(19) United States
(12) Patent Application Publication
(10) Pub. No.: US 2015/0337279 A1
(43) Pub. Date: Nov. 26, 2015

(54) RECOMBINANT FUNGAL POLYPEPTIDES

(71) Applicant: CODEXIS, INC., Redwood City, CA (US)

(72) Inventors: Xiyun Zhang, Fremont, CA (US); Dipnath Baidyaroy, Fremont, CA (US)

(21) Appl. No.: 14/443,464

(22) PCT Filed: Nov. 19, 2013
(86) PCT No.: PCT/US2013/070736

§ 371 Date: May 18, 2015

Related U.S. Application Data
(60) Provisional application No. 61/728,680, filed on Nov. 20, 2012.

(51) Int. Cl. C12N 9/42; C12P 19/02; C12P 19/14

(52) U.S. Cl. CPC C12N 9/2437; C12P 19/14; C12P 19/02; C12Y 302/01004

(57) ABSTRACT

The invention relates to Myceliophthora thermophila biomass degradation polypeptides and Myceliophthora thermophila polypeptides that increase protein productivity, nucleic acids encoding such polypeptides, and methods of producing the polypeptides. The invention further relates to methods for degrading a cellulosic biomass using a biomass degradation polypeptide and methods of engineering a cell or methods of increasing protein production using a polypeptide of the invention.

### CROSS-REFERENCES TO RELATED APPLICATIONS

[0001] This application claims the benefit of U.S. Provisional Application No. 61/728,680, filed Nov. 20, 2012, the content of which is incorporated herein by reference in its entirety and for all purposes.

### REFERENCE TO A “SEQUENCE LISTING,” A TABLE, OR A COMPUTER PROGRAM LISTING APPENDIX SUBMITTED AS A TEXT FILE

[0002] The Sequence Listing written in file CX35-124WO1_ST25.TXT, created on Nov. 18, 2013, 16,549,083 bytes, machine format IBM-PC, MS Windows operating system, is hereby incorporated by reference.

### FIELD OF THE INVENTION

[0003] The invention relates to expression of recombinant Myceliophthora thermophila enzymes involved in biomass degradation and/or enhancing hydrolysis and protein production from cells.

### BACKGROUND OF THE INVENTION

[0004] Cellulosic biomass is a significant renewable resource for the generation of sugars. Fermentation of these sugars can yield commercially valuable end-products, including biofuels and chemicals that are currently derived from petroleum. While the fermentation of simple sugars to ethanol is relatively straightforward, the efficient conversion of cellulosic biomass to fermentable sugars such as glucose is challenging. See, e.g., Ladisch et al., 1983, Enzyme Microb. Technol. 5:82. Cellulose may be pretreated chemically, mechanically or in other ways to increase the susceptibility of cellulose to hydrolysis. Such pretreatment may be followed by the enzymatic conversion of cellulose to glucose, cellobiose, cello-oligosaccharides and the like, using enzymes that specialize in breaking down the β-1-4 glycosidic bonds of cellulose. These enzymes are collectively referred to as “cellulases”.

[0005] Cellulases are divided into three sub-categories of enzymes: 1,4-β-D-glucan glucanohydrolase (“endoglucanase” or “EG”); 1,4-β-D-glucan cellobiohydrolase (“exoglucanase”, “cellobiohydrolase”, or “CBH”); and (β-D-glucoside-glucohydrolase (“β-glucosidase”, “cellobiase” or “BG”). Endoglucanases randomly attack the interior parts and mainly the amorphous regions of cellulose. Exoglucanases incrementally shorten the glucan molecules by binding to the glucan ends and releasing mainly cellobiose units from the ends of the cellulose polymer. β-glucosidases split the cellobiose, a water-soluble β-1,4-linked dimer of glucose, into two units of glucose. Efficient production of cellulases for use in processing cellulosic biomass would reduce costs and increase the efficiency of production of biofuels and other commercially valuable compounds.

[0006] Other enzymes (“accessory enzymes” or “accessory proteins”) also participate in degradation of cellulosic biomass to obtain sugars. These enzymes include esterases, lipases, laccases, and other oxidative enzymes such as oxidoreductases, and the like.

[0007] Additional proteins, e.g., transcription factors and proteins involved in pentose phosphate cycle, secretion pathways, signal transduction pathways, pH/stress response, and post-translational modifications play a role in enhancing production of active proteins and improving hydrolysis activity.

[0008] In the context of this invention, the proteins involved in degrading cellulosic biomass, e.g., a glycoside hydrolase or accessory enzyme, either directly are referred to as biomass degradation polypeptides. A protein that enhances production of proteins from a cell, e.g., by increasing secretions of a protein production, increasing expression of a protein, or inhibiting expression of a protein that suppresses secretion or expression is referred to as a “protein productivity” polypeptide.

### SUMMARY OF THE INVENTION

[0009] In one aspect, the invention provides a method of producing a biomass degradation polypeptide or a protein productivity polypeptide. The method involves culturing a cell comprising a recombinant polynucleotide sequence that encodes a Myceliophthora thermophila polypeptide comprising an amino acid sequence selected from the protein sequences of Tables 1, 2, 3, or 4. In some embodiments, the polypeptide comprises an amino acid sequence selected from the protein sequences of Table 3 or Table 4. In some embodiments, the recombinant polynucleotide sequence is operably linked to a promoter, or the polynucleotide sequence is present in multiple copies operably linked to a promoter, under conditions in which the polypeptide is produced. In some embodiments, the promoter is a heterologous promoter. In some embodiments, the polypeptide comprises a fragment that is less than the full-length of a polypeptide identified in Tables 1, 2, 3, or 4. In some embodiments, the polypeptide consists of an amino acid sequence selected from the polypeptide sequences disclosed in Tables 1, 2, 3, or 4. Optionally, a polynucleotide sequence encoding a polypeptide of the invention has a nucleotide sequence selected from the cDNA sequences disclosed in Tables 1, 2, 3, or 4. In some embodiments, the polynucleotide has a nucleotide sequence selected from the cDNA sequences disclosed in Table 3 or Table 4.

[0010] Also contemplated is a method of converting biomass substrates to soluble sugars by combining a recombinant biomass degradation polypeptide made according to the invention with biomass substrates under conditions suitable for the production of the soluble sugar. In some embodiments, the method includes the step of recovering the biomass degradation polypeptide from the medium in which the cell is cultured. In one aspect a composition comprising a recombinant biomass degradation peptide of the invention is provided.

[0011] In one aspect, the invention provides a method for producing soluble sugars from biomass by contacting the biomass with a recombinant cell comprising a recombinant polynucleotide sequence that encodes a biomass degradation enzyme having an amino acid sequence selected from the protein sequences of Tables 1-4, typically selected from the protein sequences of Table 1 or Table 3, where the polynucleotide sequence is operably linked to a promoter, under conditions in which the enzyme is expressed and secreted by the cell and said cellulosic biomass is enzymatically converted using the biomass degradation enzyme to a degradation product that produces soluble sugar. In some embodiments, the promoter is a heterologous promoter. In some embodiments, the polynucleotide encodes a polypeptide comprising a sequence set forth in Column 4 of Table 1 or Table 3. In some embodiments, the polynucleotide encodes a polypeptide comprising a sequence set forth in Column 5 of Table 1 or Table 3 linked to a heterologous signal peptide. In some embodiments, multiple copies of the polynucleotide sequence may be operably linked to a promoter. In some embodiments, the polypeptide comprises a fragment that is less than the full-length of a polypeptide identified in Tables 1, 2, 3, or 4. Optionally, the polynucleotide encoding the biomass degradation enzyme has a nucleic acid sequence selected from the cDNA sequences identified in Table 1 or Table 3.

[0012] In a further aspect, the invention provides a method of enhancing protein production of a host cell, the method comprising genetically modifying a host cell to express a protein productivity polypeptide if Tables 1, 2, 3, or 4. In some embodiment, the polypeptide has the activity designation “42” in Column 2 of Tables 1, 2, 3, or 4.

[0013] In some embodiments of the methods of the invention, the cell in which a polypeptide of Tables 1, 2, 3, or 4 is expressed is a fungal cell. In some embodiments, the cell is a Myceliophthora thermophila cell and/or the heterologous promoter is a Myceliophthora thermophila promoter.

[0014] In one aspect, the invention provides a recombinant host cell comprising a recombinant polynucleotide sequence encoding a polypeptide comprising an amino acid sequence selected from the polypeptide sequences identified in Table 1, Table 2, Table 3, and Table 4, operably linked to a promoter, optionally a heterologous promoter. In some embodiments, the polypeptide comprises a fragment that is less than the full-length of a polypeptide identified in Tables 1, 2, 3, or 4. In some embodiments, the polypeptide consists of an amino acid sequence set forth in Tables 1, 2, 3, or 4. Optionally, the recombinant polynucleotide has a nucleic acid sequence selected from the cDNA sequences identified in Tables 1, 2, 3, or 4. In one embodiment, the recombinant host cell expresses at least one other recombinant polypeptide, e.g., a cellulase enzyme or other enzyme involved in degradation of cellulosic biomass.

[0015] In a further aspect, also contemplated is a method of converting a biomass substrate to a soluble sugar, by combining an expression product from a recombinant cell that expresses a polypeptide of Tables 1, 2, 3, or 4, with a biomass substrate under conditions suitable for the production of soluble sugar(s).

[0016] In a further aspect, the invention provides a composition comprising an enzyme having an amino acid sequence selected from the group of glycoside hydrolase amino acid sequences set forth in Tables 1, 2, 3, or 4 and a cellulase, wherein the amino acid sequence of the cellulase is different from the glycoside hydrolase biomass degradation enzyme selected from Tables 1, 2, 3, or 4. In some embodiments, the cellulase is derived from a filamentous fungal cell, e.g., a Trichoderma sp. or an Aspergillus sp.

[0017] In a further aspect, the invention provides a genetically modified host cell in which a gene encoding a polypeptide of Tables 1, 2, 3, or 4, is disrupted.

[0018] In a further aspect, the invention additionally provides an isolated polypeptide comprising an amino acid sequence of Tables 1, 2, 3, or 4. In some embodiments, the polypeptide is a glycohydrolase or carbohydrate esterase. In some embodiments, the enzyme is an arabinofuranosidase of the GH3, GH43, GH51, GH54, or GH62 family. In some embodiments, the enzyme is a xyloglucanase of the GH5, GH12, GH16, GH44, or GH74 family. In some embodiments, the enzyme is an alpha-glucuronidase of the GH67 or GH115 family. In some embodiments, the enzyme is a beta-xylosidase of the GH3, GH30, GH39, GH43, GH52, or GH54 family. In some embodiments, the enzyme is a beta-galactosidase of the GH2 or GH42 family. In some embodiments, the enzyme is an arabinofuranosidase/arabinase of the GH3, GH43, GH51, GH54, GH62, or GH93 family. In some embodiments, the enzyme is an endo-xylanase of the of the GH5, GH8, GH10, or GH11 family. In some embodiments, the enzyme is a xylanase of the GH5, GH8, GH10, or GH11 family. In some embodiments, the enzyme is a polygalacturonase of the GH28 family. In some embodiments, the enzyme is a beta-glucosidase of the GH1, GH3, GH9, or GH30 family. In some embodiments, the enzyme is a beta-1,3-glucanase of the GH5, GH12. GH16, GH17, GH55, GH64 or GH81 family. In some embodiments, the enzyme is an alpha-1,6-mannanase of the GH38, GH76, or GH92. In some embodiments, the enzyme is a rhamnoglacturonyl hydrolyase or the GH28 or GH105 family. In some embodiments, the enzyme is an alpha-amylase of the GH13 or GH57 family. In some embodiments, the enzyme is an alpha-glucosidase of the GH4, GH13, GH31 or GH63 family. In some embodiments, the enzyme is a glucoamylase of the GH15 family. In some embodiments, the enzyme is a glucanase of the GH5, GH6, GH7, GH8. GH9, GH12, GH13, GH14, GH15, GH16, GH17, GH30, GH44, GH48, GH49, GH51, GH55, GH57, GH64. GH71, GH74, or GH81 family. In some embodiments, the enzyme is an endo-glucanase of the GH5, GH6, GH7, GH8. GH9, GH12, GH44, GH45, or GH74 family. In some embodiments, enzyme is a fucosidase of the GH29 family. In some embodiments, the enzyme is an alpha-xylosidase of the GH31 family.

[0019] In a further aspect, the invention provides methods of using glycohydrolase enzymes. Examples of such methods are described, e.g., in U.S. Pat. No. 8,298,79, which is incorporated by reference. The invention thus provides a method employing a glycohydrolase for increasing yield of fermentable sugars in a reaction in which a cellulose-containing substrate undergoes saccharification by cellulase enzymes comprising an endoglucanase, a beta-glucosidase, and a cellobiohydrolase, where the method comprises conducting the reaction in the presence of a recombinant glycohydrolase polypeptide of Tables 1, 2, 3, or 4, or a biologically active fragment thereof, whereby the reaction results in a glucose yield that is at least 20% higher than a glucose yield obtained from a saccharification reaction under the same conditions in the absence of said glycohydrolase protein. In some embodiments, the cellulose containing substrate is obtained from wheat, wheat straw, sorghum, rice, barley, sugar cane straw, sugar cane bagasse, grasses, switchgrass, corn grain, corn cobs, corn fiber, corn stover, or a combination thereof.

[0020] The invention further provides a method of producing a biofuel comprising ethanol, the method comprising: a) contacting a cellulose containing substrate with: i) a plurality of cellulase enzymes comprising an endoglucanase, a beta-glucosidase, and a cellobiohydrolase; and ii) a recombinant glycohydrolase polypeptide of Tables 1, 2, 3, or 4, or a biologically active fragment thereof; under conditions whereby simple sugars are produced from the substrate; b) combining simple sugars produced in step (a) with fungal cells under conditions whereby fermentation occurs and ethanol is produced. In some embodiments, the cellulase enzymes are from M. thermophila. In some embodiments, the fungal cells are yeast cells. In some embodiments, the cellulose containing substrate is obtained from wheat, wheat straw, sorghum, rice, barley, sugar cane straw, sugar cane bagasse, grasses, switchgrass, corn grain, corn cobs, corn fiber, corn stover, or a combination thereof.

[0021] Additionally, the invention provides a method of producing fermentable sugars from a cellulose containing substrate, comprising combining the substrate with: a) an enzyme composition comprising one or more beta-glucosidases and one or more cellobiohydrolases; and b) a recombinant glycohydrolase polypeptide of Tables 1, 2, 3, or 4, or a biologically active fragment thereof; wherein the enzyme composition is substantially free of recombinant endoglucanase.

[0022] In additional aspects, the invention provides nucleic acids encoding a polypeptide of the invention and a host cell comprising such a nucleic acid. The host cell may be a prokaryotic or eukaryotic cell. In some embodiments, the host cell is a fungus cell, e.g., a yeast or a filamentous fungus. In some embodiments, the host cell is a filamentous fungus host cell, such as a Myceliophthora thermophila host cell.

### BRIEF DESCRIPTION OF THE TABLES

[0023] The SEQ ID NOs. shown in the Tables 1, 2, 3, and 4 refer to the nucleic acid and polypeptide sequences provided in the electronic sequence txt file filed herewith, which is incorporated by reference.

[0024] Tables 1 and 3: Column 1, Gene; Column 2. Activity No.; Column 3, SEQ ID of corresponding to the cDNA; Column 4, SEQ ID NO for the protein encoded by the cDNA of Column 2, including the signal peptide sequence; Column 5, SEQ ID NO for the protein encoded by the cDNA of column 3 without the signal peptide. The “Activity No.” shown in Column 2 refers to the activity number in Column 1 of Table 5.

[0025] Tables 2 and 4: Column 1, Gene; Column 2. Activity No.; Column 3, SEQ ID of corresponding to the cDNA; Column 4, SEQ ID NO for the protein encoded by the cDNA of Column 2. The “Activity No.” shown in Column 2 refers to the activity number in Column 1 of Table 5.

[0026] Table 5 shows the activity associated with the activity numbers listed in Tables 1 through 4. Table 5 includes Activity No. (Column 1); polypeptide activity (Column 2); and glycohydrolase (GH) family designations for GH enzymes; or Carbohydrate Esterase (CE) family designations for carbohydrate esterases (Column 3).

[0027] In the context of this invention, “a polynucleotide of” Tables 1, 2, 3, or 4 refers to a polynucleotide that comprises a nucleotide sequence of a sequence identifier shown in Column 3; “a polypeptide of” Tables 1, 2, 3, or 4 refers to a polypeptide that comprises an amino acid sequence of a sequence identifier shown in Column 4 and Column 5 (for Tables 1 and 3).

### DETAILED DESCRIPTION OF THE INVENTION

### I. Definitions

[0028] The following definitions are provided to assist the reader. Unless otherwise defined, all terms of art are intended to have the meanings commonly understood by those of skill in the molecular biology and microbiology arts. In some cases, terms with commonly understood meanings are defined herein for clarity and/or for ready reference, and the inclusion of such definitions herein should not necessarily be construed to represent a substantial difference over the definition of the term as generally understood in the art.

[0029] As used in the context of this invention, the term “cellulosic biomass”, “biomass” and “biomass substrate” are used interchangeably to refer to material that contains cellulose and/or lignocellulose. Lignocellulose is considered to be composed of cellulose (containing only glucose monomers); hemicellulose, which can contain sugar monomers other than glucose, including xylose, mannose, galactose, rhamnose, and arabinose; and lignin.

[0030] The term “biomass degradation enzyme” is used herein to refer to enzymes that participate in degradation of cellulosic biomass degradation, and includes enzymes that degrade cellulose, lignin and hemicellulose. The term thus encompasses cellulases, xylanases, carbohydrate esterases, lipases, and enzymes that break down lignin including oxidases, peroxidases, laccases, etc. Glycoside hydrolases (GHs) are noted in Tables 1, 2, 3, and 4 as a functional class. Other enzymes that are not glycoside hydrolases that participate in biomass degradation are also included in the invention. Such proteins may be referred to herein as “accessory proteins” or “accessory enzymes”.

[0031] A “biomass degradation product” as used herein can refer to an end product of cellulose and/or lignocellulose degradation such as a soluble sugar, or to a product that undergoes further enzymatic conversion to an end product such as a soluble sugar. For example, a laccase can participate in the breakdown of lignin and although the laccase does not directly generate a soluble sugar, treatment of a biomass with laccase can result in an increase in the cellulose that is available for degradation. Similarly, various esterases can remove phenolic and acetyl groups from lignocellulose to aid in the production of soluble sugars. In typical biomass degradation reactions, the cellulosic material is hydrolyzed to break down cellulose and/or hemicellulose to fermentable sugars, such as glucose, cellobiose, xylose, xylulose, arabinose, mannose, galactose, and/or soluble oligosaccharides.

[0032] “Glycoside hydrolases” (GHs), also referred to herein as “glycohydrolases”, (EC 3.2.1.) hydrolyze the glycosidic bond between two or more carbohydrates or between a carbohydrate and a non-carbohydrate moiety. The Carbohydrate-Active Enzymes database (CAZy) provides a continuously updated list of the glycoside hydrolase families. See, the web address “cazy.org/Glycoside-Hydrolases.html”.

[0033] “Carbohydrate esterases” (CEs) catalyze the de-O or de-N-acylation of substituted saccharides. The CAZy database provides a continuously updated list of carbohydrate esterase families. See, the web address “cazy.org/Carbohydrate-Esterases.html”.

[0034] The term “cellulase” refers to a category of enzymes capable of hydrolyzing cellulose (β-1,4-glucan or β-D-glucosidic linkages) to shorter oligosaccharides, cellobiose and/or glucose. Cellulases include 1,4-β-D-glucan glucanohydrolase (“endoglucanase” or “EG”); 1,4-β-D-glucan cellobiohydrolase (“exoglucanase”, “cellobiohydrolase”, or “CBH”); and β-D-glucoside-glucohydrolase (“β-glucosidase”, “cellobiase” or “BG”).

[0035] The term “β-glucosidase” or “cellobiase” used interchangeably herein means a β-D-glucoside glucohydrolase which catalyzes the hydrolysis of a sugar dimer, including but not limited to cellobiose, with the release of a corresponding sugar monomer. In one embodiment, αβ-glucosidase is a β-glucoside glucohydrolase of the classification E.C. 3.2.1.21 which catalyzes the hydrolysis of cellobiose to glucose. Some of the β-glucosidases have the ability to also hydrolyze β-D-galactosides, β-L-arabinosides and/or β-D-fucosides and further some β-glucosidases can act on α-1,4-substrates such as starch. β-glucosidase activity may be measured by methods well known in the art, including the assays described hereinbelow. β-glucosidases include, but are not limited to, enzymes classified in the GH1, GH3, GH9, and GH30 GH families,

[0036] The term “β-glucosidase polypeptide” refers herein to a polypeptide having β-glucosidase activity.

[0037] The term “exoglucanase”, “exo-cellobiohydrolase” or “CBH” refers to a group of cellulase enzymes classified as E.C. 3.2.1.91. These enzymes hydrolyze cellobiose from the reducing or non-reducing end of cellulose. Exo-cellobiohydrolases include, but are not limited to, enzymes classified in the GH5, GH6, GH7, GH9, and GH48 GH families.

[0038] The term “endoglucanase” or “EG” refers to a group of cellulase enzymes classified as E.C. 3.2.1.4. These enzymes hydrolyze internal β-1,4 glucosidic bonds of cellulose. Endoglucanases include, but are not limited to, enzymes classified in the GH5, GH6, GH7, GH8, GH9, GH12. GH44, GH45, GH48, GH51, GH61, and GH74 GH families.

[0039] The term “xylanase” refers to a group of enzymes classified as E.C. 3.2.1.8 that catalyze the endo-hydrolysis of 1,4-beta-D-xylosidic linkages in xylans. Xylanases include, but are not limited to, enzymes classified in the GH5, GH8, GH10, and GH11 GH families.

[0040] The term “xylosidase” refers to a group of enzymes classified as E.C. 3.2.1.37 that catalyze the exo-hydrolysis of short beta (1⇄4)-xylooligosaccharides, to remove successive D-xylose residues from the non-reducing termini. Xylosidases include, but are not limited to, enzymes classified in the GH3, GH30, GH39, GH43, GH52, and GH54 GH families.

[0041] The term “arabinofuranosidase” refers to a group of enzymes classified as E.C. 3.2.1.55 that catalyze the hydrolysis of terminal non-reducing alpha-L-arabinofuranoside residues in alpha-L-arabinosides. The enzyme activity acts on alpha-L-arabinofuranosides, alpha-L-arabinans containing (1,3)- and/or (1,5)-linkages, arabinoxylans, and arabinogalactans. Arabinofuranosidases include, but are not limited to, enzymes classified in the GH3, GH43, GH51, GH54, and GH62 GH families.

[0042] The term “biomass degradation enzyme activity” encompasses glycoside hydrolase enzyme activity, e.g., that hydrolyzes glycosidic bonds of cellulose, e.g., exoglucanase activity (CBH), endoglucanase (EG) activity and/or β-glucosidase activity, as well as the enzymatic activity of accessory enzymes such as carbohydrate esterases, e.g., aryl esterases, including feruloyl and coumaroyl esterases, acetyl esterases, laccases, dehydrogenases, oxidases, peroxidases, and the like.

[0043] The term “protein production polypeptide” encompasses proteins that play a role in controlling the amount of active protein, i.e., properly folded and modified and thus, functional, protein, produced by a cell. Such polypeptides include transcription factors, and polypeptides involved in the pentose phosphate cycle, secretion pathways, signal transduction pathways, pH/stress response, and post-translational modification pathways. In some embodiments, a protein production polypeptide of the invention has an activity designated as “42” in Column 2 of Table 1, Table, 2, Table 3, or Table 4.

[0044] The term “biomass degradation polynucleotide” refers to a polynucleotide encoding a polypeptide of the invention that play a role in degrading a cellulosic biomass, e.g., a biomass degradation enzyme of Tables 1, 2, 3, or 4.

[0045] A “protein production polynucleotide” refers to a polynucleotide encoding a polypeptide of the invention e.g., a protein having an activity designation “42” in Column 2 of Tables 1, 2, 3, or 4, that plays a role in the production of active proteins by a cell.

[0046] As used herein, the term “isolated” refers to a nucleic acid, polynucleotide, polypeptide, protein, or other component that is partially or completely separated from components with which it is normally associated (other proteins, nucleic acids, cells, synthetic reagents, etc.).

[0047] The term “wildtype” as applied to a polypeptide (protein) means a polypeptide (protein) expressed by a naturally occurring microorganism such as bacteria or filamentous fungus. As applied to a microorganism, the term “wildtype” refers to the native, naturally occurring non-recombinant micro-organism.

[0048] A nucleic acid (such as a polynucleotide), and a polypeptide is “recombinant” when it is artificial or engineered. A cell is recombinant when it contains an artificial or engineered protein or nucleic acid or is derived from a recombinant parent cell. For example, a polynucleotide that is inserted into a vector or any other heterologous location, e.g., in a genome of a recombinant organism, such that it is not associated with nucleotide sequences that normally flank the polynucleotide as it is found in nature is a recombinant polynucleotide. A protein expressed in vitro or in vivo from a recombinant polynucleotide is an example of a recombinant polypeptide. Likewise, a polynucleotide sequence that does not appear in nature, for example a variant of a naturally occurring gene, is recombinant.

[0049] The term “culturing” or “cultivation” refers to growing a population of microbial cells under suitable conditions in a liquid or solid medium. In some embodiments, culturing refers to fermentative bioconversion of a cellulosic substrate to an end-product.

[0050] The term “contacting” refers to the placing of a respective enzyme in sufficiently close proximity to a respective substrate to enable the enzyme to convert the substrate to a product. Those skilled in the art will recognize that mixing solution of the enzyme with the respective substrate will effect contacting.

[0051] As used herein the term “transformed” or “transformation” used in reference to a cell means a cell has a non-native nucleic acid sequence integrated into its genome or as an episomal plasmid that is maintained through multiple generations.

[0052] The term “introduced” in the context of inserting a nucleic acid sequence into a cell means transfected, transduced or transformed (collectively “transformed”) and prokaryotic cell wherein the nucleic acid is incorporated into the genome of the cell.

[0053] As used herein, “C1” refers to Myceliophthora thermophila, including a fungal strain that was initially as described by Garg as Chrysosporium lucknowense (Garg, A., 1966, “An addition to the genus Chrysosporium corda” Mycopathologia 30: 3-4). “Myceliophthora thermophila” in the context of the present invention, includes various strains described in U.S. Pat. Nos. 6,015,707, 5,811,381 6,573,086, 8,236,551 and 8,309,328; US Pat. Pub. Nos. 2007/0238155, US 2008/0194005, US 2009/0099079; International Pat. Pub. Nos., WO 2008/073914 and WO 98/15633, and include, without limitation, Chrysosporium lucknowense Garg 27K, VKM-F 3500 D (Accession No. VKM F-3500-D), C1 strain UV13-6 (Accession No. VKM F-3632 D), C1 strain NG7C-19 (Accession No. VKM F-3633 D), and C1 strain UV18-25 (VKM F-3631 D), all of which have been deposited at the All-Russian Collection of Microorganisms of Russian Academy of Sciences (VKM), Bakhurhina St. 8, Moscow, Russia, 113184, and any derivatives thereof. Exemplary C1 strains include modified organisms in which one or more endogenous genes or sequences has been deleted or modified and/or one or more heterologous genes or sequences has been introduced, such as UV18#100.f (CBS Accession No. 122188). Derivatives include UV18#100.f Δalp1, UV18#100.f Δpyr5 Δalp1, UV18#100.f Δalp1 Δpep4 Δalp2, UV18#100.f Δpyr5 Δalp1 Δpep4 Δalp2 and UV18#100.f Δpyr4 Δpyr5 Δalp 1 Δpep4 Δalp2, as described in WO2008073914, incorporated herein by reference.

[0054] The term “operably linked” refers herein to a configuration in which a control sequence is appropriately placed at a position relative to the coding sequence of the DNA sequence such that the control sequence influences the expression of RNA encoding a polypeptide.

[0055] When used herein, the term “coding sequence” is intended to cover a nucleotide sequence that directly specifies the amino acid sequence of its protein product. The boundaries of the coding sequence are generally determined by an open reading frame, which usually begins with the ATG start codon.

[0056] A promoter or other nucleic acid control sequence is “heterologous”, when it is operably linked to a sequence encoding a protein sequence with which the promoter is not associated in nature. For example, in a recombinant construct in which a Myceliophthora thermophila Cbh1a promoter is operably linked to a protein coding sequence other than the Myceliophthora thermophila Cbh1a gene to which the promoter is naturally linked, the promoter is heterologous. For example, in a construct comprising a Myceliophthora thermophila Cbh1a promoter operably linked to a Myceliophthora thermophila nucleic acid encoding a biomass degradation enzyme of Tables 1, 2, 3, or 4, the promoter is heterologous. Similarly, a polypeptide sequence such as a secretion signal sequence, is “heterologous” to a polypeptide sequence when it is linked to a polypeptide sequence that it is not associated with in nature.

[0057] As used herein, the term “expression” includes any step involved in the production of the polypeptide including, but not limited to, transcription, post-transcriptional modification, translation, post-translational modification, and secretion.

[0058] The term “expression vector” refers herein to a DNA molecule, linear or circular, that comprises a segment encoding a polypeptide of the invention, and which is operably linked to additional segments that provide for its transcription.

[0059] A polypeptide of the invention is “active” when it has a biomass degradation activity or increase protein productivity. Thus, a polypeptide of the invention may have a glycoside hydrolase activity, or another enzymatic activity shown in Table 5.

[0060] The term “pre-protein” refers to a secreted protein with an amino-terminal signal peptide region attached. The signal peptide is cleaved from the pre-protein by a signal peptidase prior to secretion to result in the “mature” or “secreted” protein.

[0061] As used herein, a “start codon” is the ATG codon that encodes the first amino acid residue (methionine) of a protein.

[0062] The terms “peptide,” “polypeptide,” and “protein” are used interchangeably herein to refer to a polymer of amino acid residues.

[0063] The term “amino acid” refers to naturally occurring and synthetic amino acids, as well as amino acid analogs. Naturally occurring amino acids are those encoded by the genetic code, as well as those amino acids that are later modified, e.g., hydroxyproline, γ-carboxyglutamate, and O-phosphoserine. Amino acid analogs refers to compounds that have the same basic chemical structure as a naturally occurring amino acid, i.e., an α-carbon that is bound to a hydrogen, a carboxyl group, an amino group, and an R group. e.g., homoserine, norleucine, methionine sulfoxide, methionine methyl sulfonium. Such analogs have modified R groups (e.g., norleucine) or modified peptide backbones, but retain the same basic chemical structure as a naturally occurring amino acid.

[0064] Amino acids may be referred to herein by either their commonly known three letter symbols or by the one-letter symbols recommended by the IUPAC-IUB Biochemical Nomenclature Commission. Nucleotides, likewise, may be referred to by their commonly accepted single-letter codes.

### II. Introduction

[0065] The fungus Myceliophthora thermophila produces a variety of enzymes that act in concert to catalyze decrystallization and hydrolysis of cellulose to yield soluble sugars. The present invention is based on the discovery and characterization of Myceliophthora thermophila genes encoding biomass degradation polypeptides that facilitate biomass degradation and the discovery and characterization of Myceliophthora thermophila genes that enhance protein productivity of cells recombinantly engineered to have modified expression of the protein productivity genes.

[0066] The biomass degradation polypeptides of the invention, and polynucleotides encoding them, may be used in a variety of applications for degrading cellulosic biomass, such as those described hereinbelow. For simplicity, and as will be apparent from context, references to a “biomass degradation polypeptide” and the like may be used to refer both to a secreted mature form of the polypeptide and to the pre-protein form.

[0067] A protein productivity polypeptide, and polynucleotides encoding them, may be used in a variety of applications for enhancing protein production of a cell. References to a “protein productivity polypeptide” may be used to refer to both a mature form of a polypeptide and to a pre-protein form.

[0068] In various embodiments of the invention, a recombinant nucleic acid sequence is operably linked to a promoter. In one embodiment, a nucleic acid sequence encoding a polypeptide comprising an amino acid sequence of Tables 1, 2, 3, or 4 is operably linked to a promoter not associated with the polypeptide in nature (i.e., a heterologous promoter), to, for example, improve expression efficiency of a biomass degradation polypeptide or protein productivity polypeptide when expressed in a host cell. In one embodiment the host cell is a fungus, such as a filamentous fungus. In one embodiment the host cell is a Myceliophthora thermophila cell. In one embodiment the host cell is a Myceliophthora thermophila cell and the promoter is a heterologous Myceliophthora thermophila promoter.

[0069] A polypeptide expression system comprising one or more polypeptides of Tables 1, 2, 3, or 4 is particularly useful for degradation of cellulosic biomass to obtain soluble carbohydrates from the cellulosic biomass. In one aspect the invention relates to a method of producing a soluble sugar, e.g., glucose, xylose, etc., by contacting a composition comprising cellulosic biomass with a recombinantly expressed polypeptide, e.g., a glycohydrolase or accessory enzyme, of Tables 1, 2, 3, or 4, e.g., a glycohydrolase of Tables 1, 2, 3, or 4, under conditions in which the biomass is enzymatically degraded. In some embodiments, the cellulosic biomass is contacted with one or more accessory enzymes of Tables 1, 2, 3, or 4. Purified or partially purified recombinant biomass degradation enzymes may be contacted with the cellulosic biomass. In one aspect of the present invention, “contacting” comprises culturing a recombinant host cell in a medium that contains biomass produced from a cellulosic biomass feedstock, where the recombinant cell comprises a sequence encoding a biomass degradation polypeptide of Tables 1, 2, 3, or 4 operably linked to a heterologous promoter or to a homologous promoter when the sequence is present in multiple copies per cell.

[0070] In some embodiments, a polypeptide of the invention comprises an active fragment, e.g., a fragment that retains catalytic activity or activity of another domain, such as binding, of a polypeptide having an amino acid sequence set forth in Tables 1, 2, 3, or 4.

[0071] In another aspect of the invention, a heterologous Myceliophthora thermophila signal peptide may be fused to the amino terminus of a polypeptide of column 5 in Table 1 and Table 3; or a polypeptide of Table 2 or Table 4 to improve post-translational modification, secretion, folding, stability, or other properties of the polypeptide when expressed in a host cell. e.g., a fungal cell such as a Myceliophthora thermophila cell.

[0072] In some embodiments, a biomass degradation enzyme of the invention has an amino acid sequence identified in any of Tables 1-4 and is a glycohydrolase. In some embodiments, the enzyme is an arabinofuranosidase of the GH3, GH43, GH51, GH54, or GH62 family. In some embodiments, the enzyme is a xyloglucanase of the GH5, GH12, GH16, GH44, or GH74 family. In some embodiments, the enzyme is an alpha-glucuronidase of the GH67 or GH115 family. In some embodiments, the enzyme is a beta-xylosidase of the GH3, GH30, GH39, GH43, GH52, or GH54 family. In some embodiments, the enzyme is a beta-galactosidase of the GH2 or GH42 family. In some embodiments, the enzyme is an arabinofuranosidase/arabinase of the GH3, GH43, GH51, GH54, GH62, or GH93 family. In some embodiments, the enzyme is an endo-xylanase of the of the GH5, GH8, GH10, or GH11 family. In some embodiments, the enzyme is a xylanase of the GH5. GH8. GH10, or GH11 family. In some embodiments, the enzyme is a polygalacturonase of the GH28 family. In some embodiments, the enzyme is a beta-glucosidase of the GH1, GH3, GH9, or GH30 family. In some embodiments, the enzyme is a beta-1,3-glucanase of the GH5. GH12, GH16, GH17, GH55, GH64 or GH81 family. In some embodiments, the enzyme is an alpha-1,6-mannanase of the GH38, GH76, or GH92. In some embodiments, the enzyme is a rhamnoglacturonyl hydrolyase or the GH28 or GH105 family. In some embodiments, the enzyme is an alpha-amylase of the GH13 or GH57 family. In some embodiments, the enzyme is an alpha-glucosidase of the GH4, GH13, GH31 or GH63 family. In some embodiments, the enzyme is a glucoamylase of the GH15 family. In some embodiments, the enzyme is a glucanase of the GH5, GH6, GH7, GH8, GH9, GH12, GH13, GH14, GH15, GH16, GH17, GH30, GH44, GH48, GH49, GH51, GH55, GH57, GH64, GH71, GH74, or GH81 family. In some embodiments, the enzyme is an endo-glucanase of the GH5, GH6, GH7, GH8, GH9, GH12, GH44, GH45, or GH74 family. In some embodiments, enzyme is a fucosidase of the GH29 family. In some embodiments, the enzyme is an alpha-xylosidase of the GH31 family.

[0073] In some embodiments, a polypeptide of the invention has an amino acid sequence identified in any of Tables 1-4 and is an accessory enzyme. In some embodiments, the biomass degradation enzyme is an acetyl esterase, acetyl xylan esterase, ferulic acid esterase, glucuronyl esterase, laccase, cutinase, protease, oxidase, peroxidase, reductase, pectin acetyl esterase or rhamnogalactouronan acetyl esterase, or dehydrogenase.

[0074] In some embodiments, a polypeptide of the invention has an amino acid sequence identified in any of Tables 1-4 and is a protein productivity polypeptide. In some embodiments, the protein is a transcription factor; a protein in the pentose phosphate cycle, a protein in a signal transduction pathway, a protein in the secretion pathways, a pH/stress response protein, or a protein that plays a role in post-translational modification. In some embodiments, the protein has the designation “42” in Column 2 of Tables 1, 2, 3, or 4.

[0075] Various aspects of the invention are described in the following sections.

### III. Properties of Myceliophthora Thermophila Polypeptides of the Invention

[0076] In one aspect, the invention provides a method for expressing a Myceliophthora thermophila polypeptide of the invention where the method involves culturing a host cell comprising a vector comprising a nucleic acid sequence encoding a polypeptide sequence of Tables 1, 2, 3, or 4 operably linked to a heterologous promoter, under conditions in which the polypeptide or an active fragment thereof is expressed. In some embodiments, the expressed protein comprises a signal peptide that is removed in the secretion process. In some embodiments, the nucleic acid sequence is a nucleic acid sequence of Tables 1, 2, 3, or 4.

[0077] In some embodiments the polypeptide of Tables 1, 2, 3, or 4 includes additional sequences that do not alter the activity of the encoded polypeptide. For example, the polypeptide may be linked to an epitope tag or to other sequence useful in purification. In some embodiments, a polypeptide of the invention, or a functional domain thereof may be linked to heterologous amino acid sequence in a fusion protein. For example, a catalytic domain of a polypeptide of Table 1, Table, Table 3, or Table 4 may be linked to a domain, e.g., a binding domain, from a heterologous polypeptide.

### Signal Peptide

[0078] In some embodiments, polypeptides of the invention are secreted from the host cell in which they are expressed as a pre-protein including a signal peptide, i.e., an amino acid sequence linked to the amino terminus of a polypeptide that directs the encoded polypeptide into the cell secretory pathway. In one embodiment, the signal peptide is an endogenous signal peptide of a polypeptide sequence of Column 5 Table 1 or Column 5 Table 3. In other embodiments, a signal peptide from another Myceliophthora thermophila secreted protein is used.

[0079] Other signal peptides may be used, depending on the host cell and other factors. Effective signal peptide coding regions for filamentous fungal host cells include but are not limited to the signal peptide coding regions obtained from Aspergillus oryzae TAKA amylase, Aspergillus niger neutral amylase, Aspergillus niger glucoamylase. Rhizomucor miehei aspartic proteinase, Humicola insolens cellulase, Humicola lanuginosa lipase, and T. reesei cellobiohydrolase II. For example, a polypeptide sequence of the invention may be used with a variety of filamentous fungal signal peptides known in the art. Useful signal peptides for yeast host cells also include those from the genes for Saccharomyces cerevisiae alpha-factor and Saccharomyces cerevisiae invertase. Still other useful signal peptide coding regions are described by Romanos et al., 1992, Yeast 8:423-488. Effective signal peptide coding regions for bacterial host cells are the signal peptide coding regions obtained from the genes for Bacillus NCIB 11837 maltogenic amylase, Bacillus stearothermophilus alpha-amylase. Bacillus lichenformis subtilisin, Bacillus licheniformis β-lactamase, Bacillus stearothermophilus neutral proteases (nprT, nprS, nprM), and Bacillus subtilis prsA. Further signal peptides are described by Simonen and Palva, 1993, Microbiol Rev 57: 109-137. Variants of these signal peptides and other signal peptides are also suitable.

[0080] In a further aspect, the invention provides a biologically active variant of a polypeptide having an amino acid sequence of Tables 1, 2, 3, or 4, nucleic acids encoding such variant polypeptides, methods of producing such variant polypeptides, and methods of using the variant polypeptides to degrade cellulosic biomass or to increase protein productivity.

[0081] The term “variant” refers to a polypeptide having substitutions, additions, or deletions at one or more positions relative to a wild type polypeptide. The term encompasses functional (or “biologically active”) fragments of a polypeptide. In one embodiment, a “variant” comprises at least 70%, at least 75%, at least 80%, at least 85%, at least 90%, at least 91%, at least 92%, at least 93%, at least 94%, at least 95%, at least 96%, at least 97%, at least 98%, or at least 99% sequence identity to a specified reference sequence. Variants include homologs (i.e., which may be endogenous to a related microbial organism) and polymorphic variants. Homologs and polymorphic variants can be identified based on sequence identity and similar biological (e.g., enzymatic) activity.

[0082] As used herein, a “functional fragment” refers to a polypeptide that has an amino-terminal deletion and/or carboxyl-terminal deletion and/or internal deletion, but where the remaining amino acid sequence is identical or substantially identical to the corresponding positions in the sequence to which it is being compared (e.g., a full-length polypeptide sequence) and that retains substantially all of the activity of the full-length polypeptide, or a functional domain of the full-length polypeptide. In various embodiments, a functional fragment of a full-length wild-type polypeptide comprises at least about 70%, at least about 75%, at least about 80%, at least about 90%, at least about 91%, at least about 92%, at least about 93%, at least about 94%, at least about 95%, at least about 96%, at least about 97%, at least about 98%, or at least about 99% identity to the wild-type or reference amino acid sequence. In certain embodiments, a functional fragment comprises about 75%, about 80%, about 85%, at about 90%, about 91%, about 92%, about 93%, about 94%, about 95%, about 96%, about 97%, about 98%, or about 99% of the amino acid sequence of a full-length polypeptide.

[0083] The term “substantial identity” or “substantially identical” refers to in the context of two nucleic acid or polypeptide sequences, refers to a sequence that has at least 70% identity to a reference sequence. Percent identity can be any integer from 70% to 100%. Two nucleic acid or polypeptide sequences that have 100% sequence identity are said to be “identical.” A nucleic acid or polypeptide sequence are said to have “substantial sequence identity” to a reference sequence when the sequences have at least about 70%, at least about 75%, at least 80%, at least 85%, at least 90%, at least 91%, at least 92%, at least 93%, at least 94%, at least 95%, at least 96%, at least 97%, at least 98%, or at least 99% or greater sequence identity as determined using known methods, such as BLAST using standard parameters as described above.

### Polypeptide Activity

[0084] The activity of a polypeptide of the invention, e.g., to evaluate activity of a variant, evaluate an expression system, assess activity levels in an enzyme mixture comprising the enzyme, etc., can be determined by methods well known in the art for each of the various polypeptides of Tables 1, 2, 3, or 4. For example, esterase activity can be determined by measuring the ability of an enzyme to hydrolyze an ester. Glycoside hydrolase activity can be determined using known assays to measure the hydrolysis of glyosidic linkages. Enzymatic activity of oxidases and oxidoreductases can be assessed using techniques to measure oxidation of known substrates. Activity of protein productivity polypeptides can be assessed using known assays such as a BCA assay that measures protein concentrations and/or SDS-PAGE that measure secreted proteins. Assay for measuring activity of a polypeptide of Tables 1, 2, 3, or 4 are known to those of ordinary skill, and are described in the scientific anc patent literature. Illustrative polypeptide activity assays are further detailed below. One of skill understands that alternative assays are known and can be used instead of the illustrative assays.

### Alpha-Arabinofuranosidase Enzymatic Activity

[0085] Alpha-arabinofuranosidase activity can be measured using assays well known in the art. For example, enzymatic activity of an alpha-arabinofuranosidase can be measured by measuring the release of p-nitrophenol by the action of alpha-arabinofuranosidase on p-nitrophenyl alpha-L-arabinofuranoside (PNPA). One alpha-arabinofuranosidase unit of activity is the amount of enzyme that liberates 1 micromole of p-nitrophenol in one minute at 37° C. and pH 5.0. An illustrative assay is as follows: PNPA is used as the assay substrate. PNPA is dissolved in distilled water and 0.1 M acetate buffer (pH 5.0) to obtain a 1 mM stock solution. A stop reagent (0.25 M sodium carbonate solution) is used to terminate the enzymatic reaction. For the enzyme sample, 0.10 mL of 1 mM PNPA stock solution is mixed with 0.01 mL of the enzyme sample and incubated at 37° C. for 90 minutes. After 90 minutes of incubation, 0.1 mL of 0.25 M sodium carbonate solution is added and the absorbance at 405 nm (A₄₀₅) is then measured in microtiter plates as A_{S}. Absorbance is also measure for a substrate blank A_{SB}. Activity is calculated as follows:

$$Activity ( IU \text{/} ml ) = \frac{Δ {A}_{405} * DF * 21 * 1.33}{13.700 * RT}$$

where ΔA₄₀₅=A_{S}−A_{SB}, DF is the enzyme dilution factor, 21 is the dilution of 10 ul enzyme solution in 210 ul reaction volume, 1.33 is the conversion factor of microtiter plates to cuvettes, 13.700 is the extinction coefficient 13700 M⁻¹ cm⁻¹ of p-nitrophenol released corrected for mol/L to umol/mL, and RT is the reaction time in minutes.

[0086] This assay can be used to test the activity of enzymes such as, but not limited to, GH3, GH43, GH51, GH54, and GH62 enzymes. Thus, for example, this assay can be used to test the activity of an enzyme such as, but not limited to, an enzyme designated with an activity of “3” in column 2 of Tables 1, 2, 3, or 4.

Ability of Enzymes of the Present Invention to Remove the α-L-Arabinofuranosyl Residues from Substituted Xylose Residues

[0087] The ability of enzymes of the present invention to remove the α-L-arabinofuranosyl residues from substituted xylose residues can be assayed using known assays. An illustrative assay is as follows. For the complete degradation of arabinoxylans to arabinose and xylose, several enzyme activities are needed, including endo-xylanases and arabinofuranosidases. The arabinoxylan molecule from wheat is highly substituted with arabinosyl residues. These can be substituted either to the C2 or the C3 position of the xylosyl residue (single substitution), or both to the C2 and C3 position of the xylose (double substitution). An arabinofuranosidase from Bifidobacterium adolescentis (AXHd₃) has previously been isolated which is able to liberate the arabinosyl residue substituted to the C₃ position of a double substituted xylose. Most of the known arabinofuranosidases are only active towards single arabinosyl substituted xyloses. Single and double substituted oligosaccharides are prepared by incubating wheat arabinoxylan (WAX; 10 mg/mL; Megazyme, Bray, Ireland) in 50 mM acetate buffer pH 5 with 0.3 mg Pentopan Mono (mono component endo-1,4-xylanase, an enzyme from Thermomyces lanuginosus produced in Aspergillus oryzae; Sigma. St. Louis, USA) for 16 hours at 30° C. The reaction is stopped by heating the samples at 100° C. for 10 minutes. The samples are centrifuged for 5 minutes at 3100×g. The supernatant is used for further experiments. Degradation of the arabinoxylan is followed by analysis of the formed reducing sugars and High Performance Anion Exchange Chromatography (HPAEC).

[0088] Double substituted arabinoxylan oligosaccharides are prepared by incubation of 800 ul of the supernatant described above with 0.18 mg of the arabinofuranosidase Abfl (Abfl is arabinofuranosidase from M. thermophila with activity towards single arabinose substituted xylose residues and is disclosed in U.S. application Ser. No. 11/833,133, filed Aug. 2, 2007) in 50 mM acetate buffer pH 5 for 20 hours at 30° C. The reaction is stopped by heating the samples at 100° C. for 10 minutes. The samples are centrifuged for 5 minutes at 10,000×g, and the supernatant is used for further experiments. Degradation of the arabinoxylan is followed by analysis of the formed reducing sugars and HPAEC. The enzyme (25 gig total protein) is incubated with single and double substituted arabinoxylan oligosaccharides (100 supernatant of Pentopan Mono treated WAX) in 50 mM acetate buffer at 30° C. during 20 hours. The reaction is stopped by heating the samples at 100° C. for 10 minutes. The samples are centrifuged for 5 minutes at 10,000×g. Degradation of the arabinoxylan is followed by HPAEC analysis. The enzyme (25 μg total protein) from B. adolescentis (10 μl, 0.02 U; Megazyme, Bray, Ireland) is incubated with double substituted arabinoxylan oligosaccharides (125 μl supernatant of Pentopan Mono and Abfl treated WAX) in 50 mM acetate buffer at 35° C. during 24 hours. The reaction is stopped by heating the samples at 100° C. for 10 minutes. The samples are centrifuged for 5 minutes at 10,000×g. Degradation of the arabinoxylan is followed by HPAEC analysis.

[0089] The amount of reducing sugars is measured using a DNS (3,5-dinitro salicylic acid) assay. 0.5 mL of DNS reagent (3,5-dinitrosalicylic acid and sodium potassium tartrate dissolved in dilute sodium hydroxide) is added to the sample (50 ul), containing 0-5 mg/ml reducing sugar. The reaction mixture is heated at 100° C. for 5 minutes and rapidly cooled in ice to room temperature. The absorbance at 570 nm is measured. Glucose is used as a standard.

[0090] Single and double substituted arabinoxylan oligosaccharides are prepared by xylanase treatment as described above. Oligosaccharides are identified using known techniques. In addition to non-substituted oligosaccharides (xylobiose (X₂), xylotriose (X₃), xylotetraose (X₄)), single (X₃A, X₂A) and double substituted (X₄A₂, X₃A₂) oligosaccharides are also present after xylanase treatment. The activity towards this mixture of arabinoxylan oligosaccharides is then determined using the assays described above.

[0091] To generate samples with only double substituted oligosaccharides present, the single substituted oligosaccharides is removed from the xylanase-treated WAX mixture by the enzyme Abfl as described above. To generate samples with only single substituted oligosaccharides present, the double substituted oligosaccharides are removed from the xylanase-treated WAX mixture by the enzyme AXHd+ as described above. Samples containing only single substituted oligosaccharides or double substituted oligosaccharides are treated with the target enzyme or AXHd3 from B. adolescentis as a reference enzyme as described above.

[0092] This assay can be used to test the activity of enzymes such as, but not limited to, GH3, GH43, GH51, GH54, and GH62 enzymes. Thus, for example, this assay can be used to test the activity of an enzyme such as, but not limited to, an enzyme designated with an activity of “4” in column 2 of Tables 1, 2, 3, or 4.

### Xyloglucanase Activity

[0093] Xyloglucanase activity can be measured using assays well known in the art. The following is an illustrative assay. Activity is demonstrated by using xyloglucan as substrate and a reducing sugars assay (PAHBAH) as detection method. The values are compared to a standard, which is prepared using a commercial cellulase preparation from Aspergillus niger. A cellulase standard contains 2 units of cellulase per ml of 0.2 M HAc/NaOH, pH 5 is used to prepare a standard series. A working reagent containing PAHBAH is prepared (10 g of p-hydroxy benzoic acid hydrazide (PAHBAH) is suspended in 60 mL water. 10 mL of concentrated HCl is added and the volume adjusted to 200 ml. Reagent B is 24.0 g of trisodium citrated dissolved in 500 ml of water. 2.2 g of calcium chloride and 40 mg of NaOH are added and the volume adjusted to 2 L. with water. Working reagent: 10 ml Reagent A added to 90 ml of Reagent B.

[0094] The assay is conducted in micro titer plate format. Each well contains 50 ul of xyloglucan substrate (0.25% (w/v) tamarind xyloglucan in water), 30 ul of 0.2 M HAc/NaOH pH 5, 20 ul xyloglucanase sample or cellulase standard sample. These are incubated at 37° C. for 2 hours. After incubation 25 ul of each well are mixed with 125 ul working reagent. These solutions are heated at 95° C. for 5 minutes. After cooling down, the samples are analyzed by measuring the absorbance at 410 nm (A₄₁₀) as A_{S} (enzyme sample). Enzyme activities are determined using a standard curve. A substrate blank is also prepared and absorbance at 410 nm (A₄₁₀), A_{SB}, is measured.

[0095] Activity is calculated as follows: xyloglucanase activity is determined by reference to a standard curve of the cellulase standard solution.

Activity (IU/ml)=ΔA₄₁₀/SC*DF

where ΔA₄₁₀=A_{S} (enzyme sample)−A_{SB} (substrate blank), SC is the slope of the standard curve and DF is the enzyme dilution factor.

[0096] This assay can be used to test the activity of enzymes such as, but not limited to, GH5, GH12, GH16, GH44, and GH74 enzymes. Thus, for example, this assay can be used to test the activity of an enzyme such as, but not limited to, an enzyme designated with an activity of “5” in column 2 of Tables 1, 2, 3, or 4.

### Alpha-Glucuronidase Activity

[0097] Activity of an alpha-glucuronidase enzyme can be determined using known assays. The following illustrates an assay to measure the alpha-glucuronidase activity towards arabinoxylan oligosaccharides from Eucalyptus wood. This assay measures the release of glucuronic acid by the action of the α-glucuronidase on the arabinoxylan oligosaccharides.

[0098] Acetylated, 4-O-MeGlcA substituted xylo-oligosaccharides with 2-4 xylose residues or 4-10 xylose residues from Eucalyptus wood (EW-XOS) are prepared. One mg of xylo-oligosaccharides is dissolved in 1 mL distilled water. 4-o-MeGlcA is purified using known methods. Aldo-biuronic acid (X₁G), aldo-triuronic acid (X₂G), and aldo-tetrauronic acid (X₃G) are obtained from Megazyme. To remove the acetyl groups in the XOS, either for reference or for substrates, 1 mg of substrate is dissolved in 120 ul water and 120 ul 0.1 M NaOH. After overnight incubation at 4° C., the pH of the samples is checked. A pH above 9.0 indicates that the saponification reaction is complete. 120 ul of 0.1 M acetic acid and 40 ul of 0.2 M Sodium acetate, pH 5.0 are added. The substrate concentration is 2.5 mg/mL in 50 mM sodium acetate buffer, pH 5.0.

[0099] 1 mL of xylo-oligosaccharides stock solution is mixed with 0.68 μg of the enzyme sample and incubated at 35° C. for 24 hours. The reaction is stopped by heating the samples for 10 minutes at 100° C. The release of 4-O-methyl glucuronic acid and formation of new (arabino)xylan oligosaccharides are analyzed by High Performance Anion Exchange Chromatography and capillary electrophoresis. A substrate blank is also prepared using an arabinoxylan oligosaccharides stock solution.

[0100] HPAEC is performed using a Dionex HPLC system equipped with a Dionex CarboPac PA-1 (2 mm ID×250 mm) column in combination with a CarboPac PA guard column (1 mm ID×25 mm) and a Dionex EDet1 PAD-detector (Dionex Co., Sunnyvale). A flow rate of 0.3 mL/min is used with the following gradient of sodium acetate in 0.1 M NaOH: 0-50 min, 0-500 mM. Each elution is followed by a washing step of 5 min using 1 M sodium acetate in 0.1 M NaOH and an equilibration step of 15 min using 0.1 M NaOH.

[0101] Capillary Electrophoresis-Laser induced fluorescence detector (CE-LIF) is performed as follows. Samples containing about 0.4 mg of EW-XOS are substituted with 5 nmol of maltose as an internal standard. The samples are dried using centrifugal vacuum evaporator (Speedvac). 5 mg of APTS labeling dye (Beckman Coulter) is dissolved in 48 uL of 15% acetic acid (Beckman Coulter). The dried samples are mixed with 2 uL of the labeling dye solution and 2 μl of 1 M Sodium Cyanoborohydride (THF, Sigma-Aldrich). The samples are incubated overnight in the dark to allow the labeling reaction to be completed. After overnight incubation, the labeled samples are diluted 100 times with Millipore water before analysis by CE-LIF. CE-LIF is performed using ProteomeLab PA800 Protein Characterization System (Beckman Coulter), controlled by 32 Karat Software. The capillary column used is polyvinyl alcohol coated capillary (N—CHO capillary, Beckman Coulter), with 50 um ID, 50.2 cm length, 40 cm to detector window. 25 mM sodium acetate buffer pH 4.75 containing 0.4% polyethyleneoxide (Carbohydrate separation buffer. Beckman Coulter) is used as running buffer. The sample (about 3.5 nL) is injected to the capillary by a pressure of 0.5 psi for 3 seconds. The separation is done for 20 minutes at 30 kV separating voltage, with reversed polarity. The labeled XOS are detected using LIF detector at 488 nm excitation and 520 nm emission wavelengths.

[0102] This assay can be used to test the activity of enzymes such as, but not limited to, GH67 and GH115 enzymes. Thus, for example, this assay can be used to test the activity of an enzyme such as, but not limited to, an enzyme designated with an activity of “6” in column 2 of Tables 1, 2, 3, or 4.

### Beta-Xylosidase Activity

[0103] Xylosidase activity can be assessed using known assays, e.g., by measuring the release of xylose by the action of a xylosidase on xylobiose. An illustrative assay for measuring β-xylosidase activity is as follows. This assay measures the release of p-nitrophenol by the action of β-xylosidase on p-nitrophenyl 1-D-xylopyranoside (PNPX). One β-xylosidase unit of activity is the amount of enzyme that liberates 1 micromole of p-nitrophenol in one minute.

[0104] PNPX from Extrasynthese is used as the assay substrate. 16.5 mg of PNPX is dissolved in 5 mL of distilled water and 5 mL 0.1 M sodium acetate buffer pH 5.0 to obtain a 2 mM stock solution. A stop reagent (0.25 M sodium carbonate solution) used to terminate the enzymatic reaction.

[0105] 0.10 mL of 2 mM PNPX stock solution is mixed with 0.01 mL of the enzyme sample and incubated at 50° C. for 20 minutes. After exactly 30 minutes of incubation, 0.1 mL of 0.25 M sodium carbonate solution is added and then the absorbance at 405 nm (A₄₀₅) is measured in microtiter plates as A_{S} (enzyme sample). A₄₅₀ is also determined for a substrate blank (A_{SB}).

[0106] Activity is calculated as follows:

$$Activity ( IU \text{/} ml ) = \frac{Δ {A}_{405} * DF * 21 * 1.33}{13.700 * RT}$$

where ΔA₄₀₅=A_{S}−A_{SB}, DF is the enzyme dilution factor, 21 is the dilution of 10 ul enzyme solution in 210 ul reaction volume, 1.33 is the conversion factor of microtiter plates to cuvettes, 13.700 is the extinction coefficient 13700 M⁻¹ cm⁻¹ of p-nitrophenol released corrected for mol/L to umol/mL, and RT is the reaction time in minutes.

[0107] This assay can be used to test the activity of enzymes such as, but not limited to, GH3, GH30, GH39. GH43. GH52, and GH54 enzymes.

[0108] An alternative illustrative assay can be used that measures the release of xylose by the action of β-xylosidase on xylobiose. Xylobiose is purchased from Megazyme (Bray Ireland. Cat. #P-WAXYI). 25 mg is dissolved in 5 mL sodium acetate buffer pH 5.0. 5.0 mg/mL substrate solution is mixed with 0.02 mL of the enzyme sample at 50° C., and pH 5.0 for 24 hours. The reaction is stopped by heating the samples for 10 minutes at 100° C. The release of xylose and arabinoxylan oligosaccharides is analyzed by High Performance Anion Exchange Chromatography. A substrate solution blank is also prepared. HPAEC is performed using a Dionex HPLC system equipped with a Dionex CarboPac PA-1 (2 mm ID×250 mm) column in combination with a CarboPac PA guard column (1 mm ID×25 mm) and a Dionex EDet1 PAD-detector (Dionex Co., Sunnyvale). A flow rate of 0.25 mL/min is used with the following gradient of sodium acetate in 0.1 M NaOH: 0-15 min, 0-150 mM. Each elution is followed by a washing step of 5 min using 1 M sodium acetate in 0.1 M NaOH and an equilibration step of 15 min using 0.1 M NaOH.

[0109] This assay can be used to test the activity of enzymes such as, but not limited to, GH3, GH30, GH39, GH43, GH52, and GH54 enzymes. Thus, for example, this assay can be used to test the activity of an enzyme such as, but not limited to, an enzyme designated with an activity of “7” in column 2 of Tables 1, 2, 3, or 4.

### Beta-Galactosidase Activity

[0110] Beta-galactosidase activity can be assayed using known assays. The following provides an illustrative assay. This assay measures the action of β-galactosidase on 5-Bromo-4-chloro-3-indolyl β-D-galactoside (X-Gal) to yield galactose and 5-bromo-4-chloro-3-hydroxyindole. The compound 5-bromo-4-chloro-3-hydroxyindole is oxidized into 5,5′-dibromo-4,4′-dichloro-indigo, which is an insoluble blue product. X-Gal from Fermentas (St. Leon Rot, Germany) is used as the assay substrate. 1.0 mg of X-Gal is dissolved in 10 mL 0.05 M sodium acetate buffer, pH 5. 0.10 mL of 0.1 mg/mL X-Gal stock solution is mixed with 0.01 mL of the enzyme sample and incubated at 37° C. for 3 hours. After 3 hours of incubation, the absorbance at 590 nm (A₅₉₀) is measured in microtiter plates as A_{S} (enzyme sample). A substrate blank is also prepared and A₅₉₀ is measured (A_{SB}).

[0111] Activity is calculated as follows

Activity (IU/ml)=ΔA₅₉₀*DF

where ΔA₅₉₀=A_{S} (enzyme sample)−A_{SB} (substrate blank) and DF is the enzyme dilution factor.

[0112] This assay can be used to test the activity of enzymes such as, but not limited to, GH2 and GH42 enzymes.

[0113] An illustrative alternative assay is as follows. This assay measures the release of p-nitrophenol by the action of β-galactosidase p-nitrophenyl-P-D-galactopyranoside (PNPGa). One β-galactosidase unit of activity is the amount of enzyme that liberates 1 micromole of p-nitrophenol in one minute. PNPGa (Fluka) is used as the assay substrate. 2.7 mg of PNPGa is dissolved in 10 mL of McIlvain buffer to obtain 1.5 mM stock solution. McIlvain buffer (pH 4.0) is prepared by dissolving 21.01 g of citric acid monohydrate in water to a final volume of 1 L. In a separate container, 53.62 g of Na₂HPO₄*7H₂O is dissolved in water to a volume of 1 L. 614.5 ml of the first solution is mixed with 385.5 mL of the second solution. A stop reagent (0.25 M sodium carbonate) is used to terminate the enzymatic reaction. 0.25 mL of 1.5 mM PNPGa stock solution is mixed with 0.05 mL of the enzyme sample and 0.2 mL buffer and incubated at 37° C. for 10 minutes. After 10 minutes of incubation, 0.5 mL of 1 M Na₂CO₃ solution is added and then the absorbance at 410 nm (A₄₁₀) is measured in microtiter plates as A_{S} (enzyme sample). A substrate blank is also prepared and A₄₁₀ measured A_{SB} (substrate blank sample).

[0114] Activity is calculated as follows:

$$Activity ( IU \text{/} ml ) = \frac{Δ {A}_{405} * DF * 21 * 1.33}{13.700 * RT}$$

where ΔA₄₁₀=A_{S} (enzyme sample)−A_{SB} (substrate blank), DF is the enzyme dilution factor, 20 is the dilution of 50 ul enzyme solution in 1000 ul reaction volume, 1.33 is the conversion factor of microtiter plates to cuvettes, 13.700 is the extinction coefficient 13700 M⁻¹ cm⁻¹ of p-nitrophenol released corrected for mol/L to umol/ml, and RT is the reaction time in minutes.

[0115] This assay can be used to test the activity of enzymes such as GH2 and GH42. Thus, for example, this assay can be used to test the activity of an enzyme such as, but not limited to, an enzyme designated with an activity of “8” in column 2 of Tables 1, 2, 3, or 4.

### Arabinofuranosidase/Arabinase Activity

[0116] Arabinofuranosidase/arabinase activity can be measured using known assays. The following provides an illustrative assay. This assay measures the release of arabinose by the action of the arabinofuranosidase on linear and branched arabinan. Linear and branched arabinan is purchased from British Sugar. The enzyme sample (40-55 μg total protein) is incubated with 5 mg/mL of linear or branched arabinan in 50 mM sodium acetate buffer pH 5.0 at 40° C. for 24 hours. The reaction is stopped by heating the samples at 100° C. for 10 minutes. The samples are centrifuged for 5 minutes at 10,000×g. Degradation of the arabinan is followed by HPAEC analysis. A substrate blank is also prepared. HPAEC is performed using a Dionex HPLC system equipped with a Dionex CarboPac PA-1 (2 mm ID×250 mm) column in combination with a CarboPac PA guard column (1 mm ID×25 mm) and a Dionex EDet1 PAD-detector (Dionex Co., Sunnyvale). A flow rate of 0.3 mL/min is used with the following gradient of sodium acetate in 0.1 M NaOH: 0-40 min, 0-400 mM. Each elution is followed by a washing step of 5 min 1,000 mM sodium acetate in 0.1 M NaOH and an equilibration step of 15 min 0.1 M NaOH.

[0117] This assay can be used to test the activity of enzymes such as, but not limited to, GH3, GH43, GH51, GH54, GH62, and GH93 enzymes. Thus, for example, this assay can be used to test the activity of an enzyme such as, but not limited to, an enzyme designated with an activity of “9” in column 2 of Tables 1, 2, 3, or 4.

### Chitin Binding Protein Activity

[0118] Chitin binding can be determined using known assays. The following is an illustrative assay. 30 ml fermentation broth is overnight mixed with 5 g chitin in a 50 mL tube at 4° C. A plastic column (6.8×150 mm) is then filled with the mixture and it is washed with water overnight at 4° C. The method is repeated with the unbound material and fresh chitin. The unbound material is analyzed by SDS-gel electrophoresis. The bound proteins, including the matrix, are heated for 10 minutes at 95° C. in sample buffer and separated by SDS-gel electrophoresis. Specific bands from this gel are analyzed by MS/MS.

[0119] This assay can be used to test the activity of a protein such as, but not limited to, a protein designated with an activity of “10” in column 2 of Tables 1, 2, 3, or 4.

### Lichenan (Beta (1,3)-Beta(1,4)-Linked Glucan) Binding Protein Activity

[0120] Lichenan (which is a beta(1,3)-beta(1,4)-linked glucan) binding can be determined using known assays. The following is an illustrative assay. 30 ml fermentation broth is overnight mixed with 5 g lichenan in a 50 mL tube at 4° C. A plastic column (6.8×150 mm) is then filled with the mixture and it is washed with water overnight at 4° C. The method is repeated with the unbound material and fresh lichenan. The unbound material is analyzed by SDS-gel electrophoresis. The bound proteins, including the matrix, are heated for 10 minutes at 95° C. in sample buffer and separated by SDS-gel electrophoresis. Specific bands from this gel are analyzed by MS/MS.

[0121] This assay can be used to test the activity of a protein such as, but not limited to, a protein designated with an activity of “11” in column 2 of Tables 1, 2, 3, or 4.

### Endo-Xylanase Activity

[0122] Endo-xylanase activity can be determined using known assays. The following is an illustrative assay. This assay measures endo-xylanase activity towards AZO-wheat arabinoxylan. This substrate is insoluble in buffered solutions, but rapidly hydrates to form gel particles that are readily and rapidly hydrolyzed by specific endo-xylanases releasing soluble dye-labeled fragments. AZO-wheat arabinoxylan (AZO-WAX) from Megazyme (Bray, Ireland, Cat. #I-AWAXP) is used as the assay substrate. 1 g of AZO-WAX is suspended in 3 mL ethanol and adjusted to 100 mL with 0.2 M sodium acetate, pH 5.0. 96% Ethanol is used to terminate the enzymatic reaction. 0.2 mL of 10 mg/ml AZO-WAX stock solution is preheated at 40° C. for 10 minutes. This preheated stock solution is mixed with 0.2 mL of the enzyme sample (preheat at 40° C. for 10 min) and incubated at 40° C. for 10 minutes. After 10 minutes of incubation, 1.0 mL of 96% ethanol is added and then the absorbance at 590 nm (A₅₉₀) is measured as A_{S} (enzyme sample). A substrate blank is also prepared and A₅₉₀ is measured as A_{SB} (substrate blank).

[0123] Activity is calculated as follows: endo-xylanase activity is determined by reference to a standard curve, produced from an endo-xylanase with known activity towards AZO-WAX.

Activity (IU/ml)=ΔA₅₉₀/SC*DF

where ΔA₅₉₀=A_{S} (enzyme sample)−A_{SB} (substrate blank), SC is the slope of the standard curve and DF is the enzyme dilution factor.

[0124] This assay can be used to test the activity of enzymes such as, but not limited to, GH5, GH8, GH10, and GH11. Thus, for example, this assay can be used to test the activity of an enzyme such as, but not limited to, an enzyme designated with an activity of “12” in column 2 of Tables 1, 2, 3, or 4.

### Xylanase Activity

[0125] Xylanase activity can be measured using known assays. An illustrative assay follows. This assay measures the release of xylose and xylo-oligosaccharides by the action of xylanases on wheat arabinoxylan oligosaccharides (WAX). Wheat arabinoxylan is purchased from Megazyme (Bray Ireland, Cat. #P-WAXYI). 5.0 mg/mL of substrate is mixed with 0.05 mg (total protein) of the enzyme sample at 37 CC for 1 hour and 24 hours. The reaction is stopped by heating the samples for 10 minutes at 100° C. The release of xylose and arabinoxylan oligosaccharides are analyzed by High Performance Anion Exchange Chromatography. A substrate blank is also prepared. HPAEC analysis is performed using a Dionex HPLC system equipped with a Dionex CarboPac PA-1 (2 mm ID×250 mm) column in combination with a CarboPac PA guard column (1 mm ID×25 mm) and a Dionex EDet1 PAD-detector (Dionex Co., Sunnyvale). A flow rate of 0.3 mL/min is used with the following gradient of sodium acetate in 0.1 M NaOH: 0-50 min. 0-500 mM. Each elution is followed by a washing step of 5 min 1,000 mM sodium acetate in 0.1 M NaOH and an equilibration step of 15 min 0.1 M NaOH.

[0126] This assay can be used to test the activity of enzymes such as, but not limited to, GH5. GH8, GH10, and GH11. Thus, for example, this assay can be used to test the activity of an enzyme such as, but not limited to, an enzyme designated with an activity of “13” in column 2 of Tables 1, 2, 3, or 4.

### Xylan Binding Protein Activity

[0127] Xylan binding can be determined using known assays. The following is an illustrative assay to determine the ability of a protein to bind xylan. 30 ml fermentation broth is overnight mixed with 5 g xylan in a 50 mL tube at 4° C. A plastic column (6.8×150 mm) is then filled with the mixture and it is washed with water overnight at 4° C. The method is repeated with the unbound material and fresh xylan. The unbound material is analyzed by SDS-gel electrophoresis. The bound proteins, including the matrix, are heated for 10 minutes at 95° C. in sample buffer and separated by SDS-gel electrophoresis. Specific bands from this gel are analyzed by MS/MS.

[0128] This assay can be used to test the activity of a protein such as, but not limited to, a protein designated with an activity of “14” in column 2 of Tables 1, 2, 3, or 4.

### Polygalacturonase Activity

[0129] Polygalacturonase activity can be measured using known assays. The following is an illustrative assay for measuring polygalacturonase activity. This assay measures the amount of reducing sugars released from polygalacturonic acid (PGA) by the action of a polygalacturonase. One unit of activity is defined as 1 umole of reducing sugars liberated per minute under the specified reaction conditions. Polygalacturonic acid (PGA) is purchased from Sigma (St. Louis, USA). A working reagent containing PAHBAH is prepared (10 g of p-hydroxy benzoic acid hydrazide (PAHBAH) is suspended in 60 mL water. 10 mL of concentrated HCL is added and the volume adjusted to 200 ml. Reagent B is 24.0 g of trisodium citrated dissolved in 500 ml of water. 2.2 g of calcium chloride and 40 mg of NaOH are added and the volume adjusted to 2 L. with water. Working reagent: 10 ml Reagent A added to 90 ml of Reagent B. 50 uL of PGA (10.0 mg/mL in 0.2 M sodium acetate buffer pH 5.0) is mixed with 30 uL 0.2 M sodium acetate buffer pH 5.0 and 20 uL of the enzyme sample and incubated at 40° C. for 75 minutes. To 25 uL of this reaction mixture, 125 uL of working solution is added. The samples are heated for 5 minutes at 99° C. After cooling down, the samples are analyzed by measuring the absorbance at 410 nm (A₄₁₀) as A_{S} (enzyme sample). A substrate blank is also prepared and A₄₁₀ measured as (A_{SB} (substrate blank sample).

[0130] Activity is calculated as follows:

Activity (IU/ml)=ΔA410/SC*DF

where ΔA410=A_{S} (enzyme sample)−A_{SB} (substrate blank), SC is the slope of the standard curve and DF is the enzyme dilution factor.

[0131] This assay can be used to test the activity of enzymes such as, but not limited to, GH28. Thus, for example, this assay can be used to test the activity of an enzyme such as, but not limited to, an enzyme designated with an activity of “15” in column 2 of Tables 1, 2, 3, or 4.

### Beta-Glucosidase Activity

[0132] Beta-glucosidase activity can be measured using known assays. The following is an illustrative assay for measuring beta-glucosidase activity. This assay measures the release of p-nitrophenol by the action of β-glucosidase on p-nitrophenyl β-D-glucopyranoside (PNPG). One β-glucosidase unit of activity is the amount of enzyme that liberates 1 micromole of p-nitrophenol in one minute. PNPG (Sigma, St. Louis. USA) is used as the assay substrate. 20 mg of PNPG is dissolved in 5 mL of 0.2 M sodium acetate buffer, pH 5.0. 0.25 M Tris-HCl, pH 8.8 is used to terminate the enzymatic reaction. 0.025 mL of PNPG stock solution is mixed with 1 uL of the enzyme sample, 0.075 mL buffer and 0.099 mL water and incubated at 37° C. for 4 minutes. Every minute during 4 minutes a 0.04 mL sample is taken and added to 0.06 mL stop reagent. The absorbance at 410 nm (A₄₁₀) is measured in microtiter plates as A_{S} (enzyme sample). A substrate blank is also prepared and A₄₁₀ measured as A_{SB} (substrate blank sample)

[0133] Activity is calculated as follows. The A₄₁₀ values are plotted against time in minutes (X-axis). The slope of the graph is calculated (dA). Enzyme activity is calculated by using the following formula:

$$Specific activity = \frac{\partial A * {V}_{a} * d}{ɛ * l * [ protein ] * {V}_{p}}$$

Where dA=slope in A/min; Va=reaction volume in 1 (0.0002 l); d=dilution factor of assay mix after adding stop reagent (2.5); ε=extinction coefficient (0.0137 μM⁻¹ cm⁻¹); 1=length of cell (0.3 cm); [protein]=protein stock concentration in mg/ml; and Vp=volume of protein stock added to assay (0.001 ml).

[0134] This assay can be used to test the activity of enzymes such as, but not limited to, GH1, GH3, GH9, and GH30 enzymes. Thus, for example, this assay can be used to test the activity of an enzyme such as, but not limited to, an enzyme designated with an activity of “16” in column 2 of Tables 1, 2, 3, or 4.

### Beta-1,3-Glucanase Activity

[0135] Beta-glucanase activity can be measured using known assays. The following is an illustrative assay for measuring beta-glucanase activity. This assay uses beta-1,3-glucan as the substrate and a reducing sugars assay (PAHBAH) as the detection method. A working reagent containing PAHBAH is prepared (10 g of p-hydroxy benzoic acid hydrazide (PAHBAH) is suspended in 60 mL water. 10 mL of concentrated HCL is added and the volume adjusted to 200 ml. Reagent B is 24.0 g of trisodium citrated dissolved in 500 ml of water. 2.2 g of calcium chloride and 40 mg of NaOH are added and the volume adjusted to 2 L. with water. Working reagent: 10 ml Reagent A added to 90 ml of Reagent B. The assay is performed in a microtiter plate format. 50 uL of β-glucan substrate (1% (w/v) Barley 1-glucan, laminarin, lichenan or curdlan in water), 30 ul of 0.2 M HAc/NaOH pH 5, and 20 ul β-1,3-glucanase sample are used. These reagents are incubated at 37° C. for 2 hours. After incubation, 25 ul of each well are mixed with 125 uL working reagent. The solutions are heated at 95° C. for 5 minutes. After cooling down, the samples are analyzed by measuring the absorbance at 410 nm (A₄₁₀) as A_{S} (enzyme sample). A standard curve is determined and from that the enzyme activities are determined. A substrate blank is also prepared and A₄₁₀ measured for A_{SB} (substrate blank sample).

[0136] Activity is calculated as follows: β-1,3-glucanase activity is determined by reference to a standard curve of the cellulase standard solution.

Activity (IU/ml)=ΔA₄₁₀/SC*DF

where ΔA₄₁₀=A_{S} (enzyme sample)−A_{SB} (substrate blank), SC is the slope of the standard curve and DF is the enzyme dilution factor.

[0137] This assay can be used to test the activity of enzymes such as the GH5, GH12, GH16, GH17, GH55, GH64 and GH81 enzymes. Thus, for example, this assay can be used to test the activity of an enzyme such as, but not limited to, an enzyme designated with an activity of “17” in column 2 of Tables 1, 2, 3, or 4.

### Alpha-1,6-Mannanase Activity

[0138] Alpha-1,6-mannanase activity can be measured using known assays. The following is an illustrative assay. Activity is assed using an alpha-1,6-linked mannobiose as the substrate and a D-mannose detection kit (Megazyme International) as the detection method, using a four enzyme coupled assay, using ATP and NADP+. Reactions are conducted at 37° C. in 100 mM MOPS (pH 7.0), containing 0.1 mM ZnS04, 1 mg mL-1 BSA, and 20 uL of [symbol] 6-Mannanase sample. Mannose liberated by alpha-1,6-Mannanase is phosphorylated to mannose-6-phosphate by hexokinase (HK). Mannose-6-phosphate is subsequently converted to fructose-6-phosphate by phosphomannose isomerase (PMI), which is then isomerized to glucose-6-phosphate by phosphoglucose isomerase (PGI). Finally, glucose-6-phosphate is oxidized to gluconate-6-phosphate by glucose-6-phosphate dehydrogenase (G6P-DH). The concurrent reduction of the NADP+ cofactor to NADPH is monitored at 340 nm using an extinction coefficient of 6223 (M⁻¹-cm⁻¹). The enzymes are individually obtained from Sigma.

[0139] Activity is calculated as follows. The A₃₄₀ values are plotted against time in minutes (X-axis). The slope of the graph is calculated (dA). Enzyme activity is calculated by using the following formula:

$$Specific activity = \frac{\partial A * {V}_{a} * d}{ɛ * l * [ protein ] * {V}_{p}}$$

Where dA=slope in A/min; Va=reaction volume in l; d=dilution factor of assay mix; ε=extinction coefficient for NAD(P)H of 0.006223 μM⁻¹ cm⁻¹; l=length of cell in cm; [protein]=protein stock concentration in mg/ml; and Vp=volume of protein stock added to assay in ml.

[0140] This assay can be used to test the activity of enzymes such as, but not limited to, GH38, GH76, and GH92 enzymes. Thus, for example, this assay can be used to test the activity of an enzyme such as, but not limited to, an enzyme designated with an activity of “18” in column 2 of Tables 1, 2, 3, or 4.

### Rhamnogalacturonyl Hydrolase Activity

[0141] Rhamnogalacturonyl hydrolase activity can be measured using known assays. An illustrative assay follows. Activity is demonstrated using rhamnogalacturonan as a substrate and a reducing sugars assay (PAHBAH) as the detection method. A working reagent containing PAHBAH is prepared (10 g of p-hydroxy benzoic acid hydrazide (PAHBAH) is suspended in 60 mL water. 10 mL of concentrated HCL is added and the volume adjusted to 200 ml. Reagent B is 24.0 g of trisodium citrated dissolved in 500 ml of water. 2.2 g of calcium chloride and 40 mg of NaOH are added and the volume adjusted to 2 L. with water. Working reagent: 10 ml Reagent A added to 90 ml of Reagent B. The assay is conducted in a microtiter plate format. Each well contains 50 uL of rhamnogalacturonan substrate (1%(w/v) in water), 30 uL of 0.2 M HAc/NaOH pH 5, and 20 uL of rhamnogalacturonyl hydrolase sample. These are incubated at 37° C. for 2 hours. After incubation, 25 uL of each well are mixed with 125 uL working reagent. These solutions are heated at 95° C. for 5 minutes. After cooling, the samples are analyzed by measuring the absorbance at 410 nm (A₄₁₀) as A_{S} (enzyme sample). A standard curve is determined and from that the enzyme activities are determined. A substrate blank is also prepared and A₄₁₀ measured for A_{SB} (substrate blank sample).

[0142] Activity is calculated as follows: β-1,3-glucanase activity is determined by reference to a standard curve of the cellulase standard solution.

Activity (IU/ml)=ΔA₄₁₀/SC*DF

where ΔA₄₁₀=A_{S} (enzyme sample)−A_{SB} (substrate blank), SC is the slope of the standard curve and DF is the enzyme dilution factor.

[0143] This assay can be used to test the activity of enzymes such as, but not limited to, GH28 and GH 105 enzymes. Thus, for example, this assay can be used to test the activity of an enzyme such as, but not limited to, an enzyme designated with an activity of “19” in column 2 of Tables 1, 2, 3, or 4.

### Alpha-Amylase Activity

[0144] The activity of Alpha-amylase can be evaluated using known assay. The following ins an illustrative assay. In this assay, activity is demonstrated by using amylose as a substrate and a reducing sugars assay (PAHBAH) as the detection method. A working reagent containing PAHBAH is prepared (10 g of p-hydroxy benzoic acid hydrazide (PAHBAH) is suspended in 60 mL water. 10 mL of concentrated HCL is added and the volume adjusted to 200 ml. Reagent B is 24.0 g of trisodium citrated dissolved in 500 ml of water. 2.2 g of calcium chloride and 40 mg of NaOH are added and the volume adjusted to 2 L. with water. Working reagent: 10 ml Reagent A added to 90 ml of Reagent B. The assay is conducted in a microtiter plate format. Each well contains 50 ul of amylose substrate (0.15% (w/v) in water), 30 ul of 0.2 M HAc/NaOH pH 5, and 20 ul α-amylase sample. The reaction mixture is incubated at 37° C. for 15 minutes. After incubation, 25 ul from each well are mixed with 125 ul working reagent. The solutions are heated at 95° C. for 5 minutes. After cooling, the samples are analyzed by measuring the absorbance at 410 nm (A₄₁₀), A_{S} (enzyme sample). A substrate blank is also prepared and absorbance A₄₁₀ measure, A_{SB} (substrate blank sample.

[0145] Alpha-amylase activity is calculated as follows, determined by reference to a standard curve of a cellulase standard solution:

Activity (IU/ml)=ΔA410/SC*DF

where ΔA₄₁₀=A_{S} (enzyme sample)−A_{SB} (substrate blank), SC is the slope of the standard curve and DF is the enzyme dilution factor.

[0146] This assay can be used to test the activity of enzymes such as, but not limited to, GH13 and GH57 enzymes. Thus, for example, this assay can be used to test the activity of an enzyme such as, but not limited to, an enzyme designated with an activity of “20” in column 2 of Tables 1, 2, 3, or 4.

### Alpha-Glucosidase Activity

[0147] Alpha-glucosidase activity can be determined using known assays. An illustrative assay is as follows. This assay measures the release of p-nitrophenol by the action of α-glucosidase on p-nitrophenyl alpha-D-glucopyranoside. One α-glucosidase unit of activity is the amount of enzyme that liberates 1 micromole of p-nitrophenol in one minute. p-nitrophenyl alpha-D-glucopyranoside (3 mM) (Sigma, #N1377) is used as the assay substrate. 4.52 mg of p-nitrophenyl a-D-glucopyranoside is dissolved in 5 mL of sodium acetate (0.2 M, pH 5.0). Stop reagent (0.25 M Tris-HCl, pH 8.8) is used to terminate the enzymatic reaction. 0.025 mL of p-nitrophenyl a-D-glucopyranoside stock solution is mixed with 1 uL of the enzyme sample, 0.075 mL buffer and 0.099 mL water and incubated at 37° C. for 4 minutes. Every minute during the 4 minutes incubation a 0.04 mL sample is taken and added to 0.06 mL stop reagent. The absorbance at 410 nm (A₄₁₀) is measured in microtiter plates as A_{S} (enzyme sample). A substrate blank is also prepared and the absorbance (A₄₁₀) is measured in microtiter plates as A_{SB} (substrate blank sample).

[0148] Activity is calculated as follows. The A₄₁₀ values are plotted against time in minutes (X-axis). The slope of the graph is calculated (dA). Enzyme activity is calculated by using the following formula:

$$Specific activity = \frac{\partial A * {V}_{a} * d}{ɛ * l * [ protein ] * {V}_{p}}$$

Where dA=slope in A/min; Va=reaction volume in l; d=dilution factor of assay mix after adding stop reagent (2.5); ε=extinction coefficient (0.0137 μM⁻¹ cm⁻¹); 1=length of cell (0.3 cm); [protein]=protein stock concentration in mg/ml; and Vp=volume of protein stock added to assay (0.001 ml).

[0149] This assay can be used to test the activity of enzymes such as, but not limited to, GH4. GH13. GH31 and GH63 enzymes. Thus, for example, this assay can be used to test the activity of an enzyme such as, but not limited to, an enzyme designated with an activity of “21” in column 2 of Tables 1, 2, 3, or 4.

### Glucoamylase Activity

[0150] Glucoamylase activity can be evaluated using known assays. An illustrative assay is as follows. This assay measures the release of p-nitrophenol by the action of glucoamylase on p-nitrophenyl-beta-maltoside (PNPM). One glucoamylase unit of activity is the amount of enzyme that liberates 1 micromole of p-nitrophenol in one minute at 37° C. and pH 5.0. PNPM (Sigma-Aldrich, cat. #N1884) is used as the assay substrate. 18.54 mg of PNPM is dissolved in 5 mL of distilled water and 5 mL 0.1 M acetate buffer, pH 5.0 to obtain a 4 mM stock solution. A stop reagent, 0.1 M sodium tetraborate is used to terminate the enzymatic reaction. For the enzyme sample, 0.04 mL of 4 mM PNPM stock solution is mixed with 0.01 mL of the enzyme sample and incubated at 37° C. for 360 minutes. After 360 minutes of incubation, 0.12 mL of 0.1 M sodium tetraborate solution is added and the absorbance at 405 nm (A₄₀₅) is then measured in microtiter plates as A_{S}. A substrate blank is also prepared and the absorbance A₄₀₅ is measured in microtiter plates as A_{SB}.

[0151] Activity is calculated as follows:

$$Activity ( IU \text{/} ml ) = \frac{Δ {A}_{405} * DF * 21 * 1.33}{13.700 * 360}$$

where ΔA₄₀₅=A_{S}−A_{SB}, DF is the enzyme dilution factor, 21 is the dilution of 10 ul enzyme solution in 210 ul reaction volume, 1.33 is the conversion factor of microtiter plates to cuvettes, 13.700 is the extinction coefficient 13700 M⁻¹ cm⁻¹ of p-nitrophenol released corrected for mol/L to umol/mL, and 360 minutes is the reaction time.

[0152] This assay can be used to test the activity of enzymes such as, but not limited to, GH15 enzymes. Thus, for example, this assay can be used to test the activity of an enzyme such as, but not limited to, an enzyme designated with an activity of “22” in column 2 of Tables 1, 2, 3, or 4.

### Glucanase Activity

[0153] Glucanase activity can be measure using assays well known in the art. The following is an illustrative assay. Activity is demonstrated by using a glucan (e.g. dextran, glycogen, pullulan, amylose, amylopectin, cellulose, curdlan, laminarin, chrysolaminarin, lentinan, lichenin, pleuran, zymosan, etc.) as the substrate and a reducing sugars assay (PAHBAH) as the detection method. A working reagent containing PAHBAH is prepared (10 g of p-hydroxy benzoic acid hydrazide (PAHBAH) is suspended in 60 mL water. 10 mL of concentrated HCL is added and the volume adjusted to 200 ml. Reagent B is 24.0 g of trisodium citrated dissolved in 500 ml of water. 2.2 g of calcium chloride and 40 mg of NaOH are added and the volume adjusted to 2 L. with water. Working reagent: 10 ml Reagent A added to 90 ml of Reagent B. The assay is conducted in a microtiter plate format. Each well contains 50 ul of glucan substrate (1% (w/v) glucan in water), 30 ul of 0.2 M HAc/NaOH pH 5, 20 ul glucanase sample. These are incubated at 37° C. for 2 hours. After incubation, 25 ul of each well are mixed with 125 ul working reagent. The solutions are heated at 95° C. for 5 minutes. After cooling, the samples are analyzed by measuring the absorbance at 410 nm (A₄₁₀) as A_{S} (enzyme sample). A substrate blank is also prepared and absorbance (A₄₁₀) measured as A_{SB} (substrate blank sample.) A standard curve is determined and from that the enzyme activities are determined.

[0154] Activity is calculated as follows: glucanase activity is determined by reference to a standard curve of a standard solution.

Activity (IU/ml)=ΔA₄₁₀/SC*DF

where ΔA₄₁₀=A_{S} (enzyme sample)−A_{SB} (substrate blank), SC is the slope of the standard curve and DF is the enzyme dilution factor.

[0155] This assay can be used to test the activity of enzymes such as, but not limited to, GH5, GH6, GH7, GH8, GH9, GH12, GH13, GH14, GH15, GH16, GH17, GH30, GH44, GH48, GH49, GH51, GH55, GH57, GH64, GH71, GH74, and GH81 enzymes. Thus, for example, this assay can be used to test the activity of an enzyme such as, but not limited to, an enzyme designated with an activity of “23” in column 2 of Tables 1, 2, 3, or 4.

### Acetyl Esterase Activity

[0156] Acetyl esterase activity can be measured using known assays. The following is an illustrative assay. This assay measures the release of p-nitrophenol by the action of acetyl esterase on p-nitrophenyl acetate (PNPAc). One acetyl esterase unit of activity is the amount of enzyme that liberates 1 micromole of p-nitrophenol in one minute at 37° C. and pH 5. PNPAc (Fluka, cat. #46021) is used as the assay substrate. 3.6 mg of PNPAc is dissolved in 10 mL of 0.05 M sodium acetate buffer, pH 5.0 to obtain a 2 mM stock solution. A stop reagent (0.25 M Tris-HCl, pH 8.8) is used to terminate the enzymatic reaction. 0.10 mL of 2 mM PNPAc stock solution is mixed with 0.01 mL of the enzyme sample and incubated at 37° C. for 10 minutes. After 10 minutes of incubation, 0.1 mL of 0.25 M Tris-HCl solution is added and the absorbance at 405 nm (A₄₀₅) is measured in microtiter plates as A_{S} (enzyme sample). A substrate blank is also prepared and the absorbance A₄₀₅ is measured in microtiter plates as A_{SB} (substrate blank).

[0157] Activity is calculated as follows:

$$Activity ( IU \text{/} ml ) = \frac{Δ {A}_{405} * DF * 21 * 1.33}{13.700 * RT}$$

where ΔA₄₀₅=A_{S}−A_{SB}, DF is the enzyme dilution factor, 21 is the dilution of 10 ul enzyme solution in 210 ul reaction volume, 1.33 is the conversion factor of microtiter plates to cuvettes, 13.700 is the extinction coefficient 13700 M⁻¹ cm⁻¹ of p-nitrophenol released corrected for mol/L to □mol/mL, and RT is the reaction time in minutes.

[0158] This assay can be used to test the activity of enzymes such as, but not limited to, CE1, CE2, CE3, CE4, CE5, CE6, CE7, CE12, CE13 and CE16 enzymes. Thus, for example, this assay can be used to test the activity of an enzyme such as, but not limited to, an enzyme designated with an activity of “24” in column 2 of Tables 1, 2, 3, or 4.

### Acetyl Xylan Esterase Activity

[0159] Acetyl xylan esterase activity can be measured using assays known in the art. An illustrative assay follows. This assay measures acetyl xylan esterase activity towards arabinoxylan oligosaccharides from Eucalyptus wood by measuring the release of acetate by the action of the acetyl xylan esterases on the arabinoxylan oligosaccharides. Acetylated, 4-O-MeGlcA substituted xylo-oligosaccharides with 2-10 xylose residues from Eucalyptus globulus wood (EW-XOS), Eucalyptus globulus wood AIS and Eucalyptus globulus xylan polymer are obtained using known methods. 5 mL of substrate solution, containing 1 mg EW-XOS in water is mixed with 0.5% (w/w) enzyme/substrate ratio and incubated at 40° C. and pH 7 for 24 hours. The reaction is stopped by heating the samples for 10 minutes at 100° C. The release of acetic acid and formation of new (arabino)xylan oligosaccharides are analyzed by Matrix-Assisted Laser Desorption/Ionization Time-Of-Flight Mass Spectrometry and Capillary Electrophoresis. A substrate blank is also prepared.

[0160] Matrix-Assisted Laser Desorption/Ionization Time-Of-Flight Mass Spectrometry (“MALDI-TOF MS”) is performed as follows. An Ultraflex workstation (Bruker Daltronics GmbH, Germany) is used with a nitrogen laser at 337 nm. The mass spectrometer is calibrated with a mixture of malto-dextrins (mass range 365-2309). The samples are mixed with a matrix solution (1 each). The matrix solution is prepared by dissolving 10 mg of 2,5-dihydroxybenzoic acid in a 1 mL mixture of water in order to prepare a saturated solution. After thorough mixing, the solution is centrifuged to remove undissolved material. 1 ul of the prepared sample and 1 ul of matrix solution is put on a gold plate and dried with warm air.

[0161] Capillary Electrophoresis-Laser induced fluorescence detector (“CE-LIF”) is performed as follows. Samples containing about 0.4 mg of EW-XOS are substituted with 5 nmol of maltose as an internal standard. The samples are dried using a centrifugal vacuum evaporator. 5 mg of APTS labeling dye (Beckman Coulter) is dissolved in 48 ul of 15% acetic acid (Beckman Coulter). The dried samples are mixed with 2 μl of the labeling dye solution and 2 ul of 1 M Sodium Cyanoborohydride (THF, Sigma-Aldrich). The samples are incubated overnight in the dark to allow the labeling reaction to be completed. After overnight incubation, the labeled samples are diluted 100 times with Millipore water before analysis by CE-LIF. CE-LIF is performed using ProteomeLab PA800 Protein Characterization System (Beckman Coulter), controlled by 32 Karat Software. The capillary column used is polyvinyl alcohol coated capillary (N—CHO capillary, Beckman Coulter), having 50 μm ID, 50.2 cm length and 40 cm to detector window. 25 mM sodium acetate buffer pH 4.75 containing 0.4% polyethyleneoxide (Carbohydrate separation buffer, Beckman Coulter) is used as running buffer. The sample (ca. 3.5 nL) is injected to the capillary by a pressure of 0.5 psi for 3 seconds. The separation is done for 20 minutes at 30 kV separating voltage, with reversed polarity. During analysis, the samples are stored at 10° C. The labeled EW-XOS are detected using LIF detector at 488 nm excitation and 520 nm emission wavelengths.

[0162] This assay can be used to test the activity of enzymes such as, but not limited to, CE 1, CE2, CE3, CE4, CE5, CE6, CE7, CE 12, and CE 16 enzymes. Thus, for example, this assay can be used to test the activity of an enzyme such as, but not limited to, an enzyme designated with an activity of “25” in column 2 of Tables 1, 2, 3, or 4.

### Ferulic Acid Esterase Activity

[0163] Ferulic acid esterase activity can be measured using known assays. The following is an illustrative assay. This assay measures the release of p-nitrophenol by the action of ferulic acid esterase on p-nitrophenylbutyrate (PNBu). One ferulic acid esterase unit of activity is the amount of enzyme that liberates 1 micromole of p-nitrophenol in one minute at 37° C., pH 7.2. PNPBu (Sigma, cat. #N9876-5G) is used as the assay substrate. 10 ul of PNPBu is mixed with 25 ml of 0.01 M phosphate buffer, pH 7.2 to obtain a 2 mM stock solution. A stop reagent (0.25 M Tris-HCl, pH 8.5) is used to terminate the enzymatic reaction. For the enzyme sample, 0.10 mL of 2 mM PNBu stock solution is mixed with 0.01 mL of the enzyme sample and incubated at 37° C. for 10 minutes. After 10 minutes of incubation, 0.10 mL of 0.25 M Tris HCl pH 8.8 is added and the absorbance at 405 nm (A₄₀₅) is then measured in microtiter plates as A_{S}. A substrate blank is also prepared and the absorbance A₄₀₅ is measured in microtiter plates as Ass.

[0164] Activity is calculated as follows:

$$Activity ( IU \text{/} ml ) = \frac{Δ {A}_{405} * DF * 21 * 1.33}{13.700 * 10}$$

where ΔA₄₀₅=A_{S}−A_{SB}, DF is the enzyme dilution factor, 21 is the dilution of 10 ul enzyme solution in 210 ul reaction volume, 1.33 is the conversion factor of microtiter plates to cuvettes, 13.700 is the extinction coefficient 13700 M⁻¹ cm⁻¹ of p-nitrophenol released corrected from mol/L to umol/mL, and 10 is the reaction time in minutes.

[0165] This assay can be used to test the activity of enzymes such as, but not limited to, an enzyme designated with an activity of “26” in column 2 of Tables 1, 2, 3, or 4.

[0166] The following assay is an alternative assay to measure ferulic acid esterase activity. In this assay, ferulic acid esterase activity is measured using wheat bran (WB) oligosaccharides and measuring the release of ferulic acid. Wheat bran oligosaccharides are prepared by degradation of wheat bran (Nedalco, The Netherlands) by endo-xylanase III from A. niger. 50 mg of WB is dissolved in 10 ml of 0.05 M acetate buffer pH 5.0. 1.0 ml of WB stock solution is mixed with 0.0075 mg of the enzyme and incubated at 35° C. for 24 hours. The reaction is stopped by heating the samples for 10 minutes at 100° C. The residual material is removed by centrifugation (15 minutes at 14000 rpm), and the supernatant is used as the substrate in the assay detailed below.

[0167] For the enzyme sample, 1.0 ml of wheat bran oligosaccharides stock solution is mixed with 0.005 mg of the enzyme sample and incubated at 35° C. for 24 hours. The reaction is stopped by heating the samples for 10 minutes at 100° C. The release of ferulic acid is analyzed by measuring the absorbance at 335 nm. A substrate blank is also prepared and used as a control.

[0168] This assay can be used to test the activity of enzymes such as, but not limited to, an enzyme designated with an activity of “27” in column 2 of Tables 1, 2, 3, or 4.

### Glucuronyl Esterase Activity

[0169] Glucuronyl esterase activity can be measured using known assays. The following is an illustrative assay. This assay measures the release of 4-O-methyl-glucuronic acid by the action of the glucuronyl esterases on methyl-4-O-methyl-glucuronic acid. 200 uL of methyl-4-O-methyl-glucuronic acid stock solution (0.5 mg/mL) is mixed with 10 uL of the enzyme sample and incubated at 30° C. for 4 hours. The reaction is stopped by heating the samples for 15 minutes at 99° C. The release of glucose is analyzed by UPLC-MS. A substrate blank is also prepared for a control.

[0170] This assay can be used to test the activity of enzymes such as, but not limited to, an enzyme designated with an activity of “28” in column 2 of Tables 1, 2, 3, or 4.

### Endo-Glucanase Activity

[0171] Endo-glucanase activity can be measure using known assays. The following is an illustrative assay. Activity is demonstrated by using a glucan (e.g. dextran, glycogen, pullulan, amylose, amylopectin, cellulose, curdlan, laminarin, chrysolaminarin, lentinan, lichenin, pleuran, zymosan, etc.) as substrate and a reducing sugars assay (PAHBAH) as a detection method. A working reagent containing PAHBAH is prepared (10 g of p-hydroxy benzoic acid hydrazide (PAHBAH) is suspended in 60 mL water. 10 mL of concentrated HCL is added and the volume adjusted to 200 ml. Reagent B is 24.0 g of trisodium citrated dissolved in 500 ml of water. 2.2 g of calcium chloride and 40 mg of NaOH are added and the volume adjusted to 2 L. with water. Working reagent: 10 ml Reagent A added to 90 ml of Reagent B. The assay is conducted in a microtiter plate format. Each well contains 50 ul of glucan substrate (1% (w/v) glucan in water), 30 ul of 0.2 M sodium acetate, pH 5, and 20 ul endo-glucanase sample. These are incubated at 37° C. for 2 hours. After incubation 25 ul from each well are mixed with 125 ul working reagent. These solutions are heated at 95° C. for 5 minutes. After cooling, the samples are analyzed by measuring the absorbance at 410 nm (A₄₁₀) as A_{S} (enzyme sample). A standard curve is determined and from that the enzyme activities are determined. A substrate blank is also prepared and the absorbance (A410) measured as A_{SB} (substrate blank sample).

[0172] Activity is calculated as follows: endo-glucanase activity is determined by reference to a standard curve of the cellulase standard solution.

Activity (IU/ml)=ΔA₄₁₀/SC*DF

where ΔA₄₁₀=A_{S}−A_{SB}.

[0173] This assay can be used to test the activity of enzymes such as, but not limited to, an enzyme designated with an activity of “29” in column 2 of Tables 1, 2, 3, or 4.

### Alpha-Glucanase Activity

[0174] a-glucanase activity can be measured using known assays. An illustrative assay is as follows. Activity is demonstrated by using an alpha-glucan (e.g. dextran, glycogen, pullulan, amylopectin, amylose, etc.) as the substrate and a reducing sugars assay (PAHBAH) as a detection method. A working reagent containing PAHBAH is prepared (10 g of p-hydroxy benzoic acid hydrazide (PAHBAH) is suspended in 60 mL water. 10 mL of concentrated HCL is added and the volume adjusted to 200 ml. Reagent B is 24.0 g of trisodium citrated dissolved in 500 ml of water. 2.2 g of calcium chloride and 40 mg of NaOH are added and the volume adjusted to 2 L. with water. Working reagent: 10 ml Reagent A added to 90 ml of Reagent B. The assay is conducted in a microtiter plate format. Each well contains 50 ul of alpha-glucan substrate (1% (w/v) alpha-glucan in water), 50 ul of 0.2 M sodium acetate pH 5, and 20 ul alpha-glucanase sample. These are incubated at 37° C. for 2 hours. After incubation, 25 ul from each well are mixed with 125 ul working reagent. These solutions are heated at 95° C. for 5 minutes. After cooling, the samples are analyzed by measuring the absorbance at 410 nm (A₄₁₀) as A_{S} (enzyme sample). A substrate blank is also prepared and absorbance (A₄₁₀) measured as A_{SB} (substrate blank sample.) A standard curve is determined and from that the enzyme activities are determined.

[0175] Activity is calculated as follows: a-glucanase activity is determined by reference to a standard curve of cellulase standard solution.

Activity (IU/ml)=ΔA₄₁₀/SC*DF

where ΔA₄₁₀=A_{S} (enzyme sample)−A_{SB} (substrate blank), SC is the slope of the standard curve and DF is the enzyme dilution factor.

[0176] This assay can be used to test the activity of enzymes such as, but not limited to, an enzyme designated with an activity of “30” in column 2 of Tables 1, 2, 3, or 4.

### Beta-Glucanase Activity

[0177] Beta-glucanase activity can be measured using known assays. An illustrative assay is as follows. Activity is demonstrated by using [beta-glucan as a substrate and a reducing sugars assay (PAHBAH) as a detection method. A working reagent containing PAHBAH is prepared (10 g of p-hydroxy benzoic acid hydrazide (PAHBAH) is suspended in 60 mL water. 10 mL of concentrated HCL is added and the volume adjusted to 200 ml. Reagent B is 24.0 g of trisodium citrated dissolved in 500 ml of water. 2.2 g of calcium chloride and 40 mg of NaOH are added and the volume adjusted to 2 L. with water. Working reagent: 10 ml Reagent A added to 90 ml of Reagent B. The assay is conducted in a microtiter plate format. Each well contains 50 ul of beta-glucan substrate (1%(w/v) Bailey beta-glucan in water), 30 ul of 0.2 M HAc NaOH pH 5, and 20 ul □-glucanase sample. These are incubated at 37° C. for 2 hours. After incubation, 25 ul from each well are mixed with 125 ul working reagent. The solutions are heated at 95° C. for 5 minutes. After cooling, the samples are analyzed by measuring the absorbance at 410 nm (A₄₁₀) as A_{S} (enzyme sample). A standard curve is determined and from that the enzyme activities are determined. A substrate blank is also prepared and absorbance (A₄₁₀) measured as A_{SB} (substrate blank sample.)

[0178] Activity is calculated as follows: beta-glucanase activity is determined by reference to a standard curve of cellulase standard solution.

Activity (IU/ml)=ΔA₄₁₀/SC*DF

where ΔA₄₁₀=A_{S} (enzyme sample)−A_{SB} (substrate blank), SC is the slope of the standard curve and DF is the enzyme dilution factor.

[0179] This assay can be used to test the activity of enzymes such as, but not limited to, an enzyme designated with an activity of “31” in column 2 of Tables 1, 2, 3, or 4.

### Alpha-Galactosidase Activity

[0180] Alpha-galactosidase activity can be measured using known assays. An illustrative assay using 4-Nitrophenyl-alpha-D-galactopyranoside is as follows. The substrate (100 ul of 2 mM 4-Nitrophenyl-alpha-D-galactopyranoside in 50 mM NaAc pH5.0) is mixed with 10 ul of sample in wells of a microtiter plate. 100 ul of 0.25 M NaCO₃ is added to stop the solution after 10 minutes incubation at 37° C. Samples are then measured in a plate reader at E410 nm.

[0181] To quantify activity, timed samples are taken and the specific activity is calculated as follows: E410 nm is plotted as the Y-axis and time in minutes as the X-axis. The slope of the graph (Y/X) is calculated. Enzyme activity is calculated by using the following formula:

$$Specific activity = \frac{\partial A * {V}_{r} * d * {D}_{e}}{ɛ * l * [ protein ] * {V}_{p}}$$

where dA=slope in A/min; Vr=reaction volume in l; De=enzyme dilution before addition to reaction mix; d=dilution factor of assay mix after adding stop reagent; ε=extinction coefficient (0.0158 uM⁻¹ cm⁻¹); 1=length of cell (1.0 cm in case of cuvettes); [protein]=protein stock concentration in mg/ml; vp=volume of protein solution added to assay in ml.

[0182] This assay can be used to test the activity of enzymes such as, but not limited to, an enzyme designated with an activity of “32” in column 2 of Tables 1, 2, 3, or 4.

### Beta-Mannosidase Activity

[0183] Beta-mannosidase activity can be measured using assays known in the art. An illustrative assay using 2 mM 4-Nitrophenyl-beta-D-mannopyranoside as a substrate is as follows. The substrate (100 ul of 2 mM 4-Nitrophenyl-beta-D-annopyranoside in 50 mM NaAc pH5.0) is mixed with 10 ul of sample in wells of a microtiter plate. 100 ul of 0.25 M NaCO₇ is added to stop the solution after 10 minutes incubation at 37° C. Samples are then measured in a plate reader at E410 nm.

[0184] To quantify activity, timed samples are taken and the specific activity is calculated as follows: E410 nm is plotted as the Y-axis and time in minutes as the X-axis. The slope of the graph (Y/X) is calculated. Enzyme activity is calculated by using the following formula:

$$Specific activity = \frac{\partial A * {V}_{r} * d * {D}_{e}}{ɛ * l * [ protein ] * {V}_{p}}$$

where dA=slope in A/min; Vr=reaction volume in l; De=enzyme dilution before addition to reaction mix; d=dilution factor of assay mix after adding stop reagent; ε=extinction coefficient (0.0158 uM⁻¹ cm⁻¹); l=length of cell (1.0 cm in case of cuvettes); [protein]=protein stock concentration in mg/ml; vp=volume of protein solution added to assay in ml.

[0185] This assay can be used to test the activity of enzymes such as, but not limited to, an enzyme designated with an activity of “33” in column 2 of Tables 1, 2, 3, or 4.

### Rhamnogalacturonan Acetyl Esterase Activity

[0186] Rhamnogalacturonan acetyl esterase activity can be measured using known assays. An illustrative assay is as follows. This assay measures the release of acetic acid by the action of the rhamnogalacturonan acetyl esterase on sugar beet pectin. Sugar beet pectin is from CP Kelco (Atlanta, USA). The acetic acid assay kit from Megazyme (Bray, Ireland). The rhamnogalacturonan acetyl esterase sample is incubated with sugar beet pectin at 50° C. in 10 mM phosphate buffer pH 7.0 during 16 hours of incubation. The E/S ratio is 0.5% (5 ug enzyme/mg substrate). The total volume of the reaction is 110 uL. The released acetic acid is analyzed with the acetic acid assay kit according to instructions of the supplier. The enzyme with known rhamnogalacturonan acetyl esterase activity Rgael (CL1 1462) is used as a reference.

[0187] This assay can be used to test the activity of enzymes such as, but not limited to, an enzyme designated with an activity of “34” in column 2 of Tables 1, 2, 3, or 4.

### α-Fucosidase Activity

[0188] Alpha-fucosidase activity can be measured using assay known in the art. An illustrative assaying follows. This assay uses p-nitrophenyl a-L-fucoside as substrate. The enzyme sample (30 to 50 μl containing 5˜10 μg protein) is added to 0.25 ml of 2 mM substrate dissolved in 50 mM sodium citrate buffer (pH 4.5). After incubation at 37° C., 1.75 ml of 0.2 M sodium borate buffer (pH 9.8) is added to terminate the reaction and the release of p-nitrophenol is determined by measuring absorbance at 400 nm (A₄₀₀). One unit of enzyme activity is the amount of enzyme that releases 1 μmol of p-nitrophenol per min. The specific activity is expressed as unit/mg of protein.

[0189] This assay can be used to test the activity of enzymes such as, but not limited to, an enzyme designated with an activity of “43” in column 2 of Tables 1, 2, 3, or 4.

### α-Xylosidase Activity

[0190] The activity of an α-xylosidase can be measured using assays known in the art. The following are two illustrative assays. In one assay, α-xylosidase activity is assessed with a colorimetric assay using p-nitrophenyl-α-D-xyloside as substrate. The enzyme sample (30 to 50 μl containing 5˜10 μg protein) is added to 0.25 ml of 2 mM substrate dissolved in 50 mM sodium citrate buffer (pH 4.5). After incubation for an appropriate time at 37° C., 1.75 ml of 0.2 m sodium borate buffer (pH 9.8) is added to terminate the reaction and the release of p-nitrophenol is determined by measuring absorbance and 400 nm (A₄₀₀). A substrate blank is prepared as a control. One unit of the enzyme activity is defined as the amount of enzyme which releases 1 μmol of p-nitrophenol per min. The specific activity is expressed as unit/mg of protein.

[0191] Alternatively, the activity of α-xylosidase can be measured using tamarind xyloglucan (XG). Because XG contains β-linked Gal and β-linked Glc in addition to α-linked Xyl, four enzymes are included in the experiment: xyloglucanase, β-glucosidase, and β-galactosidase, in addition to α-xylosidase. A high-throughput 4-component design of experiment (DoE) experiment is performed setting the lower limit of all four enzymes to 5%. All enzymes are added at a range of loading between 5% and 85% of 15 ug total enzyme loading/reaction. A stock solution of tamarind XG is 2.5 mg/ml in 50 mM citrate buffer pH 5.0. The reaction plates are incubated at 50° C. for 48 hrs at 10 rpm. At the end of the reaction, the glucose and xylose released from the hydrolysate are measured by HPLC. Complete digestion of tamarind XG should be achieved releasing Glc and Xyl. The DoE model should predict the efficiency of the α-xylosidase, and its contribution towards the complete deconstruction of tamarind XG (see. e.g., Scott-Craig et al. 2011. J. Biol. Chem. 286:42848-54, 2011, which is herein incorporated by reference).

[0192] This assay can be used to test the activity of enzymes such as, but not limited to, an enzyme designated with an activity of “44” in column 2 of Tables 1, 2, 3, or 4.

### Laccase Activity

[0193] Laccase activity can be measured using assays well known in the art. The following is an illustrative assay. In this assay, laccase activity is determined by oxidation of 2,2′-azino-bis(3-ethylbenzthiazoline-6-sulfonic acid) (ABTS) substrate. The reaction mixture contains 5 mM ABTS in 0.1 M sodium acetate buffer (pH 5.0) and a suitable amount of enzyme. Oxidation of ABTS is followed by monitoring absorbance increase at 420 nm (A₄₂₀). The enzyme activity is expressed in units defined as the amount of enzyme oxidizing 1 μmol of ABTS min⁻¹ (ε420=36.000 M⁻¹ cm⁻¹).

[0194] This assay can be used to test the activity of enzymes such as, but not limited to, an enzyme designated with an activity of “45” in column 2 of Tables 1, 2, 3, or 4.

### Protease Activity

[0195] Protease activity can be assayed using well known methods. For example, activity of some proteases can be determined by measurement of degradation of protease substrates in solution, such as bovine serum albumin (BSA), as described by van den Hombergh et al. (Curr Genet 28:299-308, 1995, which is herein incorporated by reference). As the protease enzymes digest the protein in suspension, the mixture becomes more transparent and the absorbance changes in the reaction mixture can be followed spectophotometrically.

[0196] In an alternative illustrative assay, activity of some proteases can be determined by measurement of degradation of AZCL-casein in solution as described by the manufacturer (Megazyme, Ireland). As the protease enzyme digests the AZCL-casein in suspension, the mixture becomes blue and the absorbance changes in the reaction mixture can be followed spectophotometrically.

[0197] Further, assays for peptidase activity are well known in the art. One of skill will be able to choose the appropriate assay for the desired enzyme activity. For example, U.S. Pat. No. 6,184,020 teaches aminopeptidase assays; and U.S. Pat. No. 6,518,054 teaches metallo endopeptidase assays.

[0198] A protease assay can be used to test the activity of enzymes such as, but not limited to, an enzyme designated with an activity of “35” in column 2 of Tables 1, 2, 3, or 4.

### Oxidase Activity

[0199] Oxidase activity can be measured using known assays. An oxidase catalyzes an oxidation-reduction reaction involving molecule oxygen as the electron acceptors. In these reactions, oxygen is reduced to water or hydrogen peroxide. An example of an assay to measure oxidase activity is thus an assay that measures oxygen consumption, using a Clark electrode (Clark, L. C. Jnr. Ann. NY Acad. Sci. 102, 29-45, 1962) at a specific temperature in an air-saturated sample containing its substrate (e.g. glucose and galactose, for glucose oxidase and galactose oxidase, respectively). The reaction can be initiated by injection of a catalytic amount of oxidase in the oxygen electrode chamber. Kinetic parameters can be determined by measuring initial rates at different substrate concentrations.

[0200] An oxidase assay can be used to test the activity of enzymes such as, but not limited to, an enzyme designated with an activity of “36” in column 2 of Tables 1, 2, 3, or 4.

### Peroxidase Activity

[0201] Peroxidase activity can be measured using known assays. An illustrative assay is based on the oxidation of 2,2′-azino-di(3-ethylbenzthiazoline-6-sulphonate) (ABTS) from Sigma-Aldrich (e.g., Gallati, V. H. J. Clin. Chem. Clin. Biochem. 17, 1, 1979, which is herein incorporated by reference). The absorbance increase of the oxidized form of ABTS, measured at 410 nm, is proportional to the peroxidase activity. The assay may also be used to indirectly measure oxidase activity. The formation of hydrogen peroxide, catalyzed by the oxidase, is coupled to the oxidation of ABTS by the addition of a peroxidase (e.g. horseradish peroxidase).

[0202] A peroxidase assay can be used to test the activity of enzymes such as, but not limited to, an enzyme designated with an activity of “37” in column 2 of Tables 1, 2, 3, or 4.

### Reductase Activity

[0203] Reductase activity can be assayed using methods well known in the art. An illustrative assay for measuring nitrate reductase activity is described by Garrett & Cove, Mol. Gen. Genet. 149:179-186, 2006, which is herein incorporated by reference.

[0204] A reductase assay can be used to test the activity of enzymes such as, but not limited to, an enzyme designated with an activity of “38” in column 2 of Tables 1, 2, 3, or 4.

### Dehydrogenase Activity

[0205] Dehydrogenase activity can be determined using well known assays. In an illustrative assay, dehydrogenase activity is assessed by measuring the decrease in absorbance at 340 nm resulting from the oxidation of the NADH or NADPH cofactor when incubated with a substrate. For example, the activity of glycerol 3-phosphate dehydrogenase (GPDH), can be determined by measuring the decrease in absorbance at 340 nm when the enzyme was incubated with dihydroxyacetone phosphate as a substrate (e.g., Arst et al. Mol Gen Genet. 1990 August; 223(1): 134-137, which is herein incorporated by reference).

[0206] A dehydrogenase assay can be used to test the activity of enzymes such as, but not limited to, an enzyme designated with an activity of “39” in column 2 of Tables 1, 2, 3, or 4.

### Cutinase Activity

[0207] Cutinase activity can be determined using well known assays. An example of such an assay is an esterase assay performed using spectrophotometry (e.g., Davies et al., Physiol. Mol. Plant Pathol. 57:63-75, 2000, which is herein incorporated by reference) with p-nitrophenyl butyrate as a substrate. Cutinase activity can also be measured using ³H-labelled apple cutin as a substrate by an adaptation of the method of Koller et al., Physiol. Plant Pathol. 20:47-60, 1982, which is herein incorporated by reference.

[0208] A cutinase assay can be used to test the activity of enzymes such as, but not limited to, an enzyme designated with an activity of “40” in column 2 of Tables 1, 2, 3, or 4.

### Pectin Acetyl Esterase or Rhamnogalacturonan Acetyl Esterase Activity

[0209] Pectin acetyl esterase or rhamnogalacturonan acetyl esterase activity can be measured using known assays. In an illustrative assay, the release of acetic acid by the action of the pectin acetyl esterase or rhamnogalacturonan acetyl esterase activity is measured. Sugar beet pectin (CP, Kelco) is used as a substrate. The acetic acid assay kit is obtained from Megazyme. The pectin acetyl esterase or rhamnogalacturonan acetyl esterase enzyme sample is incubated at 50° C. in 10 mM phosphate buffer pH 7.0 during 16 hours of incubation. The E/S ratio is 0.5% (5 □g enzyme/mg substrate). The total volume of the reaction is 110 □L. The released ac [symbol] analyzed with the acetic acid assay kit according to instructions of the supplier. Enzyme with known pectin acetyl esterase or rhamnogalacturonan acetyl esterase activity is used as a reference.

[0210] This assay can be used to test the activity of enzymes such as, but not limited to, an enzyme designated with an activity of “41” in column 2 of Tables 1, 2, 3, or 4.

Measurement of Activity for Increasing Protein Productivity and/or Saccharification Efficiency

[0211] The ability of a polypeptide of the invention to increase protein productivity and/or saccharification efficiency can be measured using known assays. The following is an illustrative assay for assessing the effects of a protein on increased protein productivity and/or saccharification efficiency using Myceliophthora thermophila host cells. Myceliophthora thermophila strain(s) transformed with nucleic acid constructs that express a protein of interest, e.g., a polypeptide of Tables 1, 2, 3, or 4 are generated using standard methods known in the art. The resulting strains are grown in liquid culture using standard methods, e.g., as described in Example 1. The cells are separated from the culture medium by centrifugation. The culture medium containing proteins secreted by the fungal strain are assayed for the total amount of protein produced/secreted. The samples are first de-salted using Bio-Rad Econo-Pac 10DG Columns (Bio-Rad, Cat. No. 732-2010) as per the manufacturer's suggestions. The total protein present in the samples is assayed using a BCA protein assay kit (Thermo-Scientific, Pierce Protein Biology Products, Product No. 23225), as per the manufacturer's suggestions and the amount of protein production is compared to control strains that have not been transformed with a nucleic acid construct encoding the protein of interest. Transformants that produce increased amounts of secreted proteins compared to the controls exhibit increased protein productivity. An “increase” in protein productivity is typically at least 10%, or at least 20% or greater, in comparison to a control cell.

[0212] The produced/secreted polypeptides (as obtained from the process described above) are directly tested for increased saccharification performance. For this purpose, the samples are tested either before or after the de-salting step (as described in the previous section). The reactions employ 10-20% Avicel substrate (CAS Number 9004-34-6, Sigma-Aldrich, Product No. 11365-1KG), 0.5-1% produced enzyme with respect to substrate (wt/wt), at pH5-6, 55° C., for 24-72 h while shaking. The reactions are heat quenched at 85° C. at 850 RPM for 15 min, and filtered through a 0.45 μm filter. The samples are then assayed for the production of the final product glucose using a standard GOPOD assay kit (for example, Megazyme, Catalog No. K-GLUC), as per the manufacturer's directions. Any other cellulose-containing material can be employed in this assay (for example, pre-treated biomass), and the enzyme addition can be volume-based (wt of substrate to volume of enzyme). M. thermophila transformants that express that produce increased amounts of saccharification activity are identified by this process. An “increase” in saccharification is typically at least 10%, or at least 20% or greater, in comparison to a control cell. Cells that produce increased amounts of proteins and provide for increased amounts of hydrolysis activity are identified using the combination of the two assays.

[0213] These assays can be used to test the activity of polypeptides such as, but not limited to, a polypeptide designated with an activity of “42” in column 2 of Tables 1, 2, 3, or 4.

### IV. Biomass Degradation and Protein Productivity Polynucleotides and Expression Systems

[0214] The present invention provides polynucleotide sequences that encode biomass degradation polypeptides. Exemplary cDNA sequences encoding biomass degradation polypeptides of the invention are each identified by a sequence identifier in Column 3 of Table 1, Table 2, Table 3, and Table 4 with reference to the appended sequence listing. The invention also provides polynucleotide sequences that encode protein productivity polypeptides. Exemplary cDNA sequences encoding protein productivity polypeptides of the invention are each identified by a sequence identifier in Column 3 of Table 1, Table 2, Table 3, and Table 4 with reference to the appended sequence listing. These sequences encode the respective polypeptides shown in the tables, which are each identified by a sequence identifier with reference to the appended sequence listing. Those having ordinary skill in the art will readily appreciate that due to the degeneracy of the genetic code, a multitude of nucleotide sequences encoding a polypeptide of Table 1, Table 2, Table 3, and Table 4 exist. For example, the codons AGA, AGG, CGA, CGC, CGG, and CGU all encode the amino acid arginine. Thus, at every position in the nucleic acids of the invention where an arginine is specified by a codon, the codon can be altered to any of the corresponding codons described above without altering the encoded polypeptide. It is understood that U in an RNA sequence corresponds to T in a DNA sequence. The invention contemplates and provides each and every possible variation of nucleic acid sequence encoding a polypeptide of the invention that could be made by selecting combinations based on possible codon choices.

[0215] A DNA sequence may also be designed for high codon usage bias codons (codons that are used at higher frequency in the protein coding regions than other codons that code for the same amino acid). The preferred codons may be determined in relation to codon usage in a single gene, a set of genes of common function or origin, highly expressed genes, the codon frequency in the aggregate protein coding regions of the whole organism, codon frequency in the aggregate protein coding regions of related organisms, or combinations thereof. Codons whose frequency increases with the level of gene expression are typically optimal codons for expression. In particular, a DNA sequence can be optimized for expression in a particular host organism. See GCG CodonPreference, Genetics Computer Group Wisconsin Package; Codon W, John Peden, University of Nottingham; McInerney, J. O, 1998, Bioinformatics 14:372-73; Stenico et al., 1994, Nucleic Acids Res. 222437-46; Wright, F., 1990, Gene 87:23-29; Wada et al., 1992, Nucleic Acids Res. 20:2111-2118; Nakamura et al., 2000, Nucl. Acids Res. 28:292, all of which are incorporated herein by reference.

### Expression Vectors

[0216] The present invention makes use of recombinant constructs comprising a sequence encoding a polypeptide of Tables 1, 2, 3, or 4. In a particular aspect, the present invention provides an expression vector encoding a polypeptide of Tables 1, 2, 3, or 4, e.g., a glycohydrolase, wherein the polynucleotide encoding the polynucleotide is operably linked to a heterologous promoter. Expression vectors of the present invention may be used to transform an appropriate host cell to permit the host to express the polypeptide. Methods for recombinant expression of proteins in fungi and other organisms are well known in the art, and any number of expression vectors are available or can be constructed using routine methods. See, e.g., Tkacz and Lange, 2004, ADVANCES IN FUNGAL BIOTECHNOLOGY FOR INDUSTRY, AGRICULTURE, AND MEDICINE, KLUWER ACADEMIC/PLENUM PUBLISHERS. New York; Zhu et al., 2009, Construction of two Gateway vectors for gene expression in fungi Plasmid 6:128-33; Kavanagh, K. 2005, FUNGI: BIOLOGY AND APPLICATIONS Wiley, all of which are incorporated herein by reference.

[0217] Nucleic acid constructs of the present invention comprise a vector, such as, a plasmid, a cosmid, a phage, a virus, a bacterial artificial chromosome (BAC), a yeast artificial chromosome (YAC), and the like, into which a nucleic acid sequence encoding a polypeptide of Tables 1, 2, 3, or 4 has been inserted. The nucleic acids can be incorporated into any one of a variety of expression vectors suitable for expressing a polypeptide. Suitable vectors include chromosomal, nonchromosomal and synthetic DNA sequences, e.g., derivatives of SV40; bacterial plasmids; phage DNA; baculovirus; yeast plasmids; vectors derived from combinations of plasmids and phage DNA, viral DNA such as vaccinia, adenovirus, fowl pox virus, pseudorabies, adenovirus, adeno-associated virus, retroviruses and many others. Any vector that transduces genetic material into a cell, and, if replication is desired, which is replicable and viable in the relevant host can be used.

[0218] In an aspect of this embodiment, the construct further comprises regulatory sequences, including, for example, a promoter, operably linked to the protein encoding sequence. Large numbers of suitable vectors and promoters are known to those of skill in the art. The construct may optionally include nucleotide sequences to facilitate integration into a host genome and/or results in amplification of construct copy number in vivo.

### Promoter/Gene Constructs

[0219] As discussed above, to obtain high levels of expression in a particular host it is often useful to express a polypeptide of the invention under control of a heterologous promoter. Typically a promoter sequence may be operably linked to the 5′ region of the biomass degradation protein coding sequence. It will be recognized that in making such a construct it is not necessary to define the bounds of a minimal promoter. Instead, the DNA sequence 5′ to the lignocellulose degradation gene start codon can be replaced with DNA sequence that is 5′ to the start codon of a given heterologous gene (e.g., a C1 sequence from another gene, or a promoter from another organism). This 5′ “heterologous” sequence thus includes, in addition to the promoter elements per se, a transcription start signal and the sequence of the 5′ untranslated portion of the transcribed chimeric mRNA. Thus, the promoter-gene construct and resulting mRNA will comprise a sequence encoding a polypeptide of Tables 1, 2, 3, or 4 and a heterologous 5′ sequence upstream to the start codon of the sequence encoding the polypeptide. In some, but not all, cases the heterologous 5′ sequence will immediately abut the start codon of the polynucleotide sequence encoding the polypeptide. In some embodiments, gene constructs may be employed in which a polynucleotide encoding a polypeptide of Tables 1, 2, 3, or 4 is present in multiple copies. Such embodiments may employ the endogenous promoter for the gene encoding the polypeptide or may employ a heterologous promoter.

[0220] In one embodiment, a polypeptide of Tables 1, 2, 3, or 4 is expressed as a pre-protein including the naturally occurring signal peptide of the polypeptide. In some embodiments, polypeptide of the invention that is expressed has a sequence of column 4 in Table 1 or Table 3.

[0221] In one embodiment, the polypeptide is expressed from the construct as a pre-protein with a heterologous signal peptide.

[0222] In some embodiments, a heterologous promoter is operably linked to a polypeptide cDNA nucleic acid sequence of Column 3 of Tables 1, 2, 3, or 4.

[0223] Examples of useful promoters for expression of polypeptides of the invention include promoters from fungi. For example, promoter sequences that drive expression of homologous or orthologous genes from other organisms may be used. For example, a fungal promoter from a gene encoding a glyohydrolase, e.g., a cellobiohydrolase, may be used.

[0224] Examples of other suitable promoters useful for directing the transcription of the nucleotide constructs of the present invention in a filamentous fungal host cell are promoters obtained from the genes for Aspergillus oryzae TAKA amylase, Rhizomucor miehei aspartic proteinase, Aspergillus niger neutral alpha-amylase, Aspergillus niger acid stable alpha-amylase, Aspergillus niger or Aspergillus awamori glucoamylase (glaA), Rhizomucor miehei lipase, Aspergillus oryzae alkaline protease, Aspergillus oryzae triose phosphate isomerase, Aspergillus nidulans acetamidase, and Fusarium oxysporum trypsin-like protease (WO 96/00787, which is incorporated herein by reference), as well as the NA2-tpi promoter (a hybrid of the promoters from the genes for Aspergillus niger neutral alpha-amylase and Aspergillus oryzae triose phosphate isomerase), promoters such as cbh1, cbh2, egl1, egl2, pepA, hfb1, hfb2, xyn1, amy, and glaA (Nunberg et al., Mol. Cell Biol., 4:2306-2315 (1984), Boel et al., EMBO J. 3:1581-1585 ((1984) and EPA 137280, all of which are incorporated herein by reference), and mutant, truncated, and hybrid promoters thereof. In a yeast host, useful promoters can be from the genes for Saccharomyces cerevisiae enolase (ENO-1). Saccharomyces cerevisiae galactokinase (GAL 1), Saccharomyces cerevisiae alcohol dehydrogenase/glyceraldehyde-3-phosphate dehydrogenase (ADH2/GAP), and Saccharomyces cerevisiae 3-phosphoglycerate kinase. Other useful promoters for yeast host cells are described by Romanos et al., 1992, Yeast 8:423-488. Promoters associated with chitinase production in fungi may be used. See, e.g., Blaiseau and Lafay, 1992, Gene 120243-248 (filamentous fungus Aphanocladium album); Limon et al., 1995, Curr. Genet. 28:478-83 (Trichoderma harzianum), both of which are incorporated herein by reference.

[0225] Promoters known to control expression of genes in prokaryotic or eukaryotic cells or their viruses that can be used in some embodiments of the invention include SV40 promoter, E. coli lac or trp promoter, phage lambda P_{L} promoter, tac promoter. T7 promoter, and the like. In bacterial host cells, suitable promoters include the promoters obtained from the E. coli lac operon, Streptomyces coelicolor agarase gene (dagA), Bacillus subtilis levansucranse gene (sacB), Bacillus licheniformis alpha-amylase gene (amyl). Bacillus slearothermophilus maltogenic amylase gene (amyM). Bacillus amyloliquefaciens alpha-amylase gene (amyQ), Bacillus subtilis xylA and xylB genes and prokaryotic β-lactamase gene.

[0226] An expression vector can contain other sequences, for example, an expression vector may optionally contain a ribosome binding site for translation initiation, and a transcription terminator. The vector also optionally includes appropriate sequences for amplifying expression, e.g., an enhancer.

[0227] In addition, expression vectors that encode a polypeptide of the invention optionally contain one or more selectable marker genes to provide a phenotypic trait for selection of transformed host cells. Suitable marker genes include those coding for antibiotic resistance such as, ampicillin (ampR), kanamycin, chloramphenicol, or tetracycline resistance. Further examples include the antibiotics spectinomycin (e.g., the aada gene); streptomycin, e.g., the streptomycin phosphotransferase (SPT) gene coding for streptomycin resistance; the neomycin phosphotransferase (NPTII) gene encoding kanamycin or geneticin resistance; the hygromycin phosphotransferase (HPT) gene coding for hygromycin resistance. Additional selectable marker genes include dihydrofolate reductase or neomycin resistance for eukaryotic cell culture, and tetracycline or ampicillin resistance in E. coli. Selectable markers for fungi include markers for resistance to HPT, phleomycin, benomyl, and acetamide.

### Synthesis and Manipulation of Polynucleotides

[0228] Polynucleotides encoding a polypeptide of Tables 1, 2, 3, or 4 can be prepared using methods that are well known in the art. For example, individual oligonucleotides may be individually synthesized, then joined (e.g., by enzymatic or chemical ligation methods, or polymerase-mediated methods) to form essentially any desired continuous sequence. Chemical synthesis of oligonucleotides can be performed using, for example, the classical phosphoramidite method described by Beaucage, et al., 1981, Tetrahedron Letters, 22:1859-69, or the method described by Matthes, et al., 1984, EMBO J. 3:801-05, both of which are incorporated herein by reference. These methods are typically practiced in automated synthetic methods. In a chemical synthesis method, oligonucleotides are synthesized, e.g., in an automatic DNA synthesizer, purified, annealed, ligated and cloned in appropriate vectors. Further, essentially any nucleic acid can be custom ordered from any of a variety of commercial sources.

[0229] General texts that describe molecular biological techniques that are useful herein, including the use of vectors, promoters, protocols sufficient to direct persons of skill through in vitro amplification methods, including the polymerase chain reaction (PCR) and the ligase chain reaction (LCR), and many other relevant methods, include Berger and Kimmel, Guide to Molecular Cloning Techniques, Methods in Enzymology volume 152 Academic Press, Inc., San Diego, Calif. (Berger); Sambrook et al., Molecular Cloning—A Laboratory Manual (2nd Ed.), Vol. 1-3, Cold Spring Harbor Laboratory, Cold Spring Harbor, N.Y. 1989 (“Sambrook”) and Current Protocols in Molecular Biology, F. M. Ausubel et al., eds., Current Protocols, a joint venture between Greene Publishing Associates, Inc. and John Wiley & Sons, Inc., (supplemented through 1999) (“Ausubel”), all of which are incorporated herein by reference. Reference is made to Berger. Sambrook, and Ausubel, as well as Mullis et al., (1987) U.S. Pat. No. 4,683,202; PCR Protocols A Guide to Methods and Applications (Innis et al. eds) Academic Press Inc. San Diego, Calif. (1990) (Innis); Arnheim & Levinson (Oct. 1, 1990) C&EN 36-47; The Journal Of NIH Research (1991) 3, 81-94; (Kwoh et al. (1989) Proc. Natl. Acad. Sci. USA 86, 1173; Guatelli et al. (1990) Proc. Natl. Acad. Sci. USA 87, 1874; Lomell et al. (1989) J. Clin. Chem 35, 1826; Landegren et al., (1988) Science 241, 1077-1080; Van Brunt (1990) Biotechnology 8, 291-294; Wu and Wallace, (1989) Gene 4, 560; Barringer et al. (1990) Gene 89, 117, and Sooknanan and Malek (1995) Biotechnology 13: 563-564, all of which are incorporated herein by reference. Methods for cloning in vitro amplified nucleic acids are described in Wallace et al., U.S. Pat. No. 5,426,039, which is incorporated herein by reference.

### Expression Hosts

[0230] The present invention also provides engineered (recombinant) host cells that are transformed with an expression vector or DNA construct encoding a polypeptide of Tables 1, 2, 3, or 4. As used herein, a genetically modified or recombinant host cell includes the progeny of said host cell that comprises a polynucleotide that encodes a recombinant polypeptide of Tables 1, 2, 3, or 4. In some embodiments, the genetically modified or recombinant host cell is a eukaryotic cell. Suitable eukaryotic host cells include, but are not limited to, fungal cells, algal cells, insect cells, and plant cells. In some cases, host cells may be modified to increase protein expression, secretion or stability, or to confer other desired characteristics. Cells (e.g., fungi) that have been mutated or selected to have low protease activity are particularly useful for expression. For example, Myceliophthora thermophila strains in which the alp1 (alkaline protease) locus has been deleted or disrupted may be used. Many expression hosts can be employed in the invention, including fungal host cell, such as yeast cells and filamentous fungal cells; algal host cells; and prokaryotic cells, including gram positive, gram negative and gram-variable bacterial cells. Examples are listed below.

[0231] Suitable fungal host cells include, but are not limited to, Ascomycota, Basidiomycota, Deuteromycota, Zygomycota, Fungi imperfecti. Particularly preferred fungal host cells are yeast cells and filamentous fungal cells. The filamentous fungal host cells of the present invention include all filamentous forms of the subdivision Eumycotina and Oomycota. (see, for example, Hawksworth et al., In Ainsworth and Bisby's Dictionary of The Fungi, 8^{th} edition, 1995, CAB International, University Press, Cambridge. UK, which is incorporated herein by reference). Filamentous fungi are characterized by a vegetative mycelium with a cell wall composed of chitin, cellulose and other complex polysaccharides. The filamentous fungal host cells of the present invention are morphologically distinct from yeast.

[0232] In some embodiments the filamentous fungal host cell may be a cell of a species of, but not limited to Achlya, Acremonium, Aspergillus, Aureobasidium, Bjerkandera, Ceriporiopsis, Cephalosporium, Chrysosporium, Cochliobolus, Corynascus, Cryphonectria, Cryptococcus, Coprinus, Coriolus, Diplodia, Endothia, Fusarium, Gibberella, Gliocladium, Humicola, Hypocrea, Myceliophthora, Mucor, Neurosxpora, Penicillium, Podospora, Phlebia, Piromyces, Pyricularia, Rhizomucor, Rhizopus, Schizophyllum, Scytalidium, Sporotrichum, Talaromyces, Thermoascus, Thielavia, Trametes, Tolypocladium, Trichoderma, Verticillium, Volvariella, or teleomorphs, or anamorphs, and synonyms or taxonomic equivalents thereof.

[0233] In some embodiments of the invention, the filamentous fungal host cell is of the Aspergillus species, Ceriporiopsis species, Chrysosporium species. Corynascus species, Fusarium species, Humicola species, Neurospora species, Penicillium species, Tolypocladium species, Tramates species, or Trichoderma species.

[0234] In some embodiments of the invention, the filamentous fungal host cell is of the Trichoderma species, e.g., T. longibrachiatum, T. viride (e.g., ATCC 32098 and 32086), Hypocrea jecorina or T. reesei (NRRL 15709, ATTC 13631, 56764, 56765, 56466, 56767 and RL-P37 and derivatives thereof—See Sheir-Neiss et al., 1984, Appl. Microbiol. Biotechnology, 20:46-53, which is incorporated herein by reference), T. koningii, and T. harzianum. In addition, the term “Trichoderma” refers to any fungal strain that was previously classified as Trichoderma or currently classified as Trichoderma.

[0235] In some embodiments of the invention, the filamentous fungal host cell is of the Aspergillus species, e.g., A. awanori, A. fumigatus, A. japonicus, A. nidulans, A. niger, A. aculeatus, A. foetidus, A. oryzae, A. sojae, and A. kawachi. (Reference is made to Kelly and Hynes, 1985, EMBO J. 4,475479; NRRL 3112, ATCC 11490, 22342, 44733, and 14331; Yelton et al., 1984, Proc. Natl. Acad. Sci. USA. 81, 1470-1474; Tilburn et al., 1982, Gene 26,205-221; and Johnston et al., 1985, EMBO J. 4, 1307-1311, all of which are incorporated herein by reference).

[0236] In some embodiments of the invention, the filamentous fungal host cell is of the Fusarium species, e.g., F. hactridioides, F. cerealis, F. crookwellense, F. culmorum, F. graminearum, F. graminum. F. oxyspxorum, F. roseum, and F. venenalum. In some embodiments of the invention, the filamentous fungal host cell is of the Neurospora species, e.g., N. crassa. Reference is made to Case, M. E. et al., (1979) Proc. Natl. Acad. Sci. USA, 76, 5259-5263; U.S. Pat. No. 4,486,553; and Kinsey, J. A. and J. A. Rambosek (1984) Molecular and Cellular Biology 4, 117-122, all of which are incorporated herein by reference. In some embodiments of the invention, the filamentous fungal host cell is of the Humicola species, e.g., H. insolens, H. grisea, and H. lanuginosa. In some embodiments of the invention, the filamentous fungal host cell is of the Mucor species, e.g., M. miehei and M. circinelloides. In some embodiments of the invention, the filamentous fungal host cell is of the Rhizopus species, e.g., R. oryzae and R. niveus. In some embodiments of the invention, the filamentous fungal host cell is of the Penicillum species, e.g., P. purpurogenum, P. chrysogenum, and P. verruculosum. In some embodiments of the invention, the filamentous fungal host cell is of the Thielavia species, e.g., T. terrestris. In some embodiments of the invention, the filamentous fungal host cell is of the Tolypocladium species, e.g., T. inflatum and T. geodes. In some embodiments of the invention, the filamentous fungal host cell is of the Trametes species, e.g., T. villosa and T. versicolor.

[0237] In some embodiments of the invention, the filamentous fungal host cell is of the Chrysosporium species, e.g., C. lucknowense, C. keralinophilum, C. tropicum, C. merdarium, C. inops. C. pannicola, and C. zonatum. In a particular embodiment the host is Myceliophthora thermophila.

[0238] In the present invention a yeast host cell may be a cell of a species of, but not limited to Candida, Hansenula, Saccharomyces, Schizosaccharomyces, Pichia, Kluyveromyces, and Yarrowia. In some embodiments of the invention, the yeast cell is Hansenula polymorpha, Saccharomyces cerevisiae, Saccaromyces carlsbergensis, Saccharomyces diastaticus, Saccharomyces norbensis, Saccharomyces kluyveri, Schizosaccharomyces pombe, Pichia pastoris, Pichia finlandica, Pichia trehalophila, Pichia kodamae, Pichia membranaefaciens, Pichia opuntiae, Pichia thermotolerans, Pichia salictaria, Pichia quercuum, Pichia pijperi, Pichia stipitis, Pichia methanolica, Pichia angusta, Kluyveromyces lactis, Candida albicans, and Yarrowia lipolytica.

[0239] In some embodiments on the invention, the host cell is an algal such as, Chlamydomonas (e.g., C. reinhardtii) and Phormidium (P. sp. ATCC29409).

[0240] In other embodiments, the host cell is a prokaryotic cell. Suitable prokaryotic cells include gram positive, gram negative and gram-variable bacterial cells. The host cell may be a species of, but not limited to, Agrobacterium, Alicyclobacillus, Anabaena, Anacystic, Acinetobacten, Acidothermus, Arthrobacter, Azobacter Bacillus, Bifidobacterium, Brevibacterium, Butyrivibrio, Buchnera, Campestris, Camplyobacter, Clostridium, Corynebacterium, Chromatium, Coprococcus, Escherichia, Enterococcus, Enterobacter, Erwinia, Fusobacterium, Faecalibacterium, Francisella, Flavobacterium, Geobacillus, Haemophilus, Helicobacter, Klebsiella, Lactobacillus, Lactococcus, Ilyobacter, Micrococcus, Microbacterium, Mevorhizobtum, Methylobacterium, Mrycobacterium, Neisseria, Pantoea, Pseudomonas, Prochlorococcus, Rhodobacter, Rhodopseudomonas, Rhodopseudomonas, Roseburia, Rhodospirillum, Rhodococcus, Scenedesmus, Streptomyces, Streptococcus, Synechococcus, Saccharomonopora, Staphylococcus, Serratia, Salmonella, Shigella, Thermoanaerobacterium, Tropheryma, Tularensis, Temecula, Thermosynechoccus, Thermococcus, Ureaplasma, Xanthomnonas, Xylella, Yersinia and Zymomonas.

[0241] In some embodiments, the host cell is a species of Agrobacterium, Acinetobacter. Azobacter, Bacillus, Bifidobacterium, Buchnera, Geobacillus, Campylobacter, Clostridium, Corynebacterium, Escherichia, Enterococcus, Erwinia, Flavobacterium, Lactobacillus, Lactococcus, Pantoea, Pseudomonas, Staphylococcus, Salmonella, Streptococcus, Streptomyces, and Zymomonas.

[0242] In yet other embodiments, the bacterial host strain is non-pathogenic to humans. In some embodiments the bacterial host strain is an industrial strain. Numerous bacterial industrial strains are known and suitable in the present invention.

[0243] In some embodiments of the invention the bacterial host cell is of the Agrobacterium species, e.g., A. radiobacter. A. rhizogenes, and A. rubi. In some embodiments of the invention the bacterial host cell is of the Arthrobacter species, e.g., A. aurescens, A. citreus, A. globformis, A. hydrocarboglutamicus, A. mysorens, A. nicotianae, A. paraffineus, A. prolophonniae, A. roseoparaffinus, A. sulfureus, and A. ureafaciens. In some embodiments of the invention the bacterial host cell is of the Bacillus species, e.g., B. thuringiensis, B. anthracis, B. megaterium, B. subtilis, B. lentus, B. circulans. B. pumilus, B. lautus, B. coagulans. B. brevis, B. firmus, B. alkaophius, B. licheniformis, B. clausii, B. stearothermophilus, B. halodurans and B. amyloliquefaciens. In particular embodiments, the host cell will be an industrial Bacillus strain including but not limited to B. subtilis, B. pumilus, B. licheniformis, B. megaterium, B. clausii, B. stearothermophilus and B. amyloliquefaciens. Some preferred embodiments of a Bacillus host cell include B. subtilis. B. licheniformis, B. megaterium, B. stearothermophilus and B. amyloliquefaciens. In some embodiments the bacterial host cell is of the Clostridium species. e.g., C. acetobutylicium, C. tetani E88, C. lituseburense, C. saccharobutylicum, C. perfringens, and C. beijerinckii. In some embodiments the bacterial host cell is of the Cornebacterium species e.g., C. glutamicum and C. acetoacidophilum. In some embodiments the bacterial host cell is of the Escherichia species, e.g., E. coli. In some embodiments the bacterial host cell is of the Erwinia species, e.g., E. uredovora, E. carotovora, E. ananas, E. herbicola, E. punctata, and E. terreus. In some embodiments the bacterial host cell is of the Pantoea species, e.g., P. citrea, and P. agglomerans. In some embodiments the bacterial host cell is of the Pseudomonas species, e.g., P. putida. P. aeruginosa, P. mevalonii, and P. sp. D-01 10. In some embodiments the bacterial host cell is of the Streptococcus species, e.g., S. equisimiles, S. pyogenes, and S. uberis. In some embodiments the bacterial host cell is of the Streptomyces species, e.g., S. ambofaciens, S. achromogenes, S. avermitilis, S. coelicolor, S. aureofaciens, S. aureus, S. fungicidicus, S. griseus, and S. lividans. In some embodiments the bacterial host cell is of the Zymomonas species, e.g., Z. mobilis, and Z. lipolytica.

[0244] Strains that may be used in the practice of the invention including both prokaryotic and eukaryotic strains, are readily accessible to the public from a number of culture collections such as American Type Culture Collection (ATCC), Deutsche Sammlung von Mikroorganismen und Zellkulturen GmbH (DSM), Centraalbureau Voor Schimmelcultures (CBS), and Agricultural Research Service Patent Culture Collection, Northern Regional Research Center (NRRL).

[0245] Host cells may be genetically modified to have characteristics that improve protein secretion, protein stability or other properties desirable for expression and/or secretion of a protein. Genetic modification can be achieved by genetic engineering techniques or using classical microbiological techniques, such as chemical or UV mutagenesis and subsequent selection. A combination of recombinant modification and classical selection techniques may be used to produce the organism of interest. Using recombinant technology, nucleic acid molecules can be introduced, deleted, inhibited or modified, in a manner that results in increased yields of a biomass degradation polypeptide of the invention, e.g., a glycohydrolase set forth in Tables 1, 2, 3, or 4, within the organism or in the culture. For example, knock out of pyr5 function results in a cell with a pyrimidine deficient phenotype.

### Transformation

[0246] Introduction of a vector or DNA construct into a host cell can be effected by calcium phosphate transfection, DEAE-Dextran mediated transfection, electroporation, or other common techniques (See Davis et al., 1986, Basic Methods in Molecular Biology, which is incorporated herein by reference). Transformation of Myceliophthora thermophila host cells is known in the art (see, e.g., US 2008/0194005 which is incorporated herein by reference).

### Culture Conditions

[0247] The engineered host cells can be cultured in conventional nutrient media modified as appropriate for activating promoters, selecting transformants, or amplifying the lignocellulose degradation enzyme polynucleotide. Culture conditions, such as temperature, pH and the like, are those previously used with the host cell selected for expression, and will be apparent to those skilled in the art. As noted, many references are available for the culture and production of many cells, including cells of bacterial, plant, animal (especially mammalian) and archaebacterial origin. See e.g., Sambrook, Ausubel, and Berger (all supra), as well as Freshney (1994) Culture of Animal Cells, a Manual of Basic Technique, third edition, Wiley-Liss, New York and the references cited therein; Doyle and Griffiths (1997) Mammalian Cell Culture: Essential Techniques John Wiley and Sons, NY; Humason (1979) Animal Tissue Techniques, fourth edition W.H. Freeman and Company; and Ricciardelli, et al., (1989) In vitro Cell Dev. Biol. 25:1016-1024, all of which are incorporated herein by reference. For plant cell culture and regeneration. Payne et al. (1992) Plant Cell and Tissue Culture in Liquid Systems John Wiley & Sons. Inc. New York, N.Y.; Gamborg and Phillips (eds) (1995) Plant Cell, Tissue and Organ Culture; Fundamental Methods Springer Lab Manual, Springer-Verlag (Berlin Heidelberg New York); Jones, ed. (1984) Plant Gene Transfer and Expression Protocols, Humana Press, Totowa, N.J. and Plant Molecular Biology (1993) R. R. D. Croy, Ed. Bios Scientific Publishers, Oxford, U.K. ISBN 0 12 198370 6, all of which are incorporated herein by reference. Cell culture media in general are set forth in Atlas and Parks (eds.) The Handbook of Microbiological Media (1993) CRC Press, Boca Raton, Fla., which is incorporated herein by reference. Additional information for cell culture is found in available commercial literature such as the Life Science Research Cell Culture Catalogue (1998) from Sigma-Aldrich, Inc (St Louis, Mo.) (“Sigma-LSRCCC”) and, for example, The Plant Culture Catalogue and supplement (1997) also from Sigma-Aldrich, Inc (St Louis, Mo.) (“Sigma-PCCS”), all of which are incorporated herein by reference.

[0248] Culture conditions for fungal cells, e.g., Myceliophthora thermophila host cells are known in the art and can be readily determined by one of skill. See, e.g., US 2008/0194005, US 20030187243, WO 2008/073914 and WO 01/79507, which are incorporated herein by reference.

### V. Production and Recovery of Polypeptides

[0249] In one aspect, the invention is directed to a method of making a polypeptide having an amino acid sequence of Tables 1, 2, 3, or 4, the method comprising providing a host cell transformed with a polynucleotide encoding the polypeptide, e.g., a nucleic acid of Tables 1, 2, 3, or 4; culturing the transformed host cell in a culture medium under conditions in which the host cell expresses the encoded polypeptide; and optionally recovering or isolating the expressed polypeptide, or recovering or isolating the culture medium containing the expressed polypeptide. The method further provides optionally lysing the transformed host cells after expressing the polypeptide and optionally recovering or isolating the expressed polypeptide from the cell lysate.

[0250] In a further embodiment, the present invention provides a method of over-expressing (i.e., making,) a polypeptide having an amino acid sequence of Tables 1, 2, 3, or 4, e.g., a biomass degradation polypeptide of Tables 1, 2, 3, or 4, comprising: (a) providing a recombinant Myceliophthora thermophila host cell comprising a nucleic acid construct, wherein the nucleic acid construct comprises a polynucleotide sequence that encodes a polypeptide of Tables 1, 2, 3, or 4 and the nucleic acid construct optionally also comprises a polynucleotide sequence encoding a signal peptide at the amino terminus of polypeptide, wherein the polynucleotide sequence encoding the polypeptide and optional signal peptide is operably linked to a heterologous promoter; and (b) culturing the host cell in a culture medium under conditions in which the host cell expresses the encoded polypeptide, wherein the level of expression of the polypeptide from the host cell is greater, preferably at least about 2-fold greater, than that from wildtype Myceliophthora thermophila cultured under the same conditions. The signal peptide employed in this method may be any heterologous signal peptide known in the art or may be a wildtype signal peptide of a sequence set forth in Column 4 of Table 1 or Table 3. In some embodiments, the level of overexpression is at least about 5-fold, 10-fold, 12-fold, 15-fold, 20-fold, 25-fold, 30-fold, or 35-fold greater than expression of the protein from wildtype cells.

[0251] Typically, recovery or isolation of the polypeptide, e.g., a biomass degradation polypeptide, is from the host cell culture medium, the host cell or both, using protein recovery techniques that are well known in the art, including those described herein. Cells are typically harvested by centrifugation, disrupted by physical or chemical means, and the resulting crude extract may be retained for further purification. Microbial cells employed in expression of proteins can be disrupted by any convenient method, including freeze-thaw cycling, sonication, mechanical disruption, or use of cell lysing agents, or other methods, which are well known to those skilled in the art.

[0252] The resulting polypeptide may be recovered/isolated and optionally purified by any of a number of methods known in the art. For example, a biomass degradation polypeptide of the invention may be isolated from the nutrient medium by conventional procedures including, but not limited to, centrifugation, filtration, extraction, spray-drying, evaporation, chromatography (e.g., ion exchange, affinity, hydrophobic interaction, chromatofocusing, and size exclusion), or precipitation. Protein refolding steps can be used, as desired, in completing the configuration of the mature protein. Finally, high performance liquid chromatography (HPLC) can be employed in the final purification steps. As a further illustration, purification of a glycohydrolase is described in US patent publication US 2007/0238155, incorporated herein by reference. In addition to the references noted supra, a variety of purification methods are well known in the art, including, for example, those set forth in Sandana (1997) Bioseparation of Proteins, Academic Press, Inc.; Bollag et al. (1996) Protein Methods, 2^{nd} Edition, Wiley-Liss, NY; Walker (1996) The Protein Protocols Handbook Humana Press, NJ; Harris and Angal (1990) Protein Purification Applications: A Practical Approach, IRL Press at Oxford, Oxford, England; Harris and Angal Protein Purification Methods: A Practical Approach, IRL Press at Oxford, Oxford, England; Scopes (1993) Protein Purification: Principles and Practice 3^{rd} Edition, Springer Verlag, NY; Janson and Ryden (1998) Protein Purification: Principles, High Resolution Methods and Applications, Second Edition. Wiley-VCH, NY; and Walker (1998) Protein Protocols on CD-ROM, Humana Press, NJ, all of which are incorporated herein by reference.

[0253] Immunological methods may also be used to purify a polypeptide of the invention. In one approach, an antibody raised against the enzyme using conventional methods is immobilized on beads, mixed with cell culture media under conditions in which the enzyme is bound, and precipitated. In a related approach immunochromatograpy is used. In some embodiments, purification is achieved using protein tags to isolate recombinantly expressed protein.

### VI. Cells Having Absent or Decreased Expression of a Polypeptide of the Invention

[0254] In some embodiments, a host cell is genetically modified to disrupt expression of a polypeptide of Tables 1, 2, 3, or 4. The term “disrupted” as applied to expression of a gene refers to any genetic modification that decreases or eliminates the expression of the gene and/or the functional activity of the corresponding gene product (mRNA and/or protein). In one embodiment the disruption eliminates or substantially reduces expression of the gene product as determined by, for example, immunoassays. “Substantially reduce”, in this context, means the amount of expressed protein is reduced by at least 50%, often at least 75%, sometimes at least 80%, at least 90% or at least 95% compared to expression from the undisrupted gene. In some embodiments, a gene product (e.g., protein) is expressed from the disrupted gene but the protein is mutated (e.g., comprises a deletion, insertion of substitution(s)) that completely or substantially reduce the biological activity of the protein. In some embodiments, a disruption may completely eliminate expression, i.e., the gene produce has no measurable activity. “Substantially reduce”, in this context, means expression or activity of a protein is reduced by at least 50%, often at least 75%, sometimes at least 80%, at least 90% or at least 950% compared to a cell that is not genetically modified to disrupt expression of the gene of interest.

[0255] Methods of disrupting expression of a gene are well known, and the particular method used to reduce or abolish the expression of the endogenous gene is not critical to the invention. For example, in some embodiments, a genetically modified host cell with disrupted expression of a gene of interest has a deletion of all or a portion of the protein-encoding sequence of the endogenous gene, a mutation in the endogenous gene such that the gene encodes a polypeptide having no activity or reduced activity (e.g., insertion, deletion, point, or frameshift mutation), reduced expression due to antisense RNA or small interfering RNA that inhibits expression of the endogenous gene, or a modified or deleted regulatory sequence (e.g., promoter) that reduces expression of the endogenous gene, any of which may bring about a disrupted gene. In some embodiments, all of the genes disrupted in the microorganism are disrupted by deletion. Illustrative references describing deletion of all or part of the gene encoding the protein and site-specific mutagenesis to disrupt expression or activity of the gene product include Chaveroche et al., 2000, Nucleic Acids Research, 28:22 e97; Cho et al., 2006, MPMI 19: 1, pp. 7-15; Maruyama and Kitamoto, 2008, Biotechnol Lett 30:1811-1817; Takahashi et al., 2004, Mol Gen Genomics 272: 344-352; and You et al., 2009, Arch Micriobiol 191:615-622. In alternative methods, random mutagenesis using chemical mutagens or insertions mutagenesis can be employed to disrupt gene expression.

[0256] Additional methods of inhibiting expression of a polypeptide of Tables 1, 2, 3, or 4 include use of siRNA, antisense, or ribozyme technology to target a nucleic acid sequence that encodes a polypeptide of Tables 1, 2, 3, or 4. Such techniques are well known in the art. Thus, the invention further provides a sequence complementary to the nucleotide sequence of a gene encoding a polypeptide of the invention that is capable of hybridizing to the mRNA produced in the cell to inhibit the amount of protein expressed.

[0257] Host cells, e.g., Myceliophthora thermophila cells, manipulated to inhibit expression of a polypeptide of the invention can be screened for decreased gene expression using standard assays to determine the levels of RNA and/or protein expression, which assays include quantitative RT-PCR, immunoassays and/or enzymatic activity assays. Host cells with disrupted expression can be as host cells for the expression of native and/or heterologous polypeptides.

[0258] Thus, in a further aspect, the invention additionally provides a recombinant host cell comprising a disruption or deletion of a gene encoding a polypeptide identified in Tables 1, 2, 3, or 4, wherein the disruption or deletion inhibits expression of the polypeptide encoded by the polynucleotide sequence. In some embodiments, the recombinant host cell comprises an antisense RNA or iRNA that is complementary to a polynucleotide sequence identified in Tables 1, 2, 3, or 4.

### VII. Methods of Using Polypeptides of the Invention and Cells Expressing the Polypeptides

[0259] As described supra, polypeptides of the present invention and/or host cells expression the polypeptides can be used in processes to degrade cellulosic biomass. For example, a biomass degradation polypeptide such as a glycoside hydrolase of Tables 1, 2, 3, or 4 can be used to catalyze the hydrolysis of a sugar dimer with the release of the corresponding sugar monomer. In some embodiments, polypeptide of the invention participates in the degradation of cellulosic biomass to obtain a carbohydrate not by directly hydrolyzing cellulose or hemicellulose to obtain the carbohydrate, but by generating a degradation product that is more readily hydrolyzed to a carbohydrate by cellulases and accessory proteins. For example, lignin can be broken down using a biomass degradation enzyme of the invention, such as a laccase, to provide an intermediate in which more cellulose or hemicellulose is accessible for degradation by cellulases and glycoside hydrolases. Various other enzymes, e.g., endoglucanases and cellobiohydrolases catalyze the hydrolysis of insoluble cellulose to cellooligosaccharides while beta-glucosidases convert the oligosaccharides to glucose. Similarly, xylanases, together with other enzymes such as alpha-L-arabinofuranosidases, ferulic and acetylxylan esterases and beta-xylosidases, catalyze the hydrolysis of hemicelluloses.

[0260] The present invention thus further provides compositions that are useful for the enzymatic conversion of a cellulosic biomass to soluble carbohydrates. For example, one or more biomass degradation polypeptides of the present invention may be combined with one or more other enzymes and/or an agent that participates in biomass degradation. The other enzyme(s) may be a different glycoside hydrolase or an accessory protein such as an esterase, oxidase, or the like; or an ortholog, e.g., from a different organism of an enzyme of the invention.

[0261] In some embodiments, a host cell that is genetically modified to overexpress a polypeptide of Tables 1, 2, 3, or 4 can be used to produce increased amount of proteins, e.g., for use in biomass degradation processes.

### Cellulosic Biomass Degradation Mixtures

[0262] For example, in some embodiments, a glycoside hydrolase biomass degradation enzyme set forth in Tables 1, 2, 3, or 4 may be combined with other glycoside hydrolases to form a mixture or composition comprising a recombinant biomass degradation polypeptide of the present invention and a Myceliophthora thermophila cellulase or other filamentous fungal cellulase. The mixture or composition may include cellulases selected from CBH, EG and BG cellulases (e.g., cellulases from a Trichoderma sp. (e.g. Trichoderma reesei and the like); an Acidothermus sp. (e.g., Acidothermus cellulolyticus, and the like); an Aspergillus sp. (e.g., Aspergillus nidulans, Aspergillus niger, Aspergillus oryzae, and the like); a Humicola sp. (e.g., Humicola grisea, and the like); a Chrysosporium sp., as well as cellulases derived from any of the host cells described under the section entitled “Expression Hosts”, supra).

[0263] The mixture may additionally comprise one or more accessory proteins, e.g., an accessory enzyme such as an esterase to de-esterify hemicellulose, set forth in Tables 1, 2, 3, or 4; and/or accessory proteins from other organisms. The enzymes of the mixture work together resulting in hydrolysis of the hemicellulose and cellulose from a biomass substrate to yield soluble carbohydrates, such as, but not limited to, glucose and xylose (See Brigham et al., 1995, in Handbook on Bioethanol (C. Wyman ed.) pp 119-141, Taylor and Francis, Washington D.C., which is incorporated herein by reference). In some embodiments, mixtures of purified naturally occurring or recombinant enzymes are combined with cellulosic biomass or a product of lignocellulose hydrolysis. Alternatively or in addition, one or more cells producing naturally occurring or recombinant biomass degradation enzymes may be used.

### Other Components of Enzyme Compositions

[0264] Biomass degradation enzymes of the present invention may be used in combination with other optional ingredients such as a buffer, a surfactant, and/or a scouring agent. A buffer may be used with an enzyme of the present invention (optionally combined with other cellulose degradation enzymes) to maintain a desired pH within the solution in which the enzyme is employed. The exact concentration of the buffer employed will depend on several factors which the skilled artisan can determine. Suitable buffers are well known in the art. A surfactant may further be used in combination with the enzymes of the present invention. Suitable surfactants include any surfactant compatible with the cellulose degradation enzyme of the invention and optional other enzymes being utilized. Exemplary surfactants include anionic, non-ionic, and ampholytic surfactants.

Production of Soluble Sugars from Cellulosic Biomass

[0265] Biomass degradation polypeptides of the present invention, as well as any composition, culture medium, or cell lysate comprising such polypeptides, may be used in the production of monosaccharides, disaccharides, or oligomers of a mono- or di-saccharide from biomass for subsequent use as chemical or fermentation feedstock or in chemical synthesis. As used herein, the term “cellulosic biomass” refers to living or dead biological material that contains a cellulose substrate, such as, for example, lignocellulose, hemicellulose, lignin, and the like. Therefore, the present invention provides a method of convening a biomass substrate to a degradation product, the method comprising contacting a culture medium or cell lysate containing a biomass degradation polypeptide according to the invention, with the biomass substrate under conditions suitable for the production of the degradation product. The degradation product can be an end product such as a soluble sugar, or a product that undergoes further enzymatic conversion to an end product such as a soluble sugar. For example, a biomass degradation enzyme of the invention may participate in a reaction that makes the cellulosic substrate more susceptible to hydrolysis so that the substrate is more readily hydrolyzed to fermentable sugars, such as glucose, cellobiose, xylose, xylulose, arabinose, mannose, galactose, and/or soluble oligosaccharides. The cellulosic substrate can be contacted with a composition, culture medium or cell lysate containing biomass degradation polypeptide of Tables 1, 2, 3, or 4 (and optionally other enzymes involved in breaking down cellulosic biomass) under conditions suitable for the production of a biomass degradation product. In some embodiments, the contacting step may involve contacting the biomass with a composition, culture medium, or cell lysate containing an accessory protein such as an esterase, laccase. etc. set forth in Tables 1, 2, 3, or 4. In some embodiments, the contacting step may involve contacting the biomass with a composition, culture medium, or cell lysate containing a glycosyl hydrolase set forth in Tables 1, 2, 3, or 4.

[0266] Thus, the present invention provides a method for producing a biomass degradation product by (a) providing a cellulosic biomass; and (b) contacting the biomass with at least one biomass degradation polypeptide that has an amino acid sequence set forth in Tables 1, 2, 3, or 4 under conditions sufficient to form a reaction mixture for converting the biomass to a degradation product such as a soluble carbohydrate, or a product that is more readily hydrolyzed to a soluble carbohydrate. The cellulose degradation polypeptide may be used in such methods in either isolated form or as part of a composition, such as any of those described herein. The biomass degradation polypeptide may also be provided in cell culturing media or in a cell lysate. For example, after producing a biomass degradation enzyme of the invention by culturing a host cell transformed with a biomass degradation polynucleotide or vector of the present invention, the enzyme need not be isolated from the culture medium (i.e., if the enzyme is secreted into the culture medium) or cell lysate (i.e., if the enzyme is not secreted into the culture medium) or used in a purified form to be useful. Any composition, cell culture medium, or cell lysate containing a biomass degradation enzyme of the present invention may be suitable for use in methods to degrade cellulosic biomass. Therefore, the present invention further provides a method for producing a degradation product of cellulosic biomass, such as a soluble sugar, a de-esterified cellulose biomass, etc. by: (a) providing a cellulosic biomass; and (b) contacting the biomass with a culture medium or cell lysate or composition comprising at least one biomass degradation polypeptide having an amino acid sequence of Tables 1, 2, 3, or 4 e.g., a glycoside hydrolase of Tables 1, 2, 3, or 4, under conditions sufficient to form a reaction mixture for converting the cellulosic biomass to the degradation product.

[0267] In some embodiments, the biomass includes cellulosic substrates including but not limited to, wood, wood pulp, paper pulp, corn stover, corn fiber, rice, paper and pulp processing waste, woody or herbaceous plants, fruit or vegetable pulp, distillers grain, grasses, rice hulls, wheat straw, cotton, hemp, flax, sisal, corn cobs, sugar cane bagasse, switch grass and mixtures thereof. The biomass may optionally be pretreated to increase the susceptibility of cellulose to hydrolysis using methods known in the art such as chemical, physical and biological pretreatments (e.g., steam explosion, pulping, grinding, acid hydrolysis, solvent exposure, and the like, as well as combinations thereof).

[0268] Soluble sugars produced by the methods of the present invention may be used to produce an alcohol (such as, for example, ethanol, butanol, and the like). The present invention therefore provides a method of producing an alcohol, where the method comprises (a) providing a soluble sugar produced using a biomass degradation polypeptide of the present invention in the methods described supra; (b) contacting the soluble sugar with a fermenting microorganism to produce the alcohol or other metabolic product; and (c) recovering the alcohol or other metabolic product.

[0269] In some embodiments, a biomass degradation polypeptide of the present invention, or composition, cell culture medium, or cell lysate containing the polypeptide, may be used to catalyze the hydrolysis of a biomass substrate to a soluble sugar in the presence of a fermenting microorganism such as a yeast (e.g., Saccharomyces sp., such as, for example, S. cerevisiae, Zymomonas sp., E. coli, Pichia sp., and the like) or other C5 or C6 fermenting microorganisms that are well known in the art, to produce an end-product such as ethanol. In this simultaneous saccharification and fermentation (SSF) process the soluble sugars (e.g., glucose and/or xylose) are removed from the system by the fermentation process.

[0270] The soluble sugars produced by the use of a biomass degradation polypeptide of the present invention may also be used in the production of other end-products, such as, for example, acetone, an amino acid (e.g., glycine, lysine, and the like), an organic acid (e.g., lactic acid, and the like), glycerol, a diol (e.g., 1,3 propanediol, butanediol, and the like) and animal feeds.

[0271] One of skill in the art will readily appreciate that biomass degradation polypeptide compositions of the present invention may be used in the form of an aqueous solution or a solid concentrate. When aqueous solutions are employed, the solution can easily be diluted to allow accurate concentrations. A concentrate can be in any form recognized in the art including, for example, liquids, emulsions, suspensions, gel, pastes, granules, powders, an agglomerate, a solid disk, as well as other forms that are well known in the art. Other materials can also be used with or included in the enzyme composition of the present invention as desired, including stones, pumice, fillers, solvents, enzyme activators, and anti-redeposition agents depending on the intended use of the composition.

[0272] The foregoing and other aspects of the invention may be better understood in connection with the following non-limiting examples.

### VIII. Examples

### Example 1

### Cellulase Induction Experiments

[0273] This example identified genes that were differently expressed or secreted by a Myceliophthora thermophila strain upon induction with a microcrystalline cellulose preparation or incubation with a wheat straw biomass-derived sugar hydrolysate. In this experiment, 2×150 mL of cultures were inoculated in YPD media at 35° C. (250 rpm). After 90 hours, the cultures were harvested and washed. Then 3×50 mL of resulting cultures were started in M56 fermentation media containing 4% Avicel or wheat straw extract. Samples (1.5 mL) were collected at 0, 0.25, 0.5, 1, 2, 4, 8, 24, and 48 hours and cDNA was prepared from the cell samples. The cDNA preparations were labeled and hybridized to Agilent arrays following standard protocols. The arrays were washed and scanned for analysis. Genes over-expressed in wheat straw hydrolysate; or over-expressed during the time courses were identified and genes were selected based on a function of interest and/or overexpression parameters such as correlation of induction profiles with various cellulases, overexpression in the production strain vs. a wildtype strain, level of overexpression in wheat straw extract at later time points.

### Example 2

### Selection of Additional Genes

[0274] Genes were selected based on the following: 1) proteins detected as secreted proteins or protein predicted to be secreted; 2) genes identified from cellulase induction experiments (Example 1); 3) genes with GH domains relevant to biomass degradation, e.g. GH3. GH5. GH6, GH7, GH9, GH12, GH44. GH45. GH74 for cellulases, GH3, GH4, GH5, GH8, GH10, GH11, GH28, GH36, GH39, GH43, GH51, GH52, GH54, GH62, GH67, GH74 for hemicellulases, GH35, GH61 for accessory enzymes, GH4. GH13, GH14, GH15, GH31, GH57, GH63, GH97, GH119, GH122 for amylases; 4) additional gene designations/annotations involved in biomass degradation functions, e.g., endoglucanase, cellobiohydrolase, beta-glucosidase, esterase, endoxylanase, abf, xyloglucanase, pectinase, expansin, alpha-glucuronidase, alpha,beta-xylosidase, beta-galactosidase, mannanase, polysaccharide lyase, arabinase, mannosidase; 5) transcription factors and genes involved in pentose phosphate cycle, signal transduction pathways, secretion pathways, pH/stress response, post-translational modification that improve production and hydrolysis activity; 6) fungal oxidoreductases potentially involved in the degradation of lignin and related aromatic compounds, e.g. laccase, copper oxidase, monooxygenase, and genes with cir1 P450. Cu-oxidase, Glyoxal_oxid, GMC_oxred, Tyrosinase, Cupin_Lipase_GDSL, alcohol_oxidase, copper_amine_oxidase, Abhydrolase type of domains.

[0275] While the present invention has been described with reference to the specific embodiments thereof, it should be understood by those skilled in the art that various changes can be made and equivalents can be substituted without departing from the scope of the invention. In addition, many modifications can be made to adapt a particular situation, material, composition of matter, process, process step or steps, to achieve the benefits provided by the present invention without departing from the scope of the present invention. All such modifications are intended to be within the scope of the claims appended hereto.

[0276] All publications and patent documents cited herein are incorporated herein by reference as if each such publication or document was specifically and individually indicated to be incorporated herein by reference. Citation of publications and patent documents is not intended as an indication that any such document is pertinent prior art, nor does it constitute any admission as to the contents or date of the same.

TABLE 1

| | | | | Column 5 |
|---|---|---|---|---|
| | | | Column 4 | SEQ ID NO |
| | | | SEQ ID NO | (protein |
| | | Column 3 | (protein | sequence, no |
| Column 1 | Column 2 | SEQ ID NO | sequence with | signal |
| V4 Gene Name | Activity # | (cDNA) | signal peptide) | peptide) |
| v4chr1-54196m26 | 8 | 1 | 2 | 3 |
| v4chr3-18239m16 | 8 | 4 | 5 | 6 |
| v4chr2-73043m28 | 10 | 7 | 8 | 9 |
| v4chr4-4572p15 | 10 | 10 | 11 | 12 |
| v4chr6a-25523p13 | 10 | 13 | 14 | 15 |
| v4chr1-30182m27 | 18 | 16 | 17 | 18 |
| v4chr2-1194p18 | 18 | 19 | 20 | 21 |
| v4chr3-6594m16 | 18 | 22 | 23 | 24 |
| v4chr4-33394p15 | 18 | 25 | 26 | 27 |
| v4chr3-11825m27 | 21 | 28 | 29 | 30 |
| v4chr3-34174m29 | 21 | 31 | 32 | 33 |
| v4chr3-50789p30 | 21 | 34 | 35 | 36 |
| v4chr4-6448p10 | 25 | 37 | 38 | 39 |
| v4chr6a-11150m11 | 28 | 40 | 41 | 42 |
| v4chr6b-850p14 | 28 | 43 | 44 | 45 |
| v4chr6a-29793p13 | 28 | 46 | 47 | 48 |
| v4chr2-40227p9 | 29 | 49 | 50 | 51 |
| v4chr2-20586m21 | 36 | 52 | 53 | 54 |
| v4chr5-32868m20 | 36 | 55 | 56 | 57 |
| v4chr4-34944p18 | 36 | 58 | 59 | 60 |
| v4chr1-61131m19 | 38 | 61 | 62 | 63 |
| v4chr3-27037p20 | 38 | 64 | 65 | 66 |
| v4chr5-39651m29 | 39 | 67 | 68 | 69 |
| v4chr4-12709m29 | 39 | 70 | 71 | 72 |
| v4chr7-36312m25 | 39 | 73 | 74 | 75 |
| v4chr1-57343m21 | 39 | 76 | 77 | 78 |
| v4chr5-39576m10 | 39 | 79 | 80 | 81 |
| v4chr6b-1402m7 | 39 | 82 | 83 | 84 |
| v4chr5-9467p19 | 39 | 85 | 86 | 87 |
| v4chr3-32980m12 | 39 | 88 | 89 | 90 |
| v4chr2-14160m24 | 39 | 91 | 92 | 93 |
| v4chr5-14872m8 | 40 | 94 | 95 | 96 |
| v4chr1-6314p14 | 42 | 97 | 98 | 99 |
| v4chr1-61102m14 | 42 | 100 | 101 | 102 |
| v4chr2-23698m19 | 42 | 103 | 104 | 105 |
| v4chr2-60738p15 | 42 | 106 | 107 | 108 |
| v4chr3-1993p13 | 42 | 109 | 110 | 111 |
| v4chr3-2875m14 | 42 | 112 | 113 | 114 |
| v4chr4-46531m19 | 42 | 115 | 116 | 117 |
| v4chr5-43537m13 | 42 | 118 | 119 | 120 |
| v4chr6a-7824m13 | 42 | 121 | 122 | 123 |
| v4chr5-15490p14 | 42 | 124 | 125 | 126 |
| v4chr5-23017m10 | 42 | 127 | 128 | 129 |
| v4chr2-16266p10 | 42 | 130 | 131 | 132 |
| v4chr2-51433m11 | 42 | 133 | 134 | 135 |
| v4chr2-51800m9 | 42 | 136 | 137 | 138 |
| v4chr3-27074m15 | 42 | 139 | 140 | 141 |
| v4chr5-42485p8 | 42 | 142 | 143 | 144 |
| v4chr6a-11947m14 | 42 | 145 | 146 | 147 |
| v4chr1-28415p18 | 42 | 148 | 149 | 150 |
| v4chr3-19798p18 | 42 | 151 | 152 | 153 |
| v4chr6a-19551m28 | 42 | 154 | 155 | 156 |
| v4chr1-33134p10 | 42 | 157 | 158 | 159 |
| v4chr1-51854m13 | 42 | 160 | 161 | 162 |
| v4chr3-19646m8 | 42 | 163 | 164 | 165 |
| v4chr3-23294m7 | 42 | 166 | 167 | 168 |
| v4chr3-30087m12 | 42 | 169 | 170 | 171 |
| v4chr3-43634p8 | 42 | 172 | 173 | 174 |
| v4chr4-10827m13 | 42 | 175 | 176 | 177 |
| v4chr6a-11168p11 | 42 | 178 | 179 | 180 |
| v4chr6a-12368m9 | 42 | 181 | 182 | 183 |
| v4chr6a-18078p8 | 42 | 184 | 185 | 186 |
| v4chr7-36264m7 | 42 | 187 | 188 | 189 |
| v4chr3-18684p9 | 42 | 190 | 191 | 192 |
| v4chr7-36246m10 | 42 | 193 | 194 | 195 |
| v4chr1-17314m10 | 42 | 196 | 197 | 198 |
| v4chr2-16783p13 | 42 | 199 | 200 | 201 |
| v4chr3-18156m13 | 42 | 202 | 203 | 204 |
| v4chr3-19897p15 | 42 | 205 | 206 | 207 |
| v4chr6a-8016p21 | 42 | 208 | 209 | 210 |
| v4chr6b-309m17 | 42 | 211 | 212 | 213 |
| v4chr7-29412p13 | 42 | 214 | 215 | 216 |
| v4chr7-7921m7 | 42 | 217 | 218 | 219 |
| v4chr2-61184p17 | 42 | 220 | 221 | 222 |
| v4chr2-75425m8 | 42 | 223 | 224 | 225 |
| v4chr4-16641p21 | 42 | 226 | 277 | 228 |
| v4chr4-49590m7 | 42 | 229 | 230 | 231 |
| v4chr5-1414p17 | 42 | 232 | 233 | 234 |
| v4chr7-23480p21 | 42 | 235 | 236 | 237 |
| v4chr1-45969p13 | 42 | 238 | 239 | 240 |
| v4chr2-69550p2 | 42 | 241 | 242 | 243 |
| v4chr3-16249p19 | 42 | 244 | 245 | 246 |
| v4chr5-13441m15 | 42 | 247 | 248 | 249 |
| v4chr3-2130m7 | 42 | 250 | 251 | 252 |
| v4chr4-44326p8 | 42 | 253 | 254 | 255 |
| v4chr3-33604p8 | 10, 42 | 256 | 257 | 258 |
| v4chr2-58146p8 | 12, 13 | 259 | 260 | 261 |
| v4chr3-1974p9 | 12, 13 | 262 | 263 | 264 |
| v4chr5-40741p11 | 12, 13 | 265 | 266 | 267 |
| v4chr6a-34208p7 | 12, 13 | 268 | 269 | 270 |
| v4chr7-7143m7 | 12, 13 | 271 | 272 | 273 |
| v4chr1-42827p7 | 12, 13 | 274 | 275 | 276 |
| v4chr3-12198m16 | 15, 19 | 277 | 278 | 279 |
| v4chr6a-12299m16 | 15, 19 | 280 | 281 | 282 |
| v4chr1-45858p9 | 17, 23 | 283 | 284 | 285 |
| v4chr4-44244p12 | 17, 23 | 286 | 287 | 288 |
| v4chr5-6640p9 | 20, 23 | 289 | 290 | 291 |
| v4chr7-23790m22 | 22, 23 | 292 | 293 | 294 |
| v4chr2-18381p22 | 23, 29 | 295 | 296 | 297 |
| v4chr3-54200m17 | 23, 29 | 298 | 299 | 300 |
| v4chr3-813m12 | 23, 29 | 301 | 302 | 303 |
| v4chr4-8869m13 | 23, 29 | 304 | 305 | 306 |
| v4chr5-38617m13 | 23, 29 | 307 | 308 | 309 |
| v4chr2-66290m20 | 25, 39 | 310 | 311 | 312 |
| v4chr6b-7438p10 | 26, 27 | 313 | 314 | 315 |
| v4chr7-8477p12 | 26, 27 | 316 | 317 | 318 |
| v4chr6a-11852p7 | 26, 27 | 319 | 320 | 321 |
| v4chr4-4420m17 | 3, 4, 7, 9 | 322 | 323 | 324 |
| v4chr5-270m11 | 3, 4, 7, 9 | 325 | 326 | 327 |
| v4chr5-279p12 | 3, 4, 7, 9 | 328 | 329 | 330 |
| v4chr4-1883m23 | 3, 4, 7, 9, 16 | 331 | 332 | 333 |
| v4chr7-17283p10 | 3, 4, 7, 9, 16 | 334 | 335 | 336 |
| v4chr1-259m24 | 3, 4, 7, 9, 16 | 337 | 338 | 339 |
| v4chr4-1983m23 | 3, 4, 7, 9, 16 | 340 | 341 | 342 |
| v4chr5-22719p25 | 3, 4, 7, 9, 36 | 343 | 344 | 345 |
| v4chr6a-10875p9 | 3, 4, 9 | 346 | 347 | 348 |
| v4chr1-22293m11 | 3, 4, 9 | 349 | 350 | 351 |
| v4chr6b-11049m8 | 34, 41 | 352 | 353 | 354 |
| v4chr2-16972p12 | 36, 37 | 355 | 356 | 357 |
| v4chr5-3703m24 | 36, 45 | 358 | 359 | 360 |
| v4chr6b-12886p23 | 36, 45 | 361 | 362 | 363 |
| v4chr4-293m24 | 38, 39 | 364 | 365 | 366 |
| v4chr1-28579p15 | 5, 12, 13, 17, 23, 29, 42 | 367 | 368 | 369 |
| v4chr5-22308m12 | 5, 17, 23 | 370 | 371 | 372 |
| v4chr6b-14222p17 | 5, 17, 23 | 373 | 374 | 375 |
| v4chr1-16223p10 | 5, 17, 23 | 376 | 377 | 378 |
| v4chr5-45043m10 | 5, 17, 23 | 379 | 380 | 381 |
| v4chr6a-34292m9 | 5, 17, 23 | 382 | 383 | 384 |
| v4chr1-2303p9 | 5, 17, 23, 29 | 385 | 386 | 387 |
| v4chr1-60519p12 | 5, 17, 23, 31 | 388 | 389 | 390 |
| v4chr4-34206m11 | 5, 17, 23, 31 | 391 | 392 | 393 |
| v4chr1-21106m12 | 5, 8, 12, 13, 17, 23, 29 | 394 | 395 | 396 |
| v4chr7-169p13 | 5, 8, 12, 13, 17, 23, 29 | 397 | 398 | 399 |
| v4chr4-31038m15 | 7, 16, 23 | 400 | 401 | 402 |

TABLE 2

| | | Column 3 | Column 4 |
|---|---|---|---|
| Column 1 | Column 2 | SEQ ID NO | SEQ ID NO |
| V4 Gene Name | Activity # | (cDNA) | (protein) |
| v4chr2-25393m33 | 8 | 403 | 404 |
| v4chr2-11466m13 | 10 | 405 | 406 |
| v4chr2-36725m33 | 18 | 407 | 408 |
| v4chr7-17659p36 | 21 | 409 | 410 |
| v4chr5-12936p20 | 21 | 411 | 412 |
| v4chr1-42596p46 | 35 | 413 | 414 |
| v4chr6a-20419m22 | 36 | 415 | 416 |
| v4chr5-3942p25 | 38 | 417 | 418 |
| v4chr6b-13880p10 | 38 | 419 | 420 |
| v4chr4-7403m7 | 38 | 421 | 422 |
| v4chr7-28444m14 | 38 | 423 | 424 |
| v4chr5-35032p8 | 39 | 425 | 426 |
| v4chr6a-32476m12 | 39 | 427 | 428 |
| v4chr6a-27714p17 | 39 | 429 | 430 |
| v4chr3-39854p15 | 40 | 431 | 432 |
| v4chr1-39559m15 | 42 | 433 | 434 |
| v4chr3-17051p18 | 42 | 435 | 436 |
| v4chr4-47338m22 | 42 | 437 | 438 |
| v4chr7-9702m21 | 42 | 439 | 440 |
| v4chr5-7342p13 | 42 | 441 | 442 |
| v4chr6a-2573m13 | 42 | 443 | 444 |
| v4chr5-37116m11 | 42 | 445 | 446 |
| v4chr2-17230m25 | 42 | 447 | 448 |
| v4chr1-37598m36 | 42 | 449 | 450 |
| v4chr2-24292p15 | 42 | 451 | 452 |
| v4chr2-61903p19 | 42 | 453 | 454 |
| v4chr2-65345m23 | 42 | 455 | 456 |
| v4chr2-6752m16 | 42 | 457 | 458 |
| v4chr2-72695m22 | 42 | 459 | 460 |
| v4chr2-77127p22 | 42 | 461 | 462 |
| v4chr2-8686p26 | 42 | 463 | 464 |
| v4chr3-22012p19 | 42 | 465 | 466 |
| v4chr3-3127m9 | 42 | 467 | 468 |
| v4chr3-38467m33 | 42 | 469 | 470 |
| v4chr3-40560p11 | 42 | 471 | 472 |
| v4chr3-42190p15 | 42 | 473 | 474 |
| v4chr3-42218p20 | 42 | 475 | 476 |
| v4chr3-54225p15 | 42 | 477 | 478 |
| v4chr3-749m3 | 42 | 479 | 480 |
| v4chr4-20339p30 | 42 | 481 | 482 |
| v4chr4-32652p28 | 42 | 483 | 484 |
| v4chr5-31523m9 | 42 | 485 | 486 |
| v4chr5-32373p12 | 42 | 487 | 488 |
| v4chr5-37947p16 | 42 | 489 | 490 |
| v4chr5-48185p9 | 42 | 491 | 492 |
| v4chr6a-17391p2 | 42 | 493 | 494 |
| v4chr7-18866m38 | 42 | 495 | 496 |
| v4chr7-8999m14 | 42 | 497 | 498 |
| v4chr1-12713p16 | 42 | 499 | 500 |
| v4chr1-56580p10 | 42 | 501 | 502 |
| v4chr1-58887p11 | 42 | 503 | 504 |
| v4chr2-50714m27 | 42 | 505 | 506 |
| v4chr2-69554p20 | 42 | 507 | 508 |
| v4chr3-17149m10 | 42 | 509 | 510 |
| v4chr4-30942p10 | 42 | 511 | 512 |
| v4chr4-6224m23 | 42 | 513 | 514 |
| v4chr5-20717p29 | 42 | 515 | 516 |
| v4chr6a-1402m24 | 42 | 517 | 518 |
| v4chr2-17834p17 | 42 | 519 | 520 |
| v4chr2-62662m13 | 42 | 521 | 522 |
| v4chr4-39821p9 | 42 | 523 | 524 |
| v4chr5-12218m5 | 42 | 525 | 526 |
| v4chr6a-16604p12 | 42 | 527 | 528 |
| v4chr5-41364p11 | 42 | 529 | 530 |
| v4chr3-8836p3 | 12, 13 | 531 | 532 |
| v4chr1-267p30 | 21, 44 | 533 | 534 |
| v4chr4-6158p25 | 21, 44 | 535 | 536 |
| v4chr4-323m16 | 3, 4, 7, 9 | 537 | 538 |
| v4chr6b-6880m9 | 3, 4, 7, 9 | 539 | 540 |
| v4chr3-4714m16 | 3, 4, 7, 9, 16 | 541 | 542 |
| v4chr6b-1577m30 | 3, 4, 7, 9, 16 | 543 | 544 |
| v4chr4-49475m22 | 36, 37 | 545 | 546 |
| v4chr6a-8375p26 | 36, 39 | 547 | 548 |
| v4chr6b-10059m32 | 36, 39 | 549 | 550 |
| v4chr2-61708p22 | 36, 45 | 551 | 552 |
| v4chr4-39108p15 | 5, 12, 13, 16, | 553 | 554 |
| | 17, 23, 29 | | |
| v4chr6a-19658m23 | 5, 12, 13, 17, 23, 29 | 555 | 556 |
| v4chr5-34806m26 | 8, 33 | 557 | 558 |

TABLE 3

| | | | | Column 5 |
|---|---|---|---|---|
| | | | Column 4 | SEQ ID NO |
| | | Column 3 | SEQ ID NO | (protein |
| | | SEQ ID | (protein | sequence, no |
| Column 1 | Column 2 | NO | sequence with | signal |
| V4 Gene Name | Activity # | (cDNA) | signal peptide) | peptide) |
| v4chr6a-5087p26 | 6 | 559 | 560 | 561 |
| v4chr5-46937m26 | 8 | 562 | 563 | 564 |
| v4s103-1p12 | 8 | 565 | 566 | 567 |
| v4chr1-14031m3 | 10 | 568 | 569 | 570 |
| v4chr5-47909m12 | 10 | 571 | 572 | 573 |
| v4chr6b-15681p9 | 10 | 574 | 575 | 576 |
| v4chr7-152p8 | 10 | 577 | 578 | 579 |
| v4chr6a-2053p12 | 10 | 580 | 581 | 582 |
| v4chr4-42966m7 | 10 | 583 | 584 | 585 |
| v4chr5-47972p44 | 10 | 586 | 587 | 588 |
| v4chr7-15635m14 | 10 | 589 | 590 | 591 |
| v4chr5-27445m29 | 18 | 592 | 593 | 594 |
| v4chr1-11300p13 | 18 | 595 | 596 | 597 |
| v4chr1-6188p11 | 18 | 598 | 599 | 600 |
| v4chr3-12801m15 | 18 | 601 | 602 | 603 |
| v4chr6a-23743p16 | 18 | 604 | 605 | 606 |
| v4s151-41m13 | 18 | 607 | 608 | 609 |
| v4chr1-11374p13 | 18 | 610 | 611 | 612 |
| v4chr2-22055p33 | 21 | 613 | 614 | 615 |
| v4chr2-56875p13 | 23 | 616 | 617 | 618 |
| v4chr6b-14138p24 | 23 | 619 | 620 | 621 |
| v4chr7-16675p14 | 25 | 622 | 623 | 624 |
| v4chr1-1553m8 | 28 | 625 | 626 | 627 |
| v4chr2-42614m11 | 31 | 628 | 629 | 630 |
| v4chr5-33720m17 | 32 | 631 | 632 | 633 |
| v4chr6a-22593m17 | 32 | 634 | 635 | 636 |
| v4chr7-2448p16 | 32 | 637 | 638 | 639 |
| v4chr2-23202p17 | 33 | 640 | 641 | 642 |
| v4chr2-68710p16 | 35 | 643 | 644 | 645 |
| v4chr3-1420m15 | 35 | 646 | 647 | 648 |
| v4chr5-45534m16 | 35 | 649 | 650 | 651 |
| v4chr1-22157m14 | 35 | 652 | 653 | 654 |
| v4chr3-2834p10 | 35 | 655 | 656 | 657 |
| v4chr4-32238p11 | 35 | 658 | 659 | 660 |
| v4chr7-1388p29 | 35 | 661 | 662 | 663 |
| v4chr7-16605m18 | 35 | 664 | 665 | 666 |
| v4chr3-11441p19 | 35 | 667 | 668 | 669 |
| v4chr6a-2108p13 | 35 | 670 | 671 | 672 |
| v4chr3-26611p21 | 35 | 673 | 674 | 675 |
| v4chr5-42029m18 | 35 | 676 | 677 | 678 |
| v4chr7-2889p16 | 35 | 679 | 680 | 681 |
| v4chr6a-36911m16 | 35 | 682 | 683 | 684 |
| v4chr3-21761p16 | 35 | 685 | 686 | 687 |
| v4chr6a-18968p13 | 35 | 688 | 689 | 690 |
| v4chr5-7830p28 | 35 | 691 | 692 | 693 |
| v4chr2-24527p10 | 35 | 694 | 695 | 696 |
| v4chr1-48293m21 | 36 | 697 | 698 | 699 |
| v4chr4-3987m21 | 36 | 700 | 701 | 702 |
| v4chr4-49300m19 | 36 | 703 | 704 | 705 |
| v4chr3-49292m21 | 36 | 706 | 707 | 708 |
| v4chr2-17550m19 | 36 | 709 | 710 | 711 |
| v4chr6b-382m12 | 36 | 712 | 713 | 714 |
| v4chr4-44885m7 | 36 | 715 | 716 | 717 |
| v4chr1-18546p13 | 36 | 718 | 719 | 720 |
| v4chr1-57459m14 | 36 | 721 | 722 | 723 |
| v4chr3-16285p8 | 36 | 724 | 775 | 726 |
| v4chr3-22337m20 | 36 | 727 | 728 | 729 |
| v4chr3-23353p15 | 36 | 730 | 731 | 732 |
| v4chr4-1148p21 | 36 | 733 | 734 | 735 |
| v4chr4-1262p18 | 36 | 736 | 737 | 738 |
| v4chr5-44551p4 | 36 | 739 | 740 | 741 |
| v4chr6a-5405m18 | 36 | 742 | 743 | 744 |
| v4chr2-15086m19 | 38 | 745 | 746 | 747 |
| v4chr2-24247p11 | 38 | 748 | 749 | 750 |
| v4chr2-51729p12 | 38 | 751 | 752 | 753 |
| v4chr4-13630m11 | 38 | 754 | 755 | 756 |
| v4chr4-1406p18 | 38 | 757 | 758 | 759 |
| v4chr5-15180m18 | 38 | 760 | 761 | 762 |
| v4chr5-29634p19 | 38 | 763 | 764 | 765 |
| v4chr5-44803m21 | 38 | 766 | 767 | 768 |
| v4chr5-8009p33 | 38 | 769 | 770 | 771 |
| v4chr6a-15077p7 | 38 | 772 | 773 | 774 |
| v4chr6a-21464m17 | 38 | 775 | 776 | 777 |
| v4chr6a-21543p19 | 38 | 778 | 779 | 780 |
| v4chr6a-32779p2 | 38 | 781 | 782 | 783 |
| v4chr7-25280m14 | 38 | 784 | 785 | 786 |
| v4chr1-57507m21 | 38 | 787 | 788 | 789 |
| v4chr2-39219p21 | 38 | 790 | 791 | 792 |
| v4chr3-53190m19 | 38 | 793 | 794 | 795 |
| v4chr3-8166m21 | 38 | 796 | 797 | 798 |
| v4chr5-15070p20 | 38 | 799 | 800 | 801 |
| v4chr5-4838p16 | 38 | 802 | 803 | 804 |
| v4chr5-7275m18 | 38 | 805 | 806 | 807 |
| v4chr6a-21517p7 | 38 | 808 | 809 | 810 |
| v4chr6a-29731p20 | 38 | 811 | 812 | 813 |
| v4chr6a-31800m18 | 38 | 814 | 815 | 816 |
| v4chr6a-35660p11 | 38 | 817 | 818 | 819 |
| v4chr6a-4983m19 | 38 | 820 | 821 | 822 |
| v4chr6b-14184p21 | 38 | 823 | 824 | 825 |
| v4chr5-16338m18 | 38 | 826 | 827 | 828 |
| v4chr6b-8529p17 | 38 | 829 | 830 | 831 |
| v4chr1-6618p14 | 38 | 832 | 833 | 834 |
| v4chr1-35264p17 | 38 | 835 | 836 | 837 |
| v4chr2-21018p20 | 38 | 838 | 839 | 840 |
| v4chr2-23085p25 | 38 | 841 | 842 | 841 |
| v4chr2-63927m8 | 38 | 844 | 845 | 846 |
| v4chr3-2331m11 | 38 | 847 | 848 | 849 |
| v4chr5-13619p7 | 38 | 850 | 851 | 852 |
| v4chr5-25149p5 | 38 | 853 | 854 | 855 |
| v4chr2-64098m27 | 38 | 856 | 857 | 858 |
| v4chr1-48612m9 | 38 | 859 | 860 | 861 |
| v4chr2-68594p3 | 38 | 862 | 863 | 864 |
| v4chr2-75551m12 | 38 | 865 | 866 | 867 |
| v4chr3-4899m5 | 38 | 868 | 869 | 870 |
| v4chr2-28764p7 | 38 | 871 | 872 | 873 |
| v4chr4-41898p5 | 39 | 874 | 875 | 876 |
| v4chr7-40174p20 | 39 | 877 | 878 | 879 |
| v4chr6b-8441p8 | 39 | 880 | 881 | 882 |
| v4chr3-19463p9 | 39 | 883 | 884 | 885 |
| v4chr2-49604p15 | 39 | 886 | 887 | 888 |
| v4chr3-8782p20 | 39 | 889 | 890 | 891 |
| v4chr7-17630p19 | 39 | 892 | 893 | 894 |
| v4chr1-9503p11 | 39 | 895 | 896 | 897 |
| v4chr3-31237p3 | 39 | 898 | 899 | 900 |
| v4chr7-16330m21 | 39 | 901 | 902 | 903 |
| v4chr2-43222m19 | 39 | 904 | 905 | 906 |
| v4chr2-34496m16 | 39 | 907 | 908 | 909 |
| v4chr2-23980p16 | 42 | 910 | 911 | 912 |
| v4chr5-11514p13 | 42 | 913 | 914 | 915 |
| v4chr5-18917p23 | 42 | 916 | 917 | 918 |
| v4chr2-30244m14 | 42 | 919 | 920 | 921 |
| v4chr2-8416m28 | 42 | 922 | 923 | 924 |
| v4chr3-42606p12 | 42 | 925 | 926 | 927 |
| v4chr6a-26935p16 | 42 | 928 | 929 | 930 |
| v4chr7-2107m16 | 42 | 931 | 932 | 933 |
| v4chr7-7263m31 | 42 | 934 | 935 | 936 |
| v4chr1-14013m15 | 42 | 937 | 938 | 939 |
| v4chr1-360m18 | 42 | 940 | 941 | 942 |
| v4chr1-50559p18 | 42 | 943 | 944 | 945 |
| v4chr1-57880m11 | 42 | 946 | 947 | 948 |
| v4chr1-587p12 | 42 | 949 | 950 | 951 |
| v4chr1-9167p12 | 42 | 952 | 953 | 954 |
| v4chr2-14073p8 | 42 | 955 | 956 | 957 |
| v4chr2-21455m13 | 42 | 958 | 959 | 960 |
| v4chr2-75431p11 | 42 | 961 | 962 | 963 |
| v4chr3-41404m15 | 42 | 964 | 965 | 966 |
| v4chr4-1391m13 | 42 | 967 | 968 | 969 |
| v4chr4-579m23 | 42 | 970 | 971 | 972 |
| v4chr5-2301p14 | 42 | 973 | 974 | 975 |
| v4chr5-35126m16 | 42 | 976 | 977 | 978 |
| v4chr5-4747p18 | 42 | 979 | 980 | 981 |
| v4chr5-5934p5 | 42 | 982 | 983 | 984 |
| v4chr5-7429p20 | 42 | 985 | 986 | 987 |
| v4chr6a-25453p10 | 42 | 988 | 989 | 990 |
| v4chr6a-32568m10 | 42 | 991 | 992 | 993 |
| v4chr6b-4863p18 | 42 | 994 | 995 | 996 |
| v4s114-9p8 | 42 | 997 | 998 | 999 |
| v4chr2-24355m19 | 42 | 1000 | 1001 | 1002 |
| v4chr3-21494m15 | 42 | 1003 | 1004 | 1005 |
| v4chr4-27017p22 | 42 | 1006 | 1007 | 1008 |
| v4chr4-37992m17 | 42 | 1009 | 1010 | 1011 |
| v4chr4-3957m20 | 42 | 1012 | 1013 | 1014 |
| v4chr4-4030m18 | 42 | 1015 | 1016 | 1017 |
| v4chr4-6637m20 | 42 | 1018 | 1019 | 1020 |
| v4chr4-8254m19 | 42 | 1021 | 1022 | 1023 |
| v4chr7-8359m17 | 42 | 1024 | 1025 | 1026 |
| v4chr3-23968p10 | 42 | 1027 | 1028 | 1029 |
| v4chr4-45657m19 | 42 | 1030 | 1031 | 1032 |
| v4chr1-11419p10 | 42 | 1033 | 1034 | 1035 |
| v4chr3-19448p11 | 42 | 1036 | 1037 | 1038 |
| v4chr3-40195p14 | 42 | 1039 | 1040 | 1041 |
| v4chr5-1262p7 | 42 | 1042 | 1043 | 1044 |
| v4chr5-7902p6 | 42 | 1045 | 1046 | 1047 |
| v4chr6a-12833p17 | 42 | 1048 | 1049 | 1050 |
| v4chr6a-32898m8 | 42 | 1051 | 1052 | 1053 |
| v4chr6a-911p10 | 42 | 1054 | 1055 | 1056 |
| v4chr7-9489m24 | 42 | 1057 | 1058 | 1059 |
| v4chr2-40000p19 | 42 | 1060 | 1061 | 1062 |
| v4chr5-21253m19 | 42 | 1063 | 1064 | 1065 |
| v4chr7-1537m19 | 42 | 1066 | 1067 | 1068 |
| v4chr5-39698m9 | 42 | 1069 | 1070 | 1071 |
| v4chr6a-29703p9 | 42 | 1072 | 1073 | 1074 |
| v4chr6b-10282m10 | 42 | 1075 | 1076 | 1077 |
| v4chr1-16655m13 | 42 | 1078 | 1079 | 1080 |
| v4chr1-54416m10 | 42 | 1081 | 1082 | 1083 |
| v4chr2-58041p14 | 42 | 1084 | 1085 | 1086 |
| v4chr1-36840m3 | 42 | 1087 | 1088 | 1089 |
| v4chr2-12801m25 | 42 | 1090 | 1091 | 1092 |
| v4chr2-55602p5 | 42 | 1093 | 1094 | 1095 |
| v4chr5-24409m24 | 42 | 1096 | 1097 | 1098 |
| v4chr6a-922p7 | 42 | 1099 | 1100 | 1101 |
| v4chr6b-13435p10 | 42 | 1102 | 1103 | 1104 |
| v4chr1-24905m10 | 42 | 1105 | 1106 | 1107 |
| v4chr3-36282p12 | 42 | 1108 | 1109 | 1110 |
| v4chr5-9543m7 | 42 | 1111 | 1112 | 1113 |
| v4chr3-2762p9 | 42 | 1114 | 1115 | 1116 |
| v4chr1-679m13 | 42 | 1117 | 1118 | 1119 |
| v4chr1-16176m10 | 42 | 1120 | 1121 | 1122 |
| v4chr2-156p21 | 42 | 1123 | 1124 | 1125 |
| v4chr6b-13426m12 | 42 | 1126 | 1127 | 1128 |
| v4chr1-11242p10 | 42 | 1129 | 1130 | 1131 |
| v4chr1-11870m2 | 42 | 1132 | 1133 | 1134 |
| v4chr1-16159p6 | 42 | 1135 | 1136 | 1137 |
| v4chr1-18392p15 | 42 | 1138 | 1139 | 1140 |
| v4chr1-21382m14 | 42 | 1141 | 1142 | 1143 |
| v4chr1-21560p14 | 42 | 1144 | 1145 | 1146 |
| v4chr1-2905m25 | 42 | 1147 | 1148 | 1149 |
| v4chr1-30199p7 | 42 | 1150 | 1151 | 1152 |
| v4chr1-30249m14 | 42 | 1153 | 1154 | 1155 |
| v4chr1-44534m4 | 42 | 1156 | 1157 | 1158 |
| v4chr1-46847p12 | 42 | 1159 | 1160 | 1161 |
| v4chr1-49429m9 | 42 | 1162 | 1163 | 1164 |
| v4chr1-51362p10 | 42 | 1165 | 1166 | 1167 |
| v4chr1-51541m11 | 42 | 1168 | 1169 | 1170 |
| v4chr1-5302p12 | 42 | 1171 | 1172 | 1173 |
| v4chr1-54396m8 | 42 | 1174 | 1175 | 1176 |
| v4chr1-58020p27 | 42 | 1177 | 1178 | 1179 |
| v4chr1-61283m25 | 42 | 1180 | 1181 | 1182 |
| v4chr1-8088p2 | 42 | 1183 | 1184 | 1185 |
| v4chr1-8271m4 | 42 | 1186 | 1187 | 1188 |
| v4chr2-11396m14 | 42 | 1189 | 1190 | 1191 |
| v4chr2-1483p17 | 42 | 1192 | 1193 | 1194 |
| v4chr2-15130m20 | 42 | 1195 | 1196 | 1197 |
| v4chr2-15434p22 | 42 | 1198 | 1199 | 1200 |
| v4chr2-17391p5 | 42 | 1201 | 1202 | 1203 |
| v4chr2-19271m7 | 42 | 1204 | 1205 | 1206 |
| v4chr2-19317p19 | 42 | 1207 | 1208 | 1209 |
| v4chr2-20249p24 | 42 | 1210 | 1211 | 1212 |
| v4chr2-30610m9 | 42 | 1213 | 1214 | 1215 |
| v4chr2-31227p4 | 42 | 1216 | 1217 | 1218 |
| v4chr2-31261p27 | 42 | 1219 | 1220 | 1221 |
| v4chr2-3127m3 | 42 | 1222 | 1223 | 1224 |
| v4chr2-31365m5 | 42 | 1225 | 1226 | 1227 |
| v4chr2-3175m22 | 42 | 1228 | 1229 | 1230 |
| v4chr2-39722m19 | 42 | 1231 | 1232 | 1233 |
| v4chr2-43829m53 | 42 | 1234 | 1235 | 1236 |
| v4chr2-50840p46 | 42 | 1237 | 1238 | 1239 |
| v4chr2-54387m9 | 42 | 1240 | 1241 | 1242 |
| v4chr2-57360p3 | 42 | 1243 | 1244 | 1245 |
| v4chr2-589m14 | 42 | 1246 | 1247 | 1248 |
| v4chr2-65874p14 | 42 | 1249 | 1250 | 1251 |
| v4chr2-69530m16 | 42 | 1252 | 1253 | 1254 |
| v4chr2-73210p74 | 42 | 1255 | 1256 | 1257 |
| v4chr2-75103p19 | 42 | 1258 | 1259 | 1260 |
| v4chr2-76081p16 | 42 | 1261 | 1262 | 1263 |
| v4chr2-9537m48 | 42 | 1264 | 1265 | 1266 |
| v4chr3-10248m9 | 42 | 1267 | 1268 | 1269 |
| v4chr3-12122m28 | 42 | 1270 | 1271 | 1272 |
| v4chr3-13330m7 | 42 | 1273 | 1274 | 1275 |
| v4chr3-15119p28 | 42 | 1276 | 1277 | 1278 |
| v4chr3-18085m16 | 42 | 1279 | 1280 | 1281 |
| v4chr3-21367m14 | 42 | 1282 | 1283 | 1284 |
| v4chr3-21396m10 | 42 | 1285 | 1286 | 1287 |
| v4chr3-21453m25 | 42 | 1288 | 1289 | 1290 |
| v4chr3-22101p5 | 42 | 1291 | 1292 | 1293 |
| v4chr3-25456p4 | 42 | 1294 | 1295 | 1296 |
| v4chr3-27352p19 | 42 | 1297 | 1298 | 1299 |
| v4chr3-34237m6 | 42 | 1300 | 1301 | 1302 |
| v4chr3-3901p8 | 42 | 1303 | 1304 | 1305 |
| v4chr3-41315p26 | 42 | 1306 | 1307 | 1308 |
| v4chr3-49945m7 | 42 | 1309 | 1310 | 1311 |
| v4chr3-50196m35 | 42 | 1312 | 1313 | 1314 |
| v4chr3-8985m11 | 42 | 1315 | 1316 | 1317 |
| v4chr4-10771p12 | 42 | 1318 | 1319 | 1320 |
| v4chr4-14223m5 | 42 | 1321 | 1322 | 1323 |
| v4chr4-17965m20 | 42 | 1324 | 1325 | 1326 |
| v4chr4-21113m30 | 42 | 1327 | 1328 | 1329 |
| v4chr4-24821m2 | 42 | 1330 | 1331 | 1332 |
| v4chr4-25108m9 | 42 | 1333 | 1334 | 1335 |
| v4chr4-30930m12 | 42 | 1336 | 1337 | 1338 |
| v4chr4-32722p13 | 42 | 1339 | 1340 | 1341 |
| v4chr4-33722m5 | 42 | 1342 | 1343 | 1344 |
| v4chr4-34210p2 | 42 | 1345 | 1346 | 1347 |
| v4chr4-40062p19 | 42 | 1348 | 1349 | 1350 |
| v4chr4-41357p24 | 42 | 1351 | 1352 | 1353 |
| v4chr4-42419m8 | 42 | 1354 | 1355 | 1356 |
| v4chr4-45897p8 | 42 | 1357 | 1358 | 1359 |
| v4chr4-49176p10 | 42 | 1360 | 1361 | 1362 |
| v4chr4-49352p17 | 42 | 1363 | 1364 | 1365 |
| v4chr4-7328m11 | 42 | 1366 | 1367 | 1368 |
| v4chr5-10039p4 | 42 | 1369 | 1370 | 1371 |
| v4chr5-14756p19 | 42 | 1372 | 1373 | 1374 |
| v4chr5-15913p14 | 42 | 1375 | 1376 | 1377 |
| v4chr5-16072p4 | 42 | 1378 | 1379 | 1380 |
| v4chr5-17580p36 | 42 | 1381 | 1382 | 1383 |
| v4chr5-21093p40 | 42 | 1384 | 1385 | 1386 |
| v4chr5-23109m16 | 42 | 1387 | 1388 | 1389 |
| v4chr5-23164p25 | 42 | 1390 | 1391 | 1392 |
| v4chr5-24370p12 | 42 | 1393 | 1394 | 1395 |
| v4chr5-25106p35 | 42 | 1396 | 1397 | 1398 |
| v4chr5-29257m28 | 42 | 1399 | 1400 | 1401 |
| v4chr5-36518p9 | 42 | 1402 | 1403 | 1404 |
| v4chr5-37995m22 | 42 | 1405 | 1406 | 1407 |
| v4chr5-39252m15 | 42 | 1408 | 1409 | 1410 |
| v4chr5-39288p12 | 42 | 1411 | 1412 | 1413 |
| v4chr5-48048m5 | 42 | 1414 | 1415 | 1416 |
| v4chr6a-10450m6 | 42 | 1417 | 1418 | 1419 |
| v4chr6a-14429m11 | 42 | 1420 | 1421 | 1422 |
| v4chr6a-21121p17 | 42 | 1423 | 1424 | 1425 |
| v4chr6a-24484m21 | 42 | 1426 | 1427 | 1428 |
| v4chr6a-25193p5 | 42 | 1429 | 1430 | 1431 |
| v4chr6a-29191m45 | 42 | 1432 | 1433 | 1434 |
| v4chr6a-33318p2 | 42 | 1435 | 1436 | 1437 |
| v4chr6a-3406p11 | 42 | 1438 | 1439 | 1440 |
| v4chr6a-36501p13 | 42 | 1441 | 1442 | 1443 |
| v4chr6a-4194m4 | 42 | 1444 | 1445 | 1446 |
| v4chr6a-7588m11 | 42 | 1447 | 1448 | 1449 |
| v4chr6b-11724m12 | 42 | 1450 | 1451 | 1452 |
| v4chr6b-13729p25 | 42 | 1453 | 1454 | 1455 |
| v4chr6b-14338m16 | 42 | 1456 | 1457 | 1458 |
| v4chr6b-15954p6 | 42 | 1459 | 1460 | 1461 |
| v4chr6b-1892m10 | 42 | 1462 | 1463 | 1464 |
| v4chr6b-1924m7 | 42 | 1465 | 1466 | 1467 |
| v4chr6b-5322m18 | 42 | 1468 | 1469 | 1470 |
| v4chr6b-9661p2 | 42 | 1471 | 1472 | 1473 |
| v4chr7-11210p10 | 42 | 1474 | 1475 | 1476 |
| v4chr7-12177m19 | 42 | 1477 | 1478 | 1479 |
| v4chr7-12561m9 | 42 | 1480 | 1481 | 1482 |
| v4chr7-13728m10 | 42 | 1483 | 1484 | 1485 |
| v4chr7-18717p16 | 42 | 1486 | 1487 | 1488 |
| v4chr7-18773p8 | 42 | 1489 | 1490 | 1491 |
| v4chr7-19900p3 | 42 | 1492 | 1493 | 1494 |
| v4chr7-20048m20 | 42 | 1495 | 1496 | 1497 |
| v4chr7-23846p8 | 42 | 1498 | 1499 | 1500 |
| v4chr7-3037p35 | 42 | 1501 | 1502 | 1503 |
| v4chr7-38382m3 | 42 | 1504 | 1505 | 1506 |
| v4chr7-40004p7 | 42 | 1507 | 1508 | 1509 |
| v4chr7-4500p9 | 42 | 1510 | 1511 | 1512 |
| v4chr7-4640p3 | 42 | 1513 | 1514 | 1515 |
| v4chr7-7946p9 | 42 | 1516 | 1517 | 1518 |
| v4chr7-9934p9 | 42 | 1519 | 1520 | 1521 |
| v4chr1-34708p15 | 42 | 1522 | 1523 | 1524 |
| v4chr1-47727p6 | 42 | 1525 | 1526 | 1527 |
| v4chr2-42988p17 | 42 | 1528 | 1529 | 1530 |
| v4chr2-50815p13 | 42 | 1531 | 1532 | 1533 |
| v4chr4-11767p22 | 42 | 1534 | 1535 | 1536 |
| v4chr4-6404p10 | 42 | 1537 | 1538 | 1539 |
| v4chr4-8415m23 | 42 | 1540 | 1541 | 1542 |
| v4chr5-24084m16 | 42 | 1543 | 1544 | 1545 |
| v4chr5-35313p18 | 42 | 1546 | 1547 | 1548 |
| v4chr5-36767m3 | 42 | 1549 | 1550 | 1551 |
| v4chr5-40287p10 | 42 | 1552 | 1553 | 1554 |
| v4chr5-45193m107 | 42 | 1555 | 1556 | 1557 |
| v4chr6a-29780p7 | 42 | 1558 | 1559 | 1560 |
| v4chr6a-32800p25 | 42 | 1561 | 1562 | 1563 |
| v4chr6a-36704m3 | 42 | 1564 | 1565 | 1566 |
| v4chr7-10463p16 | 42 | 1567 | 1568 | 1569 |
| v4chr7-20489m10 | 42 | 1570 | 1571 | 1572 |
| v4chr7-2058m5 | 42 | 1573 | 1574 | 1575 |
| v4chr2-44551m28 | 42 | 1576 | 1577 | 1578 |
| v4chr3-23343p4 | 42 | 1579 | 1580 | 1581 |
| v4chr5-1565m74 | 42 | 1582 | 1583 | 1584 |
| v4chr5-1590p17 | 42 | 1585 | 1586 | 1587 |
| v4chr5-4533m24 | 42 | 1588 | 1589 | 1590 |
| v4chr6a-25112p10 | 42 | 1591 | 1592 | 1593 |
| v4chr5-16069m14 | 42 | 1594 | 1595 | 1596 |
| v4chr5-41468p11 | 42 | 1597 | 1598 | 1599 |
| v4chr3-45101p22 | 42 | 1600 | 1601 | 1602 |
| v4chr1-33956p8 | 42 | 1603 | 1604 | 1605 |
| v4chr1-5242p23 | 42 | 1606 | 1607 | 1608 |
| v4chr4-44284m18 | 42 | 1609 | 1610 | 1611 |
| v4chr6a-4933p11 | 42 | 1612 | 1613 | 1614 |
| v4chr6b-80p5 | 42 | 1615 | 1616 | 1617 |
| v4chr7-4858m11 | 42 | 1618 | 1619 | 1620 |
| v4chr1-12421p27 | 42 | 1621 | 1622 | 1623 |
| v4chr1-21583m3 | 42 | 1624 | 1625 | 1626 |
| v4chr1-48182m11 | 42 | 1627 | 1628 | 1629 |
| v4chr1-5201m31 | 42 | 1630 | 1631 | 1632 |
| v4chr2-21610m7 | 42 | 1633 | 1634 | 1635 |
| v4chr2-31604p11 | 42 | 1636 | 1637 | 1638 |
| v4chr2-56953p6 | 42 | 1639 | 1640 | 1641 |
| v4chr3-1296p6 | 42 | 1642 | 1643 | 1644 |
| v4chr3-17359p11 | 42 | 1645 | 1646 | 1647 |
| v4chr3-3108m5 | 42 | 1648 | 1649 | 1650 |
| v4chr4-39808p6 | 42 | 1651 | 1652 | 1653 |
| v4chr4-44404m8 | 42 | 1654 | 1655 | 1656 |
| v4chr5-24190m16 | 42 | 1657 | 1658 | 1659 |
| v4chr5-42223m8 | 42 | 1660 | 1661 | 1662 |
| v4chr5-44635m15 | 42 | 1663 | 1664 | 1665 |
| v4chr5-48140p4 | 42 | 1666 | 1667 | 1668 |
| v4chr5-48158m7 | 42 | 1669 | 1670 | 1671 |
| v4chr6a-35639m18 | 42 | 1672 | 1673 | 1674 |
| v4chr6b-11278m7 | 42 | 1675 | 1676 | 1677 |
| v4chr7-28201p11 | 42 | 1678 | 1679 | 1680 |
| v4chr7-4669m14 | 42 | 1681 | 1682 | 1683 |
| v4chr1-9455m22 | 42 | 1684 | 1685 | 1686 |
| v4chr2-24723p15 | 42 | 1687 | 1688 | 1689 |
| v4chr3-27549m11 | 42 | 1690 | 1691 | 1692 |
| v4chr6a-25733m8 | 42 | 1693 | 1694 | 1695 |
| v4chr7-19221p13 | 42 | 1696 | 1697 | 1698 |
| v4chr3-37011m26 | 42 | 1699 | 1700 | 1701 |
| v4chr1-18457m31 | 42 | 1702 | 1703 | 1704 |
| v4chr1-19055m12 | 42 | 1705 | 1706 | 1707 |
| v4chr1-29009p15 | 42 | 1708 | 1709 | 1710 |
| v4chr1-38449p14 | 42 | 1711 | 1712 | 1713 |
| v4chr1-46331p6 | 42 | 1714 | 1715 | 1716 |
| v4chr1-59594m13 | 42 | 1717 | 1718 | 1719 |
| v4chr1-658m16 | 42 | 1720 | 1721 | 1722 |
| v4chr2-21734m13 | 42 | 1723 | 1724 | 1725 |
| v4chr2-2258m25 | 42 | 1726 | 1727 | 1728 |
| v4chr2-24773p8 | 42 | 1729 | 1730 | 1731 |
| v4chr2-6771p8 | 42 | 1732 | 1733 | 1734 |
| v4chr3-17003m16 | 42 | 1735 | 1736 | 1737 |
| v4chr3-18562m12 | 42 | 1738 | 1739 | 1740 |
| v4chr3-4805m13 | 42 | 1741 | 1742 | 1743 |
| v4chr3-9869m27 | 42 | 1744 | 1745 | 1746 |
| v4chr4-43989m8 | 42 | 1747 | 1748 | 1749 |
| v4chr4-45276p10 | 42 | 1750 | 1751 | 1752 |
| v4chr5-14800p13 | 42 | 1753 | 1754 | 1755 |
| v4chr5-24714m23 | 42 | 1756 | 1757 | 1758 |
| v4chr5-25789m17 | 42 | 1759 | 1760 | 1761 |
| v4chr5-37073m29 | 42 | 1762 | 1763 | 1764 |
| v4chr5-4568p8 | 42 | 1765 | 1766 | 1767 |
| v4chr5-4725p14 | 42 | 1768 | 1769 | 1770 |
| v4chr6a-10825m34 | 42 | 1771 | 1772 | 1773 |
| v4chr6a-11286m11 | 42 | 1774 | 1775 | 1776 |
| v4chr6a-12808m6 | 42 | 1777 | 1778 | 1779 |
| v4chr6a-29823m11 | 42 | 1780 | 1781 | 1782 |
| v4chr6b-14053m7 | 42 | 1783 | 1784 | 1785 |
| v4chr6b-5006p14 | 42 | 1786 | 1787 | 1788 |
| v4chr7-10105m16 | 42 | 1789 | 1790 | 1791 |
| v4chr7-17391p20 | 42 | 1792 | 1793 | 1794 |
| v4chr7-31980m8 | 42 | 1795 | 1796 | 1797 |
| v4chr7-8623p9 | 42 | 1798 | 1799 | 1800 |
| v4chr1-41835p9 | 42 | 1801 | 1802 | 1803 |
| v4chr2-50235m7 | 42 | 1804 | 1805 | 1806 |
| v4chr3-1588p16 | 42 | 1807 | 1808 | 1809 |
| v4chr3-37956p10 | 42 | 1810 | 1811 | 1812 |
| v4chr3-40728p9 | 42 | 1813 | 1814 | 1815 |
| v4chr4-39930p22 | 42 | 1816 | 1817 | 1818 |
| v4chr4-14266m25 | 42 | 1819 | 1820 | 1821 |
| v4chr1-316p17 | 42 | 1822 | 1823 | 1824 |
| v4chr2-37590m16 | 42 | 1825 | 1826 | 1827 |
| v4chr2-38027p10 | 42 | 1828 | 1829 | 1830 |
| v4chr2-51472p8 | 42 | 1831 | 1832 | 1833 |
| v4chr3-37035m11 | 42 | 1834 | 1835 | 1836 |
| v4chr4-26738p26 | 42 | 1837 | 1838 | 1839 |
| v4chr5-12327m19 | 42 | 1840 | 1841 | 1842 |
| v4chr5-1726m17 | 42 | 1843 | 1844 | 1845 |
| v4chr6a-1787p8 | 42 | 1846 | 1847 | 1848 |
| v4chr6a-24618m20 | 42 | 1849 | 1850 | 1851 |
| v4chr1-12499p14 | 42 | 1852 | 1853 | 1854 |
| v4chr1-28087p7 | 42 | 1855 | 1856 | 1857 |
| v4chr3-27671p10 | 42 | 1858 | 1859 | 1860 |
| v4chr4-39759p34 | 42 | 1861 | 1862 | 1863 |
| v4chr2-41104m9 | 42 | 1864 | 1865 | 1866 |
| v4chr7-23932p10 | 42 | 1867 | 1868 | 1869 |
| v4chr2-11600m10 | 42 | 1870 | 1871 | 1872 |
| v4chr2-32506m16 | 42 | 1873 | 1874 | 1875 |
| v4chr2-3338m10 | 42 | 1876 | 1877 | 1878 |
| v4chr2-34179m10 | 42 | 1879 | 1880 | 1881 |
| v4chr2-49538m26 | 42 | 1882 | 1883 | 1884 |
| v4chr6a-2135m6 | 42 | 1885 | 1886 | 1887 |
| v4chr1-35010m18 | 42 | 1888 | 1889 | 1890 |
| v4chr2-22667m34 | 42 | 1891 | 1892 | 1893 |
| v4chr2-60923m13 | 42 | 1894 | 1895 | 1896 |
| v4chr2-73549m17 | 42 | 1897 | 1898 | 1899 |
| v4chr3-21803m18 | 42 | 1900 | 1901 | 1902 |
| v4chr3-34414m31 | 42 | 1903 | 1904 | 1905 |
| v4chr3-45226p22 | 42 | 1906 | 1907 | 1908 |
| v4chr4-35696p12 | 42 | 1909 | 1910 | 1911 |
| v4chr5-1788m19 | 42 | 1912 | 1913 | 1914 |
| v4chr5-34086p20 | 42 | 1915 | 1916 | 1917 |
| v4chr5-35052p22 | 42 | 1918 | 1919 | 1920 |
| v4chr6a-12403p16 | 42 | 1921 | 1922 | 1923 |
| v4chr6a-20285m15 | 42 | 1924 | 1925 | 1926 |
| v4chr6a-2201p21 | 42 | 1927 | 1928 | 1929 |
| v4chr6a-33945p20 | 42 | 1930 | 1931 | 1932 |
| v4chr6b-2954m24 | 42 | 1933 | 1934 | 1935 |
| v4chr3-15966m8 | 42 | 1936 | 1937 | 1938 |
| v4chr4-49610p4 | 42 | 1939 | 1940 | 1941 |
| v4chr5-24567p17 | 42 | 1942 | 1943 | 1944 |
| v4chr2-22104m10 | 42 | 1945 | 1946 | 1947 |
| v4chr3-17131p5 | 42 | 1948 | 1949 | 1950 |
| v4chr2-65241p17 | 42 | 1951 | 1952 | 1953 |
| v4chr2-40183p30 | 42 | 1954 | 1955 | 1956 |
| v4chr1-58152p4 | 42 | 1957 | 1958 | 1959 |
| v4chr4-4363p19 | 42 | 1960 | 1961 | 1962 |
| v4chr4-18447p12 | 42 | 1963 | 1964 | 1965 |
| v4chr6b-4909m2 | 42 | 1966 | 1967 | 1968 |
| v4chr4-24094m10 | 42 | 1969 | 1970 | 1971 |
| v4chr2-34513p7 | 42 | 1972 | 1973 | 1974 |
| v4chr3-45077p8 | 42 | 1975 | 1976 | 1977 |
| v4chr6b-13786m3 | 42 | 1978 | 1979 | 1980 |
| v4chr5-1870m5 | 42 | 1981 | 1982 | 1983 |
| v4chr2-3364p7 | 42 | 1984 | 1985 | 1986 |
| v4chr6a-29671p4 | 42 | 1987 | 1988 | 1989 |
| v4chr4-5419m8 | 42 | 1990 | 1991 | 1992 |
| v4chr1-32074p19 | 42 | 1993 | 1994 | 1995 |
| v4s91-10m9 | 42 | 1996 | 1997 | 1998 |
| v4chr1-58177m15 | 42 | 1999 | 2000 | 2001 |
| v4chr2-54902m2 | 42 | 2002 | 2003 | 2004 |
| v4chr4-40293m7 | 42 | 2005 | 2006 | 2007 |
| v4chr5-1482m29 | 42 | 2008 | 2009 | 2010 |
| v4chr1-34411m30 | 42 | 2011 | 2012 | 2013 |
| v4chr5-7933m6 | 42 | 2014 | 2015 | 2016 |
| v4chr3-53351m4 | 42 | 2017 | 2018 | 2019 |
| v4chr3-4513p16 | 42 | 2020 | 2021 | 2022 |
| v4chr4-353m10 | 42 | 2023 | 2024 | 2025 |
| v4chr2-23470m5 | 42 | 2026 | 2027 | 2028 |
| v4chr7-36264p4 | 42 | 2029 | 2030 | 2031 |
| v4chr6b-13344p3 | 42 | 2032 | 2033 | 2034 |
| v4chr6b-4826p8 | 42 | 2035 | 2036 | 2037 |
| v4chr4-45532p6 | 42 | 2038 | 2039 | 2040 |
| v4chr5-47920p8 | 42 | 2041 | 2042 | 2043 |
| v4chr4-30032p5 | 42 | 2044 | 2045 | 2046 |
| v4chr2-73825m7 | 42 | 2047 | 2048 | 2049 |
| v4chr7-25060p34 | 42 | 2050 | 2051 | 2052 |
| v4chr2-14765p12 | 42 | 2053 | 2054 | 2055 |
| v4chr5-44106m10 | 42 | 2056 | 2057 | 2058 |
| v4chr4-5077m5 | 42 | 2059 | 2060 | 2061 |
| v4chr7-15349p3 | 42 | 2062 | 2063 | 2064 |
| v4chr3-45365m8 | 42 | 2065 | 2066 | 2067 |
| v4chr3-53853m17 | 42 | 2068 | 2069 | 2070 |
| v4chr6b-4805m7 | 42 | 2071 | 2072 | 2073 |
| v4chr7-9542m3 | 42 | 2074 | 2075 | 2076 |
| v4chr6a-29899m2 | 42 | 2077 | 2078 | 2079 |
| v4chr4-37575m28 | 43 | 2080 | 2081 | 2082 |
| v4chr6a-35773p8 | 10, 39 | 2083 | 2084 | 2085 |
| v4chr7-40326p7 | 10, 39 | 2086 | 2087 | 2088 |
| v4chr2-25453m14 | 12, 13 | 2089 | 2090 | 2091 |
| v4chr5-8405p13 | 12, 13 | 2092 | 2093 | 2094 |
| v4chr6a-36882m13 | 12, 13 | 2095 | 2096 | 2097 |
| v4chr4-5123p8 | 12, 13 | 2098 | 2099 | 2100 |
| v4chr6b-2202p8 | 12, 13 | 2101 | 2102 | 2103 |
| v4chr5-21401p27 | 17, 23, 31 | 2104 | 2105 | 2106 |
| v4chr1-48926p16 | 23, 29 | 2107 | 2108 | 2109 |
| v4chr5-19860m8 | 23, 29 | 2110 | 2111 | 2112 |
| v4chr5-42253p14 | 23, 29 | 2113 | 2114 | 2115 |
| v4chr7-40216p17 | 23, 29 | 2116 | 2117 | 2118 |
| v4chr3-2751m10 | 25, 26, 77 | 2119 | 2120 | 2121 |
| v4chr6a-36971m11 | 25, 40 | 2122 | 2123 | 2124 |
| v4chr4-544p8 | 25, 40 | 2125 | 2126 | 2127 |
| v4chr1-44026m16 | 3, 4, 7, 9 | 2128 | 2129 | 2130 |
| v4chr3-17994m25 | 3, 4, 7, 9 | 2131 | 2132 | 2133 |
| v4chr4-45310p16 | 3, 4, 7, 9 | 2134 | 2135 | 2136 |
| v4chr7-20937m20 | 3, 4, 7, 9 | 2137 | 2138 | 2139 |
| v4chr1-2290m26 | 3, 4, 7, 9, 16 | 2140 | 2141 | 2142 |
| v4chr3-8872m30 | 3, 4, 7, 9, 16 | 2143 | 2144 | 2145 |
| v4chr4-10676m29 | 3, 4, 7, 9, 16 | 2146 | 2147 | 2148 |
| v4chr4-8740m13 | 31, 42 | 2149 | 2150 | 2151 |
| v4chr6b-11432p12 | 34, 41 | 2152 | 2153 | 2154 |
| v4chr6a-31204m11 | 36, 37 | 2155 | 2156 | 2157 |
| v4chr3-36472m35 | 36, 37 | 2158 | 2159 | 2160 |
| v4chr5-26825p11 | 36, 37 | 2161 | 2162 | 2163 |
| v4chr2-11297m20 | 36, 38 | 2164 | 2165 | 2166 |
| v4chr2-67877p22 | 36, 38 | 2167 | 2168 | 2169 |
| v4chr2-39929m14 | 36, 38 | 2170 | 2171 | 2172 |
| v4chr5-4684m17 | 36, 39 | 2173 | 2174 | 2175 |
| v4chr3-17919m17 | 36, 39 | 2176 | 2177 | 2178 |
| v4chr2-30255p14 | 38, 39 | 2179 | 2180 | 2181 |
| v4chr1-58832m5 | 38, 39 | 2182 | 2183 | 2184 |
| v4chr2-32254p17 | 38, 39 | 2185 | 2186 | 2187 |
| v4chr3-13642p19 | 38, 39 | 2188 | 2189 | 2190 |
| v4chr1-59542m12 | 38, 39 | 2191 | 2192 | 2193 |
| v4chr5-1635p17 | 38, 39 | 2194 | 2195 | 2196 |
| v4chr6b-11019m11 | 38, 39 | 2197 | 2198 | 2199 |
| v4chr3-43052m16 | 5, 12, 13, 17, 23, 29 | 2200 | 2201 | 2202 |
| v4chr2-4364m12 | 5, 12, 13, 17, 23, 29 | 2203 | 2204 | 2205 |
| v4chr2-28581p16 | 5, 12, 13, 17, 23, 29, 31 | 2206 | 2207 | 2208 |
| v4chr5-1843m14 | 5, 12, 13, 17, 23, 29, 31 | 2209 | 2210 | 2211 |
| v4chr4-40955p12 | 5, 12, 13, 17, 23, 29, 39 | 2212 | 2213 | 2214 |
| v4chr2-14989m14 | 5, 17, 23 | 2215 | 2216 | 2217 |
| v4chr4-46773p15 | 5, 17, 23 | 2218 | 2219 | 2220 |
| v4chr4-11731p6 | 5, 17, 23 | 2221 | 2222 | 2223 |
| v4chr1-30263p17 | 7, 16, 23 | 2224 | 2225 | 2226 |
| v4chr6a-31316m27 | 8, 33 | 2227 | 2228 | 2229 |

TABLE 4

| | | Column 3 | Column 4 |
|---|---|---|---|
| Column 1 | Column 2 | SEQ ID NO | SEQ ID NO |
| V4 Gene Name | Activity # | (cDNA) | (protein) |
| v4chr2-57967p13 | 8 | 2230 | 2231 |
| v4chr4-30368p14 | 10 | 2232 | 2233 |
| v4chr6a-34248p21 | 10 | 2234 | 2235 |
| v4chr6a-6531m12 | 10 | 2236 | 2237 |
| v4chr3-35489p10 | 10 | 2238 | 2239 |
| v4chr2-75315p28 | 18 | 2240 | 2241 |
| v4chr5-1284p14 | 18 | 2242 | 2243 |
| v4chr5-35150p16 | 23 | 2244 | 2245 |
| v4chr4-10792p9 | 31 | 2246 | 2247 |
| v4chr5-22247p11 | 31 | 2248 | 2249 |
| v4chr4-8381m11 | 32 | 2250 | 2251 |
| v4chr2-102m8 | 32 | 2252 | 2253 |
| v4chr3-29604p12 | 32 | 2254 | 2255 |
| v4chr3-29950p24 | 32 | 2256 | 2257 |
| v4chr5-33742m9 | 32 | 2258 | 2259 |
| v4chr1-57128m5 | 35 | 2260 | 2261 |
| v4chr2-29475m5 | 35 | 2262 | 2263 |
| v4chr6a-21699m3 | 35 | 2264 | 2265 |
| v4chr6a-7011p4 | 35 | 2266 | 2267 |
| v4chr1-10342m10 | 35 | 2268 | 2269 |
| v4chr1-24352m9 | 35 | 2270 | 2271 |
| v4chr2-35788p7 | 35 | 2272 | 2273 |
| v4chr2-49232p1 | 35 | 2274 | 2275 |
| v4chr2-56739m14 | 35 | 2276 | 2277 |
| v4chr2-6238p30 | 35 | 2278 | 2279 |
| v4chr2-67374p5 | 35 | 2280 | 2281 |
| v4chr2-67381p5 | 35 | 2282 | 2283 |
| v4chr3-10827p39 | 35 | 2284 | 2285 |
| v4chr3-20418p15 | 35 | 2286 | 2287 |
| v4chr3-32214p23 | 35 | 2288 | 2289 |
| v4chr3-5272m30 | 35 | 2290 | 2291 |
| v4chr4-13901m27 | 35 | 2292 | 2293 |
| v4chr5-28107m2 | 35 | 2294 | 2295 |
| v4chr5-30039m3 | 35 | 2296 | 2297 |
| v4chr5-47293p25 | 35 | 2298 | 2299 |
| v4chr6a-20392p1 | 35 | 2300 | 2301 |
| v4chr6a-26707p16 | 35 | 2302 | 2303 |
| v4chr6a-28312m10 | 35 | 2304 | 2305 |
| v4chr6b-13516p5 | 35 | 2306 | 2307 |
| v4chr6b-6295m17 | 35 | 2308 | 2309 |
| v4chr2-51928m3 | 35 | 2310 | 2311 |
| v4chr6a-9639m4 | 35 | 2312 | 2313 |
| v4chr2-59513m23 | 35 | 2314 | 2315 |
| v4chr1-44319m12 | 35 | 2316 | 2317 |
| v4chr7-29969m11 | 15 | 2318 | 2319 |
| v4chr7-5968m3 | 35 | 2320 | 2321 |
| v4chr1-1016p9 | 36 | 2322 | 2323 |
| v4chr1-42021p10 | 36 | 2324 | 2325 |
| v4chr2-16764m2 | 36 | 2326 | 2327 |
| v4chr5-6468p14 | 36 | 2328 | 2329 |
| v4chr6b-11006m26 | 36 | 2330 | 2331 |
| v4chr6a-36811m20 | 36 | 2332 | 2333 |
| v4chr7-7858p22 | 36 | 2334 | 2335 |
| v4chr3-27759p48 | 36 | 2336 | 2337 |
| v4chr1-20263p19 | 36 | 2338 | 2339 |
| v4chr3-15735p1 | 36 | 2340 | 2341 |
| v4chr7-22160p18 | 36 | 2342 | 2343 |
| v4chr1-58242p77 | 38 | 2344 | 2345 |
| v4chr1-11216p13 | 38 | 2346 | 2347 |
| v4chr2-13006m13 | 38 | 2348 | 2349 |
| v4chr2-13195p9 | 38 | 2350 | 2351 |
| v4chr2-15305m9 | 38 | 2352 | 2353 |
| v4chr2-65759m8 | 38 | 2354 | 2355 |
| v4chr2-7538p12 | 38 | 2356 | 2357 |
| v4chr3-14746m19 | 38 | 2358 | 2359 |
| v4chr3-34344m14 | 38 | 2360 | 2361 |
| v4chr3-38833m11 | 38 | 2362 | 2363 |
| v4chr4-11720m13 | 38 | 2364 | 2365 |
| v4chr4-233p34 | 38 | 2366 | 2367 |
| v4chr5-15654p12 | 38 | 2368 | 2369 |
| v4chr5-22765m17 | 38 | 2370 | 2371 |
| v4chr5-48100m10 | 38 | 2372 | 2373 |
| v4chr5-48229p43 | 38 | 2374 | 2375 |
| v4chr5-7373p14 | 38 | 2376 | 2377 |
| v4chr5-7536p13 | 38 | 2378 | 2379 |
| v4chr6a-24583m8 | 38 | 2380 | 2381 |
| v4chr6a-36579p14 | 38 | 2382 | 2383 |
| v4s92-1p7 | 38 | 2384 | 2385 |
| v4chr1-61193p17 | 38 | 2386 | 2387 |
| v4chr2-43661p17 | 38 | 2388 | 2389 |
| v4chr5-27033p17 | 38 | 2390 | 2391 |
| v4chr3-48895p17 | 38 | 2392 | 2393 |
| v4chr5-27144m12 | 38 | 2394 | 2395 |
| v4chr6a-1903p12 | 38 | 2396 | 2397 |
| v4chr5-18969m2 | 38 | 2398 | 2399 |
| v4chr2-22980m18 | 38 | 2400 | 2401 |
| v4chr1-13935m8 | 38 | 2402 | 2403 |
| v4chr1-23745m10 | 38 | 2404 | 2405 |
| v4chr1-34341p25 | 38 | 2406 | 2407 |
| v4chr1-35963m9 | 38 | 2408 | 2409 |
| v4chr1-36783p3 | 38 | 2410 | 2411 |
| v4chr2-18405p8 | 38 | 2412 | 2413 |
| v4chr3-107p128 | 38 | 2414 | 2415 |
| v4chr3-13405p10 | 38 | 2416 | 2417 |
| v4chr3-2904p7 | 38 | 2418 | 2419 |
| v4chr3-2942m15 | 38 | 2420 | 2421 |
| v4chr3-33137m15 | 38 | 2422 | 2423 |
| v4chr3-43021p11 | 38 | 2424 | 2425 |
| v4chr3-47814m11 | 38 | 2426 | 2427 |
| v4chr5-10384p13 | 38 | 2428 | 2429 |
| v4chr5-37220p21 | 38 | 2430 | 2431 |
| v4chr6a-32269m13 | 38 | 2432 | 2433 |
| v4chr6a-33027m16 | 38 | 2434 | 2435 |
| v4chr6a-36237m12 | 38 | 2436 | 2437 |
| v4chr6a-36330p35 | 38 | 2438 | 2439 |
| v4chr7-12605p12 | 38 | 2440 | 2441 |
| v4chr7-17382m11 | 38 | 2442 | 2443 |
| v4chr7-17572p26 | 38 | 2444 | 2445 |
| v4chr5-42512m6 | 38 | 2446 | 2447 |
| v4chr2-64405m4 | 38 | 2448 | 2449 |
| v4chr3-33074m14 | 38 | 2450 | 2451 |
| v4chr2-6305p19 | 38 | 2452 | 2453 |
| v4chr2-64474m26 | 38 | 2454 | 2455 |
| v4chr5-42644p8 | 38 | 2456 | 2457 |
| v4chr7-27945m13 | 38 | 2458 | 2459 |
| v4chr1-42179p8 | 38 | 2460 | 2461 |
| v4chr4-16780m3 | 39 | 2462 | 2463 |
| v4chr4-1751m13 | 39 | 2464 | 2465 |
| v4chr6a-33270m2 | 39 | 2466 | 2467 |
| v4chr6a-35190m15 | 39 | 2468 | 2469 |
| v4chr1-30780p3 | 39 | 2470 | 2471 |
| v4chr6a-21075m13 | 39 | 2472 | 2473 |
| v4chr4-79p11 | 39 | 2474 | 2475 |
| v4chr3-4968p7 | 39 | 2476 | 2477 |
| v4chr1-19382p14 | 39 | 2478 | 2479 |
| v4chr1-31342m12 | 39 | 2480 | 2481 |
| v4chr2-39778m27 | 39 | 2482 | 2483 |
| v4chr2-57058m18 | 39 | 2484 | 2485 |
| v4chr3-22185m8 | 39 | 2486 | 2487 |
| v4chr3-23948p3 | 39 | 2488 | 2489 |
| v4chr3-24403p12 | 39 | 2490 | 2491 |
| v4chr4-30291p15 | 39 | 2492 | 2493 |
| v4chr5-37453p30 | 39 | 2494 | 2495 |
| v4chr6a-20109m18 | 39 | 2496 | 2497 |
| v4chr6a-31273m14 | 39 | 2498 | 2499 |
| v4chr7-24161m11 | 39 | 2500 | 2501 |
| v4chr7-28176p16 | 39 | 2502 | 2503 |
| v4chr2-60711m10 | 39 | 2504 | 2505 |
| v4chr6a-21577m11 | 39 | 2506 | 2507 |
| v4chr2-12898m12 | 39 | 2508 | 2509 |
| v4chr2-40989m18 | 39 | 2510 | 2511 |
| v4chr5-33986p11 | 39 | 2512 | 2513 |
| v4chr7-30073p18 | 39 | 2514 | 2515 |
| v4chr2-15289m19 | 39 | 2516 | 2517 |
| v4chr1-36927m18 | 42 | 2518 | 2519 |
| v4chr1-38528p24 | 42 | 2520 | 2521 |
| v4chr2-12190m22 | 42 | 2522 | 2523 |
| v4chr2-35123m22 | 42 | 2524 | 2525 |
| v4chr2-54492p19 | 42 | 2526 | 2527 |
| v4chr2-67346p20 | 42 | 2528 | 2529 |
| v4chr3-14610p39 | 42 | 2530 | 2531 |
| v4chr3-31901p20 | 42 | 2532 | 2533 |
| v4chr3-32857m23 | 42 | 2534 | 2535 |
| v4chr3-6011m14 | 42 | 2536 | 2537 |
| v4chr4-12617m50 | 42 | 2538 | 2539 |
| v4chr4-32764m22 | 42 | 2540 | 2541 |
| v4chr5-4658m11 | 42 | 2542 | 2543 |
| v4chr6a-20234p24 | 42 | 2544 | 2545 |
| v4chr6a-36249p67 | 42 | 2546 | 2547 |
| v4chr6b-15163p8 | 42 | 2548 | 2549 |
| v4chr7-10730m10 | 42 | 2550 | 2551 |
| v4chr7-35558p24 | 42 | 2552 | 2553 |
| v4chr7-671m18 | 42 | 2554 | 2555 |
| v4chr1-11153p5 | 42 | 2556 | 2557 |
| v4chr1-11835p4 | 42 | 2558 | 2559 |
| v4chr1-15949m10 | 42 | 2560 | 2561 |
| v4chr1-16699m32 | 42 | 2562 | 2563 |
| v4chr1-16918p5 | 42 | 2564 | 2565 |
| v4chr1-16961m17 | 42 | 2566 | 2567 |
| v4chr1-20746p2 | 42 | 2568 | 2569 |
| v4chr1-27385p6 | 42 | 2570 | 2571 |
| v4chr1-33548m7 | 42 | 2572 | 2573 |
| v4chr1-40336m16 | 42 | 2574 | 2575 |
| v4chr1-42493m15 | 42 | 2576 | 2577 |
| v4chr1-44691p22 | 42 | 2578 | 2579 |
| v4chr1-45822m5 | 42 | 2580 | 2581 |
| v4chr1-4789m6 | 42 | 2582 | 2583 |
| v4chr1-53321m12 | 42 | 2584 | 2585 |
| v4chr1-60843m17 | 42 | 2586 | 2587 |
| v4chr1-60918p8 | 42 | 2588 | 2589 |
| v4chr1-92p3 | 42 | 2590 | 2591 |
| v4chr2-13761m17 | 42 | 2592 | 2593 |
| v4chr2-19452m21 | 42 | 2594 | 2595 |
| v4chr2-27543p31 | 42 | 2596 | 2597 |
| v4chr2-30583p14 | 42 | 2598 | 2599 |
| v4chr2-32330m15 | 42 | 2600 | 2601 |
| v4chr2-38952m22 | 42 | 2602 | 2603 |
| v4chr2-4568m14 | 42 | 2604 | 2605 |
| v4chr2-52229m15 | 42 | 2606 | 2607 |
| v4chr2-53474p31 | 42 | 2608 | 2609 |
| v4chr2-53765m21 | 42 | 2610 | 2611 |
| v4chr2-54700m23 | 42 | 2612 | 2613 |
| v4chr2-55513m27 | 42 | 2614 | 2615 |
| v4chr2-5611p7 | 42 | 2616 | 2617 |
| v4chr2-56555m10 | 42 | 2618 | 2619 |
| v4chr2-57916m11 | 42 | 2620 | 2621 |
| v4chr2-62884p2 | 42 | 2622 | 2623 |
| v4chr2-7523p12 | 42 | 2624 | 2625 |
| v4chr2-76633p12 | 42 | 2626 | 2627 |
| v4chr3-10084p14 | 42 | 2628 | 2629 |
| v4chr3-11413m21 | 42 | 2630 | 2631 |
| v4chr3-18181p23 | 42 | 2632 | 2633 |
| v4chr3-19556p21 | 42 | 2634 | 2635 |
| v4chr3-19836p12 | 42 | 2636 | 2637 |
| v4chr3-29571p15 | 42 | 2638 | 2639 |
| v4chr3-29625m2 | 42 | 2640 | 2641 |
| v4chr3-33354m8 | 42 | 2642 | 2643 |
| v4chr3-46992m18 | 42 | 2644 | 2645 |
| v4chr3-53399m10 | 42 | 2646 | 2647 |
| v4chr3-54020m5 | 42 | 2648 | 2649 |
| v4chr4-10877p2 | 42 | 2650 | 2651 |
| v4chr4-10886p2 | 42 | 2652 | 2653 |
| v4chr4-23034m5 | 42 | 2654 | 2655 |
| v4chr4-29571m3 | 42 | 2656 | 2657 |
| v4chr4-31475p8 | 42 | 2658 | 2659 |
| v4chr4-33687p20 | 42 | 2660 | 2661 |
| v4chr4-34420p9 | 42 | 2662 | 2663 |
| v4chr4-35829p3 | 42 | 2664 | 2665 |
| v4chr4-37061p11 | 42 | 2666 | 2667 |
| v4chr4-38086m11 | 42 | 2668 | 2669 |
| v4chr4-38290p9 | 42 | 2670 | 2671 |
| v4chr4-39m3 | 42 | 2672 | 2673 |
| v4chr4-44118m12 | 42 | 2674 | 2675 |
| v4chr4-44126p15 | 42 | 2676 | 2677 |
| v4chr4-45943p16 | 42 | 2678 | 2679 |
| v4chr4-46301m15 | 42 | 2680 | 2681 |
| v4chr4-48m1 | 42 | 2682 | 2683 |
| v4chr4-4994m16 | 42 | 2684 | 2685 |
| v4chr4-5080p2 | 42 | 2686 | 2687 |
| v4chr4-59p12 | 42 | 2688 | 2689 |
| v4chr5-14015m13 | 42 | 2690 | 2691 |
| v4chr5-17807m9 | 42 | 2692 | 2693 |
| v4chr5-21212m9 | 42 | 2694 | 2695 |
| v4chr5-24104m9 | 42 | 2696 | 2697 |
| v4chr5-29215p9 | 42 | 2698 | 2699 |
| v4chr5-30797p15 | 42 | 2700 | 2701 |
| v4chr5-39582p2 | 42 | 2702 | 2703 |
| v4chr5-40543m23 | 42 | 2704 | 2705 |
| v4chr5-4055m3 | 42 | 2706 | 2707 |
| v4chr5-41892m21 | 42 | 2708 | 2709 |
| v4chr5-41950m21 | 42 | 2710 | 2711 |
| v4chr5-41987p18 | 42 | 2712 | 2713 |
| v4chr5-42324m15 | 42 | 2714 | 2715 |
| v4chr5-47079m20 | 42 | 2716 | 2717 |
| v4chr5-48077m19 | 42 | 2718 | 2719 |
| v4chr5-7142p15 | 42 | 2720 | 2721 |
| v4chr5-7401p13 | 42 | 2722 | 2723 |
| v4chr6a-1007m23 | 42 | 2724 | 2725 |
| v4chr6a-17837m9 | 42 | 2726 | 2727 |
| v4chr6a-18445m21 | 42 | 2728 | 2729 |
| v4chr6a-2028p20 | 42 | 2730 | 2731 |
| v4chr6a-24937p14 | 42 | 2732 | 2733 |
| v4chr6a-2523m28 | 42 | 2734 | 2735 |
| v4chr6a-31250p5 | 42 | 2736 | 2737 |
| v4chr6a-32548m21 | 42 | 2738 | 2739 |
| v4chr6a-8301m21 | 42 | 2740 | 2741 |
| v4chr6b-9990p9 | 42 | 2742 | 2743 |
| v4chr7-16646p21 | 42 | 2744 | 2745 |
| v4chr7-16874m23 | 42 | 2746 | 2747 |
| v4chr7-19621m3 | 42 | 2748 | 2749 |
| v4chr7-22059m12 | 42 | 2750 | 2751 |
| v4chr7-23684m5 | 42 | 2752 | 2753 |
| v4chr7-27097p4 | 42 | 2754 | 2755 |
| v4chr7-4422m13 | 42 | 2756 | 2757 |
| v4chr7-5069p4 | 42 | 2758 | 2759 |
| v4chr7-5943p2 | 42 | 2760 | 2761 |
| v4chr7-7783p6 | 42 | 2762 | 2763 |
| v4chr7-9400p7 | 42 | 2764 | 2765 |
| v4chr7-9639p29 | 42 | 2766 | 2767 |
| v4s93-8m8 | 42 | 2768 | 2769 |
| v4chr6b-11029m4 | 42 | 2770 | 2771 |
| v4chr1-1342p12 | 42 | 2772 | 2773 |
| v4chr1-12623p16 | 42 | 2774 | 2775 |
| v4chr1-1599p15 | 42 | 2776 | 2777 |
| v4chr1-31206p15 | 42 | 2778 | 2779 |
| v4chr1-35179m35 | 42 | 2780 | 2781 |
| v4chr1-48321p14 | 42 | 2782 | 2783 |
| v4chr2-1421p3 | 42 | 2784 | 2785 |
| v4chr2-37074m14 | 42 | 2786 | 2787 |
| v4chr2-39539m6 | 42 | 2788 | 2789 |
| v4chr2-5362m7 | 42 | 2790 | 2791 |
| v4chr2-5452m11 | 42 | 2792 | 2793 |
| v4chr3-13375p20 | 42 | 2794 | 2795 |
| v4chr3-16302p12 | 42 | 2796 | 2797 |
| v4chr3-17575m14 | 42 | 2798 | 2799 |
| v4chr3-30304m10 | 42 | 2800 | 2801 |
| v4chr3-47790p11 | 42 | 2802 | 2803 |
| v4chr4-1372m16 | 42 | 2804 | 2805 |
| v4chr4-24579m13 | 42 | 2806 | 2807 |
| v4chr4-29387m10 | 42 | 2808 | 2809 |
| v4chr4-42943p10 | 42 | 2810 | 2811 |
| v4chr4-45508m10 | 42 | 2812 | 2813 |
| v4chr4-47359m11 | 42 | 2814 | 2815 |
| v4chr4-5521m10 | 42 | 2816 | 2817 |
| v4chr5-27169p7 | 42 | 2818 | 2819 |
| v4chr5-42553p23 | 42 | 2820 | 2821 |
| v4chr5-47036m14 | 42 | 2822 | 2823 |
| v4chr6a-15505p16 | 42 | 2824 | 2825 |
| v4chr6a-21039p16 | 42 | 2826 | 2827 |
| v4chr6a-25179m21 | 42 | 2828 | 2829 |
| v4chr6a-25554p8 | 42 | 2830 | 2831 |
| v4chr6a-2702p25 | 42 | 2832 | 2833 |
| v4chr6a-29857m20 | 42 | 2834 | 2835 |
| v4chr6a-31214m12 | 42 | 2836 | 2837 |
| v4chr6a-32888m5 | 42 | 2838 | 2839 |
| v4chr6a-4208p19 | 42 | 2840 | 2841 |
| v4chr6b-15657p13 | 42 | 2842 | 2843 |
| v4chr7-29800m7 | 42 | 2844 | 2845 |
| v4chr7-40370m16 | 42 | 2846 | 2847 |
| v4chr2-7221m34 | 42 | 2848 | 2849 |
| v4chr3-8110m9 | 42 | 2850 | 2851 |
| v4chr6a-33136p14 | 42 | 2852 | 2853 |
| v4chr1-7227m3 | 42 | 2854 | 2855 |
| v4chr1-41494m68 | 42 | 2856 | 2857 |
| v4chr2-38415p3 | 42 | 2858 | 2859 |
| v4chr3-17199p22 | 42 | 2860 | 2861 |
| v4chr4-20855p3 | 42 | 2862 | 2863 |
| v4chr4-49649p17 | 42 | 2864 | 2865 |
| v4chr6a-24964p4 | 42 | 2866 | 2867 |
| v4chr7-16614p25 | 42 | 2868 | 2869 |
| v4chr7-20943p7 | 42 | 2870 | 2871 |
| v4chr1-14975m4 | 42 | 2872 | 2873 |
| v4chr1-18229m10 | 42 | 2874 | 2875 |
| v4chr1-29730m21 | 42 | 2876 | 2877 |
| v4chr1-30186p3 | 42 | 2878 | 2879 |
| v4chr1-39789p11 | 42 | 2880 | 2881 |
| v4chr1-46006p10 | 42 | 2882 | 2883 |
| v4chr1-58226m21 | 42 | 2884 | 2885 |
| v4chr1-59485m17 | 42 | 2886 | 2887 |
| v4chr1-7573m14 | 42 | 2888 | 2889 |
| v4chr1-9460p19 | 42 | 2890 | 2891 |
| v4chr2-25244p14 | 42 | 2892 | 2893 |
| v4chr2-37328p15 | 42 | 2894 | 2895 |
| v4chr2-43062p8 | 42 | 2896 | 2897 |
| v4chr2-44880p5 | 42 | 2898 | 2899 |
| v4chr2-52279p2 | 42 | 2900 | 2901 |
| v4chr2-56459m8 | 42 | 2902 | 2903 |
| v4chr2-67387p8 | 42 | 2904 | 2905 |
| v4chr3-37717m2 | 42 | 2906 | 2907 |
| v4chr3-37835p11 | 42 | 2908 | 2909 |
| v4chr3-41013m7 | 42 | 2910 | 2911 |
| v4chr3-49242m70 | 42 | 2912 | 2913 |
| v4chr3-54209m3 | 42 | 2914 | 2915 |
| v4chr4-11673p26 | 42 | 2916 | 2917 |
| v4chr4-32181p22 | 42 | 2918 | 2919 |
| v4chr4-32209p12 | 42 | 2920 | 2921 |
| v4chr4-37747m6 | 42 | 2922 | 2923 |
| v4chr4-46893m12 | 42 | 2924 | 2925 |
| v4chr4-741p25 | 42 | 2926 | 2927 |
| v4chr5-1574m4 | 42 | 2928 | 2929 |
| v4chr5-21955m8 | 42 | 2930 | 2931 |
| v4chr5-33888p11 | 42 | 2932 | 2933 |
| v4chr5-43589p8 | 42 | 2934 | 2935 |
| v4chr5-5270p15 | 42 | 2936 | 2937 |
| v4chr6a-2445m74 | 42 | 2938 | 2939 |
| v4chr6a-33493p4 | 42 | 2940 | 2941 |
| v4chr6a-35131p8 | 42 | 2942 | 2943 |
| v4chr6b-13007p73 | 42 | 2944 | 2945 |
| v4chr6b-13196p16 | 42 | 2946 | 2947 |
| v4chr6b-5062p9 | 42 | 2948 | 2949 |
| v4chr6b-6804m19 | 42 | 2950 | 2951 |
| v4chr7-33594p4 | 42 | 2952 | 2953 |
| v4chr7-9714m9 | 42 | 2954 | 2955 |
| v4chr1-28039m8 | 42 | 2956 | 2957 |
| v4chr2-42568p10 | 42 | 2958 | 2959 |
| v4chr3-31895m18 | 42 | 2960 | 2961 |
| v4chr5-20061p16 | 42 | 2962 | 2963 |
| v4chr5-41565p18 | 42 | 2964 | 2965 |
| v4chr5-48181m13 | 42 | 2966 | 2967 |
| v4chr5-6553p15 | 42 | 2968 | 2969 |
| v4chr7-7172m8 | 42 | 2970 | 2971 |
| v4s130-0p13 | 42 | 2972 | 2973 |
| v4chr2-28034p12 | 42 | 2974 | 2975 |
| v4chr1-2319p6 | 42 | 2976 | 2977 |
| v4chr1-32261m25 | 42 | 2978 | 2979 |
| v4chr1-34595p2 | 42 | 2980 | 2981 |
| v4chr2-44877m11 | 42 | 2982 | 2983 |
| v4chr2-62070m10 | 42 | 2984 | 2985 |
| v4chr3-16763m9 | 42 | 2986 | 2987 |
| v4chr3-21425m10 | 42 | 2988 | 2989 |
| v4chr4-37949p14 | 42 | 2990 | 2991 |
| v4chr5-36448m5 | 42 | 2992 | 2993 |
| v4chr6a-17641m6 | 42 | 2994 | 2995 |
| v4chr6b-15968m6 | 42 | 2996 | 2997 |
| v4chr6a-21380m48 | 42 | 2998 | 2999 |
| v4chr1-10457p32 | 42 | 3000 | 3001 |
| v4chr1-10807p3 | 42 | 3002 | 3003 |
| v4chr1-10977m4 | 42 | 3004 | 3005 |
| v4chr1-1137m14 | 42 | 3006 | 3007 |
| v4chr1-115p76 | 42 | 3008 | 3009 |
| v4chr1-13178p15 | 42 | 3010 | 3011 |
| v4chr1-13540m57 | 42 | 3012 | 3013 |
| v4chr1-13716m21 | 42 | 3014 | 3015 |
| v4chr1-1420p3 | 42 | 3016 | 3017 |
| v4chr1-14403p4 | 42 | 3018 | 3019 |
| v4chr1-14704m4 | 42 | 3020 | 3021 |
| v4chr1-15025p41 | 42 | 3022 | 3023 |
| v4chr1-16031p4 | 42 | 3024 | 3025 |
| v4chr1-16390p8 | 42 | 3026 | 3027 |
| v4chr1-16579p17 | 42 | 3028 | 3029 |
| v4chr1-1803p6 | 42 | 3030 | 3031 |
| v4chr1-18071m20 | 42 | 3032 | 3033 |
| v4chr1-18485p50 | 42 | 3034 | 3035 |
| v4chr1-18818m14 | 42 | 3036 | 3037 |
| v4chr1-19076m8 | 42 | 3038 | 3039 |
| v4chr1-20140m6 | 42 | 3040 | 3041 |
| v4chr1-20154m6 | 42 | 3042 | 3043 |
| v4chr1-21117p25 | 42 | 3044 | 3045 |
| v4chr1-21183p4 | 42 | 3046 | 3047 |
| v4chr1-21466p8 | 42 | 3048 | 3049 |
| v4chr1-21521m8 | 42 | 3050 | 3051 |
| v4chr1-21704m13 | 42 | 3052 | 3053 |
| v4chr1-21714p16 | 42 | 3054 | 3055 |
| v4chr1-22304m3 | 42 | 3056 | 3057 |
| v4chr1-23950p61 | 42 | 3058 | 3059 |
| v4chr1-24020p6 | 42 | 3060 | 3061 |
| v4chr1-24145p10 | 42 | 3062 | 3063 |
| v4chr1-24984m46 | 42 | 3064 | 3065 |
| v4chr1-25609p4 | 42 | 3066 | 3067 |
| v4chr1-26155p15 | 42 | 3068 | 3069 |
| v4chr1-27175p10 | 42 | 3070 | 3071 |
| v4chr1-27186p4 | 42 | 3072 | 3073 |
| v4chr1-28117m15 | 42 | 3074 | 3075 |
| v4chr1-28331m9 | 42 | 3076 | 3077 |
| v4chr1-28483m9 | 42 | 3078 | 3079 |
| v4chr1-28516m24 | 42 | 3080 | 3081 |
| v4chr1-28558m23 | 42 | 3082 | 3083 |
| v4chr1-29139m20 | 42 | 3084 | 3085 |
| v4chr1-29250p11 | 42 | 3086 | 3087 |
| v4chr1-29352p10 | 42 | 3088 | 3089 |
| v4chr1-30081m6 | 42 | 3090 | 3091 |
| v4chr1-30606m7 | 42 | 3092 | 3093 |
| v4chr1-30977p16 | 42 | 3094 | 3095 |
| v4chr1-32218p13 | 42 | 3096 | 3097 |
| v4chr1-32271p6 | 42 | 3098 | 3099 |
| v4chr1-33102p20 | 42 | 3100 | 3101 |
| v4chr1-33204p35 | 42 | 3102 | 3103 |
| v4chr1-33938m12 | 42 | 3104 | 3105 |
| v4chr1-34083m18 | 42 | 3106 | 3107 |
| v4chr1-34251m14 | 42 | 3108 | 3109 |
| v4chr1-34272m9 | 42 | 3110 | 3111 |
| v4chr1-34290m13 | 42 | 3112 | 3113 |
| v4chr1-34770m14 | 42 | 3114 | 3115 |
| v4chr1-34778p6 | 42 | 3116 | 3117 |
| v4chr1-35116p15 | 42 | 3118 | 3119 |
| v4chr1-35357m18 | 42 | 3120 | 3121 |
| v4chr1-35632m24 | 42 | 3122 | 3123 |
| v4chr1-35735m12 | 42 | 3124 | 3125 |
| v4chr1-36217m19 | 42 | 3126 | 3127 |
| v4chr1-36240p9 | 42 | 3128 | 3129 |
| v4chr1-36262p21 | 42 | 3130 | 3131 |
| v4chr1-36396m30 | 42 | 3132 | 3133 |
| v4chr1-36907m7 | 42 | 3134 | 3135 |
| v4chr1-37291p21 | 42 | 3136 | 3137 |
| v4chr1-38271m59 | 42 | 3138 | 3139 |
| v4chr1-38352m10 | 42 | 3140 | 3141 |
| v4chr1-38599p34 | 42 | 3142 | 3143 |
| v4chr1-38787m13 | 42 | 3144 | 3145 |
| v4chr1-39728p10 | 42 | 3146 | 3147 |
| v4chr1-40466m27 | 42 | 3148 | 3149 |
| v4chr1-40917p10 | 42 | 3150 | 3151 |
| v4chr1-4155p78 | 42 | 3152 | 3153 |
| v4chr1-41796m7 | 42 | 3154 | 3155 |
| v4chr1-42151m23 | 42 | 3156 | 3157 |
| v4chr1-43155m34 | 42 | 3158 | 3159 |
| v4chr1-43278p27 | 42 | 3160 | 3161 |
| v4chr1-43613p19 | 42 | 3162 | 3163 |
| v4chr1-43673p9 | 42 | 3164 | 3165 |
| v4chr1-43834p9 | 42 | 3166 | 3167 |
| v4chr1-44342m4 | 42 | 3168 | 3169 |
| v4chr1-44665m4 | 42 | 3170 | 3171 |
| v4chr1-45191p15 | 42 | 3172 | 3173 |
| v4chr1-45572p12 | 42 | 3174 | 3175 |
| v4chr1-46225p28 | 42 | 3176 | 3177 |
| v4chr1-46506m12 | 42 | 3178 | 3179 |
| v4chr1-46699p32 | 42 | 3180 | 3181 |
| v4chr1-46982p6 | 42 | 3182 | 3183 |
| v4chr1-47860m36 | 42 | 3184 | 3185 |
| v4chr1-47879p5 | 42 | 3186 | 3187 |
| v4chr1-48580m1 | 42 | 3188 | 3189 |
| v4chr1-51061p10 | 42 | 3190 | 3191 |
| v4chr1-51207m10 | 42 | 3192 | 3193 |
| v4chr1-51607m16 | 42 | 3194 | 3195 |
| v4chr1-52501m14 | 42 | 3196 | 3197 |
| v4chr1-5287m11 | 42 | 3198 | 3199 |
| v4chr1-54372m19 | 42 | 3200 | 3201 |
| v4chr1-55352p18 | 42 | 3202 | 3203 |
| v4chr1-55379m4 | 42 | 3204 | 3205 |
| v4chr1-57857p4 | 42 | 3206 | 3207 |
| v4chr1-58098p9 | 42 | 3208 | 3209 |
| v4chr1-58411p9 | 42 | 3210 | 3211 |
| v4chr1-60322m1 | 42 | 3212 | 3213 |
| v4chr1-60636p8 | 42 | 3214 | 3215 |
| v4chr1-60998p8 | 42 | 3216 | 3217 |
| v4chr1-61050m12 | 42 | 3218 | 3219 |
| v4chr1-6331p10 | 42 | 3220 | 3221 |
| v4chr1-6594m15 | 42 | 3222 | 3223 |
| v4chr1-8392p14 | 42 | 3224 | 3225 |
| v4chr2-1059m9 | 42 | 3226 | 3227 |
| v4chr2-11224p3 | 42 | 3228 | 3229 |
| v4chr2-11338p40 | 42 | 3230 | 3231 |
| v4chr2-11564m15 | 42 | 3232 | 3233 |
| v4chr2-11908m15 | 42 | 3234 | 3235 |
| v4chr2-12406m43 | 42 | 3236 | 3237 |
| v4chr2-12521p2 | 42 | 3238 | 3239 |
| v4chr2-13137m13 | 42 | 3240 | 3241 |
| v4chr2-13301m7 | 42 | 3242 | 3243 |
| v4chr2-13345p33 | 42 | 3244 | 3245 |
| v4chr2-13436m9 | 42 | 3246 | 3247 |
| v4chr2-13629m23 | 42 | 3248 | 3249 |
| v4chr2-14235m4 | 42 | 3250 | 3251 |
| v4chr2-14299p7 | 42 | 3252 | 3253 |
| v4chr2-14397m19 | 42 | 3254 | 3255 |
| v4chr2-14463m23 | 42 | 3256 | 3257 |
| v4chr2-14610p20 | 42 | 3258 | 3259 |
| v4chr2-14704p7 | 42 | 3260 | 3261 |
| v4chr2-14713p27 | 42 | 3262 | 3263 |
| v4chr2-14824p5 | 42 | 3264 | 3265 |
| v4chr2-16483p18 | 42 | 3266 | 3267 |
| v4chr2-16672p31 | 42 | 3268 | 3269 |
| v4chr2-16932p23 | 42 | 3270 | 3271 |
| v4chr2-17576m23 | 42 | 3272 | 3273 |
| v4chr2-17666m10 | 42 | 3274 | 3275 |
| v4chr2-18335p7 | 42 | 3276 | 3277 |
| v4chr2-18793p61 | 42 | 3278 | 3279 |
| v4chr2-19372m25 | 42 | 3280 | 3281 |
| v4chr2-19765p37 | 42 | 3282 | 3283 |
| v4chr2-2029m32 | 42 | 3284 | 3285 |
| v4chr2-20371p11 | 42 | 3286 | 3287 |
| v4chr2-20887m19 | 42 | 3288 | 3289 |
| v4chr2-20974m6 | 42 | 3290 | 3291 |
| v4chr2-2104p20 | 42 | 3292 | 3293 |
| v4chr2-21090m9 | 42 | 3294 | 3295 |
| v4chr2-22126m13 | 42 | 3296 | 3297 |
| v4chr2-22174m20 | 42 | 3298 | 3299 |
| v4chr2-22578m10 | 42 | 3300 | 3301 |
| v4chr2-23133m18 | 42 | 3302 | 3303 |
| v4chr2-23145p32 | 42 | 3304 | 3305 |
| v4chr2-23352m14 | 42 | 3306 | 3307 |
| v4chr2-23400m9 | 42 | 3308 | 3309 |
| v4chr2-23606p10 | 42 | 3310 | 3311 |
| v4chr2-23641m19 | 42 | 3312 | 3313 |
| v4chr2-24013m11 | 42 | 3314 | 3315 |
| v4chr2-24127p12 | 42 | 3316 | 3317 |
| v4chr2-24157m14 | 42 | 3318 | 3319 |
| v4chr2-24193m23 | 42 | 3320 | 3321 |
| v4chr2-24278m17 | 42 | 3322 | 3323 |
| v4chr2-24327m15 | 42 | 3324 | 3325 |
| v4chr2-24382p4 | 42 | 3326 | 3327 |
| v4chr2-25410p17 | 42 | 3328 | 3329 |
| v4chr2-25629p18 | 42 | 3330 | 3331 |
| v4chr2-25652p10 | 42 | 3332 | 3333 |
| v4chr2-27137p26 | 42 | 3334 | 3335 |
| v4chr2-27185m4 | 42 | 3336 | 3337 |
| v4chr2-27429m8 | 42 | 3338 | 3339 |
| v4chr2-28115m16 | 42 | 3340 | 3341 |
| v4chr2-28126p57 | 42 | 3342 | 3343 |
| v4chr2-28820m3 | 42 | 3344 | 3345 |
| v4chr2-29557p3 | 42 | 3346 | 3347 |
| v4chr2-30307m3 | 42 | 3348 | 3349 |
| v4chr2-310p13 | 42 | 3350 | 3351 |
| v4chr2-31207p16 | 42 | 3352 | 3353 |
| v4chr2-3121m10 | 42 | 3354 | 3355 |
| v4chr2-33023m2 | 42 | 3356 | 3357 |
| v4chr2-33036p10 | 42 | 3358 | 3359 |
| v4chr2-33227m16 | 42 | 3360 | 3361 |
| v4chr2-33234m3 | 42 | 3362 | 3363 |
| v4chr2-33286p24 | 42 | 3364 | 3365 |
| v4chr2-33439m16 | 42 | 3366 | 3367 |
| v4chr2-33754m11 | 42 | 3368 | 3369 |
| v4chr2-3400m23 | 42 | 3370 | 3371 |
| v4chr2-34222p22 | 42 | 3372 | 3373 |
| v4chr2-34288m13 | 42 | 3374 | 3375 |
| v4chr2-3447m15 | 42 | 3376 | 3377 |
| v4chr2-35076p9 | 42 | 3378 | 3379 |
| v4chr2-35253m8 | 42 | 3380 | 3381 |
| v4chr2-36549p16 | 42 | 3382 | 3383 |
| v4chr2-36989m29 | 42 | 3384 | 3385 |
| v4chr2-37212p17 | 42 | 3386 | 3387 |
| v4chr2-37796m9 | 42 | 3388 | 3389 |
| v4chr2-38282m9 | 42 | 3390 | 3391 |
| v4chr2-38312p19 | 42 | 3392 | 3393 |
| v4chr2-38585m6 | 42 | 3394 | 3395 |
| v4chr2-38667p7 | 42 | 3396 | 3397 |
| v4chr2-38754p5 | 42 | 3398 | 3399 |
| v4chr2-39211m22 | 42 | 3400 | 3401 |
| v4chr2-39304m25 | 42 | 3402 | 3403 |
| v4chr2-40684m8 | 42 | 3404 | 3405 |
| v4chr2-40793p16 | 42 | 3406 | 3407 |
| v4chr2-41392m10 | 42 | 3408 | 3409 |
| v4chr2-41432m15 | 42 | 3410 | 3411 |
| v4chr2-41926p13 | 42 | 3412 | 3413 |
| v4chr2-42468m20 | 42 | 3414 | 3415 |
| v4chr2-43602p2 | 42 | 3416 | 3417 |
| v4chr2-43621p7 | 42 | 3418 | 3419 |
| v4chr2-443m19 | 42 | 3420 | 3421 |
| v4chr2-44624p5 | 42 | 3422 | 3423 |
| v4chr2-44636p25 | 42 | 3424 | 3425 |
| v4chr2-44925p18 | 42 | 3426 | 3427 |
| v4chr2-46397p19 | 42 | 3428 | 3429 |
| v4chr2-4732p21 | 42 | 3430 | 3431 |
| v4chr2-47648p15 | 42 | 3432 | 3433 |
| v4chr2-48304m28 | 42 | 3434 | 3435 |
| v4chr2-48586m20 | 42 | 3436 | 3437 |
| v4chr2-488m8 | 42 | 3438 | 3439 |
| v4chr2-49839p10 | 42 | 3440 | 3441 |
| v4chr2-49981m17 | 42 | 3442 | 3443 |
| v4chr2-50031m18 | 42 | 3444 | 3445 |
| v4chr2-50308m37 | 42 | 3446 | 3447 |
| v4chr2-50392m11 | 42 | 3448 | 3449 |
| v4chr2-51125m9 | 42 | 3450 | 3451 |
| v4chr2-52108m6 | 42 | 3452 | 3453 |
| v4chr2-52347p26 | 42 | 3454 | 3455 |
| v4chr2-53120p3 | 42 | 3456 | 3457 |
| v4chr2-53216p22 | 42 | 3458 | 3459 |
| v4chr2-53320m37 | 42 | 3460 | 3461 |
| v4chr2-5332p16 | 42 | 3462 | 3463 |
| v4chr2-53427m9 | 42 | 3464 | 3465 |
| v4chr2-53620m3 | 42 | 3466 | 3467 |
| v4chr2-5634m9 | 42 | 3468 | 3469 |
| v4chr2-56362m1 | 42 | 3470 | 3471 |
| v4chr2-5648p8 | 42 | 3472 | 3473 |
| v4chr2-56760p4 | 42 | 3474 | 3475 |
| v4chr2-57437m11 | 42 | 3476 | 3477 |
| v4chr2-5790p34 | 42 | 3478 | 3479 |
| v4chr2-58216m2 | 42 | 3480 | 3481 |
| v4chr2-58230p3 | 42 | 3482 | 3483 |
| v4chr2-59578m7 | 42 | 3484 | 3485 |
| v4chr2-61345p9 | 42 | 3486 | 3487 |
| v4chr2-61368m12 | 42 | 3488 | 3489 |
| v4chr2-61514p20 | 42 | 3490 | 3491 |
| v4chr2-61574m11 | 42 | 3492 | 3493 |
| v4chr2-61611p11 | 42 | 3494 | 3495 |
| v4chr2-62103m23 | 42 | 3496 | 3497 |
| v4chr2-62147m17 | 42 | 3498 | 3499 |
| v4chr2-6364p13 | 42 | 3500 | 3501 |
| v4chr2-64608m20 | 42 | 3502 | 3503 |
| v4chr2-64794p8 | 42 | 3504 | 3505 |
| v4chr2-649p8 | 42 | 3506 | 3507 |
| v4chr2-65300p1 | 42 | 3508 | 3509 |
| v4chr2-65472m6 | 42 | 3510 | 3511 |
| v4chr2-65542m18 | 42 | 3512 | 3513 |
| v4chr2-66342m15 | 42 | 3514 | 3515 |
| v4chr2-66557p34 | 42 | 3516 | 3517 |
| v4chr2-67093p48 | 42 | 3518 | 3519 |
| v4chr2-67329p4 | 42 | 3520 | 3521 |
| v4chr2-68277m16 | 42 | 3522 | 3523 |
| v4chr2-68337p25 | 42 | 3524 | 3525 |
| v4chr2-68387m8 | 42 | 3526 | 3527 |
| v4chr2-69203p16 | 42 | 3528 | 3529 |
| v4chr2-69588m3 | 42 | 3530 | 3531 |
| v4chr2-71832p9 | 42 | 3532 | 3533 |
| v4chr2-72231p13 | 42 | 3534 | 3535 |
| v4chr2-73621p47 | 42 | 3536 | 3537 |
| v4chr2-74377m5 | 42 | 3538 | 3539 |
| v4chr2-74416p2 | 42 | 3540 | 3541 |
| v4chr2-75907m11 | 42 | 3542 | 3543 |
| v4chr2-75955p14 | 42 | 3544 | 3545 |
| v4chr2-77542p16 | 42 | 3546 | 3547 |
| v4chr2-8742p8 | 42 | 3548 | 3549 |
| v4chr2-9010m22 | 42 | 3550 | 3551 |
| v4chr2-9257m35 | 42 | 3552 | 3553 |
| v4chr2-9336m6 | 42 | 3554 | 3555 |
| v4chr2-9342p21 | 42 | 3556 | 3557 |
| v4chr2-9904m2 | 42 | 3558 | 3559 |
| v4chr3-10344m19 | 42 | 3560 | 3561 |
| v4chr3-10454m3 | 42 | 3562 | 3563 |
| v4chr3-10548m30 | 42 | 3564 | 3565 |
| v4chr3-10587m14 | 42 | 3566 | 3567 |
| v4chr3-11063p33 | 42 | 3568 | 3569 |
| v4chr3-11492p20 | 42 | 3570 | 3571 |
| v4chr3-11548p4 | 42 | 3572 | 3573 |
| v4chr3-11568m6 | 42 | 3574 | 3575 |
| v4chr3-12372m17 | 42 | 3576 | 3577 |
| v4chr3-12531p3 | 42 | 3578 | 3579 |
| v4chr3-12746m13 | 42 | 3580 | 3581 |
| v4chr3-12826m11 | 42 | 3582 | 3583 |
| v4chr3-12840p22 | 42 | 3584 | 3585 |
| v4chr3-12886p21 | 42 | 3586 | 3587 |
| v4chr3-12939m23 | 42 | 3588 | 3589 |
| v4chr3-13198p40 | 42 | 3590 | 3591 |
| v4chr3-13566p53 | 42 | 3592 | 3593 |
| v4chr3-1356m10 | 42 | 3594 | 3595 |
| v4chr3-13634m10 | 42 | 3596 | 3597 |
| v4chr3-13834m42 | 42 | 3598 | 3599 |
| v4chr3-14051m28 | 42 | 3600 | 3601 |
| v4chr3-14078p25 | 42 | 3602 | 3603 |
| v4chr3-14323m19 | 42 | 3604 | 3605 |
| v4chr3-14421m13 | 42 | 3606 | 3607 |
| v4chr3-14653p3 | 42 | 3608 | 3609 |
| v4chr3-14850p11 | 42 | 3610 | 3611 |
| v4chr3-1528p4 | 42 | 3612 | 3613 |
| v4chr3-15672m3 | 42 | 3614 | 3615 |
| v4chr3-15769p23 | 42 | 3616 | 3617 |
| v4chr3-16434m8 | 42 | 3618 | 3619 |
| v4chr3-16833p16 | 42 | 3620 | 3621 |
| v4chr3-17731p4 | 42 | 3622 | 3623 |
| v4chr3-18104m12 | 42 | 3624 | 3625 |
| v4chr3-18603p5 | 42 | 3626 | 3627 |
| v4chr3-19121m7 | 42 | 3628 | 3629 |
| v4chr3-19326m10 | 42 | 3630 | 3631 |
| v4chr3-19385m11 | 42 | 3632 | 3633 |
| v4chr3-20018m6 | 42 | 3634 | 3635 |
| v4chr3-20066p14 | 42 | 3636 | 3637 |
| v4chr3-20085p18 | 42 | 3638 | 3639 |
| v4chr3-20146m34 | 42 | 3640 | 3641 |
| v4chr3-20361p5 | 42 | 3642 | 3643 |
| v4chr3-21141p17 | 42 | 3644 | 3645 |
| v4chr3-21179m8 | 42 | 3646 | 3647 |
| v4chr3-22109p11 | 42 | 3648 | 3649 |
| v4chr3-22147p19 | 42 | 3650 | 3651 |
| v4chr3-2217m1 | 42 | 3652 | 3653 |
| v4chr3-22199m3 | 42 | 3654 | 3655 |
| v4chr3-2225p17 | 42 | 3656 | 3657 |
| v4chr3-22365p5 | 42 | 3658 | 3659 |
| v4chr3-22385p27 | 42 | 3660 | 3661 |
| v4chr3-22443m27 | 42 | 3662 | 3663 |
| v4chr3-22600m14 | 42 | 3664 | 3665 |
| v4chr3-23089p48 | 42 | 3666 | 3667 |
| v4chr3-2313p1 | 42 | 3668 | 3669 |
| v4chr3-23159m11 | 42 | 3670 | 3671 |
| v4chr3-23166p21 | 42 | 3672 | 3673 |
| v4chr3-24922m2 | 42 | 3674 | 3675 |
| v4chr3-25151p21 | 42 | 3676 | 3677 |
| v4chr3-25190p20 | 42 | 3678 | 3679 |
| v4chr3-2531m23 | 42 | 3680 | 3681 |
| v4chr3-25388p3 | 42 | 3682 | 3683 |
| v4chr3-25411m16 | 42 | 3684 | 3685 |
| v4chr3-25417p11 | 42 | 3686 | 3687 |
| v4chr3-2614m19 | 42 | 3688 | 3689 |
| v4chr3-27104p8 | 42 | 3690 | 3691 |
| v4chr3-27122m8 | 42 | 3692 | 3693 |
| v4chr3-27145m17 | 42 | 3694 | 3695 |
| v4chr3-27151p24 | 42 | 3696 | 3697 |
| v4chr3-27221m42 | 42 | 3698 | 3699 |
| v4chr3-27407m28 | 42 | 3700 | 3701 |
| v4chr3-27466m40 | 42 | 3702 | 3703 |
| v4chr3-27972m7 | 42 | 3704 | 3705 |
| v4chr3-2799p18 | 42 | 3706 | 3707 |
| v4chr3-28121m9 | 42 | 3708 | 3709 |
| v4chr3-28148m16 | 42 | 3710 | 3711 |
| v4chr3-28159m7 | 42 | 3712 | 3713 |
| v4chr3-28161p14 | 42 | 3714 | 3715 |
| v4chr3-28186m5 | 42 | 3716 | 3717 |
| v4chr3-28240p27 | 42 | 3718 | 3719 |
| v4chr3-28398m11 | 42 | 3720 | 3721 |
| v4chr3-28406p21 | 42 | 3722 | 3723 |
| v4chr3-28477m38 | 42 | 3724 | 3725 |
| v4chr3-28557m8 | 42 | 3726 | 3727 |
| v4chr3-2919p6 | 42 | 3728 | 3729 |
| v4chr3-30201m43 | 42 | 3730 | 3731 |
| v4chr3-30243m30 | 42 | 3732 | 3733 |
| v4chr3-30340m26 | 42 | 3734 | 3735 |
| v4chr3-30369p2 | 42 | 3736 | 3737 |
| v4chr3-31028m44 | 42 | 3738 | 3739 |
| v4chr3-31184p9 | 42 | 3740 | 3741 |
| v4chr3-31213m17 | 42 | 3742 | 3743 |
| v4chr3-31781p21 | 42 | 3744 | 3745 |
| v4chr3-32208m6 | 42 | 3746 | 3747 |
| v4chr3-32304m30 | 42 | 3748 | 3749 |
| v4chr3-32337m14 | 42 | 3750 | 3751 |
| v4chr3-33100p9 | 42 | 3752 | 3753 |
| v4chr3-33329m10 | 42 | 3754 | 3755 |
| v4chr3-35262p33 | 42 | 3756 | 3757 |
| v4chr3-35520m2 | 42 | 3758 | 3759 |
| v4chr3-36156m4 | 42 | 3760 | 3761 |
| v4chr3-36261p13 | 42 | 3762 | 3763 |
| v4chr3-36971m8 | 42 | 3764 | 3765 |
| v4chr3-37286p16 | 42 | 3766 | 3767 |
| v4chr3-37307p13 | 42 | 3768 | 3769 |
| v4chr3-37617p28 | 42 | 3770 | 3771 |
| v4chr3-37916m8 | 42 | 3772 | 3773 |
| v4chr3-38212m11 | 42 | 3774 | 3775 |
| v4chr3-38363m11 | 42 | 3776 | 3777 |
| v4chr3-3869m33 | 42 | 3778 | 3779 |
| v4chr3-39241p25 | 42 | 3780 | 3781 |
| v4chr3-39272p8 | 42 | 3782 | 3783 |
| v4chr3-3927m11 | 42 | 3784 | 3785 |
| v4chr3-39636m17 | 42 | 3786 | 3787 |
| v4chr3-40025p16 | 42 | 3788 | 3789 |
| v4chr3-40098p18 | 42 | 3790 | 3791 |
| v4chr3-4035p15 | 42 | 3792 | 3793 |
| v4chr3-40363m30 | 42 | 3794 | 3795 |
| v4chr3-40923p12 | 42 | 3796 | 3797 |
| v4chr3-40937p8 | 42 | 3798 | 3799 |
| v4chr3-41524p19 | 42 | 3800 | 3801 |
| v4chr3-41718p8 | 42 | 3802 | 3803 |
| v4chr3-42458p10 | 42 | 3804 | 3805 |
| v4chr3-42861p2 | 42 | 3806 | 3807 |
| v4chr3-43326p3 | 42 | 3808 | 3809 |
| v4chr3-4362m10 | 42 | 3810 | 3811 |
| v4chr3-44129m4 | 42 | 3812 | 3813 |
| v4chr3-44302m19 | 42 | 3814 | 3815 |
| v4chr3-44694p8 | 42 | 3816 | 3817 |
| v4chr3-44964p16 | 42 | 3818 | 3819 |
| v4chr3-45321p19 | 42 | 3820 | 3821 |
| v4chr3-46034p1 | 42 | 3822 | 3823 |
| v4chr3-46363p19 | 42 | 3824 | 3825 |
| v4chr3-46545m8 | 42 | 3826 | 3827 |
| v4chr3-46745m12 | 42 | 3828 | 3829 |
| v4chr3-47694p4 | 42 | 3830 | 3831 |
| v4chr3-47983m5 | 42 | 3832 | 3833 |
| v4chr3-48810p16 | 42 | 3834 | 3835 |
| v4chr3-49652m32 | 42 | 3836 | 3837 |
| v4chr3-49754m10 | 42 | 3838 | 3839 |
| v4chr3-4987m7 | 42 | 3840 | 3841 |
| v4chr3-50017p22 | 42 | 3842 | 3843 |
| v4chr3-50118m7 | 42 | 3844 | 3845 |
| v4chr3-50582m9 | 42 | 3846 | 3847 |
| v4chr3-50648p20 | 42 | 3848 | 3849 |
| v4chr3-5186p19 | 42 | 3850 | 3851 |
| v4chr3-53200p10 | 42 | 3852 | 3853 |
| v4chr3-53302m12 | 42 | 3854 | 3855 |
| v4chr3-5332p14 | 42 | 3856 | 3857 |
| v4chr3-53440m24 | 42 | 3858 | 3859 |
| v4chr3-53592p9 | 42 | 3860 | 3861 |
| v4chr3-53627m3 | 42 | 3862 | 3863 |
| v4chr3-54171p7 | 42 | 3864 | 3865 |
| v4chr3-54247p9 | 42 | 3866 | 3867 |
| v4chr3-54310p14 | 42 | 3868 | 3869 |
| v4chr3-5575m9 | 42 | 3870 | 3871 |
| v4chr3-6303p6 | 42 | 3872 | 3873 |
| v4chr3-6314p9 | 42 | 3874 | 3875 |
| v4chr3-6324p21 | 42 | 3876 | 3877 |
| v4chr3-6441p10 | 42 | 3878 | 3879 |
| v4chr3-6707m4 | 42 | 3880 | 3881 |
| v4chr3-7293p19 | 42 | 3882 | 3883 |
| v4chr3-7320p26 | 42 | 3884 | 3885 |
| v4chr3-7391m18 | 42 | 3886 | 3887 |
| v4chr3-758p13 | 42 | 3888 | 3889 |
| v4chr3-828p12 | 42 | 3890 | 3891 |
| v4chr3-8695p20 | 42 | 3892 | 3893 |
| v4chr3-8741p25 | 42 | 3894 | 3895 |
| v4chr3-9391p20 | 42 | 3896 | 3897 |
| v4chr3-9922p21 | 42 | 3898 | 3899 |
| v4chr4-11120p3 | 42 | 3900 | 3901 |
| v4chr4-11996m3 | 42 | 3902 | 3903 |
| v4chr4-12337m24 | 42 | 3904 | 3905 |
| v4chr4-12386m13 | 42 | 3906 | 3907 |
| v4chr4-12435m13 | 42 | 3908 | 3909 |
| v4chr4-12795m13 | 42 | 3910 | 3911 |
| v4chr4-1301p6 | 42 | 3912 | 3913 |
| v4chr4-13057m27 | 42 | 3914 | 3915 |
| v4chr4-13062p17 | 42 | 3916 | 3917 |
| v4chr4-13296p67 | 42 | 3918 | 3919 |
| v4chr4-13451m28 | 42 | 3920 | 3921 |
| v4chr4-14468m45 | 42 | 3922 | 3923 |
| v4chr4-15162p16 | 42 | 3924 | 3925 |
| v4chr4-15240p20 | 42 | 3926 | 3927 |
| v4chr4-15305m25 | 42 | 3928 | 3929 |
| v4chr4-15366p10 | 42 | 3930 | 3931 |
| v4chr4-1546m11 | 42 | 3932 | 3933 |
| v4chr4-15980p28 | 42 | 3934 | 3935 |
| v4chr4-16342p54 | 42 | 3936 | 3937 |
| v4chr4-16421m14 | 42 | 3938 | 3939 |
| v4chr4-17332m11 | 42 | 3940 | 3941 |
| v4chr4-17540m25 | 42 | 3942 | 3943 |
| v4chr4-17773m11 | 42 | 3944 | 3945 |
| v4chr4-1783m4 | 42 | 3946 | 3947 |
| v4chr4-17868m18 | 42 | 3948 | 3949 |
| v4chr4-18331m8 | 42 | 3950 | 3951 |
| v4chr4-18342p15 | 42 | 3952 | 3953 |
| v4chr4-18907m19 | 42 | 3954 | 3955 |
| v4chr4-19051m4 | 42 | 3956 | 3957 |
| v4chr4-19250m37 | 42 | 3958 | 3959 |
| v4chr4-19463m16 | 42 | 3960 | 3961 |
| v4chr4-19510p23 | 42 | 3962 | 3963 |
| v4chr4-19926p25 | 42 | 3964 | 3965 |
| v4chr4-20003m12 | 42 | 3966 | 3967 |
| v4chr4-20130m2 | 42 | 3968 | 3969 |
| v4chr4-20172p36 | 42 | 3970 | 3971 |
| v4chr4-20215p67 | 42 | 3972 | 3973 |
| v4chr4-20578m19 | 42 | 3974 | 3975 |
| v4chr4-20847m13 | 42 | 3976 | 3977 |
| v4chr4-20986p43 | 42 | 3978 | 3979 |
| v4chr4-23276m56 | 42 | 3980 | 3981 |
| v4chr4-23337m16 | 42 | 3982 | 3983 |
| v4chr4-24409p16 | 42 | 3984 | 3985 |
| v4chr4-24826p4 | 42 | 3986 | 3987 |
| v4chr4-25156m34 | 42 | 3988 | 3989 |
| v4chr4-26126p5 | 42 | 3990 | 3991 |
| v4chr4-26368p1 | 42 | 3992 | 3993 |
| v4chr4-27106m25 | 42 | 3994 | 3995 |
| v4chr4-28509m8 | 42 | 3996 | 3997 |
| v4chr4-28758m14 | 42 | 3998 | 3999 |
| v4chr4-29088p37 | 42 | 4000 | 4001 |
| v4chr4-29189p10 | 42 | 4002 | 4003 |
| v4chr4-29355m43 | 42 | 4004 | 4005 |
| v4chr4-29692p10 | 42 | 4006 | 4007 |
| v4chr4-29836p83 | 42 | 4008 | 4009 |
| v4chr4-30196p14 | 42 | 4010 | 4011 |
| v4chr4-30233p17 | 42 | 4012 | 4013 |
| v4chr4-30511m26 | 42 | 4014 | 4015 |
| v4chr4-30707p15 | 42 | 4016 | 4017 |
| v4chr4-30964p18 | 42 | 4018 | 4019 |
| v4chr4-30997m9 | 42 | 4020 | 4021 |
| v4chr4-31228p17 | 42 | 4022 | 4023 |
| v4chr4-32250p8 | 42 | 4024 | 4025 |
| v4chr4-32607m5 | 42 | 4026 | 4027 |
| v4chr4-32619p12 | 42 | 4028 | 4029 |
| v4chr4-32872m38 | 42 | 4030 | 4031 |
| v4chr4-33224m9 | 42 | 4032 | 4033 |
| v4chr4-33425m7 | 42 | 4034 | 4035 |
| v4chr4-33447p11 | 42 | 4036 | 4037 |
| v4chr4-33594p12 | 42 | 4038 | 4039 |
| v4chr4-34490p14 | 42 | 4040 | 4041 |
| v4chr4-35111p24 | 42 | 4042 | 4043 |
| v4chr4-35251m45 | 42 | 4044 | 4045 |
| v4chr4-36233m20 | 42 | 4046 | 4047 |
| v4chr4-36238p2 | 42 | 4048 | 4049 |
| v4chr4-36362m6 | 42 | 4050 | 4051 |
| v4chr4-36659p7 | 42 | 4052 | 4053 |
| v4chr4-36753p10 | 42 | 4054 | 4055 |
| v4chr4-37052m11 | 42 | 4056 | 4057 |
| v4chr4-37235m27 | 42 | 4058 | 4059 |
| v4chr4-37281m32 | 42 | 4060 | 4061 |
| v4chr4-37298m8 | 42 | 4062 | 4063 |
| v4chr4-3743m18 | 42 | 4064 | 4065 |
| v4chr4-37770p18 | 42 | 4066 | 4067 |
| v4chr4-38372p4 | 42 | 4068 | 4069 |
| v4chr4-39037m32 | 42 | 4070 | 4071 |
| v4chr4-39288m30 | 42 | 4072 | 4073 |
| v4chr4-39444p20 | 42 | 4074 | 4075 |
| v4chr4-39894p22 | 42 | 4076 | 4077 |
| v4chr4-40736m28 | 42 | 4078 | 4079 |
| v4chr4-41352m46 | 42 | 4080 | 4081 |
| v4chr4-4185p41 | 42 | 4082 | 4083 |
| v4chr4-41976p14 | 42 | 4084 | 4085 |
| v4chr4-42026p13 | 42 | 4086 | 4087 |
| v4chr4-42260m10 | 42 | 4088 | 4089 |
| v4chr4-43037m19 | 42 | 4090 | 4091 |
| v4chr4-4465m35 | 42 | 4092 | 4093 |
| v4chr4-45362m14 | 42 | 4094 | 4095 |
| v4chr4-45935m18 | 42 | 4096 | 4097 |
| v4chr4-47755p1 | 42 | 4098 | 4099 |
| v4chr4-48311p2 | 42 | 4100 | 4101 |
| v4chr4-486p10 | 42 | 4102 | 4103 |
| v4chr4-5175p11 | 42 | 4104 | 4105 |
| v4chr4-5359p11 | 42 | 4106 | 4107 |
| v4chr4-5467m34 | 42 | 4108 | 4109 |
| v4chr4-6424p6 | 42 | 4110 | 4111 |
| v4chr4-8587m11 | 42 | 4112 | 4113 |
| v4chr5-10459m21 | 42 | 4114 | 4115 |
| v4chr5-12391p7 | 42 | 4116 | 4117 |
| v4chr5-12403p31 | 42. | 4118 | 4119 |
| v4chr5-12443p12 | 42 | 4120 | 4121 |
| v4chr5-13535m10 | 42 | 4122 | 4123 |
| v4chr5-13652p3 | 42 | 4124 | 4125 |
| v4chr5-13817p10 | 42 | 4126 | 4127 |
| v4chr5-13877m8 | 42 | 4128 | 4129 |
| v4chr5-14342p17 | 42 | 4130 | 4131 |
| v4chr5-14394p72 | 42 | 4132 | 4133 |
| v4chr5-14534p18 | 42 | 4134 | 4135 |
| v4chr5-15137p19 | 42 | 4136 | 4137 |
| v4chr5-15270p7 | 42 | 4138 | 4139 |
| v4chr5-15442m71 | 42 | 4140 | 4141 |
| v4chr5-16473p20 | 42 | 4142 | 4143 |
| v4chr5-16565p21 | 42 | 4144 | 4145 |
| v4chr5-1739p19 | 42 | 4146 | 4147 |
| v4chr5-17673p3 | 42 | 4148 | 4149 |
| v4chr5-181m5 | 42 | 4150 | 4151 |
| v4chr5-18269p31 | 42 | 4152 | 4153 |
| v4chr5-19025m15 | 42 | 4154 | 4155 |
| v4chr5-19284p37 | 42 | 4156 | 4157 |
| v4chr5-19492p42 | 42 | 4158 | 4159 |
| v4chr5-19654m19 | 42 | 4160 | 4161 |
| v4chr5-19887m13 | 42 | 4162 | 4163 |
| v4chr5-20142p15 | 42 | 4164 | 4165 |
| v4chr5-20181p16 | 42 | 4166 | 4167 |
| v4chr5-2057p16 | 42 | 4168 | 4169 |
| v4chr5-21783p23 | 42 | 4170 | 4171 |
| v4chr5-22151p29 | 42 | 4172 | 4173 |
| v4chr5-22213m20 | 42 | 4174 | 4175 |
| v4chr5-22682p11 | 42 | 4176 | 4177 |
| v4chr5-23246m36 | 42 | 4178 | 4179 |
| v4chr5-23306p32 | 42 | 4180 | 4181 |
| v4chr5-23553p26 | 42 | 4182 | 4183 |
| v4chr5-24125m16 | 42 | 4184 | 4185 |
| v4chr5-24156p13 | 42 | 4186 | 4187 |
| v4chr5-24362m29 | 42 | 4188 | 4189 |
| v4chr5-25317m45 | 42 | 4190 | 4191 |
| v4chr5-25829m34 | 42 | 4192 | 4193 |
| v4chr5-26126p9 | 42 | 4194 | 4195 |
| v4chr5-26633m56 | 42 | 4196 | 4197 |
| v4chr5-26750p11 | 42 | 4198 | 4199 |
| v4chr5-27100m15 | 42 | 4200 | 4201 |
| v4chr5-27295m3 | 42 | 4202 | 4203 |
| v4chr5-27375m4 | 42 | 4204 | 4205 |
| v4chr5-29157p11 | 42 | 4206 | 4207 |
| v4chr5-31209p11 | 42 | 4208 | 4209 |
| v4chr5-31230p5 | 42 | 4210 | 4211 |
| v4chr5-31238p3 | 42 | 4212 | 4213 |
| v4chr5-31250p19 | 42 | 4214 | 4215 |
| v4chr5-31291m10 | 42 | 4216 | 4217 |
| v4chr5-31382p11 | 42 | 4218 | 4219 |
| v4chr5-32233p14 | 42 | 4220 | 4221 |
| v4chr5-32250p35 | 42 | 4222 | 4223 |
| v4chr5-32315m6 | 42 | 4224 | 4225 |
| v4chr5-32648p11 | 42 | 4226 | 4227 |
| v4chr5-34247p7 | 42 | 4228 | 4229 |
| v4chr5-34963p27 | 42 | 4230 | 4231 |
| v4chr5-3500m15 | 42 | 4232 | 4233 |
| v4chr5-35352p79 | 42 | 4234 | 4235 |
| v4chr5-36554m16 | 42 | 4236 | 4237 |
| v4chr5-36669p8 | 42 | 4238 | 4239 |
| v4chr5-36775p13 | 42 | 4240 | 4241 |
| v4chr5-36860m11 | 42 | 4242 | 4243 |
| v4chr5-36874m5 | 42 | 4244 | 4245 |
| v4chr5-38215p6 | 42 | 4246 | 4247 |
| v4chr5-38269m19 | 42 | 4248 | 4249 |
| v4chr5-38278p43 | 42 | 4250 | 4251 |
| v4chr5-38390m8 | 42 | 4252 | 4253 |
| v4chr5-38634m2 | 42 | 4254 | 4255 |
| v4chr5-39223p9 | 42 | 4256 | 4257 |
| v4chr5-39281m21 | 42 | 4258 | 4259 |
| v4chr5-39673m6 | 42 | 4260 | 4261 |
| v4chr5-40386m2 | 42 | 4262 | 4263 |
| v4chr5-40492p18 | 42 | 4264 | 4265 |
| v4chr5-40776p52 | 42 | 4266 | 4267 |
| v4chr5-42392m26 | 42 | 4268 | 4269 |
| v4chr5-42458p10 | 42 | 4270 | 4271 |
| v4chr5-43050m5 | 42 | 4272 | 4273 |
| v4chr5-43132m3 | 42 | 4274 | 4275 |
| v4chr5-43753p82 | 42 | 4276 | 4277 |
| v4chr5-44538p6 | 42 | 4278 | 4279 |
| v4chr5-44596p14 | 42 | 4280 | 4281 |
| v4chr5-45077p3 | 42 | 4282 | 4283 |
| v4chr5-45670m11 | 42 | 4284 | 4285 |
| v4chr5-47013m15 | 42 | 4286 | 4287 |
| v4chr5-4775m5 | 42 | 4288 | 4289 |
| v4chr5-48118p14 | 42 | 4290 | 4291 |
| v4chr5-5319p2 | 42 | 4292 | 4293 |
| v4chr5-6376m15 | 42 | 4294 | 4295 |
| v4chr5-695p39 | 42 | 4296 | 4297 |
| v4chr5-8065m15 | 42 | 4298 | 4299 |
| v4chr5-8127m50 | 42 | 4300 | 4301 |
| v4chr5-8286p28 | 42 | 4302 | 4303 |
| v4chr5-9441m24 | 42 | 4304 | 4305 |
| v4chr6a-1025m5 | 42 | 4306 | 4307 |
| v4chr6a-1065m3 | 42 | 4308 | 4309 |
| v4chr6a-10711p22 | 42 | 4310 | 4311 |
| v4chr6a-11039p36 | 42 | 4312 | 4313 |
| v4chr6a-11733p2 | 42 | 4314 | 4315 |
| v4chr6a-11872p13 | 42 | 4316 | 4317 |
| v4chr6a-13424m9 | 42 | 4318 | 4319 |
| v4chr6a-13483p50 | 42 | 4320 | 4321 |
| v4chr6a-14606p4 | 42 | 4322 | 4323 |
| v4chr6a-15532m7 | 42 | 4324 | 4325 |
| v4chr6a-16336m27 | 42 | 4326 | 4327 |
| v4chr6a-16440p13 | 42 | 4328 | 4329 |
| v4chr6a-16778m6 | 42 | 4330 | 4331 |
| v4chr6a-16779p9 | 42 | 4332 | 4333 |
| v4chr6a-17311m11 | 42 | 4334 | 4335 |
| v4chr6a-17643p32 | 42 | 4336 | 4337 |
| v4chr6a-17691p11 | 42 | 4338 | 4339 |
| v4chr6a-18292m6 | 42 | 4340 | 4341 |
| v4chr6a-18833p14 | 42 | 4342 | 4343 |
| v4chr6a-19043p23 | 42 | 4344 | 4345 |
| v4chr6a-19382m18 | 42 | 4346 | 4347 |
| v4chr6a-19620m50 | 42 | 4348 | 4349 |
| v4chr6a-19781m40 | 42 | 4350 | 4351 |
| v4chr6a-19937m9 | 42 | 4352 | 4353 |
| v4chr6a-20069m18 | 42 | 4354 | 4355 |
| v4chr6a-20132m14 | 42 | 4356 | 4357 |
| v4chr6a-20163p16 | 42 | 4358 | 4359 |
| v4chr6a-20234m7 | 42 | 4360 | 4361 |
| v4chr6a-20332p33 | 42 | 4362 | 4363 |
| v4chr6a-20387m14 | 42 | 4364 | 4365 |
| v4chr6a-23727m13 | 42 | 4366 | 4367 |
| v4chr6a-24323p25 | 42 | 4368 | 4369 |
| v4chr6a-24630p17 | 42 | 4370 | 4371 |
| v4chr6a-25152m27 | 42 | 4372 | 4373 |
| v4chr6a-2597p21 | 42 | 4374 | 4375 |
| v4chr6a-27402m11 | 42 | 4376 | 4377 |
| v4chr6a-28085p24 | 42 | 4378 | 4379 |
| v4chr6a-28139m18 | 42 | 4380 | 4381 |
| v4chr6a-28149m4 | 42 | 4382 | 4383 |
| v4chr6a-28326p9 | 42 | 4384 | 4385 |
| v4chr6a-28495m18 | 42 | 4386 | 4387 |
| v4chr6a-29050p22 | 42 | 4388 | 4389 |
| v4chr6a-29102m10 | 42 | 4390 | 4391 |
| v4chr6a-29199p41 | 42 | 4392 | 4393 |
| v4chr6a-30212p16 | 42 | 4394 | 4395 |
| v4chr6a-30307m31 | 42 | 4396 | 4397 |
| v4chr6a-30326m15 | 42 | 4398 | 4399 |
| v4chr6a-30424m27 | 42 | 4400 | 4401 |
| v4chr6a-31708p14 | 42 | 4402 | 4403 |
| v4chr6a-32204m16 | 42 | 4404 | 4405 |
| v4chr6a-33248m18 | 42 | 4406 | 4407 |
| v4chr6a-33313m37 | 42 | 4408 | 4409 |
| v4chr6a-3367p12 | 42 | 4410 | 4411 |
| v4chr6a-33915p16 | 42 | 4412 | 4413 |
| v4chr6a-34221p9 | 42 | 4414 | 4415 |
| v4chr6a-34320p16 | 42 | 4416 | 4417 |
| v4chr6a-34956p34 | 42 | 4418 | 4419 |
| v4chr6a-35286m21 | 42 | 4420 | 4421 |
| v4chr6a-3552m33 | 42 | 4422 | 4423 |
| v4chr6a-35540p6 | 42 | 4424 | 4425 |
| v4chr6a-35805p4 | 42 | 4426 | 4427 |
| v4chr6a-35820m2 | 42 | 4428 | 4429 |
| v4chr6a-36134m39 | 42 | 4430 | 4431 |
| v4chr6a-3642p12 | 42 | 4432 | 4433 |
| v4chr6a-36740p5 | 42 | 4434 | 4435 |
| v4chr6a-3680p31 | 42 | 4436 | 4437 |
| v4chr6a-37196p4 | 42 | 4438 | 4439 |
| v4chr6a-462p3 | 42 | 4440 | 4441 |
| v4chr6a-6404m4 | 42 | 4442 | 4443 |
| v4chr6a-8117p4 | 42 | 4444 | 4445 |
| v4chr6a-8372m6 | 42 | 4446 | 4447 |
| v4chr6a-8993p3 | 42 | 4448 | 4449 |
| v4chr6b-10295p3 | 42 | 4450 | 4451 |
| v4chr6b-10368m10 | 42 | 4452 | 4453 |
| v4chr6b-10403p11 | 42 | 4454 | 4455 |
| v4chr6b-11223m26 | 42 | 4456 | 4457 |
| v4chr6b-11401p20 | 42 | 4458 | 4459 |
| v4chr6b-11703p2 | 42 | 4460 | 4461 |
| v4chr6b-126m10 | 42 | 4462 | 4463 |
| v4chr6b-12930m9 | 42 | 4464 | 4465 |
| v4chr6b-13126m4 | 42 | 4466 | 4467 |
| v4chr6b-13377m28 | 42 | 4468 | 4469 |
| v4chr6b-13501p13 | 42 | 4470 | 4471 |
| v4chr6b-1375p16 | 42 | 4472 | 4473 |
| v4chr6b-13828p12 | 42 | 4474 | 4475 |
| v4chr6b-14111p12 | 42 | 4476 | 4477 |
| v4chr6b-14355p7 | 42 | 4478 | 4479 |
| v4chr6b-14529m15 | 42 | 4480 | 4481 |
| v4chr6b-15874p8 | 42 | 4482 | 4483 |
| v4chr6b-241m9 | 42 | 4484 | 4485 |
| v4chr6b-2715m27 | 42 | 4486 | 4487 |
| v4chr6b-2778p5 | 42 | 4488 | 4489 |
| v4chr6b-4296m48 | 42 | 4490 | 4491 |
| v4chr6b-4399m10 | 42 | 4492 | 4493 |
| v4chr6b-5362m10 | 42 | 4494 | 4495 |
| v4chr6b-6327p26 | 42 | 4496 | 4497 |
| v4chr6b-8143m4 | 42 | 4498 | 4499 |
| v4chr7-10322m11 | 42 | 4500 | 4501 |
| v4chr7-10873m20 | 42 | 4502 | 4503 |
| v4chr7-11227p20 | 42 | 4504 | 4505 |
| v4chr7-11916p25 | 42 | 4506 | 4507 |
| v4chr7-12651m28 | 42 | 4508 | 4509 |
| v4chr7-12852p21 | 42 | 4510 | 4511 |
| v4chr7-13623m34 | 42 | 4512 | 4513 |
| v4chr7-13941p17 | 42 | 4514 | 4515 |
| v4chr7-14302p6 | 42 | 4516 | 4517 |
| v4chr7-14356m36 | 42 | 4518 | 4519 |
| v4chr7-14523p48 | 42 | 4520 | 4521 |
| v4chr7-14937p2 | 42 | 4522 | 4523 |
| v4chr7-1504m12 | 42 | 4524 | 4525 |
| v4chr7-15914p51 | 42 | 4526 | 4527 |
| v4chr7-15997m16 | 42 | 4528 | 4529 |
| v4chr7-16039m21 | 42 | 4530 | 4531 |
| v4chr7-16135m15 | 42 | 4532 | 4533 |
| v4chr7-17550p5 | 42 | 4534 | 4535 |
| v4chr7-17560p5 | 42 | 4536 | 4537 |
| v4chr7-17615m10 | 42 | 4538 | 4539 |
| v4chr7-18388m25 | 42 | 4540 | 4541 |
| v4chr7-18763m22 | 42 | 4542 | 4543 |
| v4chr7-19301p126 | 42 | 4544 | 4545 |
| v4chr7-19898m9 | 42 | 4546 | 4547 |
| v4chr7-19989p31 | 42 | 4548 | 4549 |
| v4chr7-20119m35 | 42 | 4550 | 4551 |
| v4chr7-20129p4 | 42 | 4552 | 4553 |
| v4chr7-20184p30 | 42 | 4554 | 4555 |
| v4chr7-20372m10 | 42 | 4556 | 4557 |
| v4chr7-21169p2 | 42 | 4558 | 4559 |
| v4chr7-21255p7 | 42 | 4560 | 4561 |
| v4chr7-21306p37 | 42 | 4562 | 4563 |
| v4chr7-21580m9 | 42 | 4564 | 4565 |
| v4chr7-23200m20 | 42 | 4566 | 4567 |
| v4chr7-23223m11 | 42 | 4568 | 4569 |
| v4chr7-23429p5 | 42 | 4570 | 4571 |
| v4chr7-23530m22 | 42 | 4572 | 4573 |
| v4chr7-23604p13 | 42 | 4574 | 4575 |
| v4chr7-23619p18 | 42 | 4576 | 4577 |
| v4chr7-24121p22 | 42 | 4578 | 4579 |
| v4chr7-25156m15 | 42 | 4580 | 4581 |
| v4chr7-25165p25 | 42 | 4582 | 4583 |
| v4chr7-25302p11 | 42 | 4584 | 4585 |
| v4chr7-25369p27 | 42 | 4586 | 4587 |
| v4chr7-2719m29 | 42 | 4588 | 4589 |
| v4chr7-27430m24 | 42 | 4590 | 4591 |
| v4chr7-28352p22 | 42 | 4592 | 4593 |
| v4chr7-29772m26 | 42 | 4594 | 4595 |
| v4chr7-30284p14 | 42 | 4596 | 4597 |
| v4chr7-30555m3 | 42 | 4598 | 4599 |
| v4chr7-30883p11 | 42 | 4600 | 4601 |
| v4chr7-31201p15 | 42 | 4602 | 4603 |
| v4chr7-31252p29 | 42 | 4604 | 4605 |
| v4chr7-31302p41 | 42 | 4606 | 4607 |
| v4chr7-32054p14 | 42 | 4608 | 4609 |
| v4chr7-32431m10 | 42 | 4610 | 4611 |
| v4chr7-32564m3 | 42 | 4612 | 4613 |
| v4chr7-34674p27 | 42 | 4614 | 4615 |
| v4chr7-35046m19 | 42 | 4616 | 4617 |
| v4chr7-35124p9 | 42 | 4618 | 4619 |
| v4chr7-35178p34 | 42 | 4620 | 4621 |
| v4chr7-35261p5 | 42 | 4622 | 4623 |
| v4chr7-35281p13 | 42 | 4624 | 4625 |
| v4chr7-35332m11 | 42 | 4626 | 4627 |
| v4chr7-35342p9 | 42 | 4628 | 4629 |
| v4chr7-35544m12 | 42 | 4630 | 4631 |
| v4chr7-35861p13 | 42 | 4632 | 4633 |
| v4chr7-37199p165 | 42 | 4634 | 4635 |
| v4chr7-38264m86 | 42 | 4636 | 4637 |
| v4chr7-39308p29 | 42 | 4638 | 4639 |
| v4chr7-5064m17 | 42 | 4640 | 4641 |
| v4chr7-546p6 | 42 | 4642 | 4643 |
| v4chr7-5876p11 | 42 | 4644 | 4645 |
| v4chr7-6208p11 | 42 | 4646 | 4647 |
| v4chr7-7853p2 | 42 | 4648 | 4649 |
| v4chr7-7896p9 | 42 | 4650 | 4651 |
| v4chr7-7981m13 | 42 | 4652 | 4653 |
| v4chr7-8115m16 | 42 | 4654 | 4655 |
| v4chr7-8393m14 | 42 | 4656 | 4657 |
| v4chr7-8413p2 | 42 | 4658 | 4659 |
| v4chr7-8788p48 | 42 | 4660 | 4661 |
| v4chr7-9302m15 | 42 | 4662 | 4663 |
| v4chr7-9859p19 | 42 | 4664 | 4665 |
| v4chr7-9899m18 | 42 | 4666 | 4667 |
| v4chr7-9927m20 | 42 | 4668 | 4669 |
| v4chr7-9954m6 | 42 | 4670 | 4671 |
| v4s110-252m4 | 42 | 4672 | 4673 |
| v4s122-3p12 | 42 | 4674 | 4675 |
| v4s123-10m5 | 42 | 4676 | 4677 |
| v4s18-14m14 | 42 | 4678 | 4679 |
| v4s47-4m3 | 42 | 4680 | 4681 |
| v4s89-0p5 | 42 | 4682 | 4683 |
| v4chr1-28183m7 | 42 | 4684 | 4685 |
| v4chr1-38796p3 | 42 | 4686 | 4687 |
| v4chr1-47734p7 | 42 | 4688 | 4689 |
| v4chr2-30422m26 | 42 | 4690 | 4691 |
| v4chr2-38002m1 | 42 | 4692 | 4693 |
| v4chr2-41840m9 | 42 | 4694 | 4695 |
| v4chr2-47538p2 | 42 | 4696 | 4697 |
| v4chr2-54131p2 | 42 | 4698 | 4699 |
| v4chr2-55006p11 | 42 | 4700 | 4701 |
| v4chr2-57103m3 | 42 | 4702 | 4703 |
| v4chr2-6531m12 | 42 | 4704 | 4705 |
| v4chr2-67763m2 | 42 | 4706 | 4707 |
| v4chr3-14750p10 | 42 | 4708 | 4709 |
| v4chr3-15998p9 | 42 | 4710 | 4711 |
| v4chr3-21271p15 | 42 | 4712 | 4713 |
| v4chr3-21345m13 | 42 | 4714 | 4715 |
| v4chr3-25327m16 | 42 | 4716 | 4717 |
| v4chr3-35150m5 | 42 | 4718 | 4719 |
| v4chr3-36331m28 | 42 | 4720 | 4721 |
| v4chr3-45200p17 | 42 | 4722 | 4723 |
| v4chr3-6900m32 | 42 | 4724 | 4725 |
| v4chr3-8495p9 | 42 | 4726 | 4727 |
| v4chr4-16808m17 | 42 | 4728 | 4729 |
| v4chr4-25532m10 | 42 | 4730 | 4731 |
| v4chr4-25583p2 | 42 | 4732 | 4733 |
| v4chr4-28725p4 | 42 | 4734 | 4735 |
| v4chr4-3843m5 | 42 | 4736 | 4737 |
| v4chr4-45591p5 | 42 | 4738 | 4739 |
| v4chr4-49428p16 | 42 | 4740 | 4741 |
| v4chr5-17672m19 | 42 | 4742 | 4743 |
| v4chr5-20891m36 | 42 | 4744 | 4745 |
| v4chr6a-1658m7 | 42 | 4746 | 4747 |
| v4chr6a-16816m3 | 42 | 4748 | 4749 |
| v4chr6a-18888p5 | 42 | 4750 | 4751 |
| v4chr6a-21244p18 | 42 | 4752 | 4753 |
| v4chr6a-27786p3 | 42 | 4754 | 4755 |
| v4chr6a-33339p3 | 42 | 4756 | 4757 |
| v4chr6a-35341m3 | 42 | 4758 | 4759 |
| v4chr6a-35970m21 | 42 | 4760 | 4761 |
| v4chr6b-1650p3 | 42 | 4762 | 4763 |
| v4chr6b-9548p4 | 42 | 4764 | 4765 |
| v4chr7-2813m5 | 42 | 4766 | 4767 |
| v4s77-1p12 | 42 | 4768 | 4769 |
| v4chr4-49403p18 | 42 | 4770 | 4771 |
| v4chr4-49707p17 | 42 | 4772 | 4773 |
| v4chr1-35417m25 | 42 | 4774 | 4775 |
| v4chr1-39060m47 | 42 | 4776 | 4777 |
| v4chr2-71896m49 | 42 | 4778 | 4779 |
| v4chr3-36383m33 | 42 | 4780 | 4781 |
| v4chr3-39975m12 | 42 | 4782 | 4783 |
| v4chr4-49543m46 | 42 | 4784 | 4785 |
| v4chr5-4487m6 | 42 | 4786 | 4787 |
| v4chr6a-16517m23 | 42 | 4788 | 4789 |
| v4chr6a-5146m22 | 42 | 4790 | 4791 |
| v4chr6b-15533p58 | 42 | 4792 | 4793 |
| v4chr1-11270p4 | 42 | 4794 | 4795 |
| v4chr1-17287m10 | 42 | 4796 | 4797 |
| v4chr1-2075m3 | 42 | 4798 | 4799 |
| v4chr1-42846p13 | 42 | 4800 | 4801 |
| v4chr1-4705m12 | 42 | 4802 | 4803 |
| v4chr2-28619p23 | 42 | 4804 | 4805 |
| v4chr2-31374p19 | 42 | 4806 | 4807 |
| v4chr2-31714p14 | 42 | 4808 | 4809 |
| v4chr2-55320m10 | 42 | 4810 | 4811 |
| v4chr2-76305m4 | 42 | 4812 | 4813 |
| v4chr3-25487p16 | 42 | 4814 | 4815 |
| v4chr3-30790m26 | 42 | 4816 | 4817 |
| v4chr3-34456m5 | 42 | 4818 | 4819 |
| v4chr3-38704p16 | 42 | 4820 | 4821 |
| v4chr3-48588m17 | 42 | 4822 | 4823 |
| v4chr4-23468p27 | 42 | 4824 | 4825 |
| v4chr4-46266p13 | 42 | 4826 | 4827 |
| v4chr5-1818m12 | 42 | 4828 | 4829 |
| v4chr5-19468m5 | 42 | 4830 | 4831 |
| v4chr5-3741m4 | 42 | 4832 | 4833 |
| v4chr5-43547m5 | 42 | 4834 | 4835 |
| v4chr6a-31737m13 | 42 | 4836 | 4837 |
| v4chr5-2139m20 | 42 | 4838 | 4839 |
| v4chr6a-1436p16 | 42 | 4840 | 4841 |
| v4chr2-3052m26 | 42 | 4842 | 4843 |
| v4chr3-47862p24 | 42 | 4844 | 4845 |
| v4chr3-48039p19 | 42 | 4846 | 4847 |
| v4chr4-11467p23 | 42 | 4848 | 4849 |
| v4chr4-19669p20 | 42 | 4850 | 4851 |
| v4chr3-6089m22 | 42 | 4852 | 4853 |
| v4chr4-31072m24 | 42 | 4854 | 4855 |
| v4chr5-42621p14 | 42 | 4856 | 4857 |
| v4chr7-31425p11 | 42 | 4858 | 4859 |
| v4chr1-17237m20 | 42 | 4860 | 4861 |
| v4chr1-21037m8 | 42 | 4862 | 4863 |
| v4chr1-44782m31 | 42 | 4864 | 4865 |
| v4chr1-58432p20 | 42 | 4866 | 4867 |
| v4chr2-16357m11 | 42 | 4868 | 4869 |
| v4chr2-16754m10 | 42 | 4870 | 4871 |
| v4chr2-23009m14 | 42 | 4872 | 4873 |
| v4chr2-26516m19 | 42 | 4874 | 4875 |
| v4chr2-4114m47 | 42 | 4876 | 4877 |
| v4chr2-74738p9 | 42 | 4878 | 4879 |
| v4chr2-77174m11 | 42 | 4880 | 4881 |
| v4chr3-13141m27 | 42 | 4882 | 4883 |
| v4chr3-19594p8 | 42 | 4884 | 4885 |
| v4chr3-30413p3 | 42 | 4886 | 4887 |
| v4chr3-46575p8 | 42 | 4888 | 4889 |
| v4chr3-48620p23 | 42 | 4890 | 4891 |
| v4chr3-49007m21 | 42 | 4892 | 4893 |
| v4chr3-8010p14 | 42 | 4894 | 4895 |
| v4chr3-8628m44 | 42 | 4896 | 4897 |
| v4chr4-40403p18 | 42 | 4898 | 4899 |
| v4chr4-792p13 | 42 | 4900 | 4901 |
| v4chr5-21767p9 | 42 | 4902 | 4903 |
| v4chr5-22623m13 | 42 | 4904 | 4905 |
| v4chr5-22805p11 | 42 | 4906 | 4907 |
| v4chr5-22844m15 | 42 | 4908 | 4909 |
| v4chr5-26500p9 | 42 | 4910 | 4911 |
| v4chr5-29596m15 | 42 | 4912 | 4913 |
| v4chr5-41353m20 | 42 | 4914 | 4915 |
| v4chr6a-25767m5 | 42 | 4916 | 4917 |
| v4chr6b-2865m29 | 42 | 4918 | 4919 |
| v4chr6b-480p24 | 42 | 4920 | 4921 |
| v4chr7-18486m57 | 42 | 4922 | 4923 |
| v4chr7-27654m32 | 42 | 4924 | 4925 |
| v4chr7-36462p21 | 42 | 4926 | 4927 |
| v4chr7-40391m13 | 42 | 4928 | 4929 |
| v4chr7-4577m28 | 42 | 4930 | 4931 |
| v4chr1-15220p14 | 42 | 4932 | 4933 |
| v4chr1-20481m14 | 42 | 4934 | 4935 |
| v4chr1-39497m26 | 42 | 4936 | 4937 |
| v4chr1-41044p37 | 42 | 4938 | 4939 |
| v4chr1-46347m5 | 42 | 4940 | 4941 |
| v4chr1-52244p12 | 42 | 4942 | 4943 |
| v4chr1-6764p17 | 42 | 4944 | 4945 |
| v4chr1-9287p14 | 42 | 4946 | 4947 |
| v4chr2-16818p11 | 42 | 4948 | 4949 |
| v4chr2-20984p15 | 42 | 4950 | 4951 |
| v4chr2-40269p8 | 42 | 4952 | 4953 |
| v4chr2-43741p22 | 42 | 4954 | 4955 |
| v4chr2-49577p8 | 42 | 4956 | 4957 |
| v4chr2-8309p14 | 42 | 4958 | 4959 |
| v4chr3-27555p11 | 42 | 4960 | 4961 |
| v4chr3-30505p7 | 42 | 4962 | 4963 |
| v4chr3-42960m12 | 42 | 4964 | 4965 |
| v4chr3-6659m14 | 42 | 4966 | 4967 |
| v4chr3-6999p13 | 42 | 4968 | 4969 |
| v4chr3-7900m22 | 42 | 4970 | 4971 |
| v4chr4-19565m7 | 42 | 4972 | 4973 |
| v4chr4-3718m9 | 42 | 4974 | 4975 |
| v4chr4-37303p21 | 42 | 4976 | 4977 |
| v4chr5-18195m22 | 42 | 4978 | 4979 |
| v4chr5-19037p4 | 42 | 4980 | 4981 |
| v4chr6a-27300p34 | 42 | 4982 | 4983 |
| v4chr6a-4893m24 | 42 | 4984 | 4985 |
| v4chr6b-6711p11 | 42 | 4986 | 4987 |
| v4chr7-11753p10 | 42 | 4988 | 4989 |
| v4chr7-14666m29 | 42 | 4990 | 4991 |
| v4chr7-22362m39 | 42 | 4992 | 4993 |
| v4chr7-24379p47 | 42 | 4994 | 4995 |
| v4chr7-25210m10 | 42 | 4996 | 4997 |
| v4chr7-9827p9 | 42 | 4998 | 4999 |
| v4chr1-11812m30 | 42 | 5000 | 5001 |
| v4chr1-19706p9 | 42 | 5002 | 5003 |
| v4chr1-26694p4 | 42 | 5004 | 5005 |
| v4chr2-13564p23 | 42 | 5006 | 5007 |
| v4chr2-37835m8 | 42 | 5008 | 5009 |
| v4chr2-43530p23 | 42 | 5010 | 5011 |
| v4chr2-50773m19 | 42 | 5012 | 5013 |
| v4chr2-52124p20 | 42 | 5014 | 5015 |
| v4chr2-54153p27 | 42 | 5016 | 5017 |
| v4chr2-55438p9 | 42 | 5018 | 5019 |
| v4chr2-60405m27 | 42 | 5020 | 5021 |
| v4chr2-66176p10 | 42 | 5022 | 5023 |
| v4chr3-25027p19 | 42 | 5024 | 5025 |
| v4chr3-32644p33 | 42 | 5026 | 5027 |
| v4chr3-42134p28 | 42 | 5028 | 5029 |
| v4chr3-42284m2 | 42 | 5030 | 5031 |
| v4chr3-49534p24 | 42 | 5032 | 5033 |
| v4chr3-50473m36 | 42 | 5034 | 5035 |
| v4chr4-13002p8 | 42 | 5036 | 5037 |
| v4chr4-16904p29 | 42 | 5038 | 5039 |
| v4chr4-32229m3 | 42 | 5040 | 5041 |
| v4chr4-42838m36 | 42 | 5042 | 5043 |
| v4chr4-4637p24 | 42 | 5044 | 5045 |
| v4chr5-21713p25 | 42 | 5046 | 5047 |
| v4chr5-39442p7 | 42 | 5048 | 5049 |
| v4chr5-9311m27 | 42 | 5050 | 5051 |
| v4chr6a-27201p43 | 42 | 5052 | 5053 |
| v4chr6a-28811m32 | 42 | 5054 | 5055 |
| v4chr7-22838m24 | 42 | 5056 | 5057 |
| v4chr1-27885p17 | 42 | 5058 | 5059 |
| v4chr1-32547p5 | 42 | 5060 | 5061 |
| v4chr1-56795m24 | 42 | 5062 | 5063 |
| v4chr1-59435m20 | 42 | 5064 | 5065 |
| v4chr1-59666m19 | 42 | 5066 | 5067 |
| v4chr2-69434p8 | 42 | 5068 | 5069 |
| v4chr4-49391m18 | 42 | 5070 | 5071 |
| v4chr6a-16812m19 | 42 | 5072 | 5073 |
| v4chr6a-24556m32 | 42 | 5074 | 5075 |
| v4chr6a-33258m2 | 42 | 5076 | 5077 |
| v4chr6b-13964p20 | 42 | 5078 | 5079 |
| v4chr6b-529m20 | 42 | 5080 | 5081 |
| v4chr7-21520m40 | 42 | 5082 | 5083 |
| v4chr1-17162p13 | 42 | 5084 | 5085 |
| v4chr2-31596m13 | 42 | 5086 | 5087 |
| v4chr2-47013m6 | 42 | 5088 | 5089 |
| v4chr2-69495p14 | 42 | 5090 | 5091 |
| v4chr3-14486p16 | 42 | 5092 | 5093 |
| v4chr3-31750p9 | 42 | 5094 | 5095 |
| v4chr3-33624p117 | 42 | 5096 | 5097 |
| v4chr3-34183p12 | 42 | 5098 | 5099 |
| v4chr3-51222p8 | 42 | 5100 | 5101 |
| v4chr4-1825p8 | 42 | 5102 | 5103 |
| v4chr4-31019m18 | 42 | 5104 | 5105 |
| v4chr4-32437m20 | 42 | 5106 | 5107 |
| v4chr5-15332p25 | 42 | 5108 | 5109 |
| v4chr5-22660m9 | 42 | 5110 | 5111 |
| v4chr5-2485p20 | 42 | 5112 | 5113 |
| v4chr6a-15723m17 | 42 | 5114 | 5115 |
| v4chr1-2181p20 | 42 | 5116 | 5117 |
| v4chr1-38193m18 | 42 | 5118 | 5119 |
| v4chr6a-3996p11 | 42 | 5120 | 5121 |
| v4chr7-28844p31 | 42 | 5122 | 5123 |
| v4chr1-15715m8 | 42 | 5124 | 5125 |
| v4chr1-2502p3 | 42 | 5126 | 5127 |
| v4chr1-27550m2 | 42 | 5128 | 5129 |
| v4chr1-3994p3 | 42 | 5130 | 5131 |
| v4chr1-60195p3 | 42 | 5132 | 5133 |
| v4chr2-63086p3 | 42 | 5134 | 5135 |
| v4chr2-70323m3 | 42 | 5136 | 5137 |
| v4chr2-78398p2 | 42 | 5138 | 5139 |
| v4chr3-15343p3 | 42 | 5140 | 5141 |
| v4chr4-11909p3 | 42 | 5142 | 5143 |
| v4chr4-9158m3 | 42 | 5144 | 5145 |
| v4chr5-33493m2 | 42 | 5146 | 5147 |
| v4chr6a-13960p3 | 42 | 5148 | 5149 |
| v4chr6a-9805m2 | 42 | 5150 | 5151 |
| v4chr7-26755m2 | 42 | 5152 | 5153 |
| v4chr7-5397m2 | 42 | 5154 | 5155 |
| v4s43-15m3 | 42 | 5156 | 5157 |
| v4chr6a-2142p20 | 42 | 5158 | 5159 |
| v4chr1-51877m6 | 42 | 5160 | 5161 |
| v4chr7-18054p19 | 42 | 5162 | 5163 |
| v4chr4-49235m15 | 42 | 5164 | 5165 |
| v4chr7-9571p24 | 42 | 5166 | 5167 |
| v4chr1-54444m19 | 42 | 5168 | 5169 |
| v4chr7-11600m11 | 42 | 5170 | 5171 |
| v4chr3-35717m16 | 42 | 5172 | 5173 |
| v4chr2-28801m18 | 42 | 5174 | 5175 |
| v4chr2-32956p18 | 42 | 5176 | 5177 |
| v4chr6b-4957m19 | 42 | 5178 | 5179 |
| v4chr6a-8211p6 | 42 | 5180 | 5181 |
| v4chr6b-6644m57 | 42 | 5182 | 5183 |
| v4chr2-32429p32 | 42 | 5184 | 5185 |
| v4chr3-40652m25 | 42 | 5186 | 5187 |
| v4chr6a-10595m15 | 42 | 5188 | 5189 |
| v4chr7-23547p14 | 42 | 5190 | 5191 |
| v4chr3-46456p10 | 42 | 5192 | 5193 |
| v4chr4-33294p19 | 42 | 5194 | 5195 |
| v4chr6b-10102m17 | 42 | 5196 | 5197 |
| v4chr7-29402m28 | 42 | 5198 | 5199 |
| v4chr4-32556m5 | 42 | 5200 | 5201 |
| v4chr7-14887p22 | 42 | 5202 | 5203 |
| v4chr4-2008m11 | 42 | 5204 | 5205 |
| v4chr2-12876m10 | 42 | 5206 | 5207 |
| v4s108-9m9 | 42 | 5208 | 5209 |
| v4s14-26p3 | 42 | 5210 | 5211 |
| v4chr5-16080p14 | 10, 39 | 5212 | 5213 |
| v4chr5-16108m12 | 12, 13 | 5214 | 5215 |
| v4chr2-58871p23 | 17, 23 | 5216 | 5217 |
| v4chr2-22503p30 | 21, 32 | 5218 | 5219 |
| v4chr2-41064p24 | 22, 23 | 5220 | 5221 |
| v4chr5-11255p14 | 3, 4, 7, 9 | 5222 | 5223 |
| v4chr5-24655m32 | 3, 4, 7, 9, 16 | 5224 | 5225 |
| v4chr2-33243p31 | 3, 4, 7, 9, 16 | 5226 | 5227 |
| v4chr6a-17994p9 | 3, 4, 7, 9, 16 | 5228 | 5229 |
| v4chr3-26903m11 | 31, 42 | 5230 | 5231 |
| v4chr3-33149p6 | 36, 37 | 5232 | 5233 |
| v4chr5-40856p4 | 36, 37 | 5234 | 5235 |
| v4chr6a-2925p37 | 36, 37 | 5236 | 5237 |
| v4chr1-16374m30 | 36, 37 | 5238 | 5239 |
| v4chr6a-36211p9 | 36, 37 | 5240 | 5241 |
| v4chr3-4957m10 | 36, 37, 38 | 5242 | 5243 |
| v4chr3-53312m5 | 36, 38 | 5244 | 5245 |
| v4chr3-27903m14 | 36, 38 | 5246 | 5247 |
| v4chr6a-10511m22 | 36, 38 | 5248 | 5249 |
| v4chr7-14165m32 | 36, 38 | 5250 | 5251 |
| v4chr2-75516m28 | 36, 38 | 5252 | 5253 |
| v4chr2-5283m6 | 36, 38 | 5254 | 5255 |
| v4chr5-1700p3 | 36, 39 | 5256 | 5257 |
| v4chr6a-24726m18 | 36, 39 | 5258 | 5259 |
| v4chr6a-205353m8 | 36, 45 | 5260 | 5261 |
| v4chr6b-12873m15 | 38, 39 | 5262 | 5263 |
| v4chr6b-220p10 | 38, 39 | 5264 | 5265 |
| v4chr5-11449m18 | 38, 39 | 5266 | 5267 |
| v4chr3-17076p9 | 38, 39 | 5268 | 5269 |
| v4chr2-194p15 | 38, 39 | 5270 | 5271 |
| v4chr2-23365p16 | 38, 39 | 5272 | 5273 |
| v4chr3-18302p12 | 38, 39 | 5274 | 5275 |
| v4chr3-37265p15 | 38, 39 | 5276 | 5277 |
| v4chr3-5003m9 | 38, 39 | 5278 | 5279 |
| v4chr4-30622p8 | 38, 39 | 5280 | 5281 |
| v4chr5-2153p14 | 38, 39 | 5282 | 5283 |
| v4chr5-7322p10 | 38, 39 | 5284 | 5285 |
| v4chr6a-12589p10 | 38, 39 | 5286 | 5287 |
| v4chr5-132p12 | 38, 39 | 5288 | 5289 |
| v4chr6a-10987m11 | 38, 39 | 5290 | 5291 |
| v4chr6a-24358p14 | 38, 39 | 5292 | 5293 |
| v4chr6a-24383p15 | 38, 39 | 5294 | 5295 |
| v4chr5-20377p25 | 5, 12, 13, 17, 23, 29 | 5296 | 5297 |
| v4chr6b-13308m15 | 5, 17, 23 | 5298 | 5299 |
| v4chr3-13279m17 | 5, 17, 23, 31 | 5300 | 5301 |
| v4chr4-14213m6 | 5, 17, 23, 31 | 5302 | 5303 |
| v4chr2-335p26 | 8, 33 | 5304 | 5305 |

TABLE 5

| Activity # | Activity | GH or CE family |
|---|---|---|
| 3 | arabinofuranosidase | GH3, GH43, GH51, GH54, and GH62 |
| 4 | arabinofuranosidase from | GH3, GH43, GH51, GH54, and GH62 |
| | xylose | |
| 5 | xyloglucanase | GH5, GH12, GH16, GH44, and GH74 |
| 6 | α-glucuronidase | GH67 and GH115 |
| 7 | β-xylosidase | GH3, GH30, GH39, GH43, GH52, and GH54 |
| 8 | β-galactosidase | GH2 and GH42 |
| 9 | arabinofuranosidase/arabinase | GH3, GH43, GH51, GH54, GH62, and GH93 |
| 10 | chitin binding protein | |
| 11 | lichenan (β(1,3)-β(1,4)-linked | |
| | glucan) binding protein | |
| 12 | endo-xylanase | GH5, GH8, GH10, and GH11 |
| 13 | xylanase | GH5, GH8, GH10, and GH11 |
| 14 | xylan-binding protein | |
| 15 | polygalacturonase | GH28 |
| 16 | β-glucosidase | GH1, GH3, GH9, and GH30 |
| 17 | β-1,3-glucanase | GH5, GH12, GH16, GH17, GH55, GH64 and GH81 |
| 18 | α-1,6-Mannanase | GH38, GH76, and GH92 |
| 19 | Rhamnogalacturonyl hydrolase | GH28 and GH105 |
| 20 | α-Amylase | GH13 and GH57 |
| 21 | α-glucosidase | GH4, GH13, GH31, and GH63 |
| 22 | glucoamylase | GH15 |
| 23 | glucanase | GH5, GH6, GH7, GH8, GH9, GH12, GH13, GH14, |
| | | GH15, GH16, GH17, GH30, GH44, GH48, GH49, |
| | | GH51, GH55, GH57, GH64, GH71, GH74, GH81 |
| 24 | acetyl esterase | CEI, CE2, CE3, CE4, CE5, CE6, CE7, CE12, CE13 |
| | | and CEI6 |
| 25 | acetyl xylan esterases | CEI, CE2, CE3, CE4, CES, CE6, CE7, CEI2, and |
| | | CEI6 |
| 26 | ferulic acid esterase | |
| 27 | ferulic acid esterase | |
| 28 | glucuronyl esterase | possibly CE15 |
| 29 | endo-glucanase | GH5, GH6, CH7, GH8, GH9, GH12, GH44, GH45, |
| | | GH74 |
| 30 | α-glucanase | |
| 31 | β-glucanase | |
| 32 | α-galactosidase | |
| 33 | β-mannosidase | |
| 34 | rhamnogalacturonan acetyl | |
| | esterase | |
| 35 | protease | |
| 36 | oxidase | |
| 37 | peroxidase | |
| 38 | reductase | |
| 39 | dehydrogenase | |
| 40 | cutinase | |
| 41 | Pectin acetyl esterases or | |
| | Rhamnogalacturonan acetyl | |
| | esterase | |
| 42 | BCA assay & GOPOD assay | |
| 43 | Fucosidase | GH29 |
| 44 | Alpha-xylosidase | GH31 |
| 45 | laccase | |
| 46 | | |

The application's sequence listing, which the Patent Office published only in electronic form, follows.

SEQUENCE LISTING (5305 sequences)

SEQ ID NO: 1 - DNA, 2703 bp, Myceliophthora thermophilia
atgtggttttccaatggtctcaccaatgcctgtgggctcgccttcctaggcgcgctgctgctgtccgtagtagacgcgaagccaatgccaaaggaagggggacgcgacagaatcagcatcaacaccggctggcgcttctaccggagcgagtacaacaccgacaagctggcctacgacctgagccgcaacgactacgcgaaccgcacagatttgaccgtcttgaaaccgtggattctgccctcggctaatgacttcatcgcagacccggccgcacgacaccggcgcccttccggcgagccaaccatcggcatcccctttgtgcggtcgagctacgacgacaccgagtgggagaccgtcgacctgccacacgactgggccatcaagggtccattctacgtcggggacaatgttcccgtcggcggcggcatgggccgcttgcccgtccacggcatcggttggtaccgccgaaaggtggaaatgaccaaggccgacgagggcaggtccatctacctcgacatcgacggagccatgtcgtactcgatcgtctggctcaacggccacctcgtcgggggatggccctacggatactcttcctaccgtctcgacctgacgccttacctcaagctcggcgacgacaatctgttggccatccgcgtcgacaatccagggaactcatcgcgctggtaccccggcggaggcatttaccgcaatgcttggctcaccaagacaagcccgacacacgttgggcagtggggcacctttatcacatcgaggagcgtgtccaaatcgtccgcggtcctcgacctcgccgtccaggtcgagaacgctggagagacctctcagaagctgagcgtggtgacagatgtgtatatcctagactcggcgaccggggaggcccgtacgaaggtggcctcgttcccgcgccagaccatcaccgtcgcggcgggccacaaggtctcggtgaatgcttcgaccactgtcaagaagccagcactgtggggtccaccgccctcgcagtcgccgaatatgcatgttgctgtaacgcgtttatataaccgcaacaacgacatcgttgacacgtacttgaccgactttggcatccgctcggtcgtctatgacgccgatcatggcttgctggttaacggcgagcggatccggatccagggcgtgaacggccaccacgatctcggcgcgctcggggccgccttcaacgtgcgcgcggccgaacgccagctcgaagtgctccaggaactaggctgcaacgctctccgtgtttcccacaacccccctgctcccgaactgctggatctggcagataggatgggcatcctgatctatgacgaggcgttcgacggctggcagctgtccaagaacccgaacgacttccaccttatcttcgacgattggtccgaggccgaccttcgcgccatggtgcgccgcgaccgtaaccacccgtctgtcatcatctggagcattggcaacgaggtcggggagcagaccacgggcgacagcggcgctgccgtggccaggcggctacgccagatcgtccgctccgaggacgagacgcgccccgtaacggcgtccatgaacgcggcccggccgaacatgcccttcccgggggagctcgacctgatcagcctcaactaccaaggcgagggcatccgtgatacgggcccgtacgccggtctgccgggcatcagtacgccgccgctctacctccccttccacgacgccttcccggacaagttgatcgtcagcagcgagacggcggcaaccgtaagcacccgcgggacctacttcttccccatcaccaactggacgagcgcccccgcgaactacacggtcgggagcggcggcaacgacacgctgctccaggtgagcgattacggcctgtatacggccccgtttggctcgtcgcccgacaaggtattcgtggcgcaggacaacgcgtcctttgtgtccggggagtttgtctggtccggctgggactacatcggcgagcccacgccgtactacgcggcgcggagctcgtactttggcatcatcgacctggccgggttcaagaaggaccgcttctaccagtaccaggcccgctggcggccagaccaccccgtcgcccacatcctgccgcactggacctggggggccgaccgcgtcggcgaagtcacgcccgtccacgtcttctccaacggcgaccaggccgagctgtgggtcaacggcaagtcgcagggccgtctgcggcgcgagtccgagtccgtctaccgcttccgctgggacaacgtcacctaccagcccggcgaggtgcgcgttgtcacgtacaggaacggcaagcagtgggccagcgatagggtggtgacggcgggagtgcccgtggcccttcgcctgagagcggaccggtccgcgatcgcgggcgacgggcttgacctgtcattcttgacggccacggtggtggacagcaagggcaatgtggtgccgcaggcggataacgagattaccttcaccgtgtcgggtcgcggcggtggcgagatcgtggcgacggataacggcgacccccgggatttcacatcatttgcgtccaggacgcgcaaggcctttagcgggcttgccttggggattgtgcgtgccaaccggaagggagatatcacggtcacggctagcgcgcccggccttgcccgcgccgtggtcaagttgacggcaaattga

SEQ ID NO: 2 - protein, 900 aa, Myceliophthora thermophilia
MWFSNGLTNACGLAFLGALLLSVVDAKPMPKEGGRDRISINTGWRFYRSEYNTDKLAYDLSRNDYANRTDLTVLKPWILPSANDFIADPAARHRRPSGEPTIGIPFVRSSYDDTEWETVDLPHDWAIKGPFYVGDNVPVGGGMGRLPVHGIGWYRRKVEMTKADEGRSIYLDIDGAMSYSIVWLNGHLVGGWPYGYSSYRLDLTPYLKLGDDNLLAIRVDNPGNSSRWYPGGGIYRNAWLTKTSPTHVGQWGTFITSRSVSKSSAVLDLAVQVENAGETSQKLSVVTDVYILDSATGEARTKVASFPRQTITVAAGHKVSVNASTTVKKPALWGPPPSQSPNMHVAVTRLYNRNNDIVDTYLTDFGIRSVVYDADHGLLVNGERIRIQGVNGHHDLGALGAAFNVRAAERQLEVLQELGCNALRVSHNPPAPELLDLADRMGILIYDEAFDGWQLSKNPNDFHLIFDDWSEADLRAMVRRDRNHPSVIIWSIGNEVGEQTTGDSGAAVARRLRQIVRSEDETRPVTASMNAARPNMPFPGELDLISLNYQGEGIRDTGPYAGLPGISTPPLYLPFHDAFPDKLIVSSETAATVSTRGTYFFPITNWTSAPANYTVGSGGNDTLLQVSDYGLYTAPFGSSPDKVFVAQDNASFVSGEFVWSGWDYIGEPTPYYAARSSYFGIIDLAGFKKDRFYQYQARWRPDHPVAHILPHWTWGADRVGEVTPVHVFSNGDQAELWVNGKSQGRLRRESESVYRFRWDNVTYQPGEVRVVTYRNGKQWASDRVVTAGVPVALRLRADRSAIAGDGLDLSFLTATVVDSKGNVVPQADNEITFTVSGRGGGEIVATDNGDPRDFTSFASRTRKAFSGLALGIVRANRKGDITVTASAPGLARAVVKLTAN

SEQ ID NO: 3 - protein, 874 aa, Myceliophthora thermophilia
KPMPKEGGRDRISINTGWRFYRSEYNTDKLAYDLSRNDYANRTDLTVLKPWILPSANDFIADPAARHRRPSGEPTIGIPFVRSSYDDTEWETVDLPHDWAIKGPFYVGDNVPVGGGMGRLPVHGIGWYRRKVEMTKADEGRSIYLDIDGAMSYSIVWLNGHLVGGWPYGYSSYRLDLTPYLKLGDDNLLAIRVDNPGNSSRWYPGGGIYRNAWLTKTSPTHVGQWGTFITSRSVSKSSAVLDLAVQVENAGETSQKLSVVTDVYILDSATGEARTKVASFPRQTITVAAGHKVSVNASTTVKKPALWGPPPSQSPNMHVAVTRLYNRNNDIVDTYLTDFGIRSVVYDADHGLLVNGERIRIQGVNGHHDLGALGAAFNVRAAERQLEVLQELGCNALRVSHNPPAPELLDLADRMGILIYDEAFDGWQLSKNPNDFHLIFDDWSEADLRAMVRRDRNHPSVIIWSIGNEVGEQTTGDSGAAVARRLRQIVRSEDETRPVTASMNAARPNMPFPGELDLISLNYQGEGIRDTGPYAGLPGISTPPLYLPFHDAFPDKLIVSSETAATVSTRGTYFFPITNWTSAPANYTVGSGGNDTLLQVSDYGLYTAPFGSSPDKVFVAQDNASFVSGEFVWSGWDYIGEPTPYYAARSSYFGIIDLAGFKKDRFYQYQARWRPDHPVAHILPHWTWGADRVGEVTPVHVFSNGDQAELWVNGKSQGRLRRESESVYRFRWDNVTYQPGEVRVVTYRNGKQWASDRVVTAGVPVALRLRADRSAIAGDGLDLSFLTATVVDSKGNVVPQADNEITFTVSGRGGGEIVATDNGDPRDFTSFASRTRKAFSGLALGIVRANRKGDITVTASAPGLARAVVKLTAN

SEQ ID NO: 4 - DNA, 1602 bp, Myceliophthora thermophilia
atgcgtgcctcgaccgcgtccatcatttcggcctcgctcctcctggggcaggcctcggccgctcttccgcccattgtcatgaagggatccaagttcttctacgagaacggcacccagttcttcattaagggcatcgcttaccagcaggataccaccgctgccggcggtgactctaccagcaccaaagccgtcgactataaggaccctctcgccgacgaggcggcctgcaagcgtgacgtgcccctgctcaaggcgctgcacaccaacaccatccggacgtaccgcatcgacccgacggccgaccatgacgcgtgcatgaagctcctggacgaggctggcatctacgtcatcagcgacctgagcgtgccgggcgagtcgatcaaccgcaacgacccgctctgggacacggagctgtacaagcgctacaccgacgtggtcgacagcctcagcaagtacagcaacgtcatcggcttcttcgccggcaacgaggtgaccaacgagcccaacaacacgcaggcgtcggcctacgtcaaggcggccgtccgcgacgtcaaggcgtacatcaaggagaacgtggaccgctgggtgggcgtcggctacgccgccaacgacgactcgaacatccgcgccgacattgcccactacttcaactgcggcgaccaggatgaggccatcgacttctggggctacaacatctacgagtggtgcggccacaagacgctcgagacgtcgggctaccagacccagatcgacttcttcaagaactactcggtccccgtcttcttcgccgagtacggctgcaacctgcccgacggcgccgagggccgcatctgggaggagacgacggccctgtacggcaaggagatgacgcccgtcttctcgggcggcatcgtctacatgtacttcgaggaggagaacgactacggcctcgtcaagctccagggcgacacggccaagccgatgaagaactacgaggccctcgagtccgtcatcgccaaggtcaacccgacgggcacctcgatggacgcctacgagccgaccaactcgcccgccgcctgcccggatgtgtccaagaactggcaggtcaagggcggcagcctgccgcccaagcccgacgcgaccctgtgcgactgcatgtacgcctcgctgtcgtgcgtgcccgccgacgacaccagcaccaaggactacggcgacatcttcggctacatctgcggcaagttcccggacctgtgcgccggcatcagcggcaacgccaccgagggcacctacggcgcctactccatgtgcagcgccaagcagaagctcggctacgtcctggaccagtactacaaggagcagggcagcgccagcgacgcctgcggcttcgacggcaaggccaccctgcaggacgccaaggaggacgacaagtgcagcaaggcgctcgccagcgccagcgccgctaacgacgccgccacctccaccggcggcgccgacagcgagtccagcagcaacgccgccttcgccgccgggcccatgcggtccggcttcgtcctcggcgagctggccgtcggcctctacgtcctcgtcgccatggccgttggcgcgtccatggtcctcctgtaa

SEQ ID NO: 5 - protein, 533 aa, Myceliophthora thermophilia
MRASTASIISASLLLGQASAALPPIVMKGSKFFYENGTQFFIKGIAYQQDTTAAGGDSTSTKAVDYKDPLADEAACKRDVPLLKALHTNTIRTYRIDPTADHDACMKLLDEAGIYVISDLSVPGESINRNDPLWDTELYKRYTDVVDSLSKYSNVIGFFAGNEVTNEPNNTQASAYVKAAVRDVKAYIKENVDRWVGVGYAANDDSNIRADIAHYFNCGDQDEAIDFWGYNIYEWCGHKTLETSGYQTQIDFFKNYSVPVFFAEYGCNLPDGAEGRIWEETTALYGKEMTPVFSGGIVYMYFEEENDYGLVKLQGDTAKPMKNYEALESVIAKVNPTGTSMDAYEPTNSPAACPDVSKNWQVKGGSLPPKPDATLCDCMYASLSCVPADDTSTKDYGDIFGYICGKFPDLCAGISGNATEGTYGAYSMCSAKQKLGYVLDQYYKEQGSASDACGFDGKATLQDAKEDDKCSKALASASAANDAATSTGGADSESSSNAAFAAGPMRSGFVLGELAVGLYVLVAMAVGASMVLL

SEQ ID NO: 6 - protein, 513 aa, Myceliophthora thermophilia
ALPPIVMKGSKFFYENGTQFFIKGIAYQQDTTAAGGDSTSTKAVDYKDPLADEAACKRDVPLLKALHTNTIRTYRIDPTADHDACMKLLDEAGIYVISDLSVPGESINRNDPLWDTELYKRYTDVVDSLSKYSNVIGFFAGNEVTNEPNNTQASAYVKAAVRDVKAYIKENVDRWVGVGYAANDDSNIRADIAHYFNCGDQDEAIDFWGYNIYEWCGHKTLETSGYQTQIDFFKNYSVPVFFAEYGCNLPDGAEGRIWEETTALYGKEMTPVFSGGIVYMYFEEENDYGLVKLQGDTAKPMKNYEALESVIAKVNPTGTSMDAYEPTNSPAACPDVSKNWQVKGGSLPPKPDATLCDCMYASLSCVPADDTSTKDYGDIFGYICGKFPDLCAGISGNATEGTYGAYSMCSAKQKLGYVLDQYYKEQGSASDACGFDGKATLQDAKEDDKCSKALASASAANDAATSTGGADSESSSNAAFAAGPMRSGFVLGELAVGLYVLVAMAVGASMVLL

SEQ ID NO: 7 - DNA, 2763 bp, Myceliophthora thermophilia
atgctctcctggactctagtcgtcgtggccctcgccgtggccccagccatggcaacaagtcctgccgtcaatgtctactggggacagaagggctcggcctcagacagactcagcaccttttgtgacgcctccagcttcgagtatgtcacagtcggcttcatcaacaagtctcccgagaaagactcctccgcgttgaggtatccgggcagtgacttttccgtccactgcatgaacgccgccaagtaccaagacgccaagggagtcgactcgaacctcctcagcaagtgcggccagatcgccgccgatgttcggtattgccagaagaagggcaagaaggtgctcctctccatcggcggtgaatggaacccgcccaagacggactacagcatctctagcccgcccgagggagagtattttgccgacttcatctggggcgccttcggcccgtacaccgcgagctggggagacaaaccgagacctttcgatgactttttcaacgccgacgagggcgaagagcactttgtttttgatggctttgactttgatatcgagcacaagttcacggaccaaagcggttatgtcgccatgatcagaaggctgcgtgccctgacccagctggacacgaccaagcagtatctgatcaccgccgccccggagtgccccctggacgcggatctcttcaagatgaagaccatcattgacacttgtcaattcgatgccctctttgtccagttctacaacaaccccatctgcgccggagttgacaataacaactttgacgactgggcggcctacctcgccaagacccccagcaagaacgcaaagatcttcatcggcctgcctggttctccagacgctgccggctctggctacctagcccctgcatctgcacttcagttgatcaacaagcataagaacaagccggcctttggtggtgtcatggtctgggatgccttctatggtagccagaagtttggcggcaccccattctacgacttgctgcatgattttgcctgcggtgccccgtcccacaccacgactgccccggccccgacggcgacggccactgtttgcgtcaggtggcacacggttgtcagcggtgacacttgctacgagattgccggctcctacggcattaccctggacgacctgtacaagttcaacccgggcattacctgtgacctccaaatcggcgaccaggtctgcgtgaggttcggcgtcccaccccctacaagcagctcgaccagcctctccccctcagccagcactagcacatctgctagcagtagcagtttgacaagaaccaaaacccaggctagtattagcacggcttctagcaccagcaggtcgaccagctcgacgaaaaactcgaccatctcgaccagaacctcgactatctcgaccagaacctcgactatctcgaccagaacctcgactatctcgaccagaacctcgactatctcgaccagaaccttgacaagctcaatcaaaccctcggctagctcaacgaaaacctcggccggctcaactaagagctcgactagttcgactagaacctcgaccagctcagccaagccctcgacaagctcaatcataacctcgaccagctcgactcgtacctcggctaggtcaactaaaggctcggctagctcgaccagagtctcgactagtctcagcccgtcaactagctcgaccagcgtgaccagcgcgaccagcatcaacagctcgagtggcaccagctcctcaacaggcactagcatttcaagcagcctcagcacgccctccacctcgacgtcaactgaggttagcttgactttggttacggagactagttcgaccgagagtcaagctcccagtaagacagctggggattcctccaccatcacctcggcatctggagtcactttgacaacgtccagcggtgcggctacaagtacctcgaccgacgtcgatgactcgtgcccagatgaggagaccagcacgtcaactaccgcgacctttactgggtctgccacccagtcggccaccgagactaccaccgagactgccaccgtcacatccaccccgggatccacttataccagcggcgaggagactaccagcacctcgaccgaggatgatgagactagcacctctgctgttgtgtccgctacccagaccgccacatcgcctggggccaccatcaccggatcgtcggcctcggacattagcgccactgcaagcagcaccgcctccgagggctggacaacgtctaccatctactcgaccaccacctacaccatcactagctgcccggttaccgtgaccgactgccccggcaagatcggccaggtcacgaccgagacgatcgccatcagcacgaccgtatgccccatcaccgaggggactggcccgtcaacctcggcctcctcgcctccggcgccggtcgagtcgggcagtggtgccaaacctcctcccctgcctaccggcagggagggcgaggacacggactcgacatcgaccacgcgggttaccacaacacgcttcactaccctgacggtgcccaagccagaggccacgggcgcagcggctaacccctcgtcgtcgtcgtcgtcgtcgtcgtcgtcgtcgtcatggtccccgtcggccggcctccccaccaagtcgggctccccgcccccgccgtcgacgacgaccatccccgtgtttgcgggtgccggccgcaacaccgtcacgcttggtgtgccggctgttctggctgtcgttctcgtcctcgctatttaa

SEQ ID NO: 8 - protein, 920 aa, Myceliophthora thermophilia
MLSWTLVVVALAVAPAMATSPAVNVYWGQKGSASDRLSTFCDASSFEYVTVGFINKSPEKDSSALRYPGSDFSVHCMNAAKYQDAKGVDSNLLSKCGQIAADVRYCQKKGKKVLLSIGGEWNPPKTDYSISSPPEGEYFADFIWGAFGPYTASWGDKPRPFDDFFNADEGEEHFVFDGFDFDIEHKFTDQSGYVAMIRRLRALTQLDTTKQYLITAAPECPLDADLFKMKTIIDTCQFDALFVQFYNNPICAGVDNNNFDDWAAYLAKTPSKNAKIFIGLPGSPDAAGSGYLAPASALQLINKHKNKPAFGGVMVWDAFYGSQKFGGTPFYDLLHDFACGAPSHTTTAPAPTATATVCVRWHTVVSGDTCYEIAGSYGITLDDLYKFNPGITCDLQIGDQVCVRFGVPPPTSSSTSLSPSASTSTSASSSSLTRTKTQASISTASSTSRSTSSTKNSTISTRTSTISTRTSTISTRTSTISTRTSTISTRTLTSSIKPSASSTKTSAGSTKSSTSSTRTSTSSAKPSTSSIITSTSSTRTSARSTKGSASSTRVSTSLSPSTSSTSVTSATSINSSSGTSSSTGTSISSSLSTPSTSTSTEVSLTLVTETSSTESQAPSKTAGDSSTITSASGVTLTTSSGAATSTSTDVDDSCPDEETSTSTTATFTGSATQSATETTTETATVTSTPGSTYTSGEETTSTSTEDDETSTSAVVSATQTATSPGATITGSSASDISATASSTASEGWTTSTIYSTTTYTITSCPVTVTDCPGKIGQVTTETIAISTTVCPITEGTGPSTSASSPPAPVESGSGAKPPPLPTGREGEDTDSTSTTRVTTTRFTTLTVPKPEATGAAANPSSSSSSSSSSSSWSPSAGLPTKSGSPPPPSTTTIPVFAGAGRNTVTLGVPAVLAVVLVLAI

SEQ ID NO: 9 - protein, 902 aa, Myceliophthora thermophilia
TSPAVNVYWGQKGSASDRLSTFCDASSFEYVTVGFINKSPEKDSSALRYPGSDFSVHCMNAAKYQDAKGVDSNLLSKCGQIAADVRYCQKKGKKVLLSIGGEWNPPKTDYSISSPPEGEYFADFIWGAFGPYTASWGDKPRPFDDFFNADEGEEHFVFDGFDFDIEHKFTDQSGYVAMIRRLRALTQLDTTKQYLITAAPECPLDADLFKMKTIIDTCQFDALFVQFYNNPICAGVDNNNFDDWAAYLAKTPSKNAKIFIGLPGSPDAAGSGYLAPASALQLINKHKNKPAFGGVMVWDAFYGSQKFGGTPFYDLLHDFACGAPSHTTTAPAPTATATVCVRWHTVVSGDTCYEIAGSYGITLDDLYKFNPGITCDLQIGDQVCVRFGVPPPTSSSTSLSPSASTSTSASSSSLTRTKTQASISTASSTSRSTSSTKNSTISTRTSTISTRTSTISTRTSTISTRTSTISTRTLTSSIKPSASSTKTSAGSTKSSTSSTRTSTSSAKPSTSSIITSTSSTRTSARSTKGSASSTRVSTSLSPSTSSTSVTSATSINSSSGTSSSTGTSISSSLSTPSTSTSTEVSLTLVTETSSTESQAPSKTAGDSSTITSASGVTLTTSSGAATSTSTDVDDSCPDEETSTSTTATFTGSATQSATETTTETATVTSTPGSTYTSGEETTSTSTEDDETSTSAVVSATQTATSPGATITGSSASDISATASSTASEGWTTSTIYSTTTYTITSCPVTVTDCPGKIGQVTTETIAISTTVCPITEGTGPSTSASSPPAPVESGSGAKPPPLPTGREGEDTDSTSTTRVTTTRFTTLTVPKPEATGAAANPSSSSSSSSSSSSWSPSAGLPTKSGSPPPPSTTTIPVFAGAGRNTVTLGVPAVLAVVLVLAI

SEQ ID NO: 10 - DNA, 1281 bp, Myceliophthora thermophilia
atggtgactccctctctgaagaaggcagctctggctgccctgtccctcttcccgctcctctccctagcttcgccggtgccagcaacagccgaagctagcgtacagacccggcagtcatcgggatacaagaacatcgtgtactttaccaactggggtatttacggccgcaactaccagccagaccagctgcccgcgtctcagctcacccacgtgctctattcctttgccaacatcaggtccaacggcgaggtattcctctccgacacgtatgcggacctagagaagcactatcccaacgactcatggaatgacgtcggaaacaacgtgtacggctgcgtcaagcagctcttcctgctcaagaaggcgaaccgccagctcaagacgctgctctccatcggcggctggacctactcggccaccttccccgcggcggccagcacagccgagagccgagccctcttcgcgtcgtcggcggtccggctcctggccgacctgggcttcgacggcctcgacatcgactgggagtacccggccaacgagcaggaggcggccaacttcgtcctcctgctcaaggcggtccgctcggccctggacgactacgcggcccagcacgcgcccggctaccacttcctcctcaccatcgcctcgccggccggcccgagcaactacgggcacctgccgctgcgcgacatcgccggcgtgatcgacttcttcaacttcatgggctacgactacgccggctcgtggagcaccgcggcgggacaccaggccaacctgtacccgaccgccgacgcgggcaggacgcccttctcgaccgacaaggccctgtccgactacgtcgccgccggcgtcgacccggccaagatcgtgctcggcatgcccatctacggccgctccttcgaggccaccgacggcctgggcaagcccttcaccggcgtcggccagggcagctgggagagcggcgtgtgggactacaaggtgctgccccgggccggcgccaccgtccagtacgacgaggaggccggcgcgacctacagctacgacccggccacgcgcgagctcatcagcttcgacacggtcgacatggtcaagaagaaggtcgactacgtcaagcagaagggcttcgccggcagcatgttctgggaggcctccgccgaccgcaccggcgaccagagcctcatcggcgccagcttcggcgccctcggcggcatcgaccagtcccagaaccagctgtcgtacccggacagcaagtatgataacctcagggccggcttcccgtga

SEQ ID NO: 11 - protein, 426 aa, Myceliophthora thermophilia
MVTPSLKKAALAALSLFPLLSLASPVPATAEASVQTRQSSGYKNIVYFTNWGIYGRNYQPDQLPASQLTHVLYSFANIRSNGEVFLSDTYADLEKHYPNDSWNDVGNNVYGCVKQLFLLKKANRQLKTLLSIGGWTYSATFPAAASTAESRALFASSAVRLLADLGFDGLDIDWEYPANEQEAANFVLLLKAVRSALDDYAAQHAPGYHFLLTIASPAGPSNYGHLPLRDIAGVIDFFNFMGYDYAGSWSTAAGHQANLYPTADAGRTPFSTDKALSDYVAAGVDPAKIVLGMPIYGRSFEATDGLGKPFTGVGQGSWESGVWDYKVLPRAGATVQYDEEAGATYSYDPATRELISFDTVDMVKKKVDYVKQKGFAGSMFWEASADRTGDQSLIGASFGALGGIDQSQNQLSYPDSKYDNLRAGFP

SEQ ID NO: 12 - protein, 403 aa, Myceliophthora thermophilia
SPVPATAEASVQTRQSSGYKNIVYFTNWGIYGRNYQPDQLPASQLTHVLYSFANIRSNGEVFLSDTYADLEKHYPNDSWNDVGNNVYGCVKQLFLLKKANRQLKTLLSIGGWTYSATFPAAASTAESRALFASSAVRLLADLGFDGLDIDWEYPANEQEAANFVLLLKAVRSALDDYAAQHAPGYHFLLTIASPAGPSNYGHLPLRDIAGVIDFFNFMGYDYAGSWSTAAGHQANLYPTADAGRTPFSTDKALSDYVAAGVDPAKIVLGMPIYGRSFEATDGLGKPFTGVGQGSWESGVWDYKVLPRAGATVQYDEEAGATYSYDPATRELISFDTVDMVKKKVDYVKQKGFAGSMFWEASADRTGDQSLIGASFGALGGIDQSQNQLSYPDSKYDNLRAGFP

SEQ ID NO: 13 - DNA, 1176 bp, Myceliophthora thermophilia
atggcagcattgcggctgttctggttactactctgcttcttctcacttagcatggccgtcaagtcgaagccgaagcgggacctgcgatgcctcatgtattttaccggtcagcacccagtggcaccccccgttgagaagctccgacatgtaacgcacgtcgccgtggctttcatgagccctggtctcttcaacgagcccggacggaccgagtggccattgttcaccaccgtcgatgacgtccgggccaagttcccggagaagaccaaggttttggtggccattggtggctggggagacacgatcggcttctccgtcgctgctctgaatgacgaaacgcgaaagacgtttgccgagaatgtggccagcatggtcgcagccacgggtgcggatggggttgacattgactgggaatatccggggggtaacggcgaggattacaagaaggtgcctaattcagccaaggcctgggagattggtgcctaccctctccttttcgcagagctgcgcgccgccctcgggcctcacaagatcgtctcggccgcggtgcccggcctgaagcgggacatgcttgccttcacccgcgagacggtgccccgaatcatgcgccatgtggacttcttgaatgtcatgacgtacgatctcatgaaccgccgcgacgtggtgaccaagcaccacaccggggtggagctgagcctcgaggccgtcgacgcctacgtctctgccggcgctgcgccccagagactcaatttggggtttgccttttataccaggtacttcaagacggaacacgacgcctgcgcgctcgcctcgccgataggctgcccgacgttgctgctcgaagacccggagacgggcgaagatctcggccgcagcggggcgttctcgtggcacgattcggtgccggatgaagtggccgagtcatttgcgcgggcgctggatcacggcgtctacgacgaggaggggggcggatactactattgggatgccatggaggatttctggtggacgtttgacacgcccgacgccatcgagcgcaagtttcctcggatactaggtaagcggcggttgggaggagtctttgcttggggaatcggcgaagacgcacctctgttcaaacactttgcagcactcaatgacgagttggagagatacctggaaggcaaggacgagctgtga

SEQ ID NO: 14 - protein, 391 aa, Myceliophthora thermophilia
MAALRLFWLLLCFFSLSMAVKSKPKRDLRCLMYFTGQHPVAPPVEKLRHVTHVAVAFMSPGLFNEPGRTEWPLFTTVDDVRAKFPEKTKVLVAIGGWGDTIGFSVAALNDETRKTFAENVASMVAATGADGVDIDWEYPGGNGEDYKKVPNSAKAWEIGAYPLLFAELRAALGPHKIVSAAVPGLKRDMLAFTRETVPRIMRHVDFLNVMTYDLMNRRDVVTKHHTGVELSLEAVDAYVSAGAAPQRLNLGFAFYTRYFKTEHDACALASPIGCPTLLLEDPETGEDLGRSGAFSWHDSVPDEVAESFARALDHGVYDEEGGGYYYWDAMEDFWWTFDTPDAIERKFPRILGKRRLGGVFAWGIGEDAPLFKHFAALNDELERYLEGKDEL

SEQ ID NO: 15 - protein, 372 aa, Myceliophthora thermophilia
VKSKPKRDLRCLMYFTGQHPVAPPVEKLRHVTHVAVAFMSPGLFNEPGRTEWPLFTTVDDVRAKFPEKTKVLVAIGGWGDTIGFSVAALNDETRKTFAENVASMVAATGADGVDIDWEYPGGNGEDYKKVPNSAKAWEIGAYPLLFAELRAALGPHKIVSAAVPGLKRDMLAFTRETVPRIMRHVDFLNVMTYDLMNRRDVVTKHHTGVELSLEAVDAYVSAGAAPQRLNLGFAFYTRYFKTEHDACALASPIGCPTLLLEDPETGEDLGRSGAFSWHDSVPDEVAESFARALDHGVYDEEGGGYYYWDAMEDFWWTFDTPDAIERKFPRILGKRRLGGVFAWGIGEDAPLFKHFAALNDELERYLEGKDEL

SEQ ID NO: 16 - DNA, 2439 bp, Myceliophthora thermophilia
atggctttacccgtactcctcatcgcatgctggtcggcgctggcgggtcaagtactggcccgcaacacctttgatccgctcgcgtacgttgatccgctgatcggagccagcaacggcggcaatgtgttcccgggcgcctcgctgccgtacggcatggcgaaagcagtcgccgataccgacagcggcagccggcagggcggcttcactatggatggcgccgccgtcaccggcttcagcaccatgcacgacagcgggaccggagggaatccgagcttgggcaactttgcactcttcgcctacacaagctgccccggtggcgacatcaaccgatgtgccttccccaagaagacgcgtgctgcctttggacgcttccgcaatagcaatgtctcagcaaagcccggcacctttgacatcaccttgaacagcggcatccgagccgagatgacgacgactcatcacgcctcgctcttcaggtttaccttcccgagcgacggggctgatgaggagccagcccgacccctcatcttgcaggatctcacagatctggccgattctaggcaggataacgctacagtcgccgtggaccctaagacgggccgcatcaccggcagcgcccgcttcctgcccagctttggcgccggcacgtttgtcttgcacttctgcaccgacttcaagggcgccgaggtagcggacagcggcgtattcgtcaatagtcgggccagcaccgaggtccacaacctgaccatctcaagatccatcaatggctatcccctccccgggggggcgtttgtgaggtttaactccggcgccgagcccatccttgtacggactgctaccagcttcatcagtgccgagcgagcgtgcgagcacgccgagaaggagattcccgacttcgacttcactgccgtctccaaggccgcaactgatgtctggagggccaagatgagtccgatcaaggtatcaacgaaacaggtgaacagctcgctgttgacaaacttctacagcggcatttaccggaccataatcaaccctcaaaactacacaggggagaatcccctgtggtccagcaaggagccgtactttgactcattctactgcatttgggaccaatttcgatcacagcttccgcttttgaccatcacggatcccacagccgtgactgggatggttcgctcgctgatcgacacataccgccatgtcggatggcttcccgattgccggatgagcctgagtaaaggctacactcagggcgggtccaacgctgacgttgtgttagcggatgctcacgtcaagggactcagagagggcatcaacgttgaaccttacgactggtgctgcgaagggcggggagggctcgacagctggaagtctctcggctacattccagtccaagacttcgactacaagggctttggtaccatgacgagaagcatctcgcgtactctggaatacgcctataacgattactgcatcgcccagatagccgcggctctcggcaagtctgccgagaaggaaaagtacctcgagtcgagcggcaactggcagaacctcttcaaggaagatcaaacctcgatctggtggaacggcaccgacacgggattcaccggcttttttcagccacgctacctcaacaagacctggggcttccaagatccgctaaactgcagcaatcttgacaccgccagcgtttgctcgctccagaacactggccgcgagacctttgagagcagcatctgggagtatggcttcttcgtcccccacgaccaggcaaccctcataagcctctacggcggccccgccgccttcgtgtcccgcctcgactacctccacgacagcgggataacctacattggcaatgagccttccttcctcaccgtcttccaataccactatgccggccgtccggccctctcggcgcgccgagcccacttttacattcctgccttcttctcccctaccccgggcggcctgcccggaaacgacgacagcggcgcaatgggatccttcgtggccttttcgatgatgggcctgttccccaacccgggtcagaacgtctacctgatcacgccacccttcttcgagagcgtcaacatcacgcacccgctcacccacaggaccgcccgcatcaggaacgtcaactttgaccccacgtacaaggccatctacatccagagcgccacgcttgacggcaagctgtacaccaagaactgggtcgaccacagcttctttaccgagggcaaggagcttgtgctgacgctggggcggaacgagagcgcctggggcaccaaggtcgaggacctacccccgagtctgggagcgtatgaagggttcactaagaggagtgggtcactccggagaacggcagccccggatctctggagaaagacggcggctttcaaggggcagtttggaagcctcgaggagagtttgggcatgtga

SEQ ID NO: 17 - protein, 812 aa, Myceliophthora thermophilia
MALPVLLIACWSALAGQVLARNTFDPLAYVDPLIGASNGGNVFPGASLPYGMAKAVADTDSGSRQGGFTMDGAAVTGFSTMHDSGTGGNPSLGNFALFAYTSCPGGDINRCAFPKKTRAAFGRFRNSNVSAKPGTFDITLNSGIRAEMTTTHHASLFRFTFPSDGADEEPARPLILQDLTDLADSRQDNATVAVDPKTGRITGSARFLPSFGAGTFVLHFCTDFKGAEVADSGVFVNSRASTEVHNLTISRSINGYPLPGGAFVRFNSGAEPILVRTATSFISAERACEHAEKEIPDFDFTAVSKAATDVWRAKMSPIKVSTKQVNSSLLTNFYSGIYRTIINPQNYTGENPLWSSKEPYFDSFYCIWDQFRSQLPLLTITDPTAVTGMVRSLIDTYRHVGWLPDCRMSLSKGYTQGGSNADVVLADAHVKGLREGINVEPYDWCCEGRGGLDSWKSLGYIPVQDFDYKGFGTMTRSISRTLEYAYNDYCIAQIAAALGKSAEKEKYLESSGNWQNLFKEDQTSIWWNGTDTGFTGFFQPRYLNKTWGFQDPLNCSNLDTASVCSLQNTGRETFESSIWEYGFFVPHDQATLISLYGGPAAFVSRLDYLHDSGITYIGNEPSFLTVFQYHYAGRPALSARRAHFYIPAFFSPTPGGLPGNDDSGAMGSFVAFSMMGLFPNPGQNVYLITPPFFESVNITHPLTHRTARIRNVNFDPTYKAIYIQSATLDGKLYTKNWVDHSFFTEGKELVLTLGRNESAWGTKVEDLPPSLGAYEGFTKRSGSLRRTAAPDLWRKTAAFKGQFGSLEESLGM

SEQ ID NO: 18 - protein, 792 aa, Myceliophthora thermophilia
RNTFDPLAYVDPLIGASNGGNVFPGASLPYGMAKAVADTDSGSRQGGFTMDGAAVTGFSTMHDSGTGGNPSLGNFALFAYTSCPGGDINRCAFPKKTRAAFGRFRNSNVSAKPGTFDITLNSGIRAEMTTTHHASLFRFTFPSDGADEEPARPLILQDLTDLADSRQDNATVAVDPKTGRITGSARFLPSFGAGTFVLHFCTDFKGAEVADSGVFVNSRASTEVHNLTISRSINGYPLPGGAFVRFNSGAEPILVRTATSFISAERACEHAEKEIPDFDFTAVSKAATDVWRAKMSPIKVSTKQVNSSLLTNFYSGIYRTIINPQNYTGENPLWSSKEPYFDSFYCIWDQFRSQLPLLTITDPTAVTGMVRSLIDTYRHVGWLPDCRMSLSKGYTQGGSNADVVLADAHVKGLREGINVEPYDWCCEGRGGLDSWKSLGYIPVQDFDYKGFGTMTRSISRTLEYAYNDYCIAQIAAALGKSAEKEKYLESSGNWQNLFKEDQTSIWWNGTDTGFTGFFQPRYLNKTWGFQDPLNCSNLDTASVCSLQNTGRETFESSIWEYGFFVPHDQATLISLYGGPAAFVSRLDYLHDSGITYIGNEPSFLTVFQYHYAGRPALSARRAHFYIPAFFSPTPGGLPGNDDSGAMGSFVAFSMMGLFPNPGQNVYLITPPFFESVNITHPLTHRTARIRNVNFDPTYKAIYIQSATLDGKLYTKNWVDHSFFTEGKELVLTLGRNESAWGTKVEDLPPSLGAYEGFTKRSGSLRRTAAPDLWRKTAAFKGQFGSLEESLGM

SEQ ID NO: 19 - DNA, 1887 bp, Myceliophthora thermophilia
atgctgctcacctggaccgtggtcgtagctctggccatggccgtccgcgctatgtcgccccggtcataccctccatcgctgctaagggatgggctcagcacgagagcggggggcccttcgattcctgatgacattgtcttccgagacatgtggatggcgctcagcgatttgcaggagacgtactttgagcgctggctcgggacctggcctgacggaatcgactggacccgcgccgtaatgggcacgcatgtggccgctacactgcggaccatctcggacgagctgcggctcagcgagcccacccaggacgccgggtgcgtcaccaggaaggaagacgttgtcggcgggtattttgccgacgtgatcgcctactactttgccgaagacacctttgccatccgaaatcaggcctacgacgacatgctctgggtcgttttggcttggctggagtccatccggttcatcgacgagcacagcagggttgttgcctccgggtcgtcgtgctccacagagtcgggagcctggcccggtgccgaaacgtggtatggcagtcgctggatacccgccttcgcccaccgcgcgaggatattctgggagctggcggccaagggatgggacacgaagctctgcggaggcggcatgatttggaatccgcgcctgatgccgtacaagaacgccatcacgaaccaactcttcatatcggcctccattagcatgtatctccactttcccggcgatactaactcatctcctttctccgccggcgtcggttcggccctcgccggcggtgtcggtaccgccgactggccgccccacgaccccatctacggcaaggccgcccgggatgcccacgactggcttgcttcgtccaacatgaccaacgcgcaaggcctctacgcggacggcttccacgtctcgggccagagcaccggcagcaacaacacgcgctgtgacgaccgcgacgagatggtctacacctacaaccagggcgtcctcctgtcgggactgatgggcctgtaccgggccaccggtcaagaacgctacctccgcgagggccacaccctgattcggaacgtcatctccgccaccgggtacgatctcgagcaggacaagccggtcgacccgatccacccggatcgtgtccctccctggcgcggcctcggccgcgtgggcgtcctagaggaagcatgcgacgcgtcggggacgtgctcccaggacgcgcagaccttcaagggcatctggatgcatcactttgccgcgttctgcgcgccggccgcgctgcggttcacaggctcggactctctcggctctcaacggcctcagcctcacggggaggcaggggcaggggcgggggccgggactatccgggcgcggcacgagcgcgaatgtaggaggtacatcccgtggctgcgccacaacgtgcgcgccgcgacgggcacgagggacgaaaacggcctgtttggcatgtggtggaccgccgggctgctgacgctcacgagcggcgaggccatcgaggcggccggggacctgcacccgctcccgccggggggggacgggggggaggtggtggattaccggaacacgggagtgccgctggatcctaagtggactcgtgcggccggggatgggtggtcgccggcagtgccggtgccggatgcgaaaaggaccggtcaggcaccgctcggtcacggtcagggtgttgttgttggtggtggttcgggttcgggggaagttaagagagccggatcggagaagagggcggaggctttggaggagagcggtgcttatgatcccaatcttcgcgggcgagggaggacggtggaaacgcagggcggcggactggccgtcctcagggcgttgtgggtggtttctagactcgagggatag

SEQ ID NO: 20 - protein, 628 aa, Myceliophthora thermophilia
MLLTWTVVVALAMAVRAMSPRSYPPSLLRDGLSTRAGGPSIPDDIVFRDMWMALSDLQETYFERWLGTWPDGIDWTRAVMGTHVAATLRTISDELRLSEPTQDAGCVTRKEDVVGGYFADVIAYYFAEDTFAIRNQAYDDMLWVVLAWLESIRFIDEHSRVVASGSSCSTESGAWPGAETWYGSRWIPAFAHRARIFWELAAKGWDTKLCGGGMIWNPRLMPYKNAITNQLFISASISMYLHFPGDTNSSPFSAGVGSALAGGVGTADWPPHDPIYGKAARDAHDWLASSNMTNAQGLYADGFHVSGQSTGSNNTRCDDRDEMVYTYNQGVLLSGLMGLYRATGQERYLREGHTLIRNVISATGYDLEQDKPVDPIHPDRVPPWRGLGRVGVLEEACDASGTCSQDAQTFKGIWMHHFAAFCAPAALRFTGSDSLGSQRPQPHGEAGAGAGAGTIRARHERECRRYIPWLRHNVRAATGTRDENGLFGMWWTAGLLTLTSGEAIEAAGDLHPLPPGGDGGEVVDYRNTGVPLDPKWTRAAGDGWSPAVPVPDAKRTGQAPLGHGQGVVVGGGSGSGEVKRAGSEKRAEALEESGAYDPNLRGRGRTVETQGGGLAVLRALWVVSRLEG

SEQ ID NO: 21 - protein, 611 aa, Myceliophthora thermophilia
MSPRSYPPSLLRDGLSTRAGGPSIPDDIVFRDMWMALSDLQETYFERWLGTWPDGIDWTRAVMGTHVAATLRTISDELRLSEPTQDAGCVTRKEDVVGGYFADVIAYYFAEDTFAIRNQAYDDMLWVVLAWLESIRFIDEHSRVVASGSSCSTESGAWPGAETWYGSRWIPAFAHRARIFWELAAKGWDTKLCGGGMIWNPRLMPYKNAITNQLFISASISMYLHFPGDTNSSPFSAGVGSALAGGVGTADWPPHDPIYGKAARDAHDWLASSNMTNAQGLYADGFHVSGQSTGSNNTRCDDRDEMVYTYNQGVLLSGLMGLYRATGQERYLREGHTLIRNVISATGYDLEQDKPVDPIHPDRVPPWRGLGRVGVLEEACDASGTCSQDAQTFKGIWMHHFAAFCAPAALRFTGSDSLGSQRPQPHGEAGAGAGAGTIRARHERECRRYIPWLRHNVRAATGTRDENGLFGMWWTAGLLTLTSGEAIEAAGDLHPLPPGGDGGEVVDYRNTGVPLDPKWTRAAGDGWSPAVPVPDAKRTGQAPLGHGQGVVVGGGSGSGEVKRAGSEKRAEALEESGAYDPNLRGRGRTVETQGGGLAVLRALWVVSRLEG

SEQ ID NO: 22 - DNA, 1365 bp, Myceliophthora thermophilia
atggtctggacacggttcgcggccgccgcccttgctggggccggcgtcgcaagcgccgcctacagcattgcgacaaccgacggcatcaagaagaccgccgcggacgtcgcttgggatcttttgcagtactatcacggaaacgagtcagggcagacgcccggaatcctgcctggtcctcccccgaatggtgattactactggtgggaggccggtgccatgtgggggaccttcatcgattattggaagttgacgggcgactcgacgtacaacgacctggtcacccaagcgatgctttttcaggttggcccagatcgggactataggccgcccaactacacggcctcgcttggcaacgacgaccaggcattctggggcatgtcggccatgactgccgccgagaacaactttcccaatccaccggccgaccagccgcagtggctcgctctcgcccaagccgtcttcaacacccaggcctcccccgaagagcacgacgatacttgcaacggcgggttgcggtggcagatctacctctccaacaacggatacgattacaagaacagcattgccaacggctgtttctttaacttgggcgcacgactagcgcgttacaccggcaacaaaacatacgccgagtgggccgagaaaacatgggactgggtgaggggcgtcggttacatggacgaccagtacaacatctacgacggagggcatgtgcagcacaattgcaccgacatcaaccgtgcccagttctcgtacaacaacgccgtctacctcctcggcgcggcgttcatgtacaattataccaacggtagcgacaagtggagagaggccatcgagggcctggccgacgccaccatcaagacgttcttccccgacggggtggcgtacgagatcgcatgcgagcagggcatgacatgcacggccgacatgctcagcttcaaggggtacctgcaccgctggttggctacggccacgcaggttgcgcccatcctgtccgagaagatcctcccggtcctcaagacgtcgaccgaggccgccgtgagcacctgcacgggcgaggccaacggtcgcacgtgtggcttccagtggagcaagcgccagtacgacggcagccacggcgccggccagcagatgaacgtcctcgctgccgtgtcgtcgctgctgatcgaccagagcccgccgccctatacgaacatgtccggcggcaccagcaagggcgatcccctggccgggacgaactcgcgcagcacgctgaacgagccgcgccagatcacgggcggagacagagccggtgccggcattcttaccattctcctcatagctgcgggagtcggcacgtttgggtggatgagcaccggggtttga

SEQ ID NO: 23 - protein, 454 aa, Myceliophthora thermophilia
MVWTRFAAAALAGAGVASAAYSIATTDGIKKTAADVAWDLLQYYHGNESGQTPGILPGPPPNGDYYWWEAGAMWGTFIDYWKLTGDSTYNDLVTQAMLFQVGPDRDYRPPNYTASLGNDDQAFWGMSAMTAAENNFPNPPADQPQWLALAQAVFNTQASPEEHDDTCNGGLRWQIYLSNNGYDYKNSIANGCFFNLGARLARYTGNKTYAEWAEKTWDWVRGVGYMDDQYNIYDGGHVQHNCTDINRAQFSYNNAVYLLGAAFMYNYTNGSDKWREAIEGLADATIKTFFPDGVAYEIACEQGMTCTADMLSFKGYLHRWLATATQVAPILSEKILPVLKTSTEAAVSTCTGEANGRTCGFQWSKRQYDGSHGAGQQMNVLAAVSSLLIDQSPPPYTNMSGGTSKGDPLAGTNSRSTLNEPRQITGGDRAGAGILTILLIAAGVGTFGWMSTGV

SEQ ID NO: 24 - protein, 435 aa, Myceliophthora thermophilia
AYSIATTDGIKKTAADVAWDLLQYYHGNESGQTPGILPGPPPNGDYYWWEAGAMWGTFIDYWKLTGDSTYNDLVTQAMLFQVGPDRDYRPPNYTASLGNDDQAFWGMSAMTAAENNFPNPPADQPQWLALAQAVFNTQASPEEHDDTCNGGLRWQIYLSNNGYDYKNSIANGCFFNLGARLARYTGNKTYAEWAEKTWDWVRGVGYMDDQYNIYDGGHVQHNCTDINRAQFSYNNAVYLLGAAFMYNYTNGSDKWREAIEGLADATIKTFFPDGVAYEIACEQGMTCTADMLSFKGYLHRWLATATQVAPILSEKILPVLKTSTEAAVSTCTGEANGRTCGFQWSKRQYDGSHGAGQQMNVLAAVSSLLIDQSPPPYTNMSGGTSKGDPLAGTNSRSTLNEPRQITGGDRAGAGILTILLIAAGVGTFGWMSTGV

SEQ ID NO: 25 - DNA, 1254 bp, Myceliophthora thermophilia
atgaagcctcgtttgttcctcacaatcttcggagggttcagtcaatcgtggctagcccaaggagttgcccgtcgcatcgatacccagcacgaagcagtcgaagcagcccctgagccctacagcgatgccgcggcgactggcccttcgccatccgagaccaggtacctgcagccgaggctagacttcgatatccgagcagcagcaaggtcggccatcgaggccatgaacaagaagttctattcctccgcgcaggcaatctggtcgccaggtgacccgtggtggctcagcggcgtagctctcaccgctgtcatagactacatgcgcaagacaggtaccggcgattacctgggtcaagttgagaacataatccgggtacagagaacccaacatccgcagaacggtggcgagttccgcgccgactcgactgacgatacgggatggtgggggctcgccatgattcggatgtacgacctgacgggcaacagcacctacctcaacatcgcgaccgaggacgagacctttatgtacaaatactggacttccttcccttgcggtggtggaatatatgtcgacaccaaaaccaagacatacaagaacgccatcgcaaacgagctctacatcaagctcgcggcctccctgcacaaccgcatcgccaacgataccaagtacctttctcgagcggaaaccgcctggacctggttccaaagatcgggcatgatcaagggcgacaacctgatcaacgatggactagccgcttccagcaacggggcctgctacaacaataggctgcccgtctggacctacaaccaaggcgtcattctcggcgccctcgtcgaactctaccgtgccacctcctccgagagctacctgacctcggcccgcgccatcgccgacgcggtcctctccaacgacggcagcaccaatccgcagctcagctccccatacgacggcgaaggcggcgggggcgtcctgacggaggcgtcctgcaagcccgacgagccggacgggtgcaaccatgaccagcaggtcttcaagggcgtcctggcgtacaacctggccgagctcgacgcggccgtcccggacggcagccggccttaccgggcgtacctggagcggaacgcccagagcgcgtacgtcaacgcgcgggagcaggcgacagacctgtacgacgtcggctgggcagggccgcccttcaggaactcgacaatcgggaagcaggcgagcgcggtcgggctgctggtcgctgtggtctga

SEQ ID NO: 26 - protein, 417 aa, Myceliophthora thermophilia
MKPRLFLTIFGGFSQSWLAQGVARRIDTQHEAVEAAPEPYSDAAATGPSPSETRYLQPRLDFDIRAAARSAIEAMNKKFYSSAQAIWSPGDPWWLSGVALTAVIDYMRKTGTGDYLGQVENIIRVQRTQHPQNGGEFRADSTDDTGWWGLAMIRMYDLTGNSTYLNIATEDETFMYKYWTSFPCGGGIYVDTKTKTYKNAIANELYIKLAASLHNRIANDTKYLSRAETAWTWFQRSGMIKGDNLINDGLAASSNGACYNNRLPVWTYNQGVILGALVELYRATSSESYLTSARAIADAVLSNDGSTNPQLSSPYDGEGGGGVLTEASCKPDEPDGCNHDQQVFKGVLAYNLAELDAAVPDGSRPYRAYLERNAQSAYVNAREQATDLYDVGWAGPPFRNSTIGKQASAVGLLVAVV

SEQ ID NO: 27 - protein, 396 aa, Myceliophthora thermophilia
VARRIDTQHEAVEAAPEPYSDAAATGPSPSETRYLQPRLDFDIRAAARSAIEAMNKKFYSSAQAIWSPGDPWWLSGVALTAVIDYMRKTGTGDYLGQVENIIRVQRTQHPQNGGEFRADSTDDTGWWGLAMIRMYDLTGNSTYLNIATEDETFMYKYWTSFPCGGGIYVDTKTKTYKNAIANELYIKLAASLHNRIANDTKYLSRAETAWTWFQRSGMIKGDNLINDGLAASSNGACYNNRLPVWTYNQGVILGALVELYRATSSESYLTSARAIADAVLSNDGSTNPQLSSPYDGEGGGGVLTEASCKPDEPDGCNHDQQVFKGVLAYNLAELDAAVPDGSRPYRAYLERNAQSAYVNAREQATDLYDVGWAGPPFRNSTIGKQASAVGLLVAVV

SEQ ID NO: 28 - DNA, 2517 bp, Myceliophthora thermophilia
atggcgtcgggacgccaattgagctttctgctcaccctcggctggctcagtgccctcttgaccgcccttggcttcgcaactgcagtatcagcgaacgcggctaccgatgacgaaccgatcctgcaccgcgagattgggcgccagaataatcagagtttactatggggcccctatcgccccaacctctacttcggggtgcgccccaggatccctcagagcttgatgacgggcttgatgtggggcaaagtcgagacatacactgacttccagcacacggtacggtacacctgcgaacagaatgagggcatgaaggggtatggatgggaggagtacgacccccggcggggcggtatccagaccatccacgacatccagaacggcctcgacctcaccacctcgttcgtcaaggtacccggcggcacgcacgggggcaattgggcggcacgcatcaagggagtgctcaacggtgatgcgcccaaggaccagaagactatcgtggccttctacgtcacccaggaaggggccgactcggagctgcaggcgcttcccggcgaggatgagtttggatatgagggggacgtcaccctgaaggggcactcggagtcgcttggtaactacaagcttgtcgtcacgagaggccaaggggtccagcccaagagcgaccatgacatctcgcgaatccgcggtcccggccagaccgtcgtccagtccttgacctaccccgaggagcacatatggcaggcgaagccgatcctattcagacagctcaaggagggcgtcgactggttggtcgagaacaaatacgacgtccaggaccccccgccgccatggcaagtgtacttgctcaccaaccgacccggcgccggaaacgtgcatatcgtgcagaaggtctttgaaggcgactttgagttcgatgtgctcttctctagcgagtcggcaggcaaagagctgacgagcgccgatctgtcgagggagatcaaggagacgaccgagtccttcgccgagcgcttctcgagcgtgttcgccccgaaggctcccttcagtgctgacaggttcaaagagtttggccggagcatgttctccaacctgatcggcggcatcggctacttctacggacatgccgtcgtggaccggtcgtacgcgcccgagtacgatgaggagaacgagggtttctgggaggagactgccgaagcgcgggcccgcaaccagcaggcattggaggggccgtacgagctgttcacgagcatcccatcccggccgttcttcccgaggggcttcctgtgggatgaggggtttcacctccttcccatcgccgactgggacatgaacctcactctcgagattgtcaagagctggttcaacctgatggacgaggacggctggatcggccgcgagcagatcctcggcgccgaagcacgcagcaaagtcccccccgagttccagacacaatatccccactacgccaacccgccgaccctctttttcatcatcgacgcgtttgtggaaaggctcgccggggcggcaaatggcagtctaggagactcgggcaaagaacgactcgcgcaacagcacgacgagtccctccccgccaccgcctccctcgataacccggaagtcggcctcgaacacctccggcgcctgtaccccctcctgcagcgccagttcaactggttccgcaggacccaggccggcgacatcaagtcctacgagcgggaggcctactcctcccaggaaggctaccgctggcgcggccgcacgcccacgcactgcctgacgagcgggctggacgactacccgcgcccgcagccgccgcaccccggcgagctgcacgtcgacctgctgtcgtgggtgggcgtcatggcgcggtcgctggccaacgttgccgacgcgctcggcctctccgcagacgcggagcagtacaagaaggtcctgaccgccatcgagcgcaacctggacgacctccactggtccgaaaaggacggctgctactgcgacgcgaccgtggacgactttgaggagcacacgctcgtctgccacaagggctacatctcgctcttcccgttcctgacgggcctgctcaagcccgacagccccaggttggggaggctgctcaagctgataggcgacgaggaggagctctggagtccgcacggcctgcgcagcctgagcaaacaggacgagttctacggcacggctgaaaactactggcgcagtccggtgtggatcaacatcaattacttggcgattgtccagctttacaacgtggccacacaggaaggtccccatagggagacggcgcgagacctgtactcgcgcctgcgcaagaacattgtcgacacggtctaccagagctgggaggagacgggcttcgcgtgggagcagtacaaccccgagacgggtaagggccagcgcacgcagcacttcactggctggaccagtctggtggtgaagatcatggccatggaggacttgccagcggccgaggcggcagcggggcatgtgagggacgagctgtag

SEQ ID NO: 29 - protein, 838 aa, Myceliophthora thermophilia
MASGRQLSFLLTLGWLSALLTALGFATAVSANAATDDEPILHREIGRQNNQSLLWGPYRPNLYFGVRPRIPQSLMTGLMWGKVETYTDFQHTVRYTCEQNEGMKGYGWEEYDPRRGGIQTIHDIQNGLDLTTSFVKVPGGTHGGNWAARIKGVLNGDAPKDQKTIVAFYVTQEGADSELQALPGEDEFGYEGDVTLKGHSESLGNYKLVVTRGQGVQPKSDHDISRIRGPGQTVVQSLTYPEEHIWQAKPILFRQLKEGVDWLVENKYDVQDPPPPWQVYLLTNRPGAGNVHIVQKVFEGDFEFDVLFSSESAGKELTSADLSREIKETTESFAERFSSVFAPKAPFSADRFKEFGRSMFSNLIGGIGYFYGHAVVDRSYAPEYDEENEGFWEETAEARARNQQALEGPYELFTSIPSRPFFPRGFLWDEGFHLLPIADWDMNLTLEIVKSWFNLMDEDGWIGREQILGAEARSKVPPEFQTQYPHYANPPTLFFIIDAFVERLAGAANGSLGDSGKERLAQQHDESLPATASLDNPEVGLEHLRRLYPLLQRQFNWFRRTQAGDIKSYEREAYSSQEGYRWRGRTPTHCLTSGLDDYPRPQPPHPGELHVDLLSWVGVMARSLANVADALGLSADAEQYKKVLTAIERNLDDLHWSEKDGCYCDATVDDFEEHTLVCHKGYISLFPFLTGLLKPDSPRLGRLLKLIGDEEELWSPHGLRSLSKQDEFYGTAENYWRSPVWININYLAIVQLYNVATQEGPHRETARDLYSRLRKNIVDTVYQSWEETGFAWEQYNPETGKGQRTQHFTGWTSLVVKIMAMEDLPAAEAAAGHVRDEL

SEQ ID NO: 30 - protein, 810 aa, Myceliophthora thermophilia
VSANAATDDEPILHREIGRQNNQSLLWGPYRPNLYFGVRPRIPQSLMTGLMWGKVETYTDFQHTVRYTCEQNEGMKGYGWEEYDPRRGGIQTIHDIQNGLDLTTSFVKVPGGTHGGNWAARIKGVLNGDAPKDQKTIVAFYVTQEGADSELQALPGEDEFGYEGDVTLKGHSESLGNYKLVVTRGQGVQPKSDHDISRIRGPGQTVVQSLTYPEEHIWQAKPILFRQLKEGVDWLVENKYDVQDPPPPWQVYLLTNRPGAGNVHIVQKVFEGDFEFDVLFSSESAGKELTSADLSREIKETTESFAERFSSVFAPKAPFSADRFKEFGRSMFSNLIGGIGYFYGHAVVDRSYAPEYDEENEGFWEETAEARARNQQALEGPYELFTSIPSRPFFPRGFLWDEGFHLLPIADWDMNLTLEIVKSWFNLMDEDGWIGREQILGAEARSKVPPEFQTQYPHYANPPTLFFIIDAFVERLAGAANGSLGDSGKERLAQQHDESLPATASLDNPEVGLEHLRRLYPLLQRQFNWFRRTQAGDIKSYEREAYSSQEGYRWRGRTPTHCLTSGLDDYPRPQPPHPGELHVDLLSWVGVMARSLANVADALGLSADAEQYKKVLTAIERNLDDLHWSEKDGCYCDATVDDFEEHTLVCHKGYISLFPFLTGLLKPDSPRLGRLLKLIGDEEELWSPHGLRSLSKQDEFYGTAENYWRSPVWININYLAIVQLYNVATQEGPHRETARDLYSRLRKNIVDTVYQSWEETGFAWEQYNPETGKGQRTQHFTGWTSLVVKIMAMEDLPAAEAAAGHVRDEL

SEQ ID NO: 31 - DNA, 2949 bp, Myceliophthora thermophilia
atgcacgtcccaggcccattgtcctcgcggtggacggcctaccttggcctgctgtccgcattttctgcagcatttgcacctgcagtcgccgtcaaggagcatgacttcaaaaagtgccatcaatcgggcttttgtaagcgcaaccgcgaattcgccgaccacgccctcgccacgagctcctgggcgtcaccctacaatgtcgcaccagattccggatcgttcaaagatggccagtaccaggctgtgatcttgaagaccaccaacagcggcgagacggttcggcttcccattaccgtctctttccttgagtctggtacagcgcgagtcacggtggacgaagagaagcgccagaaaggagagattgagttgcgccatggcagcaaagcgaggaaagagcgctataacgaggcagagaaatgggccattgttggagggatgactttggacaaggaggccaaggtcgattatgaggacaagacgcagattaccgtcaagtacgggccaacctccaagttcgaggcaaccatcaaattctctcccttcagcatcgacttcaagcgggacggcatcagccacgtcaaactcaacgaccagggcctccttaacatcgagcactggaggccaaaggttgacaaaccggagcccgagaagaaggacggcgattcgactgaagagaataaggcagaggaagcaaaggaggagcccaagggagaggatgagtctacctggtgggaggagacatttggcggcaacaccgataccaagcctcgcggcccggagagcgtcggtcttgacatctccttcgtcggctacgaacacgtctacggcatcccctcccatgccagctcgctgtcgctgaagcagacccgtggcggcgagggcaactaccaggagccgtacaggatgtacaatgctgacgttttcgagtacatcctcgatagcccaatgactctctacggctctattcctttcatgcaggcccatcgtaaggactcgagcgtgggcgttttctggctgaatgccgcggagacgtgggttgacatcaccaaggcgaaagactccaagaacccgctctctctcggcggcaaggccaggaccaacacgcatacccactggttctccgagagcggtctgctggacgtttttgtcttcctcggcccgacgcccaaggatttgaccgccaggtacggtgagctcactggcaccactgcaatgccccaggagttcgctctcggataccatcagtgccgttggaactacgtctcggacgaggacgtaagggatgtggaccgcaagatggacaagttcaagatgccgtacgacgtcatttggctcgacatcgagtacactgacgagaagaagtactttacctgggacaaacactcgtttacagaccccatcggcatgggcaagcagctggacagtcacggcaggaagctggttaccatcattgatccgcacatcaagaataccgacaattaccccgtcgtggcagagctaaagtccaaggaactcggcgtaaagaacaaagatggcaacctcttcgagggctggtgctggccaggctcgtctcactggatcgacgccttcagtccggctgcgcgcgagtggtggtcgtcgcttttcaagtatgacaaattcaagggcaccatggaaaacacgtggatctggaacgacatgaacgagccgtcggtctttaacggtcccgaaaccacgatgcccaaggacaacctccacgacggaaactgggaacaccgcgacgtgcacaacctgaatggcctgacgttccacaacgcgacctaccatgcgctcctcacccggaagcccggcgagctccgccgcccgttcgtgctgacccggtccttctttgccggctcgcagcgggtcggcgccatgtggaccggcgacaaccaggctgcctgggaccacctcaaggcatcgattcccatggtcctcagccagggtatttcgggcttccccttctcgggcgccgacgtcggcggcttctttggcaacccggagaaggagcttttgacgcggtggtaccaagccggcgccttctaccccttcttccgggggcacgcgcacattgatgcgcgacgccgcgagccatacctcgccggcgagccgtacacgaccatcatcgccgcggcgcttcggctgcgctacagcctgctgccgtcgtggtacactgcgttccggcacgcccatctggacggtacgcccattatcaagcccatgttctacacgcatccgtccgaggaggccggcctcgctatcgaggaccagttcttcgtcggcaacacgggcctgctcgccaagcccgtcacggagaaggagaagacgacggtcgatgtgtggatccccgacggcgaggtctactatgactactttacgtaccaggtcatcccgacagtcaagggcaagacggtcacgctggatgcgccgatggagaagatcccgctgctgatgcgcggcgggcacgtgtttgcgcgccgcgacgtgccgcggcgctcgagcgcgctcatgcgctgggacgactacacgctcgtcgtgacggtgccgcgggaaaacaaggtcgccgagggcgacctgtacgtcgacgacggagactcgtttgagtaccagaacggccagtacatccaccgccggttcgtctacgacggcgcggccaagagcctcagctcggtggatgccgagggccgcgacgcggcctcgatccgggagggcgcgtggatgaagcagatgcgctccgtgggcgtgggcaagatcgtggtggtcggcgcgccggccagctgggcgggcaagaagagcgtcaaggtagagagcgagggcaaggtctgggaggccaggatggagtttacgcctgctgggcagggcagagccgcgttcgcggtgatcaagaaggtgggcgtgaggatcggggcggattggaaggtcgagttttga

SEQ ID NO: 32 - protein, 982 aa, Myceliophthora thermophilia
MHVPGPLSSRWTAYLGLLSAFSAAFAPAVAVKEHDFKKCHQSGFCKRNREFADHALATSSWASPYNVAPDSGSFKDGQYQAVILKTTNSGETVRLPITVSFLESGTARVTVDEEKRQKGEIELRHGSKARKERYNEAEKWAIVGGMTLDKEAKVDYEDKTQITVKYGPTSKFEATIKFSPFSIDFKRDGISHVKLNDQGLLNIEHWRPKVDKPEPEKKDGDSTEENKAEEAKEEPKGEDESTWWEETFGGNTDTKPRGPESVGLDISFVGYEHVYGIPSHASSLSLKQTRGGEGNYQEPYRMYNADVFEYILDSPMTLYGSIPFMQAHRKDSSVGVFWLNAAETWVDITKAKDSKNPLSLGGKARTNTHTHWFSESGLLDVFVFLGPTPKDLTARYGELTGTTAMPQEFALGYHQCRWNYVSDEDVRDVDRKMDKFKMPYDVIWLDIEYTDEKKYFTWDKHSFTDPIGMGKQLDSHGRKLVTIIDPHIKNTDNYPVVAELKSKELGVKNKDGNLFEGWCWPGSSHWIDAFSPAAREWWSSLFKYDKFKGTMENTWIWNDMNEPSVFNGPETTMPKDNLHDGNWEHRDVHNLNGLTFHNATYHALLTRKPGELRRPFVLTRSFFAGSQRVGAMWTGDNQAAWDHLKASIPMVLSQGISGFPFSGADVGGFFGNPEKELLTRWYQAGAFYPFFRGHAHIDARRREPYLAGEPYTTIIAAALRLRYSLLPSWYTAFRHAHLDGTPIIKPMFYTHPSEEAGLAIEDQFFVGNTGLLAKPVTEKEKTTVDVWIPDGEVYYDYFTYQVIPTVKGKTVTLDAPMEKIPLLMRGGHVFARRDVPRRSSALMRWDDYTLVVTVPRENKVAEGDLYVDDGDSFEYQNGQYIHRRFVYDGAAKSLSSVDAEGRDAASIREGAWMKQMRSVGVGKIVVVGAPASWAGKKSVKVESEGKVWEARMEFTPAGQGRAAFAVIKKVGVRIGADWKVEF

SEQ ID NO: 33 - protein, 952 aa, Myceliophthora thermophilia
VKEHDFKKCHQSGFCKRNREFADHALATSSWASPYNVAPDSGSFKDGQYQAVILKTTNSGETVRLPITVSFLESGTARVTVDEEKRQKGEIELRHGSKARKERYNEAEKWAIVGGMTLDKEAKVDYEDKTQITVKYGPTSKFEATIKFSPFSIDFKRDGISHVKLNDQGLLNIEHWRPKVDKPEPEKKDGDSTEENKAEEAKEEPKGEDESTWWEETFGGNTDTKPRGPESVGLDISFVGYEHVYGIPSHASSLSLKQTRGGEGNYQEPYRMYNADVFEYILDSPMTLYGSIPFMQAHRKDSSVGVFWLNAAETWVDITKAKDSKNPLSLGGKARTNTHTHWFSESGLLDVFVFLGPTPKDLTARYGELTGTTAMPQEFALGYHQCRWNYVSDEDVRDVDRKMDKFKMPYDVIWLDIEYTDEKKYFTWDKHSFTDPIGMGKQLDSHGRKLVTIIDPHIKNTDNYPVVAELKSKELGVKNKDGNLFEGWCWPGSSHWIDAFSPAAREWWSSLFKYDKFKGTMENTWIWNDMNEPSVFNGPETTMPKDNLHDGNWEHRDVHNLNGLTFHNATYHALLTRKPGELRRPFVLTRSFFAGSQRVGAMWTGDNQAAWDHLKASIPMVLSQGISGFPFSGADVGGFFGNPEKELLTRWYQAGAFYPFFRGHAHIDARRREPYLAGEPYTTIIAAALRLRYSLLPSWYTAFRHAHLDGTPIIKPMFYTHPSEEAGLAIEDQFFVGNTGLLAKPVTEKEKTTVDVWIPDGEVYYDYFTYQVIPTVKGKTVTLDAPMEKIPLLMRGGHVFARRDVPRRSSALMRWDDYTLVVTVPRENKVAEGDLYVDDGDSFEYQNGQYIHRRFVYDGAAKSLSSVDAEGRDAASIREGAWMKQMRSVGVGKIVVVGAPASWAGKKSVKVESEGKVWEARMEFTPAGQGRAAFAVIKKVGVRIGADWKVEF

SEQ ID NO: 34 - DNA, 2766 bp, Myceliophthora thermophilia
atgatcggcactcgtctcgcaggcctcggcctgcttgtagctggcgtttgctccgcttctgccagcacgtcggcaattgagctacgctctgctgaacgacccttgagcgagtgtcccggataccaagcggtcaacgtcaagaccagtgccacaggtctcactgccgacctgagactcgccgggagtccctgcaacacctacgggactgacttggagaagcttcgcctggaagtcacctacgagactgaaaaccgtcttcacgtcaaaatcagggacgccgacgagctggtctaccaagtgccagagagtgtcttcccgcgtcccaaggccgacggcataagcgcaaagaagtcggcgctcacgttcaagtacaaggccaaccccttctccttctcggtctcgcggaccaagacgggggaggtcctgttcgacacctcggccgctcccctcgtcttccaatcggaatacctccgcctgaggaccaagctgccggagaacccgaacctctacgggctcggcgagcacagtgacccgtttcggttgaacacgaccaactacatccgcaccctctggagccaggacagctatagcacgccagaaggggccaacttgtacgggaaccacccggtgtactttgagcaccgcaagagcggaacgcacggcgtgttcttcctcaactcgaacgggatggacatcaagattgacaagaatccccaacatctcgagtacaacacgctaggcggcgtcttcgacttttactttgtggccggcccgagccccgtcgacgtcgcgcggcagtacgccgagatcagcggactgcctgcccctgttccgtactggtcctttggcttccacaactgccgttatggataccgggacgtatatgacgttgcggagatgatatacaactacagtgccgcgcgcattcctctcgagacgagctggatagacattgattatatggaccggagaagggtcttcactaacgatccggaaaggttcccgatgcctctcctgcggatgcttgcggacaaacttcactccaacaaccagcacttgattgtgatggtcgaccctgcggtctcgtactcgccgaaccccgcgtatcagcgcggcatcgaggacaacgtctttctcaagcgcagcaatggctcggaatggctgggtgtcgtgtggcccggcgtcaccgtgtttcccgactggttctcggccaatatcaccaggtattggaacaacgagtttgcccagttcttctccaaggaaactggcctcgacattgacgggctctggatcgacatgaatgagccgtccaacttcccctgcttcttcccctgcgacgaccccttctcggccgcggtaggatatcccccggacccgccccccgtgcggcccgctgcaccacgcccgctgcctgggtggccgtgcgaattccaacccgagggttccaactgcactcaacaacaggaggaggctacgccatcagtcagccttccacggcacggaattgagccaaggacagcgccgatcgccaatccgcctcgcggcgacaacaagtggaaaggccttcctggccgcgacctgctcttccccaagtactcgatccacaacaaggcagcgtacaaggattcgtggaacggaaagcacggcggactctcgaacaagaccgtcaacaccgatgtcatccatgcgaacggcctggccgaatacgatgtccacaacctatacggcaccatgatgtcggtgcaatcgcgtcaggctatgttgtccagacgacctggtctccggccattcatcatcacgaggtcgacttttgccggggcgggtgcatcggttgggaagtggttgggcgataatctgtccacttgggaccactaccgcgccgtcatccggactgtgatggccttcacgtccatctatcaggtgcccatggtcggcgccgacgtctgcggcttcggcggcgacacgaccgaatcgctctgcgctcggtgggcgatgctcggcgctttcagcccgttctaccggtcgcataacgaactcggctctatcccgcaggagttttaccgctggcccacggtggccgaggccgctcgcaaggccatcgatatccgctaccggcttctcgactacatttacaccgccttccagcagcaaaccgtcgacggcactcccgccgtcagccccatgttcttcctgtaccccaacgacgcgaatacctttggcctcgacctccagtacttctacggtcccggtttgctggtcgcgccggtcaccgaggagggcgcaacaagcgtggacgtctacctgccgaaggacatcttctacgactggtacacgcacaaggccatccgtggacagggcaagacgatccgcgtcagcaaccaggggctgaccgacatcccgctcttcctgcgcggtggcgtcatcattcccgcccgggtcaagtcggccatgacgacgactgagctgcgcgagcagaactttgagctgctcatccccgtgggtgcagacggaacagcgacaggccagctgtacctggatgacggcgtcagtctcgagcagaaagggacgacgctcatcaccttcaggtacaggaacggcgtcttgacggcgaggggcacttttgggtaccataccaaggccaagatcaccaaggtgacggtgatcggagctagccgcaagagggacgaagaggcggacacggcggttgtgactgttaaccagccgctgactggcaacttcgaaatcaaaattagcggtgctttgtag

SEQ ID NO: 35 - protein, 921 aa, Myceliophthora thermophilia
MIGTRLAGLGLLVAGVCSASASTSAIELRSAERPLSECPGYQAVNVKTSATGLTADLRLAGSPCNTYGTDLEKLRLEVTYETENRLHVKIRDADELVYQVPESVFPRPKADGISAKKSALTFKYKANPFSFSVSRTKTGEVLFDTSAAPLVFQSEYLRLRTKLPENPNLYGLGEHSDPFRLNTTNYIRTLWSQDSYSTPEGANLYGNHPVYFEHRKSGTHGVFFLNSNGMDIKIDKNPQHLEYNTLGGVFDFYFVAGPSPVDVARQYAEISGLPAPVPYWSFGFHNCRYGYRDVYDVAEMIYNYSAARIPLETSWIDIDYMDRRRVFTNDPERFPMPLLRMLADKLHSNNQHLIVMVDPAVSYSPNPAYQRGIEDNVFLKRSNGSEWLGVVWPGVTVFPDWFSANITRYWNNEFAQFFSKETGLDIDGLWIDMNEPSNFPCFFPCDDPFSAAVGYPPDPPPVRPAAPRPLPGWPCEFQPEGSNCTQQQEEATPSVSLPRHGIEPRTAPIANPPRGDNKWKGLPGRDLLFPKYSIHNKAAYKDSWNGKHGGLSNKTVNTDVIHANGLAEYDVHNLYGTMMSVQSRQAMLSRRPGLRPFIITRSTFAGAGASVGKWLGDNLSTWDHYRAVIRTVMAFTSIYQVPMVGADVCGFGGDTTESLCARWAMLGAFSPFYRSHNELGSIPQEFYRWPTVAEAARKAIDIRYRLLDYIYTAFQQQTVDGTPAVSPMFFLYPNDANTFGLDLQYFYGPGLLVAPVTEEGATSVDVYLPKDIFYDWYTHKAIRGQGKTIRVSNQGLTDIPLFLRGGVIIPARVKSAMTTTELREQNFELLIPVGADGTATGQLYLDDGVSLEQKGTTLITFRYRNGVLTARGTFGYHTKAKITKVTVIGASRKRDEEADTAVVTVNQPLTGNFEIKISGAL

SEQ ID NO: 36 - protein, 896 aa, Myceliophthora thermophilia
IELRSAERPLSECPGYQAVNVKTSATGLTADLRLAGSPCNTYGTDLEKLRLEVTYETENRLHVKIRDADELVYQVPESVFPRPKADGISAKKSALTFKYKANPFSFSVSRTKTGEVLFDTSAAPLVFQSEYLRLRTKLPENPNLYGLGEHSDPFRLNTTNYIRTLWSQDSYSTPEGANLYGNHPVYFEHRKSGTHGVFFLNSNGMDIKIDKNPQHLEYNTLGGVFDFYFVAGPSPVDVARQYAEISGLPAPVPYWSFGFHNCRYGYRDVYDVAEMIYNYSAARIPLETSWIDIDYMDRRRVFTNDPERFPMPLLRMLADKLHSNNQHLIVMVDPAVSYSPNPAYQRGIEDNVFLKRSNGSEWLGVVWPGVTVFPDWFSANITRYWNNEFAQFFSKETGLDIDGLWIDMNEPSNFPCFFPCDDPFSAAVGYPPDPPPVRPAAPRPLPGWPCEFQPEGSNCTQQQEEATPSVSLPRHGIEPRTAPIANPPRGDNKWKGLPGRDLLFPKYSIHNKAAYKDSWNGKHGGLSNKTVNTDVIHANGLAEYDVHNLYGTMMSVQSRQAMLSRRPGLRPFIITRSTFAGAGASVGKWLGDNLSTWDHYRAVIRTVMAFTSIYQVPMVGADVCGFGGDTTESLCARWAMLGAFSPFYRSHNELGSIPQEFYRWPTVAEAARKAIDIRYRLLDYIYTAFQQQTVDGTPAVSPMFFLYPNDANTFGLDLQYFYGPGLLVAPVTEEGATSVDVYLPKDIFYDWYTHKAIRGQGKTIRVSNQGLTDIPLFLRGGVIIPARVKSAMTTTELREQNFELLIPVGADGTATGQLYLDDGVSLEQKGTTLITFRYRNGVLTARGTFGYHTKAKITKVTVIGASRKRDEEADTAVVTVNQPLTGNFEIKISGAL

SEQ ID NO: 37 - DNA, 942 bp, Myceliophthora thermophilia
atgaagctcctgggcaaactctcggcggcactcgccctcgcgggcagcaggctggctgccgcgcacccggtcttcgacgagctgatgcggccgacggcgccgctggtgcgcccgcgggcggccctgcagcaggtgaccaactttggcagcaacccgtccaacacgaagatgttcatctacgtgcccgacaagctggcccccaacccgcccatcatagtggccatccactactgcaccggcaccgcccaggcctactactcgggctccccttacgcccgcctcgccgaccagaagggcttcatcgtcatctacccggagtccccctacagcggcacctgttgggacgtctcgtcgcgcgccgccctgacccacaacggcggcggcgacagcaactcgatcgccaacatggtcacctacaccctcgaaaagtacaatggcgacgccagcaaggtctttgtcaccggctcctcgtccggcgccatgatgacgaacgtgatggccgccgcgtacccggaactgttcgcggcaggaatcgcctactcgggcgtgcccgccggctgcttctacagccagtccggaggcaccaacgcgtggaacagctcgtgcgccaacgggcagatcaactcgacgccccaggtgtgggccaagatggtcttcgacatgtacccggaatacgacggcccgcgccccaagatgcagatctaccacggctcggccgacggcacgctcagacccagcaactacaacgagaccatcaagcagtggtgcggcgtcttcggcttcgactacacccgccccgacaccacccaggccaactccccgcaggccggctacaccacctacacctggggcgagcagcagctcgtcggcatctacgcccagggcgtcggacacacggtccccatccgcggcagcgacgacatggccttctttggcctgtga

SEQ ID NO: 38 - protein, 313 aa, Myceliophthora thermophilia
MKLLGKLSAALALAGSRLAAAHPVFDELMRPTAPLVRPRAALQQVTNFGSNPSNTKMFIYVPDKLAPNPPIIVAIHYCTGTAQAYYSGSPYARLADQKGFIVIYPESPYSGTCWDVSSRAALTHNGGGDSNSIANMVTYTLEKYNGDASKVFVTGSSSGAMMTNVMAAAYPELFAAGIAYSGVPAGCFYSQSGGTNAWNSSCANGQINSTPQVWAKMVFDMYPEYDGPRPKMQIYHGSADGTLRPSNYNETIKQWCGVFGFDYTRPDTTQANSPQAGYTTYTWGEQQLVGIYAQGVGHTVPIRGSDDMAFFGL

SEQ ID NO: 39 - protein, 292 aa, Myceliophthora thermophilia
HPVFDELMRPTAPLVRPRAALQQVTNFGSNPSNTKMFIYVPDKLAPNPPIIVAIHYCTGTAQAYYSGSPYARLADQKGFIVIYPESPYSGTCWDVSSRAALTHNGGGDSNSIANMVTYTLEKYNGDASKVFVTGSSSGAMMTNVMAAAYPELFAAGIAYSGVPAGCFYSQSGGTNAWNSSCANGQINSTPQVWAKMVFDMYPEYDGPRPKMQIYHGSADGTLRPSNYNETIKQWCGVFGFDYTRPDTTQANSPQAGYTTYTWGEQQLVGIYAQGVGHTVPIRGSDDMAFFGL

SEQ ID NO: 40 - DNA, 1194 bp, Myceliophthora thermophilia
atggtccatctgacctcagcccttctcgtggccggcgcggccttcgccgcggctgcgcccatgaaccacatctttgagcgccaggacacctgctcggtcagcgacaactacccgacggtgaactcggccaagctccccgacccgttcacgacggcagcgggcgagaaggtgacgaccaaggaccagttcgagtgccggcgggccgagatcaacaagatcctgcagcagtacgagctgggcgagtacccgggaccgccggacagcgtcgaggcgtcgcttagcggcaacagcatcaccgtcagggtgacggtcggcagcaagagcatctccttctcggcctcgatcaggaagccgtccggcgccggcccgttccccgccatcatcggcatcggcggcgcgtccatccccatcccgagcaacgtggccaccatcacgttcaacaacgacgagttcggcgcgcagatgggcagcgggtcgcggggccagggcaagttctacgacctctttggcagggaccactccgccggctcgctcaccgcgtgggcctggggtgtggaccggctcatcgacggtctggagcaggtcggggcgcaggcgtcgggcatcgacacgaaacgtctcggcgtgacgggctgctcgcgcaacggcaagggcgccttcatcacgggtgcgctcgtcgaccgtatcgccctgacgatcccgcaggagtcgggagccggcggcgcggcctgctggcgcatcagcgaccagcagaaggcggccggcgccaacatccagacggcggcgcagatcatcaccgagaacccctggttctccaggaacttcgacccccacgtcaactccatcacgtcggtcccgcaagaccaccacctactggccgccctgatcgtgccccgcggcctggccgtcttcgagaacaacatcgactggctcggccccgtgtcgacgacgggctgcatggccgccggccgcctcatctacaaggcctacggcgtgcccaacaacatgggcttctccctcgtcggcggccacaaccactgccagttcccgagcagccagaaccaggacctcaacagctacatcaactacttcctgctcggacagggctcccccagcggcgtcgagcacagcgacgtcaacgtcaacgtcgccgaatgggcgccgtggggcgccggcgccccgactctggcgtga

SEQ ID NO: 41 - protein, 397 aa, Myceliophthora thermophilia
MVHLTSALLVAGAAFAAAAPMNHIFERQDTCSVSDNYPTVNSAKLPDPFTTAAGEKVTTKDQFECRRAEINKILQQYELGEYPGPPDSVEASLSGNSITVRVTVGSKSISFSASIRKPSGAGPFPAIIGIGGASIPIPSNVATITFNNDEFGAQMGSGSRGQGKFYDLFGRDHSAGSLTAWAWGVDRLIDGLEQVGAQASGIDTKRLGVTGCSRNGKGAFITGALVDRIALTIPQESGAGGAACWRISDQQKAAGANIQTAAQIITENPWFSRNFDPHVNSITSVPQDHHLLAALIVPRGLAVFENNIDWLGPVSTTGCMAAGRLIYKAYGVPNNMGFSLVGGHNHCQFPSSQNQDLNSYINYFLLGQGSPSGVEHSDVNVNVAEWAPWGAGAPTLA

SEQ ID NO: 42 - protein, 379 aa, Myceliophthora thermophilia
APMNHIFERQDTCSVSDNYPTVNSAKLPDPFTTAAGEKVTTKDQFECRRAEINKILQQYELGEYPGPPDSVEASLSGNSITVRVTVGSKSISFSASIRKPSGAGPFPAIIGIGGASIPIPSNVATITFNNDEFGAQMGSGSRGQGKFYDLFGRDHSAGSLTAWAWGVDRLIDGLEQVGAQASGIDTKRLGVTGCSRNGKGAFITGALVDRIALTIPQESGAGGAACWRISDQQKAAGANIQTAAQIITENPWFSRNFDPHVNSITSVPQDHHLLAALIVPRGLAVFENNIDWLGPVSTTGCMAAGRLIYKAYGVPNNMGFSLVGGHNHCQFPSSQNQDLNSYINYFLLGQGSPSGVEHSDVNVNVAEWAPWGAGAPTLA

SEQ ID NO: 43 - DNA, 1254 bp, Myceliophthora thermophilia
atgaagctagtctcagcatacacgttgataggggcagcgatcggcagcgcctcccgggttccccggatcccgcgacaaggcggcggtaacaccatgatcgagtgtgccccgatcccgtcccctttcccgacctggcaagagctcccgctgcagtcgtcgatgccggaccccttcctcccgctcgcgtacaccacgcccgataacgccgcggatgtcgtggccggcaggggcaagggcagggtgcagactcccgaggagtggtaccggtgccggcagcccgagatcattcagctgctgcaggagtaccagtatggctactacccggacccctccgaggagaaggtcgaggccacgcgcagcggcaacacgctcaacatcgtcgtgacggcgggcggcaagcagggcagcttcagggcgaccatctcgctgccctccggggcttccgcgtcgaacccggcgccggtggtgatcaacattggcgggatgcagaaccagccatatctgagcgcggggatcgccgttgcgcagtttgactacaccaccgtatcgccggatagcaatgcgaagacgggggctttctggagtatctacaacgggagggacattggagtcctgacggcctgggcctggggcttccaccgtacgctggatgccatcaacctgacggtccccgagatcgacgcggcccgggtcggcgtgaccgggtgctcgcgcctgggcaaggcggcgctggcggcggggctctttgacaagcgcatcacgctcaccatgcccatgtcgtcgggcgtccagggggcggggccctaccggtactacgacatgagcgggcagggcgagaacctcgagaacagcaaacagggcgccggctggtggaccaacagcaagctgggcaccttcgtgaaccacgcccagaacctgccgtacgacgcccacaccatcgtggcggccatcgcgccgagggccgtcatcatcgaccagggcaccggcgaccccttcgtcaacagcaagggcaccgccgtcgtcgtctaccctgcggccaaggtcgtctatgactggctgggagcgggtgaaaacattggcatcagcgtgcgcgggggcgggcactgcgatctgagcggctacacggctatcctgccgtacgtccaaaagatcttctttgggaccccgacagacaaggactacaacaacctcggctcgtacggctcacccgtgtcgtccgccttcctatgggcgacggcggttcccggagcttga

SEQ ID NO: 44 - protein, 417 aa, Myceliophthora thermophilia
MKLVSAYTLIGAAIGSASRVPRIPRQGGGNTMIECAPIPSPFPTWQELPLQSSMPDPFLPLAYTTPDNAADVVAGRGKGRVQTPEEWYRCRQPEIIQLLQEYQYGYYPDPSEEKVEATRSGNTLNIVVTAGGKQGSFRATISLPSGASASNPAPVVINIGGMQNQPYLSAGIAVAQFDYTTVSPDSNAKTGAFWSIYNGRDIGVLTAWAWGFHRTLDAINLTVPEIDAARVGVTGCSRLGKAALAAGLFDKRITLTMPMSSGVQGAGPYRYYDMSGQGENLENSKQGAGWWTNSKLGTFVNHAQNLPYDAHTIVAAIAPRAVIIDQGTGDPFVNSKGTAVVVYPAAKVVYDWLGAGENIGISVRGGGHCDLSGYTAILPYVQKIFFGTPTDKDYNNLGSYGSPVSSAFLWATAVPGA

SEQ ID NO: 45 - protein, 400 aa, Myceliophthora thermophilia
SRVPRIPRQGGGNTMIECAPIPSPFPTWQELPLQSSMPDPFLPLAYTTPDNAADVVAGRGKGRVQTPEEWYRCRQPEIIQLLQEYQYGYYPDPSEEKVEATRSGNTLNIVVTAGGKQGSFRATISLPSGASASNPAPVVINIGGMQNQPYLSAGIAVAQFDYTTVSPDSNAKTGAFWSIYNGRDIGVLTAWAWGFHRTLDAINLTVPEIDAARVGVTGCSRLGKAALAAGLFDKRITLTMPMSSGVQGAGPYRYYDMSGQGENLENSKQGAGWWTNSKLGTFVNHAQNLPYDAHTIVAAIAPRAVIIDQGTGDPFVNSKGTAVVVYPAAKVVYDWLGAGENIGISVRGGGHCDLSGYTAILPYVQKIFFGTPTDKDYNNLGSYGSPVSSAFLWATAVPGA

SEQ ID NO: 46 - DNA, 981 bp, Myceliophthora thermophilia
atgcttcgcaaaaccgccctcctcgccgtcgccgccctcccggccttgtcggcggcccagatctccaacgactttgagagcgggtgggaccagacggcatggcccatctacgccccagactgcaaccaaggcggcaaggtgtcccttgatacttcgactgcccacagtggcagcaactccatcagggtcgacggtgctggtggttattgcggccacatcttctttggaacgaacaaggtgcctagcggcgatctctacgtgagggtctatctcaaagcgtccaaggccctcaccgcctcccatgtcaccttcatcaccatgccggaccctgcccagggaaccaacaagcaccttcggatcggcggccagagcgagatcctcatgtacaaccgcgagtccgacgacgccaccctgcccgagctctctccgcaaggtatcgccacctcaacctccctgcccaccaacagctggcagtgcttcgaataccacgtcggcaccgacggcaccatcgagacctggctcaacgacaaggccgttgccggcctgaccttcggcccgggcatctccaaccccaacgcgggcgcctggtcgcgcagctccatcatccccaagccctcgggcgtctacttcggctgggagtcgtacggcggcgacacaaacaccttctggtacgacgacatcgtcatcagctcctcccgcgtcggctgctccggcagcggcactcctcctccttcctcctcctcctcctcctcccctaccggccccgccccctccaccactctcgtcacctccaccacatcccgcggctcgaccagcaccaccaccaccaccagctcggcccccgccacctccaccaccagcagcggctgcaccgtgccgcagtggggccagtgcggcggtattaactacacgggatgcacgacatgcgcggccccgtacacctgcaagttcagcaatgactactactcgcagtgcctctag

SEQ ID NO: 47 - protein, 326 aa, Myceliophthora thermophilia
MLRKTALLAVAALPALSAAQISNDFESGWDQTAWPIYAPDCNQGGKVSLDTSTAHSGSNSIRVDGAGGYCGHIFFGTNKVPSGDLYVRVYLKASKALTASHVTFITMPDPAQGTNKHLRIGGQSEILMYNRESDDATLPELSPQGIATSTSLPTNSWQCFEYHVGTDGTIETWLNDKAVAGLTFGPGISNPNAGAWSRSSIIPKPSGVYFGWESYGGDTNTFWYDDIVISSSRVGCSGSGTPPPSSSSSSSPTGPAPSTTLVTSTTSRGSTSTTTTTSSAPATSTTSSGCTVPQWGQCGGINYTGCTTCAAPYTCKFSNDYYSQCL

SEQ ID NO: 48 - protein, 307 aa, Myceliophthora thermophilia
QISNDFESGWDQTAWPIYAPDCNQGGKVSLDTSTAHSGSNSIRVDGAGGYCGHIFFGTNKVPSGDLYVRVYLKASKALTASHVTFITMPDPAQGTNKHLRIGGQSEILMYNRESDDATLPELSPQGIATSTSLPTNSWQCFEYHVGTDGTIETWLNDKAVAGLTFGPGISNPNAGAWSRSSIIPKPSGVYFGWESYGGDTNTFWYDDIVISSSRVGCSGSGTPPPSSSSSSSPTGPAPSTTLVTSTTSRGSTSTTTTTSSAPATSTTSSGCTVPQWGQCGGINYTGCTTCAAPYTCKFSNDYYSQCL

SEQ ID NO: 49 - DNA, 678 bp, Myceliophthora thermophilia
atgcatctctccgccaccaccgggttcctcgccctcccggccctggccctggcccagctctcgggcagcggccagacgacccggtactgggactgctgcaagccgagctgcgcctggcccggcaagggcccctcgtctccggtgcaggcctgcgacaagaacgacaacccgctcaacgacggcggctccacccggtccggctgcgacgcgggcggcagcgcctacatgtgctcctcccagagcccctgggccgtcagcgacgagctgtcgtacggctgggcggccgtcaagctcgccggcagctccgagtcgcagtggtgctgcgcctgctacgagctgaccttcaccagcgggccggtcgcgggcaagaagatgattgtgcaggcgaccaacaccggtggcgacctgggcgacaaccactttgacctggccatccccggtggcggtgtcggtattttcaacgcctgcaccgaccagtacggcgctcccccgaacggctggggcgaccgctacggcggcatccattccaaggaagagtgcgaatccttcccggaggccctcaagcccggctgcaactggcgcttcgactggttccaaaacgccgacaacccgtcggtcaccttccaggaggtggcctgcccgtcggagctcacgtccaagagcggctgctcccgttaa

SEQ ID NO: 50 - protein, 225 aa, Myceliophthora thermophilia
MHLSATTGFLALPALALAQLSGSGQTTRYWDCCKPSCAWPGKGPSSPVQACDKNDNPLNDGGSTRSGCDAGGSAYMCSSQSPWAVSDELSYGWAAVKLAGSSESQWCCACYELTFTSGPVAGKKMIVQATNTGGDLGDNHFDLAIPGGGVGIFNACTDQYGAPPNGWGDRYGGIHSKEECESFPEALKPGCNWRFDWFQNADNPSVTFQEVACPSELTSKSGCSR

SEQ ID NO: 51 - protein, 207 aa, Myceliophthora thermophilia
QLSGSGQTTRYWDCCKPSCAWPGKGPSSPVQACDKNDNPLNDGGSTRSGCDAGGSAYMCSSQSPWAVSDELSYGWAAVKLAGSSESQWCCACYELTFTSGPVAGKKMIVQATNTGGDLGDNHFDLAIPGGGVGIFNACTDQYGAPPNGWGDRYGGIHSKEECESFPEALKPGCNWRFDWFQNADNPSVTFQEVACPSELTSKSGCSR

SEQ ID NO: 52 - DNA, 1938 bp, Myceliophthora thermophilia
atggcgcgctgtcaaatgactctcctcttcccgatcgtctgcctcgtcagcgctctcgtttcagcccaatattcaggttatgactatggatttgacgtcaagaagcgggtcaagcgccagctcggccaacgttcggccatggtcgtgcaggacaagaccggcagcgagatccaggtgcgccaggaaattcgtcaacttgagcaggaccatgacctctggaccctgtacatcctaggcttgagcatgctgcagtataccgaccaggaatctcccgtgtcttattatggactcgcggggatacacggaatgcctcaccagacttggggcggcatgggaccagtcaccggaaacgagaataccgggtattgtacccattcgtccgtcctgttcccgacatggcaccgggcatacatggctctatacgagcaagttttgcacgatctaatccagatgatcgccacgttctggcccgacagcgagagacagcgctacgagagtgccgcccgcaggttccgcctcccttactgggactgggcggcaagccctcctccgggacaaagcgttctccctgagagcatcggaggaagtccatttattgacgtcaacggaccgaatggcttgcagcggatcgcgaaccccttattcagctaccagttcaaccctctcgatcagaaggcttttgaaagtccatcaagtggcggccctgacgcgcagtccaacaacacgctcgtcgccctgaacctcgatcggagccgcgcctccatcgctcagcgcctctatgatttattttcgcacaacgataactacactctgttcagcaacaatgccgtggggggacaggctgaatcggtagaatcgctgcacgacaccatccatagcttagttggcggcgtcgggcctagtcagtcagtacctcagcctgggcacatgacgtacatccagtggtcggccttcgatcccgtcttcttcctgcatcactgcatggttgaccggattttcgccttgtggcaggcgattcaccccaacacttgggttccctcgtctcaagctctgctggactcgtacaccattcggaggggccagtccatagactctggtacagcactcactcccttcttttccaacgacaacggcacattctggacttctgacggcgtgcgcgaccacacaaggttcggctatacgtacgccgagttgctgcgcggtcccgtcaccggctcttcaaacaataccctcttagccgcatctcaaatacgcatagtaaaacaggccgtaaaccgcatgtatggctctttcagcccggccttcttctttctcgaagagcttcgcattcaaggcggcgctgccgtggtaggcgccggcttccgaaacaaccacaggaaaacggcgccgctccatggtctactggaatccaaaatctttgttgcggggagcaacggcaaccgctactacgagtggaaggtagatgtgtgcgtagggcgcaacggcagccaaggtattctcggcggcgacggaattgacgggtcttcaatcagtttcttccttggcgacctttcttctcttaacaatttgttgaatgacacccatgttgggaccatgggcgtgtttacctccgctcgcttgtcgcaacatgaaccggctggtgggcatgatgtgcctatctcagggagcgtgcctctgacggccgcgctggtgaagaagatctgcgaaggcgagctcgcggggttggcttcaggacatgtggtgccgtacttgaagagaaacctgaagatggtgatgcgagggacccagagagaggtggtggcgggcacagacgataagaagatttgtgaaacactcttgagtcttcggatcgttagctcggtggttgaggcgccgtggagcgaggatgaattgccgaaatggggagaggaaagagtagagtttgatgtgtgctga

SEQ ID NO: 53 - protein, 645 aa, Myceliophthora thermophilia
MARCQMTLLFPIVCLVSALVSAQYSGYDYGFDVKKRVKRQLGQRSAMVVQDKTGSEIQVRQEIRQLEQDHDLWTLYILGLSMLQYTDQESPVSYYGLAGIHGMPHQTWGGMGPVTGNENTGYCTHSSVLFPTWHRAYMALYEQVLHDLIQMIATFWPDSERQRYESAARRFRLPYWDWAASPPPGQSVLPESIGGSPFIDVNGPNGLQRIANPLFSYQFNPLDQKAFESPSSGGPDAQSNNTLVALNLDRSRASIAQRLYDLFSHNDNYTLFSNNAVGGQAESVESLHDTIHSLVGGVGPSQSVPQPGHMTYIQWSAFDPVFFLHHCMVDRIFALWQAIHPNTWVPSSQALLDSYTIRRGQSIDSGTALTPFFSNDNGTFWTSDGVRDHTRFGYTYAELLRGPVTGSSNNTLLAASQIRIVKQAVNRMYGSFSPAFFFLEELRIQGGAAVVGAGFRNNHRKTAPLHGLLESKIFVAGSNGNRYYEWKVDVCVGRNGSQGILGGDGIDGSSISFFLGDLSSLNNLLNDTHVGTMGVFTSARLSQHEPAGGHDVPISGSVPLTAALVKKICEGELAGLASGHVVPYLKRNLKMVMRGTQREVVAGTDDKKICETLLSLRIVSSVVEAPWSEDELPKWGEERVEFDVC

SEQ ID NO: 54 - protein, 623 aa, Myceliophthora thermophilia
QYSGYDYGFDVKKRVKRQLGQRSAMVVQDKTGSEIQVRQEIRQLEQDHDLWTLYILGLSMLQYTDQESPVSYYGLAGIHGMPHQTWGGMGPVTGNENTGYCTHSSVLFPTWHRAYMALYEQVLHDLIQMIATFWPDSERQRYESAARRFRLPYWDWAASPPPGQSVLPESIGGSPFIDVNGPNGLQRIANPLFSYQFNPLDQKAFESPSSGGPDAQSNNTLVALNLDRSRASIAQRLYDLFSHNDNYTLFSNNAVGGQAESVESLHDTIHSLVGGVGPSQSVPQPGHMTYIQWSAFDPVFFLHHCMVDRIFALWQAIHPNTWVPSSQALLDSYTIRRGQSIDSGTALTPFFSNDNGTFWTSDGVRDHTRFGYTYAELLRGPVTGSSNNTLLAASQIRIVKQAVNRMYGSFSPAFFFLEELRIQGGAAVVGAGFRNNHRKTAPLHGLLESKIFVAGSNGNRYYEWKVDVCVGRNGSQGILGGDGIDGSSISFFLGDLSSLNNLLNDTHVGTMGVFTSARLSQHEPAGGHDVPISGSVPLTAALVKKICEGELAGLASGHVVPYLKRNLKMVMRGTQREVVAGTDDKKICETLLSLRIVSSVVEAPWSEDELPKWGEERVEFDVC

SEQ ID NO: 55 - DNA, 1953 bp, Myceliophthora thermophilia
atgttactttcgaaactatctattctgcttgccaaatggctgtccgttgctgtgtatgccggaactcttgtccatgatgaacagttcatcccggaccatattctcagggtatccgttgcccaggtgccctcggcttgcgagaaccgggaagacgttgtcgtcaacgggacctcaccggggcctgccatacacttgcttcctggcgctaggacttggatccgtgtctacaatgacatgaatgaccggaaccttagcatgcattggcacggcctttctcagcgattcgccccgttctccgacgggacaccatccgcaacgcaatggcccataccgcccgggcacttcttcgactacgaaattctgaccgaaccagaagacgcagggacatacttctaccattcacacgtgggcatgcaggcgctgagctgcaccgggcccttgatcgtggaggactgtggatcatcaccgtaccactacgacgacgagcgaatactgctattccaagaccacttccagaagagcgatctcgaaatgattcaaggcctgacgtcaacgcagttcacgtggaccggcgagacacggggtatcttactgaacggcaggggcgtctcgccgaaccaagcagccgtccagggccgaccaggcgaagccagcggcttctttggaagccaccgtttctcaaatttccgcgcgggtgatggcacctccaactcctgggatgggatacgtggcgatgatcagatcgaacctccaactgactgcactctcccggtcatcgatgtcgagccgggcaagacttaccggctccgcttcattggtgccacaggcctgtcccttttgacgatgggtttcgaggatcacaacgatctcactattgttcaggtcgacggcagcgagtacaatgcgccggtaacggttgaccatatccagctcggcggaggtcaacgtttcgacgttcttctccgcaccaagacggccgaggagctcagatgcaacggcgacaagaccacctatttcctgcaatttgaaacccgcgatcgtcccgatccctaccgcggctatggcgtcctacggtataatctcggcactccggtccccgccgcccccacgactccggcgctcactctcccggccgaagtcaacaactggctggaatacactttccagccacttcatccttcgagcagcttgtctcccacggccgaagaggtcacccgccgcgtcattctcgaagccgagcaaaagatcgaccctgcaaccggtcgccttgtctggaagctcgcgcacatgacctggactgacatgtcacgcgacaagccggtgctagtcgacatatacgagcgcggggaggccgccatgccggactatgccgcggcgctgaccaactacggctgggatccggcaacgaagctgttccccgcgaagaaagacgaggtgctcgagattgtgatccagaacacgggatcgcactacagcggtgccagcggcatcgtcgagacgcaccccttccacgcccacggtcagcacttctacgatgtgggcagtgggcccggcaagtacgatcccgaggccaataacgccaagctggcgagcttgggataccggccaatcaagcgggacacgacaatggtgtaccggtacggcgaaggcaaggtggcgcccggcgagccggccgggtggagggcgtggaggatgaagatgaacaatcctggcgtgtggatggtgcactgtcacattctggcacacatgatcatgggcatggaaacgatctgggtggtcggagacgccgaggacatcgtcacaattccgttgtctgtgagccagaactacttcacatacggcggcagcgtctacggaaatgatacacacgccccagaggtttatcactatttcgacgacacgaacaaatgttgtgccgcgggggccggggatagtgaggattccggtcactaa

SEQ ID NO: 56 - protein, 650 aa, Myceliophthora thermophilia
MLLSKLSILLAKWLSVAVYAGTLVHDEQFIPDHILRVSVAQVPSACENREDVVVNGTSPGPAIHLLPGARTWIRVYNDMNDRNLSMHWHGLSQRFAPFSDGTPSATQWPIPPGHFFDYEILTEPEDAGTYFYHSHVGMQALSCTGPLIVEDCGSSPYHYDDERILLFQDHFQKSDLEMIQGLTSTQFTWTGETRGILLNGRGVSPNQAAVQGRPGEASGFFGSHRFSNFRAGDGTSNSWDGIRGDDQIEPPTDCTLPVIDVEPGKTYRLRFIGATGLSLLTMGFEDHNDLTIVQVDGSEYNAPVTVDHIQLGGGQRFDVLLRTKTAEELRCNGDKTTYFLQFETRDRPDPYRGYGVLRYNLGTPVPAAPTTPALTLPAEVNNWLEYTFQPLHPSSSLSPTAEEVTRRVILEAEQKIDPATGRLVWKLAHMTWTDMSRDKPVLVDIYERGEAAMPDYAAALTNYGWDPATKLFPAKKDEVLEIVIQNTGSHYSGASGIVETHPFHAHGQHFYDVGSGPGKYDPEANNAKLASLGYRPIKRDTTMVYRYGEGKVAPGEPAGWRAWRMKMNNPGVWMVHCHILAHMIMGMETIWVVGDAEDIVTIPLSVSQNYFTYGGSVYGNDTHAPEVYHYFDDTNKCCAAGAGDSEDSGH

SEQ ID NO: 57 - protein, 630 aa, Myceliophthora thermophilia
GTLVHDEQFIPDHILRVSVAQVPSACENREDVVVNGTSPGPAIHLLPGARTWIRVYNDMNDRNLSMHWHGLSQRFAPFSDGTPSATQWPIPPGHFFDYEILTEPEDAGTYFYHSHVGMQALSCTGPLIVEDCGSSPYHYDDERILLFQDHFQKSDLEMIQGLTSTQFTWTGETRGILLNGRGVSPNQAAVQGRPGEASGFFGSHRFSNFRAGDGTSNSWDGIRGDDQIEPPTDCTLPVIDVEPGKTYRLRFIGATGLSLLTMGFEDHNDLTIVQVDGSEYNAPVTVDHIQLGGGQRFDVLLRTKTAEELRCNGDKTTYFLQFETRDRPDPYRGYGVLRYNLGTPVPAAPTTPALTLPAEVNNWLEYTFQPLHPSSSLSPTAEEVTRRVILEAEQKIDPATGRLVWKLAHMTWTDMSRDKPVLVDIYERGEAAMPDYAAALTNYGWDPATKLFPAKKDEVLEIVIQNTGSHYSGASGIVETHPFHAHGQHFYDVGSGPGKYDPEANNAKLASLGYRPIKRDTTMVYRYGEGKVAPGEPAGWRAWRMKMNNPGVWMVHCHILAHMIMGMETIWVVGDAEDIVTIPLSVSQNYFTYGGSVYGNDTHAPEVYHYFDDTNKCCAAGAGDSEDSGH

SEQ ID NO: 58 - DNA, 1749 bp, Myceliophthora thermophilia
atggcccccttcaagatggtcgccgcggcggcggcgctggctctcgtcggtcacgtccaggctaccgagattcccctccctccgtgcctcgaccccttccagccatttgtctattccggttgctttggggaatcggccggcacccagctcttgcccttccgccctccccttgaccagcaggagggcaccgtcgagaagtgcgtggccacgtgcaagggcaatggctaccgctacgccggcctcgtctactacggcgtgtgctactgcggccagaccgtcaacggaccgcaggtcgacgactcgcagtgcgacctcccctgcaatggcaacaagtccgagacgtgcggcggtaacggccacttttctgtctactctgaccccaccttcctgcctgtcgaccatgtcaccgttgccgactacgaacctctcggctgctggaccgacgactcgagcctgggccgcgccctgacataccgtcaggtccagctcgacagcgccaccctgaccaccgagaagtgtctgcaggcctgccgcgacggcggcttcccctttgccggaaccgagtacagcggtgaatgctactgcggcgtcgtcatcggcaacgacacctatgctgcgcccgctgacgagtgcgacatgccctgcaacggcaacgcggacgagacctgcggtggccgcagccgcctgaacctctacgtcgccgaggagctgggatcgctccaaccctgtggttaccagccctccgtctcgagcagcacctcgctgccgccgtcttcgaccgtcacttccaccacctcctcttccacctcttcgtcgacagcgcctcccgaaacttcaactattacttcgacgagcaccaccccggccacctcgaccacaagcaccagcagctccgcctgcgtgtctaccaccgtcgtgcccccgcagtgcgagtacaagtgcggcaagtggtgctcgtcgcccctccccgactggaacgaccccaagacgtgcaagaatgcctggtctagctgccacgtccaagttgcgtcctgcttcaagcaggccgggtggcccgacgtgctcgactgcttcgagtttagccagtggtgcgccgacatcgccaagtactgcgacagcaacccgcgtggcggctgccgcaaggacgacttctggggcaagaagccccccaagggcggtgcgcacccatccactaccatcactgtgaccgccacgtgcgcccctgccaccggcacggagccgcccgcgacttctaccaagccccctgcctccagcaccaccaccaggtgccccatcccgacccccaccaacatctgcatccagcccagtagcccgctctacggctacggcccgggcaagccggtcggcggcatcgacatgcccgtcgtgagctgcaacgacctccccaacgagtgggcccagttcccgttcaagggctacaccgaccgcgatagccgcaactgccgcaagtatcagcggaaccagtgcacaaacgtctgcgccgacgcctgcaaggagcagtacgaggactgcgtcaacgtctacgccgagggctgcaagcgcaagccgcacgggcgccgggacgtcggctactttgagttccggggcagcgtcgagaagcgcaccttcgggtggaacgacgacttctcgggcgccgtcaacaagtgcaaggcccagtacagcgactgcttgagggtaaacaggggcgtcacgggtgccggcaagtgcaccaagccttgcggatggtag

SEQ ID NO: 59 - protein, 582 aa, Myceliophthora thermophilia
MAPFKMVAAAAALALVGHVQATEIPLPPCLDPFQPFVYSGCFGESAGTQLLPFRPPLDQQEGTVEKCVATCKGNGYRYAGLVYYGVCYCGQTVNGPQVDDSQCDLPCNGNKSETCGGNGHFSVYSDPTFLPVDHVTVADYEPLGCWTDDSSLGRALTYRQVQLDSATLTTEKCLQACRDGGFPFAGTEYSGECYCGVVIGNDTYAAPADECDMPCNGNADETCGGRSRLNLYVAEELGSLQPCGYQPSVSSSTSLPPSSTVTSTTSSSTSSSTAPPETSTITSTSTTPATSTTSTSSSACVSTTVVPPQCEYKCGKWCSSPLPDWNDPKTCKNAWSSCHVQVASCFKQAGWPDVLDCFEFSQWCADIAKYCDSNPRGGCRKDDFWGKKPPKGGAHPSTTITVTATCAPATGTEPPATSTKPPASSTTTRCPIPTPTNICIQPSSPLYGYGPGKPVGGIDMPVVSCNDLPNEWAQFPFKGYTDRDSRNCRKYQRNQCTNVCADACKEQYEDCVNVYAEGCKRKPHGRRDVGYFEFRGSVEKRTFGWNDDFSGAVNKCKAQYSDCLRVNRGVTGAGKCTKPCGW

SEQ ID NO: 60 - protein, 561 aa, Myceliophthora thermophilia
TEIPLPPCLDPFQPFVYSGCFGESAGTQLLPFRPPLDQQEGTVEKCVATCKGNGYRYAGLVYYGVCYCGQTVNGPQVDDSQCDLPCNGNKSETCGGNGHFSVYSDPTFLPVDHVTVADYEPLGCWTDDSSLGRALTYRQVQLDSATLTTEKCLQACRDGGFPFAGTEYSGECYCGVVIGNDTYAAPADECDMPCNGNADETCGGRSRLNLYVAEELGSLQPCGYQPSVSSSTSLPPSSTVTSTTSSSTSSSTAPPETSTITSTSTTPATSTTSTSSSACVSTTVVPPQCEYKCGKWCSSPLPDWNDPKTCKNAWSSCHVQVASCFKQAGWPDVLDCFEFSQWCADIAKYCDSNPRGGCRKDDFWGKKPPKGGAHPSTTITVTATCAPATGTEPPATSTKPPASSTTTRCPIPTPTNICIQPSSPLYGYGPGKPVGGIDMPVVSCNDLPNEWAQFPFKGYTDRDSRNCRKYQRNQCTNVCADACKEQYEDCVNVYAEGCKRKPHGRRDVGYFEFRGSVEKRTFGWNDDFSGAVNKCKAQYSDCLRVNRGVTGAGKCTKPCGW

SEQ ID NO: 61 - DNA, 1785 bp, Myceliophthora thermophilia
atgctttcagaaaaactcattgacagcttcacgctgttcaagttgcaatcggccatcgccgatgcgggtcttttcaatgtcgccctcgccttgctggccgtggtagcgacggctattgccgccgactacgcccacatgctctatctcaggtcgaagatgccgcccggcccctttccctggcctatcgttggcaacacgtttacgcttcccgacacgaaaccatggttgtatttcgaggagctgtctaagaagtacaacaccccattgattacattttggatcggacggaaccccactatttggatcaacgatgcctggtgcgctcacgacatcttggaaaagaaggctcagatctatacttcgcggcctcgtatggttgtctttggcgaacttggcagcggccaggcaaacctggtcaccatgaggatccggaaccagcaggagcgcgaccattggcgtattcatcgcaagctgatgcacgtcggcgtcggcgtacagtcggtccgcggttaccgagagatccagaacaacgagagcaagatcgttgcctatgacttcctccgcgagccgaaggagtacgtgaagcacctggagcggtatgcgaccagcgtcgtgtccatcattgcgtttggccggcgggtagcgagctataacgaccccatcatcaccgaggtaatcgccttgatgcagctggccgccgatttgaacgttcccggaaagtcttttccaatgcttctcgagacattccccatcctggccaagttcccgcggtttatgccttggttcaagggactcggcactcgcagccaaaaagggggccactacttcttctacaccctagcccaggaagcgattgagcagtacaaccagaaatcgccttccgagcaggcctcgatgccaacgccgtacgtcaagaccctctttgacgaggccaagaaatacaacctccctatcaatgagctctcgggtctgaccggcaacctattcggggccggtgcggacacctcctcgagcacactggtcaccttcgtcctcgcgtgctgcgcgtttcctgatgccatggagaaggcccaggccgagatcgaccgagtcattgggccgaaccggtctctgcactgggacgactcacccaggctgccctacgtcaacgcctttgtgaaggaagtcttccgctggcgcagcgtggccatcattggcggacagccgcactcgcccacgcaagatgacacgtacaatggctggctgattcccgccgggtcctgggtgcaggggaacgtgtgggcgattcaccaccacgagcgcgagttcccggacccggaccgcttctacccggacaggttcttcgaggacaacgatcaccaccgcccgtttcccggcgacagggactacatgacctttggctggggccggcgcgtgtgcagcggccaggcgctggccgagcaggggacctgggtcacggtggcgcggcttctgtggggattcaacatccgcaaggcaaaggatcccaagacaggaaagcagatcgacgtcgacatattcgccttcacgaacgggctgaatatgcggccgcagcccttcccctgcgagattgtgccgcggagtgaggagatcaaggaagcgatattgagggaaggggagcaagcattggcggatctcaagcttcacgacggcgagaccaggtaccggatgagcaccttctatcaacagcagaagaggaagctgaaggaggagcccgtgctcgatgagcacggaaacgtcaaggttgtcaaggtcaaggctgtttag

SEQ ID NO: 62 - protein, 594 aa, Myceliophthora thermophilia
MLSEKLIDSFTLFKLQSAIADAGLFNVALALLAVVATAIAADYAHMLYLRSKMPPGPFPWPIVGNTFTLPDTKPWLYFEELSKKYNTPLITFWIGRNPTIWINDAWCAHDILEKKAQIYTSRPRMVVFGELGSGQANLVTMRIRNQQERDHWRIHRKLMHVGVGVQSVRGYREIQNNESKIVAYDFLREPKEYVKHLERYATSVVSIIAFGRRVASYNDPIITEVIALMQLAADLNVPGKSFPMLLETFPILAKFPRFMPWFKGLGTRSQKGGHYFFYTLAQEAIEQYNQKSPSEQASMPTPYVKTLFDEAKKYNLPINELSGLTGNLFGAGADTSSSTLVTFVLACCAFPDAMEKAQAEIDRVIGPNRSLHWDDSPRLPYVNAFVKEVFRWRSVAIIGGQPHSPTQDDTYNGWLIPAGSWVQGNVWAIHHHEREFPDPDRFYPDRFFEDNDHHRPFPGDRDYMTFGWGRRVCSGQALAEQGTWVTVARLLWGFNIRKAKDPKTGKQIDVDIFAFTNGLNMRPQPFPCEIVPRSEEIKEAILREGEQALADLKLHDGETRYRMSTFYQQQKRKLKEEPVLDEHGNVKVVKVKAV

SEQ ID NO: 63 - protein, 554 aa, Myceliophthora thermophilia
ADYAHMLYLRSKMPPGPFPWPIVGNTFTLPDTKPWLYFEELSKKYNTPLITFWIGRNPTIWINDAWCAHDILEKKAQIYTSRPRMVVFGELGSGQANLVTMRIRNQQERDHWRIHRKLMHVGVGVQSVRGYREIQNNESKIVAYDFLREPKEYVKHLERYATSVVSIIAFGRRVASYNDPIITEVIALMQLAADLNVPGKSFPMLLETFPILAKFPRFMPWFKGLGTRSQKGGHYFFYTLAQEAIEQYNQKSPSEQASMPTPYVKTLFDEAKKYNLPINELSGLTGNLFGAGADTSSSTLVTFVLACCAFPDAMEKAQAEIDRVIGPNRSLHWDDSPRLPYVNAFVKEVFRWRSVAIIGGQPHSPTQDDTYNGWLIPAGSWVQGNVWAIHHHEREFPDPDRFYPDRFFEDNDHHRPFPGDRDYMTFGWGRRVCSGQALAEQGTWVTVARLLWGFNIRKAKDPKTGKQIDVDIFAFTNGLNMRPQPFPCEIVPRSEEIKEAILREGEQALADLKLHDGETRYRMSTFYQQQKRKLKEEPVLDEHGNVKVVKVKAV

SEQ ID NO: 64 - DNA, 1602 bp, Myceliophthora thermophilia
atgataaccaagcttgcacagctaggtacattcgacctagccatcagtaccaccgtcttggggctagctgccatcgtcttcttcgccctgggccgcatgctctggccatccaagaagggcacaccaccactcccgcccagtccaccctccgagcctctactgggtcattaccggattgttcctgatgatgccgccttcaagcggtacgccaagtgggcgaaagagtacaaaacagacgtcctctacttccacgcttttgggacaaaatggatcgtcctaaacagccttgaggcggcaactgagctgcttgaaaagcgaggagcgagttacgcggaccgtccccgcttcgtcatgtttgaggaaatgggttggtccccaaccctcacctggcttcgttggggcccgaaatatcagcttcatcggagggtgttgcaaccacctttcaccaaatcgaaggtcggaaactacatggcgatgcagaggagggaagcacactcttgctgtaaaggcatggttgacgaccctgaaaactggctgagagccgttagacggttctcggcggctatcgtgctcaagatcgcctacggactcgaggtggagggcccccaaagcccctggatccagatggctgaggacactgccgccgcggttggcaaatcgggggctccagctagttccatcatggaccgccttcccgcgactcgctacctgccagactggcttcccttcatggaacgattacgctatgctcgaacctggcggccggcaattgagaagcttacgcgcattcccttcgaggcgtcgttggagacaatgcgttcgggtgcgaacaacaactcctttgtccacactcagatgcaaatccggaatgacaatgccatcaaccaacaacccaatgaatttgatgtggaagacatcaaaggcgcagcagcaacaatcgtcattgccggcaatgacactacaacggctacgttgatgctttttgttctctacttgatgcaaaatcctgacgcccagcgcaaggcacaggaggaggtcgaccgtgttgtcggccacgacaggctgccagactgggacgacatgccgaaactacgatataccaaccttatcctgcaggagacctaccgaatgaacccgctctctccccttgggattccccacgccagcgttgcaggtgatgtctacaacggcatgttcattcccaaggggaccattgtatacccgaatgtttgggccatgaaccacgacgagtccgtctacgtcgaaccgttccgcttctggccggagaggtaccttccaaaggaccagggaggaaataatgagcccttcccagtaggaaattttgggttcggaagacgcatctgcgtcggcaggcacctagctgagaacagcctccttatcatgctggctacggtgcttgccactctcgaaattggctggcctctgggagaagacggcgaacccgccccttttgaacctgagtggtctttcaggggacaagccatcgtcttgcccttcccatcctccattcgaagccgaagtgccaagtccagtgcattgctagatgcagagctgcatgcgtcagaatatcaccgcggttga

SEQ ID NO: 65 - protein, 533 aa, Myceliophthora thermophilia
MITKLAQLGTFDLAISTTVLGLAAIVFFALGRMLWPSKKGTPPLPPSPPSEPLLGHYRIVPDDAAFKRYAKWAKEYKTDVLYFHAFGTKWIVLNSLEAATELLEKRGASYADRPRFVMFEEMGWSPTLTWLRWGPKYQLHRRVLQPPFTKSKVGNYMAMQRREAHSCCKGMVDDPENWLRAVRRFSAAIVLKIAYGLEVEGPQSPWIQMAEDTAAAVGKSGAPASSIMDRLPATRYLPDWLPFMERLRYARTWRPAIEKLTRIPFEASLETMRSGANNNSFVHTQMQIRNDNAINQQPNEFDVEDIKGAAATIVIAGNDTTTATLMLFVLYLMQNPDAQRKAQEEVDRVVGHDRLPDWDDMPKLRYTNLILQETYRMNPLSPLGIPHASVAGDVYNGMFIPKGTIVYPNVWAMNHDESVYVEPFRFWPERYLPKDQGGNNEPFPVGNFGFGRRICVGRHLAENSLLIMLATVLATLEIGWPLGEDGEPAPFEPEWSFRGQAIVLPFPSSIRSRSAKSSALLDAELHASEYHRG

SEQ ID NO: 66 - protein, 502 aa, Myceliophthora thermophilia
RMLWPSKKGTPPLPPSPPSEPLLGHYRIVPDDAAFKRYAKWAKEYKTDVLYFHAFGTKWIVLNSLEAATELLEKRGASYADRPRFVMFEEMGWSPTLTWLRWGPKYQLHRRVLQPPFTKSKVGNYMAMQRREAHSCCKGMVDDPENWLRAVRRFSAAIVLKIAYGLEVEGPQSPWIQMAEDTAAAVGKSGAPASSIMDRLPATRYLPDWLPFMERLRYARTWRPAIEKLTRIPFEASLETMRSGANNNSFVHTQMQIRNDNAINQQPNEFDVEDIKGAAATIVIAGNDTTTATLMLFVLYLMQNPDAQRKAQEEVDRVVGHDRLPDWDDMPKLRYTNLILQETYRMNPLSPLGIPHASVAGDVYNGMFIPKGTIVYPNVWAMNHDESVYVEPFRFWPERYLPKDQGGNNEPFPVGNFGFGRRICVGRHLAENSLLIMLATVLATLEIGWPLGEDGEPAPFEPEWSFRGQAIVLPFPSSIRSRSAKSSALLDAELHASEYHRG

SEQ ID NO: 67 - DNA, 2364 bp, Myceliophthora thermophilia
atgaagctactcagccgcgttggggcgaccgccctagcggcgacgttgtcactgcagcaatgtgcagcccagatgaccgaggggacctacaccgatgaggctaccggtatccaattcaagacgtggaccgcctccgagggcgcccctttcacgtttggcttgaccctccccgcggacgcgctggaaaaggatgccaccgagtacattggtctcctgcgttgccaaatcaccgatcccgcctcgcccagctggtgcggtatctcccacggccagtccggccagatgacgcaggcgctgctgctggtcgcctgggccagcgaggacaccgtctacacgtcgttccgctacgccaccggctacacgctccccggcctctacacgggcgacgccaagctgacccagatctcctcctcggtcagcgaggacagcttcgaggtgctgttccgctgcgaaaactgcttctcctgggaccaggatggcaccaagggcaacgtctcgaccagcaacggcaacctggtcctcggccgcgccgccgcgaaggatggtgtgacgggccccacgtgcccggacacggccgagttcggtttccatgataacggtttcggacagtggggtgccgtgcttgagggtgctacttcggactcgtacgaggagtgggctaagctggccacgaccacgcccgagaccacctgcgatggcactggccccggcgacaaggagtgcgttccggctcccgaggacacgtatgattacatcgttgtcggtgccggcgccggtggtatcaccgtcgccgacaagctcagcgaggccggccacaaggtccttctcatcgagaagggacccccttcgaccggcctgtggaacgggaccatgaagcccgagtggctcgagagcaccgaccttacccgcttcgacgttcccggcctgtgcaaccagatctgggtcgactctgccggcatcgcctgcaccgataccgaccagatggcgggctgcgttctcggcggtggcaccgctgtcaacgctggtttgtggtggaagccccaccccgctgactgggatgagaacttccccgaagggtggaagtcgagcgatctcgcggatgcgaccgagcgtgtcttcaagcgcatccccggcacgtcgcacccgtcgcaggacggcaagttgtaccgccaggagggcttcgaggtcatcagcaagggcctggccaacgccggctggaaggaaatcagcgccaacgaggcgcccagcgagaagaaccacacctatgcacacaccgagttcatgttctcgggcggtgagcgtggcggccccctggcgacgtaccttgcctcggctgccgagcgcagcaacttcaacctgtggctcaacactgccgtccggagggccgtccgcagcggcagcaaggtcaccggcgtcgagctcgagtgcctcacggacggtggcttcagcgggaccgtcaacctgaatgagggcggtggtgtcatcttctcggccggcgctttcggctcggccaagctgctccttcgcagcggtatcggtcctgaggaccagctcgagattgtggcgagctccaaggacggcgagaccttcactcccaaggacgagtggatcaacctccccgtcggccacaacctgatcgaccatctcaacactgacctcattatcacgcacccggatgtcgttttctatgacttctatgcggcctgggacgagcccatcacggaggataaggaggcctacctgaactcgcggtccggcattctcgcccaggcggcgcccaatatcggccctatgatgtgggatcaagtcacgccgtccgacggcatcacccgccagttccagtggacatgccgtgttgagggcgacagctccaagaccaactcgacccacgccatgaccctcagccagtacctcggccgtggcgtcgtctcgcgcggccggatgggcatcacctccgggctgagcacgacggtggccgagcacccgtacctgcacaacaacggcgacctggaggcggtcatccaggggatccagaacgtggtggacgcgctcagccaggtggccgacctcgagtgggtgctcccgccgcccgacgggacggtggccgactacgtcaacagcctgatcgtctcgccggccaaccgccgggccaaccactggatgggcacggccaagctgggcaccgacgacggccgctcgggcggcacctcggtcgtcgacctcgacaccaaggtgtacggcaccgacaacctgttcgtcgtcgacgcgtccgtcttccccggcatgtcgacgggcaacccgtcggccatgatcgtcatcgtggccgagcaggcggcgcagcgcatcctggccctgcggtcttaa

SEQ ID NO: 68 - protein, 787 aa, Myceliophthora thermophilia
MKLLSRVGATALAATLSLQQCAAQMTEGTYTDEATGIQFKTWTASEGAPFTFGLTLPADALEKDATEYIGLLRCQITDPASPSWCGISHGQSGQMTQALLLVAWASEDTVYTSFRYATGYTLPGLYTGDAKLTQISSSVSEDSFEVLFRCENCFSWDQDGTKGNVSTSNGNLVLGRAAAKDGVTGPTCPDTAEFGFHDNGFGQWGAVLEGATSDSYEEWAKLATTTPETTCDGTGPGDKECVPAPEDTYDYIVVGAGAGGITVADKLSEAGHKVLLIEKGPPSTGLWNGTMKPEWLESTDLTRFDVPGLCNQIWVDSAGIACTDTDQMAGCVLGGGTAVNAGLWWKPHPADWDENFPEGWKSSDLADATERVFKRIPGTSHPSQDGKLYRQEGFEVISKGLANAGWKEISANEAPSEKNHTYAHTEFMFSGGERGGPLATYLASAAERSNFNLWLNTAVRRAVRSGSKVTGVELECLTDGGFSGTVNLNEGGGVIFSAGAFGSAKLLLRSGIGPEDQLEIVASSKDGETFTPKDEWINLPVGHNLIDHLNTDLIITHPDVVFYDFYAAWDEPITEDKEAYLNSRSGILAQAAPNIGPMMWDQVTPSDGITRQFQWTCRVEGDSSKTNSTHAMTLSQYLGRGVVSRGRMGITSGLSTTVAEHPYLHNNGDLEAVIQGIQNVVDALSQVADLEWVLPPPDGTVADYVNSLIVSPANRRANHWMGTAKLGTDDGRSGGTSVVDLDTKVYGTDNLFVVDASVFPGMSTGNPSAMIVIVAEQAAQRILALRS

SEQ ID NO: 69 - protein, 764 aa, Myceliophthora thermophilia
QMTEGTYTDEATGIQFKTWTASEGAPFTFGLTLPADALEKDATEYIGLLRCQITDPASPSWCGISHGQSGQMTQALLLVAWASEDTVYTSFRYATGYTLPGLYTGDAKLTQISSSVSEDSFEVLFRCENCFSWDQDGTKGNVSTSNGNLVLGRAAAKDGVTGPTCPDTAEFGFHDNGFGQWGAVLEGATSDSYEEWAKLATTTPETTCDGTGPGDKECVPAPEDTYDYIVVGAGAGGITVADKLSEAGHKVLLIEKGPPSTGLWNGTMKPEWLESTDLTRFDVPGLCNQIWVDSAGIACTDTDQMAGCVLGGGTAVNAGLWWKPHPADWDENFPEGWKSSDLADATERVFKRIPGTSHPSQDGKLYRQEGFEVISKGLANAGWKEISANEAPSEKNHTYAHTEFMFSGGERGGPLATYLASAAERSNFNLWLNTAVRRAVRSGSKVTGVELECLTDGGFSGTVNLNEGGGVIFSAGAFGSAKLLLRSGIGPEDQLEIVASSKDGETFTPKDEWINLPVGHNLIDHLNTDLIITHPDVVFYDFYAAWDEPITEDKEAYLNSRSGILAQAAPNIGPMMWDQVTPSDGITRQFQWTCRVEGDSSKTNSTHAMTLSQYLGRGVVSRGRMGITSGLSTTVAEHPYLHNNGDLEAVIQGIQNVVDALSQVADLEWVLPPPDGTVADYVNSLIVSPANRRANHWMGTAKLGTDDGRSGGTSVVDLDTKVYGTDNLFVVDASVFPGMSTGNPSAMIVIVAEQAAQRILALRS

SEQ ID NO: 70 - DNA, 2487 bp, Myceliophthora thermophilia
atgaggacctcctctcgtttaatcggtgcccttgcggcggcactcttgccgtctgcccttgcgcagaacaacgcgccggtaaccttcaccgacccggactcgggcattaccttcaacacgtggggtctcgccgaggattctccccagactaagggcggtttcacttttggtgttgctctgccctctgatgccctcacgacagacgccaaggagttcatcggttacttgaaatgcgcgaggaacgatgagagcggttggtgcggtgtctccctgggcggccccatgaccaactcgctcctcatcgcggcctggccccacgaggacaccgtctacacctctctccgcttcgccaccggctatgccatgccggatgtctaccagggggacgccgagatcacccaggtctcctcctctgtcaactcgacgcacttcagcctcatcttcaggtgcgagaactgcctgcaatggagtcaaagcggcgccaccggcggtgcctccacctcgaacggcgtgttggtcctcggctgggtccaggcattcgccgaccccggcaacccgacctgccccgaccagatcaccctcgagcagcacgacaacggcatgggtatctggggtgcccagctcaactccgacgccgccagcccgtcctacaccgagtgggccgcccaggccaccaagaccgtcacgggtgactgcggcggtcccaccgagacctctgtcgtcggtgtccccgttccgacgggcgtctcgttcgattacatcgtcgtgggcggcggtgccggtggcatccccgccgccgacaagctcagcgaggccggcaagagtgtgctgctcatcgagaagggctttgcctcgaccgccaacaccggaggcactctcggccccgagtggctcgagggccacgaccttacccgctttgacgtgccgggtctgtgcaaccagatctgggttgactccaaggggatcgcttgcgaggataccgaccagatggctggctgtgtcctcggcggcggtaccgccgtgaatgccggcctgtggttcaagccctactcgctcgactgggactacctcttccctagtggttggaagtacaaagacgtccagccggccatcaaccgcgccctctcgcgcatcccgggcaccgatgctccctcgaccgacggcaagcgctactaccaacagggcttcgacgtcctctccaagggcctggccggcggcggctggacctcggtcacggccaataacgcgccagacaagaagaaccgcaccttctcccatgcccccttcatgttcgccggcggcgagcgcaacggcccgctgggcacctacttccagaccgccaagaagcgcagcaacttcaagctctggctcaacacgtcggtcaagcgcgtcatccgccagggcggccacatcaccggcgtcgaggtcgagccgttccgcgacggcggttaccaaggcatcgtccccgtcaccaaggttacgggccgcgtcatcctctctgccggtacctttggcagtgcaaagatcctgctgaggagcggtatcggtccgaacgatcagctgcaggttgtcgcggcctcggagaaggatggccctaccatgatcagcaactcgtcctggatcaacctgcctgtcggctacaacctggatgaccacctcaacaccgacactgtcatctcccaccccgacgtcgtgttctacgacttctacgaggcgtgggacaatcccatccagtctgacaaggacagctacctcaactcgcgcacgggcatcctcgcccaagccgctcccaacattgggcctatgttctgggaagagatcaagggtgcggacggcattgttcgccagctccagtggactgcccgtgtcgagggcagcctgggtgcccccaacggcaagaccatgaccatgtcgcagtacctcggtcgtggtgccacctcgcgcggccgcatgaccatcaccccgtccctgacaactgtcgtctcggacgtgccctacctcaaggaccccaacgacaaggaggccgtcatccagggcatcatcaacctgcagaacgccctcaagaacgtcgccaacctgacctggctcttccccaactcgaccatcacgccgcgccaatacgttgacagcatggtcgtctccccgagcaaccggcgctccaaccactggatgggcaccaacaagatcggcaccgacgacgggcgcaagggcggctccgccgtcgtcgacctcaacaccaaggtctacggcaccgacaacctcttcgtcatcgacgcctccatcttccccggcgtgcccaccaccaaccccacctcgtacatcgtgacggcgtcggagcacgcctcggcccgcatcctcgccctgcccgacctcacgcccgtccccaagtacgggcagtgcggcggccgcgaatggagcggcagcttcgtctgcgccgacggctccacgtgccagatgcagaacgagtggtactcgcagtgcttgtga

SEQ ID NO: 71 - protein, 828 aa, Myceliophthora thermophilia
MRTSSRLIGALAAALLPSALAQNNAPVTFTDPDSGITFNTWGLAEDSPQTKGGFTFGVALPSDALTTDAKEFIGYLKCARNDESGWCGVSLGGPMTNSLLIAAWPHEDTVYTSLRFATGYAMPDVYQGDAEITQVSSSVNSTHFSLIFRCENCLQWSQSGATGGASTSNGVLVLGWVQAFADPGNPTCPDQITLEQHDNGMGIWGAQLNSDAASPSYTEWAAQATKTVTGDCGGPTETSVVGVPVPTGVSFDYIVVGGGAGGIPAADKLSEAGKSVLLIEKGFASTANTGGTLGPEWLEGHDLTRFDVPGLCNQIWVDSKGIACEDTDQMAGCVLGGGTAVNAGLWFKPYSLDWDYLFPSGWKYKDVQPAINRALSRIPGTDAPSTDGKRYYQQGFDVLSKGLAGGGWTSVTANNAPDKKNRTFSHAPFMFAGGERNGPLGTYFQTAKKRSNFKLWLNTSVKRVIRQGGHITGVEVEPFRDGGYQGIVPVTKVTGRVILSAGTFGSAKILLRSGIGPNDQLQVVAASEKDGPTMISNSSWINLPVGYNLDDHLNTDTVISHPDVVFYDFYEAWDNPIQSDKDSYLNSRTGILAQAAPNIGPMFWEEIKGADGIVRQLQWTARVEGSLGAPNGKTMTMSQYLGRGATSRGRMTITPSLTTVVSDVPYLKDPNDKEAVIQGIINLQNALKNVANLTWLFPNSTITPRQYVDSMVVSPSNRRSNHWMGTNKIGTDDGRKGGSAVVDLNTKVYGTDNLFVIDASIFPGVPTTNPTSYIVTASEHASARILALPDLTPVPKYGQCGGREWSGSFVCADGSTCQMQNEWYSQCL

SEQ ID NO: 72 - protein, 807 aa, Myceliophthora thermophilia
QNNAPVTFTDPDSGITFNTWGLAEDSPQTKGGFTFGVALPSDALTTDAKEFIGYLKCARNDESGWCGVSLGGPMTNSLLIAAWPHEDTVYTSLRFATGYAMPDVYQGDAEITQVSSSVNSTHFSLIFRCENCLQWSQSGATGGASTSNGVLVLGWVQAFADPGNPTCPDQITLEQHDNGMGIWGAQLNSDAASPSYTEWAAQATKTVTGDCGGPTETSVVGVPVPTGVSFDYIVVGGGAGGIPAADKLSEAGKSVLLIEKGFASTANTGGTLGPEWLEGHDLTRFDVPGLCNQIWVDSKGIACEDTDQMAGCVLGGGTAVNAGLWFKPYSLDWDYLFPSGWKYKDVQPAINRALSRIPGTDAPSTDGKRYYQQGFDVLSKGLAGGGWTSVTANNAPDKKNRTFSHAPFMFAGGERNGPLGTYFQTAKKRSNFKLWLNTSVKRVIRQGGHITGVEVEPFRDGGYQGIVPVTKVTGRVILSAGTFGSAKILLRSGIGPNDQLQVVAASEKDGPTMISNSSWINLPVGYNLDDHLNTDTVISHPDVVFYDFYEAWDNPIQSDKDSYLNSRTGILAQAAPNIGPMFWEEIKGADGIVRQLQWTARVEGSLGAPNGKTMTMSQYLGRGATSRGRMTITPSLTTVVSDVPYLKDPNDKEAVIQGIINLQNALKNVANLTWLFPNSTITPRQYVDSMVVSPSNRRSNHWMGTNKIGTDDGRKGGSAVVDLNTKVYGTDNLFVIDASIFPGVPTTNPTSYIVTASEHASARILALPDLTPVPKYGQCGGREWSGSFVCADGSTCQMQNEWYSQCL

SEQ ID NO: 73 - DNA, 1737 bp, Myceliophthora thermophilia
atgcaagttgcttcaaagttggtagccgtcactggcggtgccctggcgctctggctacatccagtggcagcacaggaaggatgtaccaacatctcctccaccgagacgtacgattacatcgttgtgggatccggtgctggcggtatccctgttgcggatcgcctgagcgaagctggccacaaggttctcctgatcgagaagggtccgccgtcgacggggagatggggtggaataatgaaaccggagtggctaatcggtacgaacctgacccgcttcgacgtcccgggtctctgcaaccagatctgggccgacccaaccggggccatctgcaccgacgtcgaccagatggcggggtgtatgctaggaggagggacagcggtcaacgccggactgtggtggaagccgcaccctgccgactgggacgtcaacttccccgagggttggcacagcgaggacatggcggaggccacagaacgcgtgtttgagcggatccccggcaccatcaccccgtcgatggacggcaagcggtacctctcgcagggcttcgacatgctgggcggcagcctcgaagctgccggctgggagtacctcgtccccaacgagcacccggacaggaagaaccgcacatacgggcacagcaccttcatgtactcgggcggagagaggggcgggcccctggccacatacctcgtctcggcggttcagcgcgagggctttacgctgtggatgaacacgactgtgacgcgcatcatccgggaaggcggccatgctacgggcgtcgaggtgcagtgcagcaacagcgaggcaggtcaggccggcatcgtcccgctcacccccaagaccggccgggttattgtctccgcgggagcattcggctcggcgaagctgctcttccgaagcggtatcggaccgaaggaccaactcaatattgtcaagaactcaaccgatgggcctagcatgatttcggaggaccagtggatcgaattgccggttggctacaacctcaatgatcacgtcgggaccgacattgaaatagcacacccggatgtcgtcttctacgactactatggggcttgggacgagcccatcgtcgaggataccgaaagatatgtggccaacaggaccggtcctctggcgcaagctgcaccaaatattggcccgatcttctgggagaccataaaggggagcgacggtgtctctcgtcacctgcaatggcaggcgagggtcgagggaaaactcaacacctccatgacgatcacccagtatttgggcacaggctcccgatctcgaggccggatgactatcacgaggcggttgaatacggtagtctcgacccctccatacctccgagatgagtatgacagggaggccgtcatccagggcatcgccaacctgcgagagtcattgaaaggggtggccaacctgacatggattactccgccgtcgaacgtgacggtggaggatttcgtggactcgatcccggctactccggcgcgccgttgctccaaccactggataggcacggccaagattggcctcgacgacgggcgggaggggggcacgtcggtggtggaccttaacactaaggtgtacgggactgacaatatctttgtcgtcgacgcatccatcttccccggccacatcacaggcaatccctcggcagccattgtgatcgcggccgagtatgcggcggccaagatacttgcgctaccggccccggaggatgcggcatcgtga

SEQ ID NO: 74 - protein, 578 aa, Myceliophthora thermophilia
MQVASKLVAVTGGALALWLHPVAAQEGCTNISSTETYDYIVVGSGAGGIPVADRLSEAGHKVLLIEKGPPSTGRWGGIMKPEWLIGTNLTRFDVPGLCNQIWADPTGAICTDVDQMAGCMLGGGTAVNAGLWWKPHPADWDVNFPEGWHSEDMAEATERVFERIPGTITPSMDGKRYLSQGFDMLGGSLEAAGWEYLVPNEHPDRKNRTYGHSTFMYSGGERGGPLATYLVSAVQREGFTLWMNTTVTRIIREGGHATGVEVQCSNSEAGQAGIVPLTPKTGRVIVSAGAFGSAKLLFRSGIGPKDQLNIVKNSTDGPSMISEDQWIELPVGYNLNDHVGTDIEIAHPDVVFYDYYGAWDEPIVEDTERYVANRTGPLAQAAPNIGPIFWETIKGSDGVSRHLQWQARVEGKLNTSMTITQYLGTGSRSRGRMTITRRLNTVVSTPPYLRDEYDREAVIQGIANLRESLKGVANLTWITPPSNVTVEDFVDSIPATPARRCSNHWIGTAKIGLDDGREGGTSVVDLNTKVYGTDNIFVVDASIFPGHITGNPSAAIVIAAEYAAAKILALPAPEDAAS

SEQ ID NO: 75 - protein, 554 aa, Myceliophthora thermophilia
QEGCTNISSTETYDYIVVGSGAGGIPVADRLSEAGHKVLLIEKGPPSTGRWGGIMKPEWLIGTNLTRFDVPGLCNQIWADPTGAICTDVDQMAGCMLGGGTAVNAGLWWKPHPADWDVNFPEGWHSEDMAEATERVFERIPGTITPSMDGKRYLSQGFDMLGGSLEAAGWEYLVPNEHPDRKNRTYGHSTFMYSGGERGGPLATYLVSAVQREGFTLWMNTTVTRIIREGGHATGVEVQCSNSEAGQAGIVPLTPKTGRVIVSAGAFGSAKLLFRSGIGPKDQLNIVKNSTDGPSMISEDQWIELPVGYNLNDHVGTDIEIAHPDVVFYDYYGAWDEPIVEDTERYVANRTGPLAQAAPNIGPIFWETIKGSDGVSRHLQWQARVEGKLNTSMTITQYLGTGSRSRGRMTITRRLNTVVSTPPYLRDEYDREAVIQGIANLRESLKGVANLTWITPPSNVTVEDFVDSIPATPARRCSNHWIGTAKIGLDDGREGGTSVVDLNTKVYGTDNIFVVDASIFPGHITGNPSAAIVIAAEYAAAKILALPAPEDAAS

SEQ ID NO: 76 - DNA, 1944 bp, Myceliophthora thermophilia
atgggcttcctcgccgccactcttgtgtcctgtgccgctctcgcgagcgcagcaagcatcccacgtccccatgccaagcgccaggtctcccagcttcgcgacgattatgacttcgtgatcgttggcggtggaactagcggcctcactgtagccgatcggctgacagaggcctttccagccaagaacgtccttgtcattgagtatggagacgtccactacgccccgggaaccttcgatccgccgacggactggatcacacctcagcctgatgcccccccttcctggtctttcaattccctccccaacccagacatggcaaacacaacagcgtttgtgctagccggccaagtggtgggtggaagcagtgccgtgaacggcatgttctttgaccgcgcatcccgccacgactacgatgcgtggaccgcggtcggcgggtccgggttcgaacagtccagccacaagtgggactgggaggggctgttccctttcttccagaagagcgtcacgttcacggaaccgccggccgacatcgtccagaagtatcactacacctgggacctgtctgcctacggcaatggctcaacccccatctacagcagctatccggtcttccagtgggccgaccagccgttacttaaccaggcatggcaggagatgggaatcaatccggtgaccgaatgcgccggcggcgacaaggagggtgtctgctgggttcccgcctcgcagcaccctgtcacggcgaggaggtcgcacgccgggctcggccactacgccgatgtgctcccgcgagccaattacgacctcctcgttcaacaccaggttgtcagggtagtattccccaatgggccgagccacggaccgccgcttgtcgaggcgcggtccctggccgacaaccacctgttcaacgtgactgtgaagggcgaagtcatcatctcggcgggcgctctgcacaccccgaccgtccttcaacggagcggcatcggcccggcatccttcttggacgacgccgggatccccgtgacgcttgacctgccgggcgtcggcgccaacctccaggaccactgcggtccgcccgtcacgtggaactacaccgagccctacaccggcttcttcccgctcccctccgagatggtcaacaacgcgaccttcaaagccgaagccatcaccggcttcgacgaggtcccggcccgcggcccctacacgctcgccgggggcaacaacgccatcttcgtatcgctcccacacctcacggccgactacggcgccatcaccgcaaatatccgcgccatggtcgccgacggaaccgccgcctcctatctcgcggccgacgtccgcaccatcccggggatggtggccggctacgaggcccagctcctcgtgctcgccgacctgctcgacaacccggaggcgcccagcctggagacgccgtgggcgacgagcgaggcgccgcagacgtcgtcggtcctggccttcctgctgcacccgctcagccgcggcagcgtgcggctcaacctcagcgacccgctcgcgcagcccgtgctcgactaccgctccgggtccaacccggtcgacatcgacctgcacctcgcccacgtgcgcttcctgcgcggcctgctcgacacgcccaccatgcaggcccgcggggcgctcgagacggcccccggctcggccgtggccgacagcgacgaggcgctgggggagtacgtgcgctcgcacagcacgctgtccttcatgcacccgtgctgcacggccgccatgctgcccgaggaccggggcggcgtcgtcgggccggacctcaaggtgcacggggccgagggcctgagggtcgtggacatgagcgtgatgccgctgttgccgggggcgcacctgagcgccactgcttatgcggtgggggagaaagctgcggatattatcatccaggagtggatggacaaggagcagtga

SEQ ID NO: 77 - protein, 647 aa, Myceliophthora thermophilia
MGFLAATLVSCAALASAASIPRPHAKRQVSQLRDDYDFVIVGGGTSGLTVADRLTEAFPAKNVLVIEYGDVHYAPGTFDPPTDWITPQPDAPPSWSFNSLPNPDMANTTAFVLAGQVVGGSSAVNGMFFDRASRHDYDAWTAVGGSGFEQSSHKWDWEGLFPFFQKSVTFTEPPADIVQKYHYTWDLSAYGNGSTPIYSSYPVFQWADQPLLNQAWQEMGINPVTECAGGDKEGVCWVPASQHPVTARRSHAGLGHYADVLPRANYDLLVQHQVVRVVFPNGPSHGPPLVEARSLADNHLFNVTVKGEVIISAGALHTPTVLQRSGIGPASFLDDAGIPVTLDLPGVGANLQDHCGPPVTWNYTEPYTGFFPLPSEMVNNATFKAEAITGFDEVPARGPYTLAGGNNAIFVSLPHLTADYGAITANIRAMVADGTAASYLAADVRTIPGMVAGYEAQLLVLADLLDNPEAPSLETPWATSEAPQTSSVLAFLLHPLSRGSVRLNLSDPLAQPVLDYRSGSNPVDIDLHLAHVRFLRGLLDTPTMQARGALETAPGSAVADSDEALGEYVRSHSTLSFMHPCCTAAMLPEDRGGVVGPDLKVHGAEGLRVVDMSVMPLLPGAHLSATAYAVGEKAADIIIQEWMDKEQ

SEQ ID NO: 78 - protein, 630 aa, Myceliophthora thermophilia
ASIPRPHAKRQVSQLRDDYDFVIVGGGTSGLTVADRLTEAFPAKNVLVIEYGDVHYAPGTFDPPTDWITPQPDAPPSWSFNSLPNPDMANTTAFVLAGQVVGGSSAVNGMFFDRASRHDYDAWTAVGGSGFEQSSHKWDWEGLFPFFQKSVTFTEPPADIVQKYHYTWDLSAYGNGSTPIYSSYPVFQWADQPLLNQAWQEMGINPVTECAGGDKEGVCWVPASQHPVTARRSHAGLGHYADVLPRANYDLLVQHQVVRVVFPNGPSHGPPLVEARSLADNHLFNVTVKGEVIISAGALHTPTVLQRSGIGPASFLDDAGIPVTLDLPGVGANLQDHCGPPVTWNYTEPYTGFFPLPSEMVNNATFKAEAITGFDEVPARGPYTLAGGNNAIFVSLPHLTADYGAITANIRAMVADGTAASYLAADVRTIPGMVAGYEAQLLVLADLLDNPEAPSLETPWATSEAPQTSSVLAFLLHPLSRGSVRLNLSDPLAQPVLDYRSGSNPVDIDLHLAHVRFLRGLLDTPTMQARGALETAPGSAVADSDEALGEYVRSHSTLSFMHPCCTAAMLPEDRGGVVGPDLKVHGAEGLRVVDMSVMPLLPGAHLSATAYAVGEKAADIIIQEWMDKEQ

SEQ ID NO: 79 - DNA, 912 bp, Myceliophthora thermophilia
atgcgaccccagacacctcccacgctcctgagcacgctgttcttcacgtattacgggctagccatgcgggggcaagggctgtattacacagacatccacacaagcatccgcttctacggccatggcgaacctggtggctacctcttcggcatggtgatcccccggcgaccgaccacagacttcgtcgcgcaactcgtagcgccccttaaccacagcgatgggtggggaggcgtgagcctgggagattccatgaccggtccgctcctgcttgttacctgggccaacggcagcaatgtaatgacggccgcccgcatggccgacgctcacagcgcagccagcgttgtcccatacacagccagtccgataaccgtatcccccatcaaggcggggaccttcgccaacagcacgcacgtctcctccaccttcctctgtaagggctgcatcaacagcgactccttcgacccaggcagggccggcgaggaaggccgccacgtcttcttcgggtacgcctattccagaacagccgtcgaggatccttccgacatcgacaccgccctctcggaccacaccggcagaggcggcgggtatggagggttcagggtggcgctggaccgcgtcaagtcggacgcgtatcatcactacgccgggatggcggagatcggtatctacggcgtcaagcccgaagctccacacccgtcggctccgaccacgacttcgacctctgcgccgagcccagattccacctccgcagcccctgctgctaccacggacgagtgggagaacgggtgctatgaggatgaatgtgagatgccgaccggacccgactacagtcacagggagatatcgtggctggagttgttcggattggcggcgcttgtcgtgatataccttctccaaccgttcattagttga

SEQ ID NO: 80 - protein, 303 aa, Myceliophthora thermophilia
MRPQTPPTLLSTLFFTYYGLAMRGQGLYYTDIHTSIRFYGHGEPGGYLFGMVIPRRPTTDFVAQLVAPLNHSDGWGGVSLGDSMTGPLLLVTWANGSNVMTAARMADAHSAASVVPYTASPITVSPIKAGTFANSTHVSSTFLCKGCINSDSFDPGRAGEEGRHVFFGYAYSRTAVEDPSDIDTALSDHTGRGGGYGGFRVALDRVKSDAYHHYAGMAEIGIYGVKPEAPHPSAPTTTSTSAPSPDSTSAAPAATTDEWENGCYEDECEMPTGPDYSHREISWLELFGLAALVVIYLLQPFIS

SEQ ID NO: 81 - protein, 282 aa, Myceliophthora thermophilia
MRGQGLYYTDIHTSIRFYGHGEPGGYLFGMVIPRRPTTDFVAQLVAPLNHSDGWGGVSLGDSMTGPLLLVTWANGSNVMTAARMADAHSAASVVPYTASPITVSPIKAGTFANSTHVSSTFLCKGCINSDSFDPGRAGEEGRHVFFGYAYSRTAVEDPSDIDTALSDHTGRGGGYGGFRVALDRVKSDAYHHYAGMAEIGIYGVKPEAPHPSAPTTTSTSAPSPDSTSAAPAATTDEWENGCYEDECEMPTGPDYSHREISWLELFGLAALVVIYLLQPFIS

SEQ ID NO: 82 - DNA, 678 bp, Myceliophthora thermophilia
atgcgtactgccatcgccaacgtcttctccttctgcctcgtcctgttgctcggcagcttgaggggaggccacgccttcgcgacggcgccggcgccggcgctggacaagagacagagcacgtcgcggtactgcagcccgagcacgcagatctgctacctcgagtactcgtggggccccacgatccccgtcttccgcatcgccgtccccgacagcgcgtcgaccaacaccgacttccagacgctgctgcagattgtcgcgcccgcctcgctcggctgggccggcttctcctggggcggcggcatgacgctcaacccgctgacggtggcgtggcccaacggcagcggaggggcgacggtttcttcgcggtgggcaactggacggagcctccccacggtgtactcgtcggcgacgtaccgcatcatctcggccgagaccaactcgacgcactggacggtcgagacggtttgctcgggatgcagccggtggaacggcagcgcgctgagcaccacggccgtcaacacctttgcgtgggccgtcagcaagagtcccgtgtcgcagcccgccgacagctcgagcagcttccagatccacgacaatatcggcaccttcgccgcgtcgttaaacgacgccaaggtgcccaaagcgacctttgatcagtatgtgcaaggggcccagtga

SEQ ID NO: 83 - protein, 225 aa, Myceliophthora thermophilia
MRTAIANVFSFCLVLLLGSLRGGHAFATAPAPALDKRQSTSRYCSPSTQICYLEYSWGPTIPVFRIAVPDSASTNTDFQTLLQIVAPASLGWAGFSWGGGMTLNPLTVAWPNGSGGATVSSRWATGRSLPTVYSSATYRIISAETNSTHWTVETVCSGCSRWNGSALSTTAVNTFAWAVSKSPVSQPADSSSSFQIHDNIGTFAASLNDAKVPKATFDQYVQGAQ

SEQ ID NO: 84 - protein, 200 aa, Myceliophthora thermophilia
FATAPAPALDKRQSTSRYCSPSTQICYLEYSWGPTIPVFRIAVPDSASTNTDFQTLLQIVAPASLGWAGFSWGGGMTLNPLTVAWPNGSGGATVSSRWATGRSLPTVYSSATYRIISAETNSTHWTVETVCSGCSRWNGSALSTTAVNTFAWAVSKSPVSQPADSSSSFQIHDNIGTFAASLNDAKVPKATFDQYVQGAQ

SEQ ID NO: 85 - DNA, 1872 bp, Myceliophthora thermophilia
atgaagttcttgcggaaatccgaccggggaagtgtcttgggcagcacgctcttttccttggcgtttctgttctacagcccgccgacggcggcacaaagtccaccccccgatggagcggtctacgactatattgtcatcgggagcggaccgggcggcggcgttgtgggagccaatctcgccaaggcgggatactcggtcctgctcctcgaggcgggagacgacagccccggcgcggggttcggggtgtacacgccgaccgtgacctgggacttctacgtcaagcactatcccgagggggatccgcgagacaaccagtacagccacctgacctggctcacccccgacggccgttactgggtgggccagagcggtgcgcccgagggctcccggctcctcggcgtctattatccccgcggtgccaccctgggagggtcgtccatgatcaacgccatggtcgtctggctgccgaatgacagcgactgggactaccatgccgaggtcacgggagacgacagctggagagccgagaacatgcacaagatcttccagaagatcgaaaagaacaactacctgccccggggcacggcaaaccacgggttcgacggctggttccagacgcagatggggaccatggtgcagaccaaccggacaggcccgctgcagggcaacggcgtcatgacgacgtacgcgcaggactggaacctgacgatacccatgtcggacctcctgatccgcgaccccaacgagatcggcccggaccgcgaccagacgtcgagcatctacgggcaggtcagccaccagttcgccaacggcaaccggtacagctcgcgccactacgtgcaggacgccgtcagctctggcgccaacctgaccgtctccctgacctcgctcgcgaccaggatcctctttgacacggtgacggaacccgacagcccgcgggcgacgggggtcgagtacctctttggcaagtcgctctacaggggcgacaggcggcgggcggacggcgcgatcggggtcaaccgcacggccgtggcgcggcgcgaggtgatcgtgtccgggggcgccttcaactcgccacagctgctgctgctcagcgggatcggcaacgcgaccgagctggaggcgctggggatccccgtgatccgggacctgcccggggtgggccgcaacctgatggacaaccaggagatgcccatcgtgggcacgggaagccccggcggcggcccgggggcggtggcgggcgtggccatgtacaagacgcggcacccggcccacggggagcgcgacatgttcctcttcggcgggcccggcttcctcttccgcggcttctggcccaacgaggccgtgcacctgcccgacgagccggcccagcccgtctacggcgtcagcatggtcaaggggtcgagcgtcaacaacggcggctgggtcaaactgcggagccgggacccgaccgacacgcccgagatcaacttcaaccactacgccgtcggcgccgagtacgacctcgaggccgtcaaggacacggtcgcctggatccggtccgtctaccggcgcgtgggcatcgcgacggtcgagccgccgtgcgcccgcggccccgacgagaacggctactgcggcgaggaggacgaggcctggatccacaagcagaccttcggccaccacccgacctcgaccaacaagatcggcgccgacgacgaccccaccgccgtgctcgactccaagttccgcgtccgcggcgtccgcgccctgcgcgtcgtcgacgccagcgccttcgccaggatcccgggcgtcttccccgtcgtctccacctttatgatctcgcagaaggccagcgacgacattctggccgagctggaggccgagtcacgctga

SEQ ID NO: 86 - protein, 623 aa, Myceliophthora thermophilia
MKFLRKSDRGSVLGSTLFSLAFLFYSPPTAAQSPPPDGAVYDYIVIGSGPGGGVVGANLAKAGYSVLLLEAGDDSPGAGFGVYTPTVTWDFYVKHYPEGDPRDNQYSHLTWLTPDGRYWVGQSGAPEGSRLLGVYYPRGATLGGSSMINAMVVWLPNDSDWDYHAEVTGDDSWRAENMHKIFQKIEKNNYLPRGTANHGFDGWFQTQMGTMVQTNRTGPLQGNGVMTTYAQDWNLTIPMSDLLIRDPNEIGPDRDQTSSIYGQVSHQFANGNRYSSRHYVQDAVSSGANLTVSLTSLATRILFDTVTEPDSPRATGVEYLFGKSLYRGDRRRADGAIGVNRTAVARREVIVSGGAFNSPQLLLLSGIGNATELEALGIPVIRDLPGVGRNLMDNQEMPIVGTGSPGGGPGAVAGVAMYKTRHPAHGERDMFLFGGPGFLFRGFWPNEAVHLPDEPAQPVYGVSMVKGSSVNNGGWVKLRSRDPTDTPEINFNHYAVGAEYDLEAVKDTVAWIRSVYRRVGIATVEPPCARGPDENGYCGEEDEAWIHKQTFGHHPTSTNKIGADDDPTAVLDSKFRVRGVRALRVVDASAFARIPGVFPVVSTFMISQKASDDILAELEAESR

SEQ ID NO: 87 - protein, 592 aa, Myceliophthora thermophilia
QSPPPDGAVYDYIVIGSGPGGGVVGANLAKAGYSVLLLEAGDDSPGAGFGVYTPTVTWDFYVKHYPEGDPRDNQYSHLTWLTPDGRYWVGQSGAPEGSRLLGVYYPRGATLGGSSMINAMVVWLPNDSDWDYHAEVTGDDSWRAENMHKIFQKIEKNNYLPRGTANHGFDGWFQTQMGTMVQTNRTGPLQGNGVMTTYAQDWNLTIPMSDLLIRDPNEIGPDRDQTSSIYGQVSHQFANGNRYSSRHYVQDAVSSGANLTVSLTSLATRILFDTVTEPDSPRATGVEYLFGKSLYRGDRRRADGAIGVNRTAVARREVIVSGGAFNSPQLLLLSGIGNATELEALGIPVIRDLPGVGRNLMDNQEMPIVGTGSPGGGPGAVAGVAMYKTRHPAHGERDMFLFGGPGFLFRGFWPNEAVHLPDEPAQPVYGVSMVKGSSVNNGGWVKLRSRDPTDTPEINFNHYAVGAEYDLEAVKDTVAWIRSVYRRVGIATVEPPCARGPDENGYCGEEDEAWIHKQTFGHHPTSTNKIGADDDPTAVLDSKFRVRGVRALRVVDASAFARIPGVFPVVSTFMISQKASDDILAELEAESR

SEQ ID NO: 88 - DNA, 963 bp, Myceliophthora thermophilia
atggctgctccaatgatgttggcacggcaggcactccggctctcgagtcgcgtaagatactttagctccacggctgcgcgaccagccgccgaggtcaagcgattgggtgtcgttggcgctgggcaaatgggtctcggcattgcattggtggccgctcagaaggcccaggtgccggtaacgctggtcgactcgtcacaagcttccctggacaagggactagcctttgcagagaagctcctcgccaaggacgtctccaagcagcgcatcacccaggaacaggccgacgccacccgcgccctgctccagcccaccacctccatcgacgacctctcgcccgtagacttcgtcatcgaggccgtgcccgagatccccgagctcaagtttgacatcttcgccaagctcgccgagatctgccccaagcacgccatcctggccaccaacacctcgtccatccccatcacccgcatcgccgccgccaccgcccgcggcaacccgaacgacacctccaacagctcacgcgtcgtatccacccacttcatgaacccggtccccgtccagaagggcgtcgagatcatctcgggcctccagacctcgcccgagacgctcgacacggccatcgagttctgcaagcgcatgggcaagatcccctccgtctcggccgactccccgggcttcctggccaaccgcatcctgatgccctacatcaacgaggccatcatctgcctcgagacgggcgtcggtgaccgtgactccatcgacgccatcatgaagaacggcaccaacgtgcccatggggcccctgcagctcgccgacttcatcggcctcgacacctgcctggccatcatgaaggttcttcacaccgaaacgggcgactccaagtaccgccccagcgtgcttctgcggaacatggtcgacgccggctggctgggcaagaagagcggcaggggcttctacgagtattag

SEQ ID NO: 89 - protein, 320 aa, Myceliophthora thermophilia
MAAPMMLARQALRLSSRVRYFSSTAARPAAEVKRLGVVGAGQMGLGIALVAAQKAQVPVTLVDSSQASLDKGLAFAEKLLAKDVSKQRITQEQADATRALLQPTTSIDDLSPVDFVIEAVPEIPELKFDIFAKLAEICPKHAILATNTSSIPITRIAAATARGNPNDTSNSSRVVSTHFMNPVPVQKGVEIISGLQTSPETLDTAIEFCKRMGKIPSVSADSPGFLANRILMPYINEAIICLETGVGDRDSIDAIMKNGTNVPMGPLQLADFIGLDTCLAIMKVLHTETGDSKYRPSVLLRNMVDAGWLGKKSGRGFYEY

SEQ ID NO: 90 - protein, 268 aa, Myceliophthora thermophilia
QKAQVPVTLVDSSQASLDKGLAFAEKLLAKDVSKQRITQEQADATRALLQPTTSIDDLSPVDFVIEAVPEIPELKFDIFAKLAEICPKHAILATNTSSIPITRIAAATARGNPNDTSNSSRVVSTHFMNPVPVQKGVEIISGLQTSPETLDTAIEFCKRMGKIPSVSADSPGFLANRILMPYINEAIICLETGVGDRDSIDAIMKNGTNVPMGPLQLADFIGLDTCLAIMKVLHTETGDSKYRPSVLLRNMVDAGWLGKKSGRGFYEY

SEQ ID NO: 91 - DNA, 1935 bp, Myceliophthora thermophilia
atggcttggaggcgcctagccgcggcgccggcgctctcgcgtgccgccagaaacccgatccgcgcattttccacaacacggccagtcgcccgcgtcatcgccaacgggccgctccgtgcgaaggaggcgtccccgttcgtaagcagcaagtacccggtcatcgatcatgagtacgacgccatcgtggtcggtgccggcggtgccggtctgcgtgctgccttcggtcttgccgaggccggcttcaacacggcttgcatttccaagctcttccccactagaagccacacggtcgctgcccagggtggcatcaacgccgctctcggcaacatgcatgaggacgactggcggtggcacatgtacgacacggtcaagggctccgactggcttggcgaccaggacgccattcactacatgacccgtgaggctcccgcctccatcgtcgagcttgagaactacggctgccccttctcccggaccgaggatggcaagatctaccagcgtgctttcggtggtcagtcccagaagtacggcaagggcggccaggcctaccgctgctgcgccgccgctgaccgtaccggccacgccctgctccacaccctctacggccagtcgctcaggcacaacaccaactacttcattgagtacttcgctatcgacctgatcatgcaggacggcgagtgccgtggtgtcttggcgtacaaccaggaggacggcacgctgcatcggttcctcgccaacaacaccgtcctggccaccggtggctacggccgcgcctacttcagctgtacctcggcccacacctgcaccggtgacggcatggccatggtcgcccgtgccggtctgcccaaccaggatctcgagttcgtccagttccatcccactggtatctacggggccggctgcctgatcaccgagggtgctcgcggtgagggtggctacctcctcaactcggagggcgagcgcttcatggagaggtacgccccgacggccaaggatcttgccagccgcgacgtcgtctcgcgttccatgaccatggagatccgcgagggccgcggtgtcggccccgagaaggaccacatctacctccagctcagccacttgccccccgagatcctcgccgagcgtctccccggtatctcggagaccgccggtatctttgccggcgtcgacgttcgcaagcagcccatccccgtccttcccaccgtccactacaacatgggcggcattccgacccgctacaccggtgaggtccttaccgtggacgagaatggcaacgacaaggtcgtccccggtctcttcgcctgcggtgaggctgcctgcgtctccgtccacggtgccaaccgactgggtgccaactcgctgctcgacctggtcgtcttcggccgtgccgtctcgcacaccatccgcgacaagttcacccccggcgccaagctgaagccgatcgaggccgacgccggcgcccagtcgatcgagacgctcgacaagatccgcaactcgaacgggcccaagtccaccgccgagatccgcctggccatgcagaagaccatgcagcgcgaggttagcgtcttccgtacccaggagagcctggacgagggtgtcaggcagatcaccgaggtcgaccagatgttctcgcaggtcggcatcaaggaccgcagcatgatctggaattcggacctcgtcgagacccttgagctccgcaacctgctcacttgcgctgtgcagaccgccgtctcggccgcgaaccgcaaggagtcccgtggcgcccacgcccgtgaggactatcccgagcgcgacgacaagaactggatgaagcacacgctcagctggcagaaaacgccgcacggcaaggtcgagctctcgtaccgccgcgtcatcgacaccaccctcgacgagaacgagtgcaagcccgtgcccccgatgaagcgtgtctactaa

SEQ ID NO: 92 - protein, 644 aa, Myceliophthora thermophilia
MAWRRLAAAPALSRAARNPIRAFSTTRPVARVIANGPLRAKEASPFVSSKYPVIDHEYDAIVVGAGGAGLRAAFGLAEAGFNTACISKLFPTRSHTVAAQGGINAALGNMHEDDWRWHMYDTVKGSDWLGDQDAIHYMTREAPASIVELENYGCPFSRTEDGKIYQRAFGGQSQKYGKGGQAYRCCAAADRTGHALLHTLYGQSLRHNTNYFIEYFAIDLIMQDGECRGVLAYNQEDGTLHRFLANNTVLATGGYGRAYFSCTSAHTCTGDGMAMVARAGLPNQDLEFVQFHPTGIYGAGCLITEGARGEGGYLLNSEGERFMERYAPTAKDLASRDVVSRSMTMEIREGRGVGPEKDHIYLQLSHLPPEILAERLPGISETAGIFAGVDVRKQPIPVLPTVHYNMGGIPTRYTGEVLTVDENGNDKVVPGLFACGEAACVSVHGANRLGANSLLDLVVFGRAVSHTIRDKFTPGAKLKPIEADAGAQSIETLDKIRNSNGPKSTAEIRLAMQKTMQREVSVFRTQESLDEGVRQITEVDQMFSQVGIKDRSMIWNSDLVETLELRNLLTCAVQTAVSAANRKESRGAHAREDYPERDDKNWMKHTLSWQKTPHGKVELSYRRVIDTTLDENECKPVPPMKRVY

SEQ ID NO: 93 - protein, 629 aa, Myceliophthora thermophilia
ARNPIRAFSTTRPVARVIANGPLRAKEASPFVSSKYPVIDHEYDAIVVGAGGAGLRAAFGLAEAGFNTACISKLFPTRSHTVAAQGGINAALGNMHEDDWRWHMYDTVKGSDWLGDQDAIHYMTREAPASIVELENYGCPFSRTEDGKIYQRAFGGQSQKYGKGGQAYRCCAAADRTGHALLHTLYGQSLRHNTNYFIEYFAIDLIMQDGECRGVLAYNQEDGTLHRFLANNTVLATGGYGRAYFSCTSAHTCTGDGMAMVARAGLPNQDLEFVQFHPTGIYGAGCLITEGARGEGGYLLNSEGERFMERYAPTAKDLASRDVVSRSMTMEIREGRGVGPEKDHIYLQLSHLPPEILAERLPGISETAGIFAGVDVRKQPIPVLPTVHYNMGGIPTRYTGEVLTVDENGNDKVVPGLFACGEAACVSVHGANRLGANSLLDLVVFGRAVSHTIRDKFTPGAKLKPIEADAGAQSIETLDKIRNSNGPKSTAEIRLAMQKTMQREVSVFRTQESLDEGVRQITEVDQMFSQVGIKDRSMIWNSDLVETLELRNLLTCAVQTAVSAANRKESRGAHAREDYPERDDKNWMKHTLSWQKTPHGKVELSYRRVIDTTLDENECKPVPPMKRVY

SEQ ID NO: 94 - DNA, 696 bp, Myceliophthora thermophilia
atgaagtttctctcgctcctcactgctgcaggcgtcgctgccgcgctgcccacttccccggctgaggtctccagcgccggcgaaatcgaggcccgccagctagcatctacccgcaacgagctggagaacggcgactcagccaactgccccaaggccatcttcatctttgcccgagcctcgactgaacccggcaacatgggcatctcggcgggccccaacgtcgcgtccgtcctggaggccgcctacggcgacaatatctgggtgcagggggtggggggcccgtaccgggcagggctggccgacaacgcgctgccggcgggcacgacgcgggcggcgatcgacgaggcgaagcggctgttcaacctggccaacaccaagtgtccgggggcggccgtggtcgcgggcggctacagccaggggacggccgtcgtgtccaacgcgatcgcggagctgcgggggacggggacggcgacgcaggagcagatccggggcgtcgtgctcttcggctacaccaagaacctccagaacggcggccgcgtccccgactacccgaccgaccgcaccaaggtcttctgcaacgtcggcgacctcgtctgctccggcaccctcatcgttgccccggcccacttcctctacacggccgagtcgctcggcgaggccccgcgcttcctccagagcaagatcgacgccacgtag

SEQ ID NO: 95 - protein, 231 aa, Myceliophthora thermophilia
MKFLSLLTAAGVAAALPTSPAEVSSAGEIEARQLASTRNELENGDSANCPKAIFIFARASTEPGNMGISAGPNVASVLEAAYGDNIWVQGVGGPYRAGLADNALPAGTTRAAIDEAKRLFNLANTKCPGAAVVAGGYSQGTAVVSNAIAELRGTGTATQEQIRGVVLFGYTKNLQNGGRVPDYPTDRTKVFCNVGDLVCSGTLIVAPAHFLYTAESLGEAPRFLQSKIDAT

SEQ ID NO: 96 - protein, 216 aa, Myceliophthora thermophilia
LPTSPAEVSSAGEIEARQLASTRNELENGDSANCPKAIFIFARASTEPGNMGISAGPNVASVLEAAYGDNIWVQGVGGPYRAGLADNALPAGTTRAAIDEAKRLFNLANTKCPGAAVVAGGYSQGTAVVSNAIAELRGTGTATQEQIRGVVLFGYTKNLQNGGRVPDYPTDRTKVFCNVGDLVCSGTLIVAPAHFLYTAESLGEAPRFLQSKIDAT

SEQ ID NO: 97 - DNA, 1275 bp, Myceliophthora thermophilia
atgaaacctgccgcgctgctcggagcggcccttgcggccgtggccttccccgcgggcgcccatgcccgctgttcttccgatgcgccgcctcccgcccccgttggcgatgacctcaccgagcccaaggagctgacggacctcttcgagaaggccaagaaggccgtcatcgatcgcctccacgaggacgagaaggccctgcgcgcccgcggcgaggcgcctcgctgcaccgccgataagctcatctttcgccgcgaatacgggtctctgtccaaggatgagcgtctcgcgtacgtcaacgcggtcaagtgcctgcagagcaagccgccgcggacgccggcgagcgtggcgcccggggcgcggtcgcggttcgacgactttgtggtggtgcacatccagcagacgctcgacatccactactcgggcatcttccaggcgtggcaccgctggttcgtgtaccagtacgagaaggcgctgcgggacgagtgcggctacacgggctaccagccgtattgggactggcccaagtacgcgagcgcgccccaggactcgcccctgttcaacggcgacccgtacagcctgggcggcaacggcgagtacgtgccccacgacgggcccgtcatcgtgccgcccgagggcgtcagcggcggcaacatctcgctcccggccggcgtcggcggcggcttcgtcaggacggggcccttcgccaacatgacggtcaacctgggccccgtcggcggcctggccgacaccgccccgggcccccagggcggcctcggctacaacccgcgcgggctcaagcgcgacctgggcggggccatgaacacgcgctacgccaactacaccaccgtcctgcgcctgctgacccagcccgacgtcgacgccttccgcaccgtctccgagggcgtcccctacacggtcgagatcggcccccacggcggcatccactacaccatcggcggcgacccgggcggcgacctcttcacctcccccggcgacccggccttctgggtccaccacgcccagatggaccgcgtctgggccacctggcaggccctcggcctcctcccccccgccgacggcggcgaccccgacccggcccgccgctacaccgacctcggcaagggcgactacgcccaccgcacctggcagaactccccgccctccccctttgccgagctgtccgacgtcatcgatatgggctacgccgccccctccaccaccatcggcgccgtcatgtccaccaccgaaggcgagctgtgctacttttatctctga

SEQ ID NO: 98 - protein, 424 aa, Myceliophthora thermophilia
MKPAALLGAALAAVAFPAGAHARCSSDAPPPAPVGDDLTEPKELTDLFEKAKKAVIDRLHEDEKALRARGEAPRCTADKLIFRREYGSLSKDERLAYVNAVKCLQSKPPRTPASVAPGARSRFDDFVVVHIQQTLDIHYSGIFQAWHRWFVYQYEKALRDECGYTGYQPYWDWPKYASAPQDSPLFNGDPYSLGGNGEYVPHDGPVIVPPEGVSGGNISLPAGVGGGFVRTGPFANMTVNLGPVGGLADTAPGPQGGLGYNPRGLKRDLGGAMNTRYANYTTVLRLLTQPDVDAFRTVSEGVPYTVEIGPHGGIHYTIGGDPGGDLFTSPGDPAFWVHHAQMDRVWATWQALGLLPPADGGDPDPARRYTDLGKGDYAHRTWQNSPPSPFAELSDVIDMGYAAPSTTIGAVMSTTEGELCYFYL

SEQ ID NO: 99 - protein, 402 aa, Myceliophthora thermophilia
RCSSDAPPPAPVGDDLTEPKELTDLFEKAKKAVIDRLHEDEKALRARGEAPRCTADKLIFRREYGSLSKDERLAYVNAVKCLQSKPPRTPASVAPGARSRFDDFVVVHIQQTLDIHYSGIFQAWHRWFVYQYEKALRDECGYTGYQPYWDWPKYASAPQDSPLFNGDPYSLGGNGEYVPHDGPVIVPPEGVSGGNISLPAGVGGGFVRTGPFANMTVNLGPVGGLADTAPGPQGGLGYNPRGLKRDLGGAMNTRYANYTTVLRLLTQPDVDAFRTVSEGVPYTVEIGPHGGIHYTIGGDPGGDLFTSPGDPAFWVHHAQMDRVWATWQALGLLPPADGGDPDPARRYTDLGKGDYAHRTWQNSPPSPFAELSDVIDMGYAAPSTTIGAVMSTTEGELCYFYL

SEQ ID NO: 100 - DNA, 1326 bp, Myceliophthora thermophilia
atgtccaccacgtcggccccaaaaaccggcatcaaagtgatcgtggttggcgccggcttcggcggcctgacggcagccatcgagtgccaccgccagggccacgacgtgtccatctatgagaacttccccgagctcaagaccctcggtgacatcatctcgttcggggccaacgccgggcgcatcttctaccgctggtccaatggcgagattgcgcgccgcctgcgcgagctgtgcatcgacctgtcctcctacggcttccgcatccacaagtgggacaccggcgaggtggtctaccaccagccaacgcccgaacagaagcccgacgcacccgtgctcaacggccaccgcggcgaactgcacgaagtggtgttcagatacgcccgcgacgagctgaagatccccatccacctgggccaacctgtcaacgagtacttcgaggacgagaaccaggcgggcatcgtgctgaagagcggagagcgcgtcgtcgccgacctcgtcatcggcgcggacggcgtgcggtccaaggcgagggagttggtgctgggatatgtagacaagccgaagagcagcggatatgcggtgtggcgggcgtggttccccaacacagacatgatcaaagaccctcgcacacgcgagttctgcatcaacggcgacactttcaacggctggatcggcccggacgtccacttcctgttcagcaccatcaagggtggtaaggattgctgctgggtcttgacccaccgcgacgagcacgacatcgatgagtcctggtccttcccgggcaagctcgaggacgtctacaaggtcctcgagggctgggacccgacctgccgggccatcgtcgagaagacgccaagtctggtggactggaagctcgtctaccgcgatcccctgccgacctgggtgagcaagcatgcgaggatcttgctcgtcggagactcggcgcatccgttcctgcccaccagcgcccagggggcaactcaggcgatggaggacggagtgacgattgccgtgtgcctgaggagagccggtaagaacaacgtgccggctgccgttcgggtgcaccaggagattcggtatgagcgtgtccgcttggtgcagaagaccggtgagaccacgcgcgaccggtggcacaaaacagactgggaaaaggtcgccaaggaccccaagagcatcgcgttcccgcgcgaggactggatccaccagcacgatgccgagaagcacgccgaggaggtgtttgacgacatcttcaagaaggttacgcagccggaactctttgagaatgtcaagctgctgcctgtcgggcccatccccgtggcggtatga

SEQ ID NO: 101 - protein, 441 aa, Myceliophthora thermophilia
MSTTSAPKTGIKVIVVGAGFGGLTAAIECHRQGHDVSIYENFPELKTLGDIISFGANAGRIFYRWSNGEIARRLRELCIDLSSYGFRIHKWDTGEVVYHQPTPEQKPDAPVLNGHRGELHEVVFRYARDELKIPIHLGQPVNEYFEDENQAGIVLKSGERVVADLVIGADGVRSKARELVLGYVDKPKSSGYAVWRAWFPNTDMIKDPRTREFCINGDTFNGWIGPDVHFLFSTIKGGKDCCWVLTHRDEHDIDESWSFPGKLEDVYKVLEGWDPTCRAIVEKTPSLVDWKLVYRDPLPTWVSKHARILLVGDSAHPFLPTSAQGATQAMEDGVTIAVCLRRAGKNNVPAAVRVHQEIRYERVRLVQKTGETTRDRWHKTDWEKVAKDPKSIAFPREDWIHQHDAEKHAEEVFDDIFKKVTQPELFENVKLLPVGPIPVAV

SEQ ID NO: 102 - protein, 415 aa, Myceliophthora thermophilia
IECHRQGHDVSIYENFPELKTLGDIISFGANAGRIFYRWSNGEIARRLRELCIDLSSYGFRIHKWDTGEVVYHQPTPEQKPDAPVLNGHRGELHEVVFRYARDELKIPIHLGQPVNEYFEDENQAGIVLKSGERVVADLVIGADGVRSKARELVLGYVDKPKSSGYAVWRAWFPNTDMIKDPRTREFCINGDTFNGWIGPDVHFLFSTIKGGKDCCWVLTHRDEHDIDESWSFPGKLEDVYKVLEGWDPTCRAIVEKTPSLVDWKLVYRDPLPTWVSKHARILLVGDSAHPFLPTSAQGATQAMEDGVTIAVCLRRAGKNNVPAAVRVHQEIRYERVRLVQKTGETTRDRWHKTDWEKVAKDPKSIAFPREDWIHQHDAEKHAEEVFDDIFKKVTQPELFENVKLLPVGPIPVAV

SEQ ID NO: 103 - DNA, 1509 bp, Myceliophthora thermophilia
atgcatcgtttgcaaggggccctgatcgtgctactgaaccctctcctctggctcggcacactaggactacccagaccccaaattggcgactatggggcgaacgagggccccgtgggtggcgtcagcccgcctattccgacagtcacgtccagcagcggctcgctgcgaggagactcgggccttctagggggcaacgctccgctgcccgacccggaaaagtccgactcggccattgtccccaatccgcagctcgtcaacgggcaagaagcggacgcgaagctcgggctctacctcgacttcgacagcgccgatcctccccagccgatccgtggggagaacgggaacacggatcccggcccacgcacctttgagtacgagaaactcaatcccgacctcttcgcgcccccccggaccgacgcgggggacatgcccaacctgatgtggcccatggggttgtcccacaaccgcccgggcacgggcaagaactcgggctgggcgaggcagcagaacgttgacgtcctgccggaagccaaggccatggcgggcgtcgacatgcgcctggccccgaatgcctaccgagaactgcactggcacacggccaacgagtgggcgatgattctcaagggctgcgttcgcgtggccgccgtcgacgacgagggccgcaacttcgtagacgacgtctgcgccggcgacgtgtggttcttccccgccggcataccgcacagcatccaggccttcgagaagggggccgagttcctgctcgtgttcgaccagggcgacttcaccgaggacggtaccttcctcgtgtccgagctgttcctccggaacccggtcgaggtgctcagcaaggacctgcgcgccggcgtcgacgccttcgagaacctccccaaggaccagctctacatcttcaacggcacccccgcgcccgccgacatctcggagcagaacgtcacctcgccggccggcgccatcaccggcaacgcctcctacacgtaccactggtcccaacaggccccctacaccgtccccggcggctccatcaagatcctcgaccccctgactttccccgtagccagcatgttctcggccgcgctggtcctcgtgcagccgggcgccctgcgcgagattcactggcacacgacctcggacgagtggaacttcttcctccagggggccgggcgcatcaccgtgtacggggcgccggcgtcgtcgcggacctacgacttcacgggcggcggcgtgggctacgtgccggccgcctgcggccactacgtcgagaacacgggcgaggaggacctcgtcttcctcgaggtcctgcaggcgcccaagttcaccgacatcagcgtcgcccagtggctcgccctgaccccgcgccaggtcgtcagggaccacctgaacctccccgacgccgtcctcgacgccctgccccgcgagaagcccatcatcctgacgggcaaccagaacttgaccgctctcgccgccggcggcagtgctttctcgatttcgtag

SEQ ID NO: 104 - protein, 502 aa, Myceliophthora thermophilia
MHRLQGALIVLLNPLLWLGTLGLPRPQIGDYGANEGPVGGVSPPIPTVTSSSGSLRGDSGLLGGNAPLPDPEKSDSAIVPNPQLVNGQEADAKLGLYLDFDSADPPQPIRGENGNTDPGPRTFEYEKLNPDLFAPPRTDAGDMPNLMWPMGLSHNRPGTGKNSGWARQQNVDVLPEAKAMAGVDMRLAPNAYRELHWHTANEWAMILKGCVRVAAVDDEGRNFVDDVCAGDVWFFPAGIPHSIQAFEKGAEFLLVFDQGDFTEDGTFLVSELFLRNPVEVLSKDLRAGVDAFENLPKDQLYIFNGTPAPADISEQNVTSPAGAITGNASYTYHWSQQAPYTVPGGSIKILDPLTFPVASMFSAALVLVQPGALREIHWHTTSDEWNFFLQGAGRITVYGAPASSRTYDFTGGGVGYVPAACGHYVENTGEEDLVFLEVLQAPKFTDISVAQWLALTPRQVVRDHLNLPDAVLDALPREKPIILTGNQNLTALAAGGSAFSIS

SEQ ID NO: 105 - protein, 480 aa, Myceliophthora thermophilia
LPRPQIGDYGANEGPVGGVSPPIPTVTSSSGSLRGDSGLLGGNAPLPDPEKSDSAIVPNPQLVNGQEADAKLGLYLDFDSADPPQPIRGENGNTDPGPRTFEYEKLNPDLFAPPRTDAGDMPNLMWPMGLSHNRPGTGKNSGWARQQNVDVLPEAKAMAGVDMRLAPNAYRELHWHTANEWAMILKGCVRVAAVDDEGRNFVDDVCAGDVWFFPAGIPHSIQAFEKGAEFLLVFDQGDFTEDGTFLVSELFLRNPVEVLSKDLRAGVDAFENLPKDQLYIFNGTPAPADISEQNVTSPAGAITGNASYTYHWSQQAPYTVPGGSIKILDPLTFPVASMFSAALVLVQPGALREIHWHTTSDEWNFFLQGAGRITVYGAPASSRTYDFTGGGVGYVPAACGHYVENTGEEDLVFLEVLQAPKFTDISVAQWLALTPRQVVRDHLNLPDAVLDALPREKPIILTGNQNLTALAAGGSAFSIS

SEQ ID NO: 106 - DNA, 1128 bp, Myceliophthora thermophilia
atggcacgtctcaccctcgcggggctgcttgcagtcccctggctcctgctcccgggcctcgtgtccggcgacgcagtcttggatctccaggaaaagggtcgtcccgccatcgatgctcaactggccaagtcgacgacatgcaccaaagagaaactccaggtccgccgcgagtggggcgacatctcggccgaagagaagaaggcctacatcgccgccatgctgtgcatcatggagaagccgtccaggttggacccgaaccagtttcccggcgccaagtcacggtacgacgacttcgtcgtcgttcacatgaaccagactctgtccatccacggcacgggcaacttcctctcgtggcatcgctactacacctgggtgtttgagcgcgccctccaggaggagtgcgggtataacgggacccagccctactgggactgggggcgctgggccgacgacccggagaactcgcccatctttgacggcagcgacacctctctcagcggcaacggcgagtacattgagcacagggcctcgggcttcatacccgccggcaacggaggtggctgcgtcaagtcgggtcccttcaaagacatggtcgtccacctgggccccgtcgctcccgccatcgacccggcgccgccggcgaacccgcggcgcgacgggtacggcgacaacccgcggtgcctgcggcgtgacatctcgaaccagctgtcgagcaagtacgcgcggacgcaggacattgtcgacctgatcacgacgtcggccgacattggcaccttccagacggtcatgcagggcgccggcggcttcggcgtcggccccggcggcatgggcgtgcacgccgccggccacttcaccatcgccggcgacccgggcggcgacttctacacctcccccaacgacccggccttctgggtccaccacggcatgatcgaccgcacctggaccatctggcagagccaggacctcgacaaccgcctccaggtcatcgccggcggttccagcatgatgggcggccctccccagaccctcgacgaccccgttgacctcggcgtcgtcgccgacaaggtctatcccatcagggacctggtcagcgtcgtcgacgggcccttctgctacgtctatgagtga

SEQ ID NO: 107 - protein, 375 aa, Myceliophthora thermophilia
MARLTLAGLLAVPWLLLPGLVSGDAVLDLQEKGRPAIDAQLAKSTTCTKEKLQVRREWGDISAEEKKAYIAAMLCIMEKPSRLDPNQFPGAKSRYDDFVVVHMNQTLSIHGTGNFLSWHRYYTWVFERALQEECGYNGTQPYWDWGRWADDPENSPIFDGSDTSLSGNGEYIEHRASGFIPAGNGGGCVKSGPFKDMVVHLGPVAPAIDPAPPANPRRDGYGDNPRCLRRDISNQLSSKYARTQDIVDLITTSADIGTFQTVMQGAGGFGVGPGGMGVHAAGHFTIAGDPGGDFYTSPNDPAFWVHHGMIDRTWTIWQSQDLDNRLQVIAGGSSMMGGPPQTLDDPVDLGVVADKVYPIRDLVSVVDGPFCYVYE

SEQ ID NO: 108 - protein, 352 aa, Myceliophthora thermophilia
DAVLDLQEKGRPAIDAQLAKSTTCTKEKLQVRREWGDISAEEKKAYIAAMLCIMEKPSRLDPNQFPGAKSRYDDFVVVHMNQTLSIHGTGNFLSWHRYYTWVFERALQEECGYNGTQPYWDWGRWADDPENSPIFDGSDTSLSGNGEYIEHRASGFIPAGNGGGCVKSGPFKDMVVHLGPVAPAIDPAPPANPRRDGYGDNPRCLRRDISNQLSSKYARTQDIVDLITTSADIGTFQTVMQGAGGFGVGPGGMGVHAAGHFTIAGDPGGDFYTSPNDPAFWVHHGMIDRTWTIWQSQDLDNRLQVIAGGSSMMGGPPQTLDDPVDLGVVADKVYPIRDLVSVVDGPFCYVYE

SEQ ID NO: 109 - DNA, 1326 bp, Myceliophthora thermophilia
atgggcggcgactcgtttccccgtcgcccgccgtccggcatcaaggtgatcgtcgtcggcgccggcttcgccgggctggcggcggcgatcgagtgcgaccgcaaggggcactcggtgacgctcctggagaaggcggagaacatggacgacatgatgcggatcggcgacatcatcagcttcgacccgaacgggtctaaggcgtttgagcggtggcccggggtggtcgaggccatggaggcggtggcccggcagacgacctggctggacctgtaccaccaccagggccgcttcgtcacccggcagtccttcgcgggcgagcgggcctgggggcggcgcatcaacggccaccgcggcgagctgcacaacatcatctaccgccacgccgtcgcccggggcatcgacatccgcctgggctgccgcgtcgaggactacttcgagacggacgaccccccgcaggcgggcgtggtgctggcgggcagcggcggcggcgagcgcctgtcggccgacgtcgtcgtcgcggccgagggggtgcgctcgcggggccgcaagatcgtcctgggctcggacgagaacccgaaatcgtccggctacgccgtctaccgggcctggttcccggccgaccgcatccgcgacaaccccgtcgtccggcacctggtggcccacggcgacacgcaccagggctacatcggcccggacgtccacttcctcgcctcgagcctcaagaacgggtccgaggtcaactgggtcttcacccacgtcgacgacggcaacatcgacgagagctggcagttccccggccggcccgaggaggcgctccgctacctcgacggctggagccccgtcgtgcgcgagctggtcaaggcgacgccggatgacgggcgcctgatcgaccacaagctcgtgtaccgcgacccgctgccgaccttcgtctccccgcgcgcgcgcacctgcctgatcggcgacgccgcccaccctttcctgcccacctcgatccagggggccagccagtcgatcgaggacggcgtcgtgctggccgcctgcctcgagctggccggcgcccgcggcgacgacatcatccccaccgccctgcgcgcctacgagaggctgcggtacgagcgcgtccaccgcgcccaggccacggggcccaagacgcgcgagcgctggcacaaggccgactggtcccgcgtctgggagaacccggacctcatccacctcgtccgcgaggagtggctgctcaactttgacgccgaaaaggacgcctaccagaggtatccccgggtcgtcgccgagttgggggtggggccgccgctacggccgcgcctctga

SEQ ID NO: 110 - protein, 441 aa, Myceliophthora thermophilia
MGGDSFPRRPPSGIKVIVVGAGFAGLAAAIECDRKGHSVTLLEKAENMDDMMRIGDIISFDPNGSKAFERWPGVVEAMEAVARQTTWLDLYHHQGRFVTRQSFAGERAWGRRINGHRGELHNIIYRHAVARGIDIRLGCRVEDYFETDDPPQAGVVLAGSGGGERLSADVVVAAEGVRSRGRKIVLGSDENPKSSGYAVYRAWFPADRIRDNPVVRHLVAHGDTHQGYIGPDVHFLASSLKNGSEVNWVFTHVDDGNIDESWQFPGRPEEALRYLDGWSPVVRELVKATPDDGRLIDHKLVYRDPLPTFVSPRARTCLIGDAAHPFLPTSIQGASQSIEDGVVLAACLELAGARGDDIIPTALRAYERLRYERVHRAQATGPKTRERWHKADWSRVWENPDLIHLVREEWLLNFDAEKDAYQRYPRVVAELGVGPPLRPRL

SEQ ID NO: 111 - protein, 412 aa, Myceliophthora thermophilia
IECDRKGHSVTLLEKAENMDDMMRIGDIISFDPNGSKAFERWPGVVEAMEAVARQTTWLDLYHHQGRFVTRQSFAGERAWGRRINGHRGELHNIIYRHAVARGIDIRLGCRVEDYFETDDPPQAGVVLAGSGGGERLSADVVVAAEGVRSRGRKIVLGSDENPKSSGYAVYRAWFPADRIRDNPVVRHLVAHGDTHQGYIGPDVHFLASSLKNGSEVNWVFTHVDDGNIDESWQFPGRPEEALRYLDGWSPVVRELVKATPDDGRLIDHKLVYRDPLPTFVSPRARTCLIGDAAHPFLPTSIQGASQSIEDGVVLAACLELAGARGDDIIPTALRAYERLRYERVHRAQATGPKTRERWHKADWSRVWENPDLIHLVREEWLLNFDAEKDAYQRYPRVVAELGVGPPLRPRL

SEQ ID NO: 112 - DNA, 1143 bp, Myceliophthora thermophilia
atgacgctcaagcagttgctcatgagcgcgctgctcgcagcacccgcgctggctcatccggcccacaaggagaaggtgtacgcgcacgcggccctccccctcgagcgcaagtctctggcccactgtgcggccaagttcaacgaacccgagttcgtcaagaggacggtcgaacaccatggccgcgagttgcatcggctgaagcgtgcgcgaggtattccggttgaggaaaagcccaagataagcccgcgcgactacctcgatgtcatcaagatcgaccacaagagcaacaagacggtcaccgaggggatggatctcagcacgctgtttgaggactacggggcctgcatgctgatgcctgctgtcgaccagggccctctgtacgtcaaaggagaggaggtccgaaaggacattacgaatggcgagccgggcatccccttgaccctggcgatccaggtcgtggactacaagacgtgcgagacggtcacggatgcgtttgtcgacgtctggagctccaattcgactggcatctacacgggcgtccagggctacccgggcatgggcgaccccaacgactcctcgatcctgcagggtaccaccctccgcggcgtgcagccgaccgacgaccacggcattgcctcttttgactcgctgttcccgggccactacgaggggcgtgctacccacattcacgccatcgtctaccttggcgcgaccaaggaggccaacaacacgatcacgggcggccgggcggcgcacgtgggccaactatactttgaccagagtctcatcaccgaggcggacaagctggcgccgtacaacaccaacaggatggcgattgtgttgaaccagaacgacttcctcttccgggcgggcgccaacggcgacgacccgatcgtgcgctacgccctcgtcggcaacaagcttgaggacggcctgttcgcctggatccgctttggcatcgaccagaacgccaacctgcgcgttaacccggccgccttctggacggaaaatggcggcgtcatgaaccccaccggccccatctcgcagcttcctcccggcggcttccccggctggcctggttggggcatgaggaagagggtagaggcggccttggctgccgctcaggcgcagaacgacgggtaa

SEQ ID NO: 113 - protein, 380 aa, Myceliophthora thermophilia
MTLKQLLMSALLAAPALAHPAHKEKVYAHAALPLERKSLAHCAAKFNEPEFVKRTVEHHGRELHRLKRARGIPVEEKPKISPRDYLDVIKIDHKSNKTVTEGMDLSTLFEDYGACMLMPAVDQGPLYVKGEEVRKDITNGEPGIPLTLAIQVVDYKTCETVTDAFVDVWSSNSTGIYTGVQGYPGMGDPNDSSILQGTTLRGVQPTDDHGIASFDSLFPGHYEGRATHIHAIVYLGATKEANNTITGGRAAHVGQLYFDQSLITEADKLAPYNTNRMAIVLNQNDFLFRAGANGDDPIVRYALVGNKLEDGLFAWIRFGIDQNANLRVNPAAFWTENGGVMNPTGPISQLPPGGFPGWPGWGMRKRVEAALAAAQAQNDG

SEQ ID NO: 114 - protein, 362 aa, Myceliophthora thermophilia
HPAHKEKVYAHAALPLERKSLAHCAAKFNEPEFVKRTVEHHGRELHRLKRARGIPVEEKPKISPRDYLDVIKIDHKSNKTVTEGMDLSTLFEDYGACMLMPAVDQGPLYVKGEEVRKDITNGEPGIPLTLAIQVVDYKTCETVTDAFVDVWSSNSTGIYTGVQGYPGMGDPNDSSILQGTTLRGVQPTDDHGIASFDSLFPGHYEGRATHIHAIVYLGATKEANNTITGGRAAHVGQLYFDQSLITEADKLAPYNTNRMAIVLNQNDFLFRAGANGDDPIVRYALVGNKLEDGLFAWIRFGIDQNANLRVNPAAFWTENGGVMNPTGPISQLPPGGFPGWPGWGMRKRVEAALAAAQAQNDG

SEQ ID NO: 115 - DNA, 1284 bp, Myceliophthora thermophilia
atgcgagggattcagagtctcgtgagcctgtccttgctcgccggagcttgggcgaacccgatgcacaagagatggaagcccaacgcgccccggaacccggacttcccccttgacgaagtcgacaagctcgaggagtccatcatgcccaatgttgaggcatggatgtccaagcgcccggccaaatacagcaactgcactctcgagaatgcgggcatccggagggaatggagcgacctctcggtggacgagcgcaaggagtacatcagcgccgtcctctgcctccagtccaagccttccaagattcccgagggcgaggtccctggggccctgagccgcttcgacgactttgtggcgacgcacatgaccatggcaggccagctgcacagcccaaccaacctatttgccgcccaccggtacttcatccacgcctacgagaaggcactgcgtgaggagtgcggctacaaggggtatcagccgtacatgaactacgaccgctatgctgacgaccccctcaacacacccttgtttgacggcagtgacagcagcatgagtggtaacggcggtccgtacaactactccggcatcccccagcccttcccaaagccgtataacttgattcctccggctggtggtggcggttgtgtcaccgagggccccttcagagaagaggatgcgcacaacaacagcatggtagtctcgctgggccccaagggcggcctcttccacgacataccgcgcaacccgcgggcggacggactaggctccaacccgcggtgcctccgccgcgacgtcaacaagtattcggcccgaggcgcccgcgccaactacacctacagcgccatcatggacaacccggatatcgacagcttctacaaccgctacatgggcatgccgcagctcaagggggacccttacccgtggggtctccatagctccggccactacctcatcggtggcgacccgggcggcgacttctactgctctcccggcgacccgctcttctacttccaccacggcatgctcgaccgggtctggtggatctggcagatgcaggacccggagaaccgcgtccaagccgtcccggggaccaacacgatgccgatgccgcccttgatggccgccaacttggagagcgaggcggccgcgacgacgacgcacaagcgggcggtcaacgtcagcgacctggttgtggacctgggctggacggcgcccccggtcaagttggtcgacctgaacgagcagctgggcggtctgggcggcgagctgtgctacatctacgtgtga

SEQ ID NO: 116 - protein, 427 aa, Myceliophthora thermophilia
MRGIQSLVSLSLLAGAWANPMHKRWKPNAPRNPDFPLDEVDKLEESIMPNVEAWMSKRPAKYSNCTLENAGIRREWSDLSVDERKEYISAVLCLQSKPSKIPEGEVPGALSRFDDFVATHMTMAGQLHSPTNLFAAHRYFIHAYEKALREECGYKGYQPYMNYDRYADDPLNTPLFDGSDSSMSGNGGPYNYSGIPQPFPKPYNLIPPAGGGGCVTEGPFREEDAHNNSMVVSLGPKGGLFHDIPRNPRADGLGSNPRCLRRDVNKYSARGARANYTYSAIMDNPDIDSFYNRYMGMPQLKGDPYPWGLHSSGHYLIGGDPGGDFYCSPGDPLFYFHHGMLDRVWWIWQMQDPENRVQAVPGTNTMPMPPLMAANLESEAAATTTHKRAVNVSDLVVDLGWTAPPVKLVDLNEQLGGLGGELCYIYV

SEQ ID NO: 117 - protein, 409 aa, Myceliophthora thermophilia
NPMHKRWKPNAPRNPDFPLDEVDKLEESIMPNVEAWMSKRPAKYSNCTLENAGIRREWSDLSVDERKEYISAVLCLQSKPSKIPEGEVPGALSRFDDFVATHMTMAGQLHSPTNLFAAHRYFIHAYEKALREECGYKGYQPYMNYDRYADDPLNTPLFDGSDSSMSGNGGPYNYSGIPQPFPKPYNLIPPAGGGGCVTEGPFREEDAHNNSMVVSLGPKGGLFHDIPRNPRADGLGSNPRCLRRDVNKYSARGARANYTYSAIMDNPDIDSFYNRYMGMPQLKGDPYPWGLHSSGHYLIGGDPGGDFYCSPGDPLFYFHHGMLDRVWWIWQMQDPENRVQAVPGTNTMPMPPLMAANLESEAAATTTHKRAVNVSDLVVDLGWTAPPVKLVDLNEQLGGLGGELCYIYV

SEQ ID NO: 118 - DNA, 1173 bp, Myceliophthora thermophilia
atgaagctctcaacactaccagcagcactcctgtccttgattctcctggctcaccaggccgccgccgccccgctcggcaacgtcgacgctgaagcggccgcatcccagagaatcctcgagctgcaagctcagtaccagcgaaacgttctagacgccatcagcaaccgcacctcaggctgcacagcccaaaatatccagcgccgccaggaatggagcaccctctccctggctgaccgcgccgctttcatctcggcgatccactgcctcaacgcgctgccggcgcggacgccgcagtccaccgccccgggcgcccgggcgctctacgacgacttcatcgtcgcccacatcctacagactcccttcgtccacgcgtcgggcctcttcctgcccttccaccgccaccttctgcacctgttcgcaggcgcgctgcgcgaccgctgcgactacgccggcccgctgccctactgggactggacggcgagctacgccgacccgcgcgcggcggccgtcttcgacggcgggccgcactcgctcggcggcaacggcgccttcgtgcccggccgcaacggcaccgtcatctccgtccccggcggcgcgcacgtggtcatcccgcccgcgaccggcggcgggtgcgtcacgacggggccgttccgccagggccgcttcgaggtgcgcctcggccccgtcgcgttcgagccccgcggcccgcacggagggctgggctacaacccgcggtgcctccggcgggacctgagcccgcacttcagcctcggcacgcgccccggcgcggtcgtggccttgctggacggctgcgccggcgacctcggctgcctcgtgcgcgacatggacgcccccgggggcgtgcccgggggcgtgcacgcgtccgggcactggcaggtcgggccggacgcgctcgacgtcttcgccagcccgagcgaccccgtcttttggctgcaccacgcccaggtcgaccgcgtctggaccatctggcagggactggacctcgaggggaggacgtatcaggtctggggcacgagcacggcggcgaacgatccgccaagtgacgacgtaacgctcgagacggcaatggactttggcattcttggtgaggcaaagacggtcggtgaggttgcctcgacggtggacggagaatattgctacatgtatgagtga

SEQ ID NO: 119 - protein, 390 aa, Myceliophthora thermophilia
MKLSTLPAALLSLILLAHQAAAAPLGNVDAEAAASQRILELQAQYQRNVLDAISNRTSGCTAQNIQRRQEWSTLSLADRAAFISAIHCLNALPARTPQSTAPGARALYDDFIVAHILQTPFVHASGLFLPFHRHLLHLFAGALRDRCDYAGPLPYWDWTASYADPRAAAVFDGGPHSLGGNGAFVPGRNGTVISVPGGAHVVIPPATGGGCVTTGPFRQGRFEVRLGPVAFEPRGPHGGLGYNPRCLRRDLSPHFSLGTRPGAVVALLDGCAGDLGCLVRDMDAPGGVPGGVHASGHWQVGPDALDVFASPSDPVFWLHHAQVDRVWTIWQGLDLEGRTYQVWGTSTAANDPPSDDVTLETAMDFGILGEAKTVGEVASTVDGEYCYMYE

SEQ ID NO: 120 - protein, 368 aa, Myceliophthora thermophilia
APLGNVDAEAAASQRILELQAQYQRNVLDAISNRTSGCTAQNIQRRQEWSTLSLADRAAFISAIHCLNALPARTPQSTAPGARALYDDFIVAHILQTPFVHASGLFLPFHRHLLHLFAGALRDRCDYAGPLPYWDWTASYADPRAAAVFDGGPHSLGGNGAFVPGRNGTVISVPGGAHVVIPPATGGGCVTTGPFRQGRFEVRLGPVAFEPRGPHGGLGYNPRCLRRDLSPHFSLGTRPGAVVALLDGCAGDLGCLVRDMDAPGGVPGGVHASGHWQVGPDALDVFASPSDPVFWLHHAQVDRVWTIWQGLDLEGRTYQVWGTSTAANDPPSDDVTLETAMDFGILGEAKTVGEVASTVDGEYCYMYE

SEQ ID NO: 121 - DNA, 1218 bp, Myceliophthora thermophilia
atgaagctctcggcgtctctggccttggctgcggccatgggggcctcggccaccttcaacattcccgcctttgagcagtccgctatcgactccggcctggctcttgctggtctgaacggcatcgccctgctgcagtcagccaccaggtacggcgggtcgtgcaatcttgggaacgtcaagatccgccgagaatggtatgtcgatcacccgtcgaccctgatctcctgcattccgcaacagctccgtgttgacccggggattaggaggacgctgtccaaagcccagcggaagagttacatcaaggcggtgcagtgcgtccaagctaagcccagcagactggccgagggtattgccgctgggtccaagacgctcttcgatgactttgtttacgtacacatgaatgcgaccctcttcatccactacaccggcaacttcctcatctggcaccgcaacttcatccacgtgtacgagaaggagcttaacgcctgtggctacaaagatgccctcccctattgggaatggggcttcgatgtcgaggcgccacacctttcacctgtctttgacgggtctgatacatcgatgagtggcgatggcgagttcgtccctggccccccacttgagctcctggttcccggcaacgccgagcccgtggtactggcgaagggtactggtggcggctgtgtcaagacgggcccgtttgccaacatgacggtccggttgggcccaatcacgcagccggacccgaccgcggacaacccgcgctgcctgaagcgcgacctgaacgccgatgccggcaagcgcttctctagcttccgcaacacaacgaacctcattatcaactcgcccacgatcgagtatttccggaccaccatggagggccaccccaactatgtgcccaactcgctgggggtgcacggcggcggccacttcatgatcagcggcgacccgggcgcggatgccttcatctcgcccggcgaccccgcgttctaccttcatcatgcccaaatcgatcgcgtctactggatctggcagatgctggattttgagaaccgccagggcgtcttcggcaccaacactatgctcaactaccctcccagcgagaacaccaccgtcgaggacaccgtcgatgtgggccacctcggcggcccaatcaagatcaagaacctcatgagcactaccgggcaaaatggctctcctctttgctacatttatctttag

SEQ ID NO: 122 - protein, 405 aa, Myceliophthora thermophilia
MKLSASLALAAAMGASATFNIPAFEQSAIDSGLALAGLNGIALLQSATRYGGSCNLGNVKIRREWYVDHPSTLISCIPQQLRVDPGIRRTLSKAQRKSYIKAVQCVQAKPSRLAEGIAAGSKTLFDDFVYVHMNATLFIHYTGNFLIWHRNFIHVYEKELNACGYKDALPYWEWGFDVEAPHLSPVFDGSDTSMSGDGEFVPGPPLELLVPGNAEPVVLAKGTGGGCVKTGPFANMTVRLGPITQPDPTADNPRCLKRDLNADAGKRFSSFRNTTNLIINSPTIEYFRTTMEGHPNYVPNSLGVHGGGHFMISGDPGADAFISPGDPAFYLHHAQIDRVYWIWQMLDFENRQGVFGTNTMLNYPPSENTTVEDTVDVGHLGGPIKIKNLMSTTGQNGSPLCYIYL

SEQ ID NO: 123 - protein, 387 aa, Myceliophthora thermophilia
FNIPAFEQSAIDSGLALAGLNGIALLQSATRYGGSCNLGNVKIRREWYVDHPSTLISCIPQQLRVDPGIRRTLSKAQRKSYIKAVQCVQAKPSRLAEGIAAGSKTLFDDFVYVHMNATLFIHYTGNFLIWHRNFIHVYEKELNACGYKDALPYWEWGFDVEAPHLSPVFDGSDTSMSGDGEFVPGPPLELLVPGNAEPVVLAKGTGGGCVKTGPFANMTVRLGPITQPDPTADNPRCLKRDLNADAGKRFSSFRNTTNLIINSPTIEYFRTTMEGHPNYVPNSLGVHGGGHFMISGDPGADAFISPGDPAFYLHHAQIDRVYWIWQMLDFENRQGVFGTNTMLNYPPSENTTVEDTVDVGHLGGPIKIKNLMSTTGQNGSPLCYIYL

SEQ ID NO: 124 - DNA, 1179 bp, Myceliophthora thermophilia
atgaggctcaccaggtatgccccggtgctgtcggcagccgtgttggcagcagcggcctcagtcccggcagccgggaatctcgacattgtcaagaatctggctcatcgcatgggtgaagaggacatggacgcgttcccagtgttatcgtgggacgaggctgtggccatcatgacggggaatgacgagggcggcggcagcagcagcagcagcagcagcggtagcggtcgcggtcccgacaacaacagggtctcggtcaacaactacagcaacaagaccaagcccgcctacccccccgcctacgtcccccacgcgtcctcctgcgggaagcccaaggtccgggtcgagtggaagaagctgaaagagtcggaaaagtttgcgtacctgggggcggtcaagtgcctgatggacacgaagccggtcggcgtctggtccaaggcgacgagcatctgggacgagatggcatgggcgcacaacgaggccaaatggaacatccacgagaccgacaacttcctgccctggcaccgctactacatctacatgctcgagacgctcctcagcaagcactgctcctaccgggggcccatcccctggtggcgcgagaccgacgacaccggcaacttggccggggccaatctgttttcgcccaactacttcggctcgctacccccccggacggaagacggtaagaccacatgcattaccgacggctggtttgccaacaccacggtccttctcgggcccggcgctccgacttgcctcgcccggggcgaggataagagaatcgccgccgaggtgacgacggccgccctggacctgtgccaaggcgacagagacaccaagtacgagaggcaccgtcgctgcgttgaggccaccatccattcctccacgcaccgggccgtcggcggcgcaatggaaagcatcagcgcctccccgagcgaccccgtcttctacctccaccacggtttcgtcgactggcagtgggcgcgctggcagaacgtcgaatccagccgcaagaccacaatttccggctgctccgagccttccccggtccctggcaaatgtgtggagctcaccctagacacggtactgaagggatatggcttgatacccgacatgaaggtccgcgacgttctcgacatcgaaaacggaatcctgtgctacacctatgacgagttttga

SEQ ID NO: 125 - protein, 392 aa, Myceliophthora thermophilia
MRLTRYAPVLSAAVLAAAASVPAAGNLDIVKNLAHRMGEEDMDAFPVLSWDEAVAIMTGNDEGGGSSSSSSSGSGRGPDNNRVSVNNYSNKTKPAYPPAYVPHASSCGKPKVRVEWKKLKESEKFAYLGAVKCLMDTKPVGVWSKATSIWDEMAWAHNEAKWNIHETDNFLPWHRYYIYMLETLLSKHCSYRGPIPWWRETDDTGNLAGANLFSPNYFGSLPPRTEDGKTTCITDGWFANTTVLLGPGAPTCLARGEDKRIAAEVTTAALDLCQGDRDTKYERHRRCVEATIHSSTHRAVGGAMESISASPSDPVFYLHHGFVDWQWARWQNVESSRKTTISGCSEPSPVPGKCVELTLDTVLKGYGLIPDMKVRDVLDIENGILCYTYDEF

SEQ ID NO: 126 - protein, 374 aa, Myceliophthora thermophilia
ASVPAAGNLDIVKNLAHRMGEEDMDAFPVLSWDEAVAIMTGNDEGGGSSSSSSSGSGRGPDNNRVSVNNYSNKTKPAYPPAYVPHASSCGKPKVRVEWKKLKESEKFAYLGAVKCLMDTKPVGVWSKATSIWDEMAWAHNEAKWNIHETDNFLPWHRYYIYMLETLLSKHCSYRGPIPWWRETDDTGNLAGANLFSPNYFGSLPPRTEDGKTTCITDGWFANTTVLLGPGAPTCLARGEDKRIAAEVTTAALDLCQGDRDTKYERHRRCVEATIHSSTHRAVGGAMESISASPSDPVFYLHHGFVDWQWARWQNVESSRKTTISGCSEPSPVPGKCVELTLDTVLKGYGLIPDMKVRDVLDIENGILCYTYDEF

SEQ ID NO: 127 - DNA, 1041 bp, Myceliophthora thermophilia
atgtcttccttcacctccaagggtctcctttccgccctcatgggcgcggcaacggttgccgcccacggtcacgtcaccaacatcgtcatcaacggcgtctcataccagaacttcgacccattcacgcacccttatatgcagaaccctccgacggttgtcggctggaccgcgagcaacacggacaacggcttcgtcggccccgagtccttctctagcccggacatcatctgccacaagtccgccaccaacgctggcggccatgccgtcgtcgcggccggcgataaggtcttcatccagtgggacacctggcccgagtcgcaccacggtccggtcatcgactatctcgccgactgcggcgacgcgggctgcgagaaggtcgacaagaccacgctcaagttcttcaagatcagcgagtccggcctgctcgacggcactaacgcccccggcaagtgggcgtccgacacgctgatcgccaacaacaactcgtggctggtccagatcccgcccaacatcgccccgggcaactacgtcctgcgccacgagatcatcgccctgcacagcgccggccagcagaacggcgcccagaactaccctcagtgcttcaacctgcaggtcaccggctccggcactcagaagccctccggcgtcctcggcaccgagctctacaaggccaccgacgccggcatcctggccaacatctacacctcgcccgtcacctaccagatccccggcccggccatcatctcgggcgcctccgccgtccagcagaccacctcggccatcaccgcctctgctagcgccatcaccggctccgctaccgccgcgcccacggctgccaccaccaccgccgccgccgccgccaccactaccaccaccgctggctccggtgctaccgccacgccctcgaccggcggctctccttcttccgcccagcctgctcctaccaccgctgccgctacctccagccctgctcgcccgacccgctgcgctggtctgaagaagcgccgtcgccacgcccgtgacgtcaaggttgccctctaa

SEQ ID NO: 128 - protein, 346 aa, Myceliophthora thermophilia
MSSFTSKGLLSALMGAATVAAHGHVTNIVINGVSYQNFDPFTHPYMQNPPTVVGWTASNTDNGFVGPESFSSPDIICHKSATNAGGHAVVAAGDKVFIQWDTWPESHHGPVIDYLADCGDAGCEKVDKTTLKFFKISESGLLDGTNAPGKWASDTLIANNNSWLVQIPPNIAPGNYVLRHEIIALHSAGQQNGAQNYPQCFNLQVTGSGTQKPSGVLGTELYKATDAGILANIYTSPVTYQIPGPAIISGASAVQQTTSAITASASAITGSATAAPTAATTTAAAAATTTTTAGSGATATPSTGGSPSSAQPAPTTAAATSSPARPTRCAGLKKRRRHARDVKVAL

SEQ ID NO: 129 - protein, 326 aa, Myceliophthora thermophilia
AHGHVTNIVINGVSYQNFDPFTHPYMQNPPTVVGWTASNTDNGFVGPESFSSPDIICHKSATNAGGHAVVAAGDKVFIQWDTWPESHHGPVIDYLADCGDAGCEKVDKTTLKFFKISESGLLDGTNAPGKWASDTLIANNNSWLVQIPPNIAPGNYVLRHEIIALHSAGQQNGAQNYPQCFNLQVTGSGTQKPSGVLGTELYKATDAGILANIYTSPVTYQIPGPAIISGASAVQQTTSAITASASAITGSATAAPTAATTTAAAAATTTTTAGSGATATPSTGGSPSSAQPAPTTAAATSSPARPTRCAGLKKRRRHARDVKVAL

SEQ ID NO: 130 - DNA, 960 bp, Myceliophthora thermophilia
atgtccaacaccttcggcctccgccggcttctcagcctcgcgctgggcgcaagctgcatcgcggtcgcgtcatgtcgaaaccactgggtcgacatctgggcttcaatgccccaggaagtagaaccgtacaacctgcccaatcccccttataacggcaccgatggcgtgttccagaacacgacgatccgcacgaccgtctacgtgacccaagacgcgtcgacgatccggctccagctcagcaacgcctttggcggctccgacctgcccatcacggcggccaccatcgcgctgcctgccaacggcaccgccgggtcgccggcgatccgcccgggcaccctccagtacctcaccttctcgggctcgcgctccttcgccgtccccaacggcgccctggtcgtctcggacccgatccacttccccgtcaaggcgcagaccagcgtcaccgtgtccgtctacctggcctcgggccaggccggcttcgccatcaccggccacccgggcagccgcactaccagctggctgacccagggcgacctcgtctcggcggccgacgtgaccacgccgacgacgcagcgcatcgacaagtggttcctggccgccgtcggcgaccgcctaatcgccgcctacggccggatgatcacgcgcctgcaaggcgccggcatccccgtcttcggcgccaccatcacccccatgtgcgggcccggccagccctacagcgaccccgtgcgcgaggcccagcgccagcgcgtcaaccgctggatccgcaccagcggccgcttcgacgccgtcgtcgactttgaccgcgccgtgcgcgaccccaagaacgccaccatgctgcgcaccgagtacgacagcggcgactacctgcacctgaaccctgccggatacaaggccatggccgacgccgtcgacctcgacctgtttgtccgcttcgccggcggcgtgtactccatggtttaa

SEQ ID NO: 131 - protein, 319 aa, Myceliophthora thermophilia
MSNTFGLRRLLSLALGASCIAVASCRNHWVDIWASMPQEVEPYNLPNPPYNGTDGVFQNTTIRTTVYVTQDASTIRLQLSNAFGGSDLPITAATIALPANGTAGSPAIRPGTLQYLTFSGSRSFAVPNGALVVSDPIHFPVKAQTSVTVSVYLASGQAGFAITGHPGSRTTSWLTQGDLVSAADVTTPTTQRIDKWFLAAVGDRLIAAYGRMITRLQGAGIPVFGATITPMCGPGQPYSDPVREAQRQRVNRWIRTSGRFDAVVDFDRAVRDPKNATMLRTEYDSGDYLHLNPAGYKAMADAVDLDLFVRFAGGVYSMV

SEQ ID NO: 132 - protein, 294 aa, Myceliophthora thermophilia
RNHWVDIWASMPQEVEPYNLPNPPYNGTDGVFQNTTIRTTVYVTQDASTIRLQLSNAFGGSDLPITAATIALPANGTAGSPAIRPGTLQYLTFSGSRSFAVPNGALVVSDPIHFPVKAQTSVTVSVYLASGQAGFAITGHPGSRTTSWLTQGDLVSAADVTTPTTQRIDKWFLAAVGDRLIAAYGRMITRLQGAGIPVFGATITPMCGPGQPYSDPVREAQRQRVNRWIRTSGRFDAVVDFDRAVRDPKNATMLRTEYDSGDYLHLNPAGYKAMADAVDLDLFVRFAGGVYSMV

SEQ ID NO: 133 - DNA, 1053 bp, Myceliophthora thermophilia
atgatgctcacacgcttcgtggctggcctgctcggcatctccgccgcggatgccgccctcacctacagaggcgtggattggtcctcagtggtggttgaggaacgggccggcgtctcgtacaagaacaccaacgggaatgcccaaccgcttgagaacatcctggctgccaatggcgtcaacacggtgcggcagcgagtctgggttaaccccgcggacggcaactacaacctcgactacaacatcgcgatcgcgaagagggcgaaggctgccgggcttggcgtgtacatcgacttccactacagcgacacctgggccgatcctgctcatcagaccatgcccgctgggtggccgagcgacattgacaacctctcctggaagctctacaactacactctggacgccgccaacaagctccagaacgcgggtatccagcccaccatcgtgtccatcggtaacgagatccgggccggtctgctatggcccacagggagaaccgagaactgggccaacattgcccggttgttgcactccgctgcttggggtatcaaggactcgtcgctcagcccgaagccaaagatcatgatccacctcgacaacggatgggactggggtacccagaattggtggtacacgaatgtcttgaagcagggtacacttgagctgtccgactttgacatgatgggcgtctcgttctaccccttttactcgtcgtcggcaaccttgagcgccctgaaatcgagcttggacaacatggccaaaacctggaacaaggagattgccgtggtcgagaccaattggccaatctcttgtcccaacccaaggtacagtttcccctcggacgtcaagaacatccccttctcgccggaaggacagacgaccttcatcaccaacgtggccaacatcgtgtcctcggtaagccgcggcgtaggcctgttttattgggaacccgcttggattcacaatgcaaacctgggctcgtcgtgcgccgacaacaccatgttttcgcaatccgggcaggctttgtccagcttgtccgttttccagagaatctga

SEQ ID NO: 134 - protein, 350 aa, Myceliophthora thermophilia
MMLTRFVAGLLGISAADAALTYRGVDWSSVVVEERAGVSYKNTNGNAQPLENILAANGVNTVRQRVWVNPADGNYNLDYNIAIAKRAKAAGLGVYIDFHYSDTWADPAHQTMPAGWPSDIDNLSWKLYNYTLDAANKLQNAGIQPTIVSIGNEIRAGLLWPTGRTENWANIARLLHSAAWGIKDSSLSPKPKIMIHLDNGWDWGTQNWWYTNVLKQGTLELSDFDMMGVSFYPFYSSSATLSALKSSLDNMAKTWNKEIAVVETNWPISCPNPRYSFPSDVKNIPFSPEGQTTFITNVANIVSSVSRGVGLFYWEPAWIHNANLGSSCADNTMFSQSGQALSSLSVFQRI

SEQ ID NO: 135 - protein, 332 aa, Myceliophthora thermophilia
ALTYRGVDWSSVVVEERAGVSYKNTNGNAQPLENILAANGVNTVRQRVWVNPADGNYNLDYNIAIAKRAKAAGLGVYIDFHYSDTWADPAHQTMPAGWPSDIDNLSWKLYNYTLDAANKLQNAGIQPTIVSIGNEIRAGLLWPTGRTENWANIARLLHSAAWGIKDSSLSPKPKIMIHLDNGWDWGTQNWWYTNVLKQGTLELSDFDMMGVSFYPFYSSSATLSALKSSLDNMAKTWNKEIAVVETNWPISCPNPRYSFPSDVKNIPFSPEGQTTFITNVANIVSSVSRGVGLFYWEPAWIHNANLGSSCADNTMFSQSGQALSSLSVFQRI

SEQ ID NO: 136 - DNA, 699 bp, Myceliophthora thermophilia
atgcacctcctcgctcttggattcgtcaccggccttgctgccacagtggacgcacaggtggtcaaagttatgctgcttggcgactccataaccgagatcacctgctggaggccgctggtgtgggagcagatcgctgcggccgggctggcgggcgacgtcgatctggttgggaccatgagcgacctcgacggccgctgctcgcgcccctcgggcttcgacccggaccacgagggccactcgggctggcaggcctacgacattgcccggaacaacatcgccggctgggtccggagcgcccggccggacgtggtccagttcatgctcggcaccaacgacgtcaacatcggcaagcgcgacgtccagtccgtcctcgattcgtacaccatcatgctcgacgccatgcgtgacgcgaatcccaacgtcaaggtcattatcgacaagctgatcccgacaagctggagcgacgcgaccatcgaggccatcaacagcgccatccccggctgggcggcggcgcactcgacggcgcagtcgcccgtcgaggtggccgactgctcgcgcgccgccggcttcaccaacgacatgctgcaggccgacggcgtccaccccaacgagctgggcgaccgcttcatcgccgagcaggtcgggccgaagctgatccagttcatcagcgacgctcgtgctcgtgtccggaactattag

SEQ ID NO: 137 - protein, 232 aa, Myceliophthora thermophilia
MHLLALGFVTGLAATVDAQVVKVMLLGDSITEITCWRPLVWEQIAAAGLAGDVDLVGTMSDLDGRCSRPSGFDPDHEGHSGWQAYDIARNNIAGWVRSARPDVVQFMLGTNDVNIGKRDVQSVLDSYTIMLDAMRDANPNVKVIIDKLIPTSWSDATIEAINSAIPGWAAAHSTAQSPVEVADCSRAAGFTNDMLQADGVHPNELGDRFIAEQVGPKLIQFISDARARVRNY

SEQ ID NO: 138 - protein, 214 aa, Myceliophthora thermophilia
QVVKVMLLGDSITEITCWRPLVWEQIAAAGLAGDVDLVGTMSDLDGRCSRPSGFDPDHEGHSGWQAYDIARNNIAGWVRSARPDVVQFMLGTNDVNIGKRDVQSVLDSYTIMLDAMRDANPNVKVIIDKLIPTSWSDATIEAINSAIPGWAAAHSTAQSPVEVADCSRAAGFTNDMLQADGVHPNELGDRFIAEQVGPKLIQFISDARARVRNY

SEQ ID NO: 139 - DNA, 1317 bp, Myceliophthora thermophilia
atgatgtccctcgctcgctgggcagctgttgctgcttcgttgctcctgttatcccctagcaccctcgctgttcccacgcacggaaatggcaagacgacgcgggatgccgtctcgcctcgagcagacgacgactggcactgggtagccacatggacatccatgccgcagctggtcgaaccgaacaacatgcctccggcaccctttaccggcggcggtgccgtgttcagggacgccaccctgcgccagacggttcacctgtccatcggagccgagcgcctacgtctgcagatcggcaacaccttcggcggtagcgacctgcccattaccgcggccaccatcgccctgccccagggcggcaaggctggagtggcggccatcgatgcgtccactgtcaaaccgctgacattcaacaacggctcgtcctccatcaccatcccgcgaggcgaggtcgcctacacggacccgatcgactttaccgtctccccgcaggccaacatcgccgtctcgatctactcccaggcgggccagtcgggaagcagcatcacgggacacccgggcagccgcacgacgtcgtggatgcagtcgggcaaccacgtcgacgcagccagtctttccggctccaccacgaaacactggtacttcctctcggccgtggaagtctggtcgccaccgacgacgggcgcgtttgtgatcctgggcgatagcatcacggacgggcggggcagcaccgacgacggcaacgaccggtggccggacctgctcctggcgcgcatgcaggccgccgagggcggcggcaacctgagccaggtcgccgtcgacaaccaggcagcgggcggcaacgcggtgctgtccggggggctggggccgacgctgctctcgcggtaccggcgcgacgcgctgcaggtcgccggggtgcggtacgtcatgatcttcgagggagtcaacgacatcggcagcgggccggccgacgccgggtcgcaggccggcatcggcagccggctgcaggacgcgttcgcgcagatcacggccgactgcaaggccgccggcatcaagaccatcggggccaccatcacgccctttggcggcaatgggcagccgtactcgaaccccactagggagcagacgcgcgcccaggtaaacgagtggattctgaacagcgggacgttcgacgcgaccgtcgacttcgcctcgctggtggcgaacccggccatcgcgagccagctggcgccccagtatgacgggggcgatcatctgcatccgaacgtggcgggctacaaagcgatggcggacggatttcccttggacgtctttgaatga

SEQ ID NO: 140 - protein, 438 aa, Myceliophthora thermophilia
MMSLARWAAVAASLLLLSPSTLAVPTHGNGKTTRDAVSPRADDDWHWVATWTSMPQLVEPNNMPPAPFTGGGAVFRDATLRQTVHLSIGAERLRLQIGNTFGGSDLPITAATIALPQGGKAGVAAIDASTVKPLTFNNGSSSITIPRGEVAYTDPIDFTVSPQANIAVSIYSQAGQSGSSITGHPGSRTTSWMQSGNHVDAASLSGSTTKHWYFLSAVEVWSPPTTGAFVILGDSITDGRGSTDDGNDRWPDLLLARMQAAEGGGNLSQVAVDNQAAGGNAVLSGGLGPTLLSRYRRDALQVAGVRYVMIFEGVNDIGSGPADAGSQAGIGSRLQDAFAQITADCKAAGIKTIGATITPFGGNGQPYSNPTREQTRAQVNEWILNSGTFDATVDFASLVANPAIASQLAPQYDGGDHLHPNVAGYKAMADGFPLDVFE

SEQ ID NO: 141 - protein, 415 aa, Myceliophthora thermophilia
VPTHGNGKTTRDAVSPRADDDWHWVATWTSMPQLVEPNNMPPAPFTGGGAVFRDATLRQTVHLSIGAERLRLQIGNTFGGSDLPITAATIALPQGGKAGVAAIDASTVKPLTFNNGSSSITIPRGEVAYTDPIDFTVSPQANIAVSIYSQAGQSGSSITGHPGSRTTSWMQSGNHVDAASLSGSTTKHWYFLSAVEVWSPPTTGAFVILGDSITDGRGSTDDGNDRWPDLLLARMQAAEGGGNLSQVAVDNQAAGGNAVLSGGLGPTLLSRYRRDALQVAGVRYVMIFEGVNDIGSGPADAGSQAGIGSRLQDAFAQITADCKAAGIKTIGATITPFGGNGQPYSNPTREQTRAQVNEWILNSGTFDATVDFASLVANPAIASQLAPQYDGGDHLHPNVAGYKAMADGFPLDVFE

SEQ ID NO: 142 - DNA, 708 bp, Myceliophthora thermophilia
atgcatatcttgagcttcgtctcggccttcagcctggccagcctggccctggcaagcccagtggaggtggcggagcgtcaagcccaaaagctgcggatcatgcccctgggcgacagcatcaccgagatcacctgctggcgcgccttcgtgtgggaccagctggccgcggccgggctggccgaccaggtgcagtacgtcgggtcgcagaacagcaacccgcagggctgccagccccagaccgccaactgggaccagcaccacgagggccactctggctggctggctatcgacatcgccaacaactacctggccaactggctccggagcacgcctgccgacattgtcatgttcatgctgggcaccaacgatgtcgtgcgcgggcacactacggatgagatcatcaacgcctacaccaagatggtcgagatcatgcgagcggcgaacccaaacaccaagatcattgtcgacctcgtcatcccgctccccttctccaacggcccgatccaggccatcaactcgcgcatcccccagtgggccgccggcctcaactcgaccgagtcgcccatcgtcgtcgccgattgctaccagggcttcacctcttccatgctccgcgacggtgtgcaccccaatctcgaaggcgaccgcctcatcgcctcgcgcgtcggtccgctgctgctggattacgtcaagcagtcgctgggtcagtaa

SEQ ID NO: 143 - protein, 235 aa, Myceliophthora thermophilia
MHILSFVSAFSLASLALASPVEVAERQAQKLRIMPLGDSITEITCWRAFVWDQLAAAGLADQVQYVGSQNSNPQGCQPQTANWDQHHEGHSGWLAIDIANNYLANWLRSTPADIVMFMLGTNDVVRGHTTDEIINAYTKMVEIMRAANPNTKIIVDLVIPLPFSNGPIQAINSRIPQWAAGLNSTESPIVVADCYQGFTSSMLRDGVHPNLEGDRLIASRVGPLLLDYVKQSLGQ

SEQ ID NO: 144 - protein, 217 aa, Myceliophthora thermophilia
SPVEVAERQAQKLRIMPLGDSITEITCWRAFVWDQLAAAGLADQVQYVGSQNSNPQGCQPQTANWDQHHEGHSGWLAIDIANNYLANWLRSTPADIVMFMLGTNDVVRGHTTDEIINAYTKMVEIMRAANPNTKIIVDLVIPLPFSNGPIQAINSRIPQWAAGLNSTESPIVVADCYQGFTSSMLRDGVHPNLEGDRLIASRVGPLLLDYVKQSLGQ

SEQ ID NO: 145 - DNA, 1185 bp, Myceliophthora thermophilia
atgacaaacgtagcctccagtcttgttccaattctcgtgcttggtttgcccttgggtctatacacactgtttctgagcctgagcacgatcccgtattttcagcgaaacttcctctatgcgcacaagatccacacgttgtggtgggggaacatcaacgaaccagagcaatggggcttcgcaaagaaccaagtcacccccttttacctcaccaccgcggataaccagacgctctacgcatggcacatacttccccttcccctctacgtccagcacgaagacaaactctcctctcaaccaagcggtttctgccatgatataacggccaccgagaacttccgcctcctccgtgatgaccccacggccaagctcatcatctccttccatggtaacgccgcgcagctgacccagggccgccgcccgccccactaccataccctcacctctctccacagcccataccacctgctcaccctcgactaccgcggcttcggcctcagcagcggaacgcccacggagcgagggctcatcctcgacgccgccgccgctctcaggtgggccgtggacaccgcgggcgtgcccccctcgcggatcgtcctcgtcggccacagcctggggaccgccgtggcggcggcggccagcgagctgctcacgctgcacgagggctgggactttgccggggtcgtgcttgtggccggcttcagctcgctgccggagatgctgagcgggtacgcgatcgccgggtggctgccggtgctgcggccgctgacgtggtggccgtggctgtcgaacaagctgatggcgcgtgtggtggacacgtgggacagtgccgggagatggagggatgttgtcagggcggtaaaggaaaggcgtgggcggttgaggctgagcctggtacatgcgaaggacgactgggacattccgtctcatgagagtgacaagctgtttcgggcggccgtggagggcttggtcgggggcgggatgggagaggagcagtttgaggcagagaagaggaaaaggatggtgattaaggggaagaactcgtttactgcaacatggaaagagggggatattgtggtaaagcaggagttgttccctcacggaggacacaacggagtcctgactcatactcctgtactgatggccgtcatgagatcattcgggcttgatgaccaatccgcgccctga

SEQ ID NO: 146 - protein, 394 aa, Myceliophthora thermophilia
MTNVASSLVPILVLGLPLGLYTLFLSLSTIPYFQRNFLYAHKIHTLWWGNINEPEQWGFAKNQVTPFYLTTADNQTLYAWHILPLPLYVQHEDKLSSQPSGFCHDITATENFRLLRDDPTAKLIISFHGNAAQLTQGRRPPHYHTLTSLHSPYHLLTLDYRGFGLSSGTPTERGLILDAAAALRWAVDTAGVPPSRIVLVGHSLGTAVAAAASELLTLHEGWDFAGVVLVAGFSSLPEMLSGYAIAGWLPVLRPLTWWPWLSNKLMARVVDTWDSAGRWRDVVRAVKERRGRLRLSLVHAKDDWDIPSHESDKLFRAAVEGLVGGGMGEEQFEAEKRKRMVIKGKNSFTATWKEGDIVVKQELFPHGGHNGVLTHTPVLMAVMRSFGLDDQSAP

SEQ ID NO: 147 - protein, 372 aa, Myceliophthora thermophilia
LFLSLSTIPYFQRNFLYAHKIHTLWWGNINEPEQWGFAKNQVTPFYLTTADNQTLYAWHILPLPLYVQHEDKLSSQPSGFCHDITATENFRLLRDDPTAKLIISFHGNAAQLTQGRRPPHYHTLTSLHSPYHLLTLDYRGFGLSSGTPTERGLILDAAAALRWAVDTAGVPPSRIVLVGHSLGTAVAAAASELLTLHEGWDFAGVVLVAGFSSLPEMLSGYAIAGWLPVLRPLTWWPWLSNKLMARVVDTWDSAGRWRDVVRAVKERRGRLRLSLVHAKDDWDIPSHESDKLFRAAVEGLVGGGMGEEQFEAEKRKRMVIKGKNSFTATWKEGDIVVKQELFPHGGHNGVLTHTPVLMAVMRSFGLDDQSAP

SEQ ID NO: 148 - DNA, 1806 bp, Myceliophthora thermophilia
atgctttccgtcaggaggaggggcttcttcgccctgttccccgccgccgccatcctgctgctgttcctggtgacgtacttgcgggagggcgtagtgacggtgccaaagctaagcggccgcctcggagggctaccgagcggagacgaggagccgaccttttgggcaaggctccccgtccactacccgccctcccacatccgcccgctgcccaccggcaagcccgtccggtacccgcgggtacaagcagcgacgttccccgtcgagaaggacccggacgcgcgggcccggcggcgggagcgccgggcgatcgtccgggacgtcttccacaaggcctggctgtcgtaccgggagctcgcctggggcgccgacgagctggctcccctgtcgggcgggaccaagaacccgtttggcgggtggggcgccaccttggtcgacgcgctcgacacgctgtggatcatgaatctccggcccgagttcgacgaggcggtcgccagggcggcgaccatcaacttcaccagcaccgacctgcccgagctcaacgtgttcgagaccaacatccgctacctcggcggcttcctgtccgcctacgacctgagcggcgacggccgcctgctgcgcaaggccgtcgaggtcggcgacatgctctacaaggccttcgacacccccaaccgcatgcccatcgcccgctgggacctccacgcggccgcccggggtgccgagcaggtggccgggaaggccctcctcgccgaggtcgccaccctgtccatggagttcacccgcctgtccatgctgacgggcgaccccaagtggttcgacgccgtgcagcgcgtcgccgacgccatggccgcccagcaggactcgaccgccctcccgggcctctggccgctcgaggtcgacggcaagacggccgtcttcaactccggatccgtcttcgccctcggcgccatggccgactcggcgtacgagtacctgcccaagatggcggcgctcacgggcggccggctgcccgtctaccggcgcatgtacgagaaggcggtcgacgccgccgtgaagcacaacatcttccgccccctgacgcccgccgacgaggacatcctcatcgccggcaacgcgcacgccaaggagcacggcatcgagctcgagccccagggccagcatctcgcctgcttctggggcggcatgatggcgctggccgcccgcctcttcggccgcgacgaggacatggaacccgcgaggaagctcgtcgagggctgcatctggacctacagggccttcccccacggcgtcatggccgaggcattcacgatggcgccttgtcctgctggagcggtggcgggtgacgacgagtgccggtgggacgaagccgcctggaagcgcgaggtcctccgcagggccgggaaggaccccgacgccgcggggagcgacgcggaggccgacgccatcatcaagaaggaccggctacccgagggcttcacctcgatcagcgaccgggcctacgtcctgcggccggaagccatcgagagcatctttgtactctaccgcgtcacgggccgggaagacctcccggaggcggcgtgggacatgtttaccgccatcgacagggtgacgagcaccgagctggccaacgcggccgtccgcgacgtcaccaccccggagaccccggagcaaaaggactcgatggagtcgttctggctggccgagaccctcaagtacttctacctcatcttcagcgaccccgagctgatcagcctggacgagtacgtgttcaacacggaggcgcaccccttcctgcggccgctgaagtag

SEQ ID NO: 149 - protein, 601 aa, Myceliophthora thermophilia
MLSVRRRGFFALFPAAAILLLFLVTYLREGVVTVPKLSGRLGGLPSGDEEPTFWARLPVHYPPSHIRPLPTGKPVRYPRVQAATFPVEKDPDARARRRERRAIVRDVFHKAWLSYRELAWGADELAPLSGGTKNPFGGWGATLVDALDTLWIMNLRPEFDEAVARAATINFTSTDLPELNVFETNIRYLGGFLSAYDLSGDGRLLRKAVEVGDMLYKAFDTPNRMPIARWDLHAAARGAEQVAGKALLAEVATLSMEFTRLSMLTGDPKWFDAVQRVADAMAAQQDSTALPGLWPLEVDGKTAVFNSGSVFALGAMADSAYEYLPKMAALTGGRLPVYRRMYEKAVDAAVKHNIFRPLTPADEDILIAGNAHAKEHGIELEPQGQHLACFWGGMMALAARLFGRDEDMEPARKLVEGCIWTYRAFPHGVMAEAFTMAPCPAGAVAGDDECRWDEAAWKREVLRRAGKDPDAAGSDAEADAIIKKDRLPEGFTSISDRAYVLRPEAIESIFVLYRVTGREDLPEAAWDMFTAIDRVTSTELANAAVRDVTTPETPEQKDSMESFWLAETLKYFYLIFSDPELISLDEYVFNTEAHPFLRPLK

SEQ ID NO: 150 - protein, 568 aa, Myceliophthora thermophilia
VPKLSGRLGGLPSGDEEPTFWARLPVHYPPSHIRPLPTGKPVRYPRVQAATFPVEKDPDARARRRERRAIVRDVFHKAWLSYRELAWGADELAPLSGGTKNPFGGWGATLVDALDTLWIMNLRPEFDEAVARAATINFTSTDLPELNVFETNIRYLGGFLSAYDLSGDGRLLRKAVEVGDMLYKAFDTPNRMPIARWDLHAAARGAEQVAGKALLAEVATLSMEFTRLSMLTGDPKWFDAVQRVADAMAAQQDSTALPGLWPLEVDGKTAVFNSGSVFALGAMADSAYEYLPKMAALTGGRLPVYRRMYEKAVDAAVKHNIFRPLTPADEDILIAGNAHAKEHGIELEPQGQHLACFWGGMMALAARLFGRDEDMEPARKLVEGCIWTYRAFPHGVMAEAFTMAPCPAGAVAGDDECRWDEAAWKREVLRRAGKDPDAAGSDAEADAIIKKDRLPEGFTSISDRAYVLRPEAIESIFVLYRVTGREDLPEAAWDMFTAIDRVTSTELANAAVRDVTTPETPEQKDSMESFWLAETLKYFYLIFSDPELISLDEYVFNTEAHPFLRPLK

SEQ ID NO: 151 - DNA, 1821 bp, Myceliophthora thermophilia
atgccggcattcggaagacgaaaaacaatcgcattcgtctccatcacactctgcatcctcttcttgtactccttccgacgactcgattcctatgacccgcgtttgtctttcgatgacggggttcgcgacgcaactagcggcccaactcgtgccccaactcgcgccccagccctaaacacgaaatggaccaaactaaagacgaagtacccagtcaaggatctgcggccgcttcccaccgggcagccgtcggcgctacccaaggtgcaggccgaatttggcccagagtccgactcggaccgtgacctgcgcctcaagaggcgcgatgccgtcaaggcatcctttcagcgctgctggaagtcgtaccgcaagcttgcctggatgagcgatgagctcaagcccgtgagcggggggcggcacgacccctttggcggatggggcgccacgctcgtcgacagcctcgacaccctctggatcatgggtctgatggacgagtttgaggaagccgtcgccgcgtcgtcaaccatcaactttgacaaggtctcctcccaggacatcaacgtattcgagaccaacatccgctacctcggcggcttcctcgccgcgtatgacctcagcggggacgtgcgactcttgaccaaggccagagaggtgggcgagatgctctatgtcgctttcgacacccccaacaggatgcccctgacgcgctggaacgcgtgggcggctggctggggcagggcccaggtggccgacgaccacgtcctgctcgccgagatcggcaccttttcgctcgagttcattcgcctgtccatgctgacaggcgacccgaaatggtacgacgcagtgcagcgcatcatcgatctgctccacaagcagcagcaaaccaccggcctgccgggtatgtggccgatcgtggtgaacgcccgtagggcagagtttaaccagcatcacgactataccctcggctccatggccgattcactgtacgaatacctccctaaaacgcatgctctcgtcggcggcctgctccccgtctatcgcgagatgtacgaggcggcgatgcacaccgccatcaagcacaacctctaccggcccatgctgcccgacgagaaggacgttctcatgtccgggctggtgacagtcaagacagaggacggcaagacgacccggcgcctgcgccctgagggtcaacacctcgtctgttatgcgggcggcatgctcgccctcggcggccggctggtcgggaacaagactcacgtggaaaaaggcgaaaagctgatggatggttgtatctggacctaccagaacatgccgctgggaatcatgcccgagaccttccagatgctgccgtgcgagtctgccgacgactgcccgtgggacgaggacaagtggcgggaagctgtgctctccaggggcggcctggatcgcaagacggatcccgacgacgccgacgaggccatcctccgcaaaggaatacccaagggcttcgtcgccatcggcgacaagcgatacatgttgcggcccgaggccatcgagagcgtcttcatcttgtaccgcatcaccggccgcaaagatctgctcgagtcggcatggaaaatgtacgaggcgatcgaggaaaacaccaggacgccgctggccaactcggccatttgggatgtcaccgccgccgaggggacgcccgagctgagcgactcgatggagagtttctggttgggcgagacgctcaagtatttctacttgatgttcagcgagcccgaactgatcagcctggatgagtacgtcttcaatacggaggcgcacccgctaaagagactgctcccctga

SEQ ID NO: 152 - protein, 606 aa, Myceliophthora thermophilia
MPAFGRRKTIAFVSITLCILFLYSFRRLDSYDPRLSFDDGVRDATSGPTRAPTRAPALNTKWTKLKTKYPVKDLRPLPTGQPSALPKVQAEFGPESDSDRDLRLKRRDAVKASFQRCWKSYRKLAWMSDELKPVSGGRHDPFGGWGATLVDSLDTLWIMGLMDEFEEAVAASSTINFDKVSSQDINVFETNIRYLGGFLAAYDLSGDVRLLTKAREVGEMLYVAFDTPNRMPLTRWNAWAAGWGRAQVADDHVLLAEIGTFSLEFIRLSMLTGDPKWYDAVQRIIDLLHKQQQTTGLPGMWPIVVNARRAEFNQHHDYTLGSMADSLYEYLPKTHALVGGLLPVYREMYEAAMHTAIKHNLYRPMLPDEKDVLMSGLVTVKTEDGKTTRRLRPEGQHLVCYAGGMLALGGRLVGNKTHVEKGEKLMDGCIWTYQNMPLGIMPETFQMLPCESADDCPWDEDKWREAVLSRGGLDRKTDPDDADEAILRKGIPKGFVAIGDKRYMLRPEAIESVFILYRITGRKDLLESAWKMYEAIEENTRTPLANSAIWDVTAAEGTPELSDSMESFWLGETLKYFYLMFSEPELISLDEYVFNTEAHPLKRLLP

SEQ ID NO: 153 - protein, 576 aa, Myceliophthora thermophilia
YDPRLSFDDGVRDATSGPTRAPTRAPALNTKWTKLKTKYPVKDLRPLPTGQPSALPKVQAEFGPESDSDRDLRLKRRDAVKASFQRCWKSYRKLAWMSDELKPVSGGRHDPFGGWGATLVDSLDTLWIMGLMDEFEEAVAASSTINFDKVSSQDINVFETNIRYLGGFLAAYDLSGDVRLLTKAREVGEMLYVAFDTPNRMPLTRWNAWAAGWGRAQVADDHVLLAEIGTFSLEFIRLSMLTGDPKWYDAVQRIIDLLHKQQQTTGLPGMWPIVVNARRAEFNQHHDYTLGSMADSLYEYLPKTHALVGGLLPVYREMYEAAMHTAIKHNLYRPMLPDEKDVLMSGLVTVKTEDGKTTRRLRPEGQHLVCYAGGMLALGGRLVGNKTHVEKGEKLMDGCIWTYQNMPLGIMPETFQMLPCESADDCPWDEDKWREAVLSRGGLDRKTDPDDADEAILRKGIPKGFVAIGDKRYMLRPEAIESVFILYRITGRKDLLESAWKMYEAIEENTRTPLANSAIWDVTAAEGTPELSDSMESFWLGETLKYFYLMFSEPELISLDEYVFNTEAHPLKRLLP

SEQ ID NO: 154 - DNA, 2697 bp, Myceliophthora thermophilia
atgtttcgcccaagacggcaccgcgtggtgctcatctgcgccttcgtcatcactgtgctgctctaccacgtctccaagaactcgcaatgggaccagccgagggagacgtggcgcggcaagacgagtcccaacacccatccaagacccgagcctctgcctccaccgccgcccgcacccaacccgcaccaaggtcccccgcctcacgttcccccaccgcacgatcctccgccgcgcgcttcgccattgccggatccggagcccatccggatcccgcagctgaaggaggccgacgaggagcaaggcacttacggccttcctaccgagcctgccgccgtcgtgcccgagaggaagccgcccacccaccacgacgggtatcacgatgcgcaagccgaagacgtcggggtcctggacccggcaacccctacctccgccgtcgtacactggcagaagccttacgagtggtttcccgtgcccgaggagtcgctcattccgcttcccacgggaaatcccaagcccattccgtcggtgcaggtctcgtttgcccaagagtcgcccgcggccaaggagaagcgcgagcagcgcctggccaaggtcagggccgaagccctgcacgcctggaccggctacaagaagtacgcctggaaccacgacgagctcatgcccgtctccaacaggtccagggaccctttttgcggctgggccgctacccttgtcgactctctcgataccctctggatcatgggcctgaaggacgagtttgacgaagccgtggacgccgtgagggggattgacttcaccacgacgccctaccgcgaggaaatccccgtctttgagaccatcatccgctatctgggcggtcttcttggggcgtacgacgtaacgggcaacgacccccgataccgcgtgctcttggacaaggcggtcgaacttgccgagatcctgatgggagtcttcgacacgcccaaccgcttgcccatcctcttttacaactggaagccggactacgccgagagaccgaaacgggcttccaccagcgcgagcgtggccgagctcggctccatgagtatggagttcacccgcctagctcagcttaccggccaaaacaagtattacgacgcaatcgcccgcatcaccgacgcttttgaggacctccaaaaccgcgagaacggcacggccatcccgggcatcttccccgagcgcctggacgcttctggctgcaataggaccgctccgccgccgtcatcctcctcagcgacgccggccggtggcgccgcaaccgtgcagcacggcaccgatgacctgaagcgtgcacttgcgggccaccacgaagctcagagtccggagggctccgccctgggcacgggcatcggcagcatcaccacggagttttatggtgggccccaaaagcgaacagatggtccccgtggcggagatcaaacctcgctcaacgcgaaggaactgcccccaaactgggactgcgccgctcagcccctgacgggaaccagctggggaacgggctcgtacagcatgggcggcagccaagactccacgtatgagtattttccgaagcaatatctcatgctgggtggcctcgaacccaagtaccgcaccatgcacgagaagacggtcgatgccgtcaaggagtatctgctcttccgtcccatggccgagggcgacccagacatcctcttctccgccaaggcctactcctccgacggcaccgcggacaagctgacgtacgagtgggaggtcacgcacctcacctgcttcctcggtggcatgtttggcctgggtggcaagatctttgaccgccccgaagatgtcgagattgccaagaagctcgccgacggctgcgtgtgggcgtacgaggtgatgcccgctggtgtcatgcccgagtatgcgcgcgtcctgccctgcaagagcagggacgactgtcactacgatcaagcggcgtggtacacggctctggatcccagggcggagcaacgcgaagccgagatggaggaatactacacccagctggccgagtggaaggagcaagtggagaaactcaagaaggaggacgctctgcggaagcaggccgaggagccggcacgtgaggtcgagtcgcagagtaagcctgctgcggagacggcacaatatggtgattcgggggatttccctgccgaaccaacggagaacgacaagaacaaatctcctgacggtttcaatttccgttccgacaaccaaggcatttccaacaaccagcaacccatgagaagcgacaagcttgttttccctcctgcacccatgaagccagtcacccataaagaatacgttgcgcagcggatcgagaacgagcgcatccctccgggcttcgtcaccctcaccgacaagcggtacctcctcaggcccgaggcaatcgagtccgtctggtacatgtaccgcatcacgggtgacccgtcctggcaggaaaaggggtggcgcatgttcgaggccgttatcggcgcgacccggacagaggccggccacagcgccatccgcgatgtgaccactaaggaccccggcaacgccaaagacatggaggacaacatggagagcttctggctcgccgagacgctcaagtacttttacctgctctttgagacccccgacgtaatctcgttggacaactgggtcttgaataccgaggcgcatcccttcaaacgcccaacttag

SEQ ID NO: 155 - protein, 898 aa, Myceliophthora thermophilia
MFRPRRHRVVLICAFVITVLLYHVSKNSQWDQPRETWRGKTSPNTHPRPEPLPPPPPAPNPHQGPPPHVPPPHDPPPRASPLPDPEPIRIPQLKEADEEQGTYGLPTEPAAVVPERKPPTHHDGYHDAQAEDVGVLDPATPTSAVVHWQKPYEWFPVPEESLIPLPTGNPKPIPSVQVSFAQESPAAKEKREQRLAKVRAEALHAWTGYKKYAWNHDELMPVSNRSRDPFCGWAATLVDSLDTLWIMGLKDEFDEAVDAVRGIDFTTTPYREEIPVFETIIRYLGGLLGAYDVTGNDPRYRVLLDKAVELAEILMGVFDTPNRLPILFYNWKPDYAERPKRASTSASVAELGSMSMEFTRLAQLTGQNKYYDAIARITDAFEDLQNRENGTAIPGIFPERLDASGCNRTAPPPSSSSATPAGGAATVQHGTDDLKRALAGHHEAQSPEGSALGTGIGSITTEFYGGPQKRTDGPRGGDQTSLNAKELPPNWDCAAQPLTGTSWGTGSYSMGGSQDSTYEYFPKQYLMLGGLEPKYRTMHEKTVDAVKEYLLFRPMAEGDPDILFSAKAYSSDGTADKLTYEWEVTHLTCFLGGMFGLGGKIFDRPEDVEIAKKLADGCVWAYEVMPAGVMPEYARVLPCKSRDDCHYDQAAWYTALDPRAEQREAEMEEYYTQLAEWKEQVEKLKKEDALRKQAEEPAREVESQSKPAAETAQYGDSGDFPAEPTENDKNKSPDGFNFRSDNQGISNNQQPMRSDKLVFPPAPMKPVTHKEYVAQRIENERIPPGFVTLTDKRYLLRPEAIESVWYMYRITGDPSWQEKGWRMFEAVIGATRTEAGHSAIRDVTTKDPGNAKDMEDNMESFWLAETLKYFYLLFETPDVISLDNWVLNTEAHPFKRPT

SEQ ID NO: 156 - protein, 877 aa, Myceliophthora thermophilia
YHVSKNSQWDQPRETWRGKTSPNTHPRPEPLPPPPPAPNPHQGPPPHVPPPHDPPPRASPLPDPEPIRIPQLKEADEEQGTYGLPTEPAAVVPERKPPTHHDGYHDAQAEDVGVLDPATPTSAVVHWQKPYEWFPVPEESLIPLPTGNPKPIPSVQVSFAQESPAAKEKREQRLAKVRAEALHAWTGYKKYAWNHDELMPVSNRSRDPFCGWAATLVDSLDTLWIMGLKDEFDEAVDAVRGIDFTTTPYREEIPVFETIIRYLGGLLGAYDVTGNDPRYRVLLDKAVELAEILMGVFDTPNRLPILFYNWKPDYAERPKRASTSASVAELGSMSMEFTRLAQLTGQNKYYDAIARITDAFEDLQNRENGTAIPGIFPERLDASGCNRTAPPPSSSSATPAGGAATVQHGTDDLKRALAGHHEAQSPEGSALGTGIGSITTEFYGGPQKRTDGPRGGDQTSLNAKELPPNWDCAAQPLTGTSWGTGSYSMGGSQDSTYEYFPKQYLMLGGLEPKYRTMHEKTVDAVKEYLLFRPMAEGDPDILFSAKAYSSDGTADKLTYEWEVTHLTCFLGGMFGLGGKIFDRPEDVEIAKKLADGCVWAYEVMPAGVMPEYARVLPCKSRDDCHYDQAAWYTALDPRAEQREAEMEEYYTQLAEWKEQVEKLKKEDALRKQAEEPAREVESQSKPAAETAQYGDSGDFPAEPTENDKNKSPDGFNFRSDNQGISNNQQPMRSDKLVFPPAPMKPVTHKEYVAQRIENERIPPGFVTLTDKRYLLRPEAIESVWYMYRITGDPSWQEKGWRMFEAVIGATRTEAGHSAIRDVTTKDPGNAKDMEDNMESFWLAETLKYFYLLFETPDVISLDNWVLNTEAHPFKRPT

SEQ ID NO: 157 - DNA, 678 bp, Myceliophthora thermophilia
atgagatacttcctccagctcgctgcggccgcggcctttgccgtgaacagcgcggcgggtcactacatcttccagcagttcgcgacgggcgggtccaagtacccgccctggaagtacatccggcgcaacaccaacccggactggctgcagaacgggccggtgacggacctgtcgtcgaccgacctgcgctgcaacgtgggcgggcaggtcagcaacgggaccgagaccatcaccttgaacgccggcgacgagttcagcttcatcctcgacacgcccgtctaccatgccggccccacctcgctctacatgtccaaggcgcccggagctgtggccgactacgacggcggcggggcctggttcaagatctacgactggggtccgtcggggacgagctggacgttgagtggcacgtacactcagagaattcccaagtgcatccctgacggcgagtacctcctccgcatccagcagatcgggctccacaaccccggcgccgcgccacagttctacatcagctgcgctcaagtcaaggtcgtcgatggcggcagcaccaatccgaccccgaccgcccagattccgggagccttccacagcaacgaccctggcttgactgtcaatatctacaacgaccctctcaccaactacgtcgtcccgggacctagagtttcgcactggtag

SEQ ID NO: 158 - protein, 225 aa, Myceliophthora thermophilia
MRYFLQLAAAAAFAVNSAAGHYIFQQFATGGSKYPPWKYIRRNTNPDWLQNGPVTDLSSTDLRCNVGGQVSNGTETITLNAGDEFSFILDTPVYHAGPTSLYMSKAPGAVADYDGGGAWFKIYDWGPSGTSWTLSGTYTQRIPKCIPDGEYLLRIQQIGLHNPGAAPQFYISCAQVKVVDGGSTNPTPTAQIPGAFHSNDPGLTVNIYNDPLTNYVVPGPRVSHW

SEQ ID NO: 159 - protein, 205 aa, Myceliophthora thermophilia
HYIFQQFATGGSKYPPWKYIRRNTNPDWLQNGPVTDLSSTDLRCNVGGQVSNGTETITLNAGDEFSFILDTPVYHAGPTSLYMSKAPGAVADYDGGGAWFKIYDWGPSGTSWTLSGTYTQRIPKCIPDGEYLLRIQQIGLHNPGAAPQFYISCAQVKVVDGGSTNPTPTAQIPGAFHSNDPGLTVNIYNDPLTNYVVPGPRVSHW

SEQ ID NO: 160 - DNA, 1335 bp, Myceliophthora thermophilia
atgcacccctcccttcttttcacgcttgggctggcgagcgtgcttgtccccctctcgtctgcacacactaccttcacgaccctcttcgtcaacgatgtcaaccaaggtgatggtacctgcattcgcatggcgaagaagggcaatgtcgccacccatcctctcgcaggcggtctcgactccgaagacatggcctgtggtcgggatggtcaagaacccgtggcatttacgtgtccggccccagctggtgccaagttgactctcgagtttcgcatgtgggccgatgcttcgcagtccggatcgatcgatccatcccaccttggcgtcatggccatctacctcaagaaggtttccgacatgaaatctgacgcggccgctggcccgggctggttcaagatttgggaccaaggctacgacttggcggccaagaagtgggccaccgagaagctcatcgacaacaacggcctcctgagcgtcaaccttccaaccggcttaccaaccggctactacctcgcccgccaggagatcatcacgctccaaaacgttaccaatgacaggccagagccccagttctacgtcggctgcgcacagctctacgtcgagggcacctcggactcacccatcccctcggacaagacggtctccattcccggccacatcagcgacccggccgacccgggcctgaccttcaacgtctacacgggcgacgcatccacctacaagccgcccggccccgaggtttacttccccaccaccaccaccaccacctcctcctcctcctccggaagcagcgacaacaagggagccaggcgccagcaaacccccgacgacaagcaggccgacggcctcgttccagccgactgcctcgtcaagaacgcgaactggtgcgccgctgccctgccgccgtacaccgacgaggccggctgctgggccgccgccgaggactgcaacaagcagctggacgcgtgctacaccagcgcacccccctcgggcagcaaggggtgcaaggtctgggaggagcaggtgtgcaccgtcgtctcgcagaagtgcgaggccggggatttcaaggggcccccgcagctcgggaaggagctcggcgaggggatcgatgagcctattccggggggaaagctgcccccggcggtcaacgcgggagagaacgggaatcatggcggaggtggtggtgatgatggtgatgatgataatgatgaggccggggctggggcagcgtcgactccgacttttgctgctcctggtgcggccaagactccccaaccaaactccgagagggcccggcgccgtgaggcgcattggcggcgactggaatctgctgagtag

SEQ ID NO: 161 - protein, 444 aa, Myceliophthora thermophilia
MHPSLLFTLGLASVLVPLSSAHTTFTTLFVNDVNQGDGTCIRMAKKGNVATHPLAGGLDSEDMACGRDGQEPVAFTCPAPAGAKLTLEFRMWADASQSGSIDPSHLGVMAIYLKKVSDMKSDAAAGPGWFKIWDQGYDLAAKKWATEKLIDNNGLLSVNLPTGLPTGYYLARQEIITLQNVTNDRPEPQFYVGCAQLYVEGTSDSPIPSDKTVSIPGHISDPADPGLTFNVYTGDASTYKPPGPEVYFPTTTTTTSSSSSGSSDNKGARRQQTPDDKQADGLVPADCLVKNANWCAAALPPYTDEAGCWAAAEDCNKQLDACYTSAPPSGSKGCKVWEEQVCTVVSQKCEAGDFKGPPQLGKELGEGIDEPIPGGKLPPAVNAGENGNHGGGGGDDGDDDNDEAGAGAASTPTFAAPGAAKTPQPNSERARRREAHWRRLESAE

SEQ ID NO: 162 - protein, 423 aa, Myceliophthora thermophilia
HTTFTTLFVNDVNQGDGTCIRMAKKGNVATHPLAGGLDSEDMACGRDGQEPVAFTCPAPAGAKLTLEFRMWADASQSGSIDPSHLGVMAIYLKKVSDMKSDAAAGPGWFKIWDQGYDLAAKKWATEKLIDNNGLLSVNLPTGLPTGYYLARQEIITLQNVTNDRPEPQFYVGCAQLYVEGTSDSPIPSDKTVSIPGHISDPADPGLTFNVYTGDASTYKPPGPEVYFPTTTTTTSSSSSGSSDNKGARRQQTPDDKQADGLVPADCLVKNANWCAAALPPYTDEAGCWAAAEDCNKQLDACYTSAPPSGSKGCKVWEEQVCTVVSQKCEAGDFKGPPQLGKELGEGIDEPIPGGKLPPAVNAGENGNHGGGGGDDGDDDNDEAGAGAASTPTFAAPGAAKTPQPNSERARRREAHWRRLESAE

SEQ ID NO: 163 - DNA, 714 bp, Myceliophthora thermophilia
atgaaggttctcgcgcccctgattctggccggtgccgccagcgcccacaccatcttctcatccctcgaggtgggcggcgtcaaccagggcatcgggcagggtgtccgcgtgccgtcgtacaacggtccgatcgaggacgtgacgtccaactcgatcgcctgcaacgggccccccaacccgacgacgccgaccaacaaggtcatcacggtccgggccggcgagacggtgacggccgtctggcggtacatgctgagcaccaccggctcggcccccaacgacatcatggacagcagccacaagggcccgaccatggcctacctcaagaaggtcgacaacgccaccaccgactcgggcgtcggcggcggctggttcaagatccaggaggacggccttaccaacggcgtctggggcaccgagcgcgtcatcaacggccagggccgccacaacatcaagatccccgagtgcatcgcccccggccagtacctcctccgcgccgagatgcttgccctgcacggagcttccaactaccccggcgctcagttctacatggagtgcgcccagctcaatatcgtcggcggcaccggcagcaagacgccgtccaccgtcagcttcccgggcgcttacaagggtaccgaccccggagtcaagatcaacatctactggccccccgtcaccagctaccagattcccggccccggcgtgttcacctgctaa

SEQ ID NO: 164 - protein, 237 aa, Myceliophthora thermophilia
MKVLAPLILAGAASAHTIFSSLEVGGVNQGIGQGVRVPSYNGPIEDVTSNSIACNGPPNPTTPTNKVITVRAGETVTAVWRYMLSTTGSAPNDIMDSSHKGPTMAYLKKVDNATTDSGVGGGWFKIQEDGLTNGVWGTERVINGQGRHNIKIPECIAPGQYLLRAEMLALHGASNYPGAQFYMECAQLNIVGGTGSKTPSTVSFPGAYKGTDPGVKINIYWPPVTSYQIPGPGVFTC

SEQ ID NO: 165 - protein, 222 aa, Myceliophthora thermophilia
HTIFSSLEVGGVNQGIGQGVRVPSYNGPIEDVTSNSIACNGPPNPTTPTNKVITVRAGETVTAVWRYMLSTTGSAPNDIMDSSHKGPTMAYLKKVDNATTDSGVGGGWFKIQEDGLTNGVWGTERVINGQGRHNIKIPECIAPGQYLLRAEMLALHGASNYPGAQFYMECAQLNIVGGTGSKTPSTVSFPGAYKGTDPGVKINIYWPPVTSYQIPGPGVFTC

SEQ ID NO: 166 - DNA, 738 bp, Myceliophthora thermophilia
atgctcctcctcaccctagccacactcgtcaccctcctggcgcgccacgtctcggctcacgcccggctgttccgcgtctctgtcgacgggaaagaccagggcgacgggctgaacaagtacatccgctcgccggcgaccaacgaccccgtgcgcgacctctcgagcgccgccatcgtgtgcaacacccaggggtccaaggccgccccggacttcgtcagggccgcggccggcgacaagctgaccttcctctgggcgcacgacaacccggacgacccggtcgactacgtcctcgacccgtcccacaagggcgccatcctgacctacgtcgccgcctacccctccggggacccgaccggccccatctggagcaagcttgccgaggaaggattcaccggcgggcagtgggcgaccatcaagatgatcgacaacggcggcaaggtcgacgtgacgctgcccgaggcccttgcgccgggaaagtacctgatccgccaggagctgctggccctgcaccgggccgactttgcctgcgacgacccggcccaccccaaccgcggcgccgagtcgtaccccaactgcgtccaggtggaggtgtcgggcagcggcgacaagaagccggaccagaactttgacttcaacaagggctatacctgcgataacaaaggactccactttaagatctacatcggtcaggacagccagtatgtggccccggggccgcggccttggaatgggagctga

SEQ ID NO: 167 - protein, 245 aa, Myceliophthora thermophilia
MLLLTLATLVTLLARHVSAHARLFRVSVDGKDQGDGLNKYIRSPATNDPVRDLSSAAIVCNTQGSKAAPDFVRAAAGDKLTFLWAHDNPDDPVDYVLDPSHKGAILTYVAAYPSGDPTGPIWSKLAEEGFTGGQWATIKMIDNGGKVDVTLPEALAPGKYLIRQELLALHRADFACDDPAHPNRGAESYPNCVQVEVSGSGDKKPDQNFDFNKGYTCDNKGLHFKIYIGQDSQYVAPGPRPWNGS

SEQ ID NO: 168 - protein, 226 aa, Myceliophthora thermophilia
HARLFRVSVDGKDQGDGLNKYIRSPATNDPVRDLSSAAIVCNTQGSKAAPDFVRAAAGDKLTFLWAHDNPDDPVDYVLDPSHKGAILTYVAAYPSGDPTGPIWSKLAEEGFTGGQWATIKMIDNGGKVDVTLPEALAPGKYLIRQELLALHRADFACDDPAHPNRGAESYPNCVQVEVSGSGDKKPDQNFDFNKGYTCDNKGLHFKIYIGQDSQYVAPGPRPWNGS

SEQ ID NO: 169 - DNA, 852 bp, Myceliophthora thermophilia
atgaagccctttagcctcgtcgccctggcgactgccgtgagcggccatgccatcttccagcgggtgtcggtcaacgggcaggaccagggccagctcaagggggtgcgggcgccgtcgagcaactccccgatccagaacgtcaacgatgccaacatggcctgcaacgccaacattgtgtaccacgacaacaccatcatcaaggtgcccgcgggagcccgcgtcggcgcgtggtggcagcacgtcatcggcgggccgcagggcgccaacgacccggacaacccgatcgccgcctcccacaagggccccatccaggtctacctggccaaggtggacaacgcggcgacggcgtcgccgtcgggcctcaagtggttcaaggtggccgagcgcggcctgaacaacggcgtgtgggcctacctgatgcgcgtcgagctgctcgccctgcacagcgcctcgagccccggcggcgcccagttctacatgggctgtgcacagatcgaagtcactggctccggcaccaactcgggctccgactttgtctcgttccccggcgcctactcggccaacgacccgggcatcttgctgagcatctacgacagctcgggcaagcccaacaatggcgggcgctcgtacccgatccccggcccgcgccccatctcctgctccggcagcggcggcggcggcaacaacggcggcgacggcggcgacgacaacaacggtggtggcaacaacaacggcggcggcagcgtccccctgtacgggcagtgcggcggcatcggctacacgggcccgaccacctgtgcccagggaacttgcaaggtgtcgaacgaatactacagccagtgcctcccctag

SEQ ID NO: 170 - protein, 283 aa, Myceliophthora thermophilia
MKPFSLVALATAVSGHAIFQRVSVNGQDQGQLKGVRAPSSNSPIQNVNDANMACNANIVYHDNTIIKVPAGARVGAWWQHVIGGPQGANDPDNPIAASHKGPIQVYLAKVDNAATASPSGLKWFKVAERGLNNGVWAYLMRVELLALHSASSPGGAQFYMGCAQIEVTGSGTNSGSDFVSFPGAYSANDPGILLSIYDSSGKPNNGGRSYPIPGPRPISCSGSGGGGNNGGDGGDDNNGGGNNNGGGSVPLYGQCGGIGYTGPTTCAQGTCKVSNEYYSQCLP

SEQ ID NO: 171 - protein, 268 aa, Myceliophthora thermophilia
HAIFQRVSVNGQDQGQLKGVRAPSSNSPIQNVNDANMACNANIVYHDNTIIKVPAGARVGAWWQHVIGGPQGANDPDNPIAASHKGPIQVYLAKVDNAATASPSGLKWFKVAERGLNNGVWAYLMRVELLALHSASSPGGAQFYMGCAQIEVTGSGTNSGSDFVSFPGAYSANDPGILLSIYDSSGKPNNGGRSYPIPGPRPISCSGSGGGGNNGGDGGDDNNGGGNNNGGGSVPLYGQCGGIGYTGPTTCAQGTCKVSNEYYSQCLP

SEQ ID NO: 172 - DNA, 741 bp, Myceliophthora thermophilia
atgaagctctccctcttttccgtcctggccactgccctcaccgtcgaggggcatgccatcttccagaaggtctccgtcaacggagcggaccagggctccctcaccggcctccgcgctcccaacaacaacaaccccgtgcagaatgtcaacagccaggacatgatctgcggccagtcgggatcgacgtcgaacactatcatcgaggtcaaggccggcgataggatcggtgcctggtatcagcatgtcatcggcggtgcccagttccccaacgacccagacaacccgattgccaagtcgcacaagggccccgtcatggcctacctcgccaaggttgacaatgccgcaaccgccagcaagacgggcctgaagtggttcaagatttgggaggatacctttaatcccagcaccaagacctggggtgtcgacaacctcatcaacaacaacggctgggtgtacttcaacctcccgcagtgcatcgccgacggcaactacctcctccgcgtcgaggtcctcgctctgcactcggcctactcccagggccaggctcagttctaccagtcctgcgcccagatcaacgtatccggcggcggctccttcacgccggcgtcgactgtcagcttcccgggtgcctacagcgccagcgaccccggtatcctgatcaacatctacggcgccaccggccagcccgacaacaacggccagccgtacactgcccctgggcccgcgcccatctcctgctga

SEQ ID NO: 173 - protein, 246 aa, Myceliophthora thermophilia
MKLSLFSVLATALTVEGHAIFQKVSVNGADQGSLTGLRAPNNNNPVQNVNSQDMICGQSGSTSNTIIEVKAGDRIGAWYQHVIGGAQFPNDPDNPIAKSHKGPVMAYLAKVDNAATASKTGLKWFKIWEDTFNPSTKTWGVDNLINNNGWVYFNLPQCIADGNYLLRVEVLALHSAYSQGQAQFYQSCAQINVSGGGSFTPASTVSFPGAYSASDPGILINIYGATGQPDNNGQPYTAPGPAPISC

SEQ ID NO: 174 - protein, 227 aa, Myceliophthora thermophilia
IFQKVSVNGADQGSLTGLRAPNNNNPVQNVNSQDMICGQSGSTSNTIIEVKAGDRIGAWYQHVIGGAQFPNDPDNPIAKSHKGPVMAYLAKVDNAATASKTGLKWFKIWEDTFNPSTKTWGVDNLINNNGWVYFNLPQCIADGNYLLRVEVLALHSAYSQGQAQFYQSCAQINVSGGGSFTPASTVSFPGAYSASDPGILINIYGATGQPDNNGQPYTAPGPAPISC

SEQ ID NO: 175 - DNA, 972 bp, Myceliophthora thermophilia
atgaagtccttcaccctcaccactctggccgccctggctggcaacgccgccgctcacgcgaccttccaggccctctgggtcgacggcgtcgactacggcgcgcagtgtgcccgtctgcccgcgtccaactcgccggtcaccgacgtgacctccaacgcgatccgctgcaacgccaacccctcgcccgctcggggcaagtgcccggtcaaggccggctcgaccgttacggtcgagatgcatcagcaacccggtgaccgctcgtgcagcagcgaggcgatcggcggggcgcactacggccccgtgatggtgtacatgtccaaggtgtcggacgcggcgtcggcggacgggtcgtcgggctggttcaaggtgttcgaggacggctgggccaagaacccgtccggcgggtcgggcgacgacgactactggggcaccaaggacctgaactcgtgctgcgggaagatgaacgtcaagatccccgccgacctgccctcgggcgactacctgctccgggccgaggccctcgcgctgcacacggccggcagcgcgggcggcgcccagttctacatgacctgctaccagctcaccgtgaccggctccggcagcgccagcccgcccaccgtctccttcccgggcgcctacaaggccaccgacccgggcatcctcgtcaacatccacgccccgctgtccggctacaccgtgcccggcccggccgtctactcgggcggctccaccaagaaggccggcagcgcctgcaccggctgcgagtccacttgcgccgtcggctccggccccaccgccaccgtctcccagtcgcccggttccaccgccacctcggcccccggcggcggcggcggctgcaccgtccagaagtaccagcagtgcggcggccagggctacaccggctgcaccaactgcgcgtccggctccacctgcagcgcggtctcgccgccctactactcgcagtgcgtctaa

SEQ ID NO: 176 - protein, 323 aa, Myceliophthora thermophilia
MKSFTLTTLAALAGNAAAHATFQALWVDGVDYGAQCARLPASNSPVTDVTSNAIRCNANPSPARGKCPVKAGSTVTVEMHQQPGDRSCSSEAIGGAHYGPVMVYMSKVSDAASADGSSGWFKVFEDGWAKNPSGGSGDDDYWGTKDLNSCCGKMNVKIPADLPSGDYLLRAEALALHTAGSAGGAQFYMTCYQLTVTGSGSASPPTVSFPGAYKATDPGILVNIHAPLSGYTVPGPAVYSGGSTKKAGSACTGCESTCAVGSGPTATVSQSPGSTATSAPGGGGGCTVQKYQQCGGQGYTGCTNCASGSTCSAVSPPYYSQCV

SEQ ID NO: 177 - protein, 305 aa, Myceliophthora thermophilia
HATFQALWVDGVDYGAQCARLPASNSPVTDVTSNAIRCNANPSPARGKCPVKAGSTVTVEMHQQPGDRSCSSEAIGGAHYGPVMVYMSKVSDAASADGSSGWFKVFEDGWAKNPSGGSGDDDYWGTKDLNSCCGKMNVKIPADLPSGDYLLRAEALALHTAGSAGGAQFYMTCYQLTVTGSGSASPPTVSFPGAYKATDPGILVNIHAPLSGYTVPGPAVYSGGSTKKAGSACTGCESTCAVGSGPTATVSQSPGSTATSAPGGGGGCTVQKYQQCGGQGYTGCTNCASGSTCSAVSPPYYSQCV

SEQ ID NO: 178 - DNA, 765 bp, Myceliophthora thermophilia
atggccctccagctcttggcgagcttggccctcctctcagtgccggcccttgcccacggtggcttggccaactacaccgtcggtgatacttggtacagaggctacgacccaaacctgccgccggagacgcagctcaaccagacctggatgatccagcggcaatgggccaccatcgaccccgtcttcaccgtgtcggagccgtacctggcctgcaacaacccgggcgcgccgccgccctcgtacatccccatccgcgccggtgacaagatcacggccgtgtactggtactggctgcacgccatcgggcccatgagcgtctggctcgcgcggtgcggcgacacgcccgcggccgactgccgcgacgtcgacgtcaaccgggtcggctggttcaagatctgggagggcggcctgctggagggtcccaacctggccgaggggctctggtaccaaaaggacttccagcgctgggacggctccccgtccctctggcccgtcacgatccccaaggggctcaagagcgggacctacatcatccggcacgagatcctgtcgcttcacgtcgccctcaagccccagttttacccggagtgtgcgcatctgaatattactgggggcggagacttgctgccacccgaagagactctggtgcggtttccgggggtttacaaagaggacgatccctctatcttcatcgatgtctactcggaggagaacgcgaaccggacagattatacggttccgggagggccaatctgggaagggtga

SEQ ID NO: 179 - protein, 254 aa, Myceliophthora thermophilia
MALQLLASLALLSVPALAHGGLANYTVGDTWYRGYDPNLPPETQLNQTWMIQRQWATIDPVFTVSEPYLACNNPGAPPPSYIPIRAGDKITAVYWYWLHAIGPMSVWLARCGDTPAADCRDVDVNRVGWFKIWEGGLLEGPNLAEGLWYQKDFQRWDGSPSLWPVTIPKGLKSGTYIIRHEILSLHVALKPQFYPECAHLNITGGGDLLPPEETLVRFPGVYKEDDPSIFIDVYSEENANRTDYTVPGGPIWEG

SEQ ID NO: 180 - protein, 231 aa, Myceliophthora thermophilia
NYTVGDTWYRGYDPNLPPETQLNQTWMIQRQWATIDPVFTVSEPYLACNNPGAPPPSYIPIRAGDKITAVYWYWLHAIGPMSVWLARCGDTPAADCRDVDVNRVGWFKIWEGGLLEGPNLAEGLWYQKDFQRWDGSPSLWPVTIPKGLKSGTYIIRHEILSLHVALKPQFYPECAHLNITGGGDLLPPEETLVRFPGVYKEDDPSIFIDVYSEENANRTDYTVPGGPIWEG

SEQ ID NO: 181 - DNA, 684 bp, Myceliophthora thermophilia
atgaagctgagcgctgccatcgccgtgctcgcggccgcccttgccgaggggcactataccttccccagcatcgccaacacggccgactggcaatatgtgcgcatcacgaccaacttccagagcaacggccccgtgacggacgtcaactcggaccagatccggtgctacgagcgcaacccgggcaccggcgcccccggcatctacaacgtcacggccggcacaaccatcaactacaacgccaagtcgtccatctcccacccgggacccatggccttctacattgccaaggttcccgccggccagtcggccgccacctgggacggtaagggcgccgtctggtccaagatccaccaggagatgccgcactttggcaccagcctcacctgggactccaacggccgcacctccatgcccgtcaccatcccccgctgtctgcaggacggcgagtatctgctgcgtgcagagcacattgccctccacagcgccggcagccccggcggcgcccagttctacatttcttgtgcccagctctcagtcaccggcggcagcgggacctggaaccccaggaacaaggtgtcgttccccggcgcctacaaggccactgacccgggcatcctgatcaacatctactaccccgtcccgactagctacactcccgctggtccccccgtcgacacctgctaa

SEQ ID NO: 182 - protein, 227 aa, Myceliophthora thermophilia
MKLSAAIAVLAAALAEGHYTFPSIANTADWQYVRITTNFQSNGPVTDVNSDQIRCYERNPGTGAPGIYNVTAGTTINYNAKSSISHPGPMAFYIAKVPAGQSAATWDGKGAVWSKIHQEMPHFGTSLTWDSNGRTSMPVTIPRCLQDGEYLLRAEHIALHSAGSPGGAQFYISCAQLSVTGGSGTWNPRNKVSFPGAYKATDPGILINIYYPVPTSYTPAGPPVDTC

SEQ ID NO: 183 - protein, 210 aa, Myceliophthora thermophilia
HYTFPSIANTADWQYVRITTNFQSNGPVTDVNSDQIRCYERNPGTGAPGIYNVTAGTTINYNAKSSISHPGPMAFYIAKVPAGQSAATWDGKGAVWSKIHQEMPHFGTSLTWDSNGRTSMPVTIPRCLQDGEYLLRAEHIALHSAGSPGGAQFYISCAQLSVTGGSGTWNPRNKVSFPGAYKATDPGILINIYYPVPTSYTPAGPPVDTC

SEQ ID NO: 184 - DNA, 708 bp, Myceliophthora thermophilia
atgaaggccctctctctccttgcggctgccggggcagtctctgcgcataccatcttcgtccagctcgaagcagacggcacgaggtacccggtttcgtacgggatccgggacccaacctacgacggccccatcaccgacgtcacatccaacgacgttgcttgcaacggcggtccgaacccgacgaccccctccagcgacgtcatcaccgtcaccgcgggcaccaccgtcaaggccatctggaggcacaccctccaatccggcccggacgatgtcatggacgccagccacaagggcccgaccctggcctacatcaagaaggtcggcgatgccaccaaggactcgggcgtcggcggtggctggttcaagatccaggaggacggttacaacaacggccagtggggcaccagcaccgttatctccaacggcggcgagcactacattgacatcccggcctgcatccccgagggtcagtacctcctccgcgccgagatgatcgccctccacgcggccgggtcccccggcggcgctcagctctacatggaatgtgcccagatcaacatcgtcggcggctccggctcggtgcccagctcgacggtcagcttccccggcgcgtatagccccaacgacccgggtctcctcatcaacatctattccatgtcgccctcgagctcgtacaccatcccgggcccgcccgttttcaagtgctag

SEQ ID NO: 185 - protein, 235 aa, Myceliophthora thermophilia
MKALSLLAAAGAVSAHTIFVQLEADGTRYPVSYGIRDPTYDGPITDVTSNDVACNGGPNPTTPSSDVITVTAGTTVKAIWRHTLQSGPDDVMDASHKGPTLAYIKKVGDATKDSGVGGGWFKIQEDGYNNGQWGTSTVISNGGEHYIDIPACIPEGQYLLRAEMIALHAAGSPGGAQLYMECAQINIVGGSGSVPSSTVSFPGAYSPNDPGLLINIYSMSPSSSYTIPGPPVFKC

SEQ ID NO: 186 - protein, 220 aa, Myceliophthora thermophilia
HTIFVQLEADGTRYPVSYGIRDPTYDGPITDVTSNDVACNGGPNPTTPSSDVITVTAGTTVKAIWRHTLQSGPDDVMDASHKGPTLAYIKKVGDATKDSGVGGGWFKIQEDGYNNGQWGTSTVISNGGEHYIDIPACIPEGQYLLRAEMIALHAAGSPGGAQLYMECAQINIVGGSGSVPSSTVSFPGAYSPNDPGLLINIYSMSPSSSYTIPGPPVFKC

SEQ ID NO: 187 - DNA, 678 bp, Myceliophthora thermophilia
atgctgacaacaaccttcgccctcctgacggccgctctcggcgtcagcgcccattataccctccccagggtcgggaccggttccgactggcagcacgtgcggcgggctgacaactggcaaaacaacggcttcgtcggcgacgtcaactcggagcagatcaggtgcttccaggcgacccctgccggcgcccaagacgtctacactgttcaggcgggatcgaccgtgacctaccacgccaaccccagtatctaccaccccggccccatgcagttctacctggcccgcgttccggacggacaggacgtcaagtcgtggaccggcgagggtgccgtgtggttcaaggtgtacgaggagcagcctcaatttggcgcccagctgacctggcctagcaacggcaagagctcgttcgaggttcctatccccagctgcattcgggcgggcaactacctcctccgcgctgagcacatcgccctgcacgttgcccaaagccagggcggcgcccagttctacatctcgtgcgcccagctccaggtcactggtggcggcagcaccgagccttctcagaaggtttccttcccgggtgcctacaagtccaccgaccccggcattcttatcaacatcaactaccccgtccctacctcgtaccagaatccgggtccggctgtcttccgttgctaa

SEQ ID NO: 188 - protein, 225 aa, Myceliophthora thermophilia
MLTTTFALLTAALGVSAHYTLPRVGTGSDWQHVRRADNWQNNGFVGDVNSEQIRCFQATPAGAQDVYTVQAGSTVTYHANPSIYHPGPMQFYLARVPDGQDVKSWTGEGAVWFKVYEEQPQFGAQLTWPSNGKSSFEVPIPSCIRAGNYLLRAEHIALHVAQSQGGAQFYISCAQLQVTGGGSTEPSQKVSFPGAYKSTDPGILININYPVPTSYQNPGPAVFRC

SEQ ID NO: 189 - protein, 208 aa, Myceliophthora thermophilia
HYTLPRVGTGSDWQHVRRADNWQNNGFVGDVNSEQIRCFQATPAGAQDVYTVQAGSTVTYHANPSIYHPGPMQFYLARVPDGQDVKSWTGEGAVWFKVYEEQPQFGAQLTWPSNGKSSFEVPIPSCIRAGNYLLRAEHIALHVAQSQGGAQFYISCAQLQVTGGGSTEPSQKVSFPGAYKSTDPGILININYPVPTSYQNPGPAVFRC

SEQ ID NO: 190 - DNA, 768 bp, Myceliophthora thermophilia
atgtaccgcacgctcggttccattgccctgctcgcggggggcgctgccgcccacggcgccgtgaccagctacaacattgcgggcaaggactaccctggatactcgggcttcgcccctaccggccaggatgtcatccagtggcaatggcccgactataaccccgtgctgtccgccagcgaccccaagctccgctgcaacggcggcaccggggcggcgctgtatgccgaggcggcccccggcgacaccatcacggccacctgggcccagtggacgcactcccagggcccgatcctggtgtggatgtacaagtgccccggcgacttcagctcctgcgacggctccggcgcgggttggttcaagatcgacgaggccggcttccacggcgacggcacgaccgtcttcctcgacaccgagaccccctcgggctgggacattgccaagctggtcggcggcaacaagtcgtggagcagcaagatccctgacggcctcgccccgggcaattacctggtccgccacgagctcatcgccctgcaccaggccaacaacccgcaattctaccccgagtgcgcccagatcaaggtcaccggctctggcaccgccgagcccgccgcctcctacaaggccgccatccccggctactgccagcagagcgaccccaacatttcgttcaacatcaacgaccactccctcccgcaggagtacaagatccccggtcccccggtcttcaagggcaccgcctccgccaaggctcgcgctttccaggcctaa

SEQ ID NO: 191 - protein, 255 aa, Myceliophthora thermophilia
MYRTLGSIALLAGGAAAHGAVTSYNIAGKDYPGYSGFAPTGQDVIQWQWPDYNPVLSASDPKLRCNGGTGAALYAEAAPGDTITATWAQWTHSQGPILVWMYKCPGDFSSCDGSGAGWFKIDEAGFHGDGTTVFLDTETPSGWDIAKLVGGNKSWSSKIPDGLAPGNYLVRHELIALHQANNPQFYPECAQIKVTGSGTAEPAASYKAAIPGYCQQSDPNISFNINDHSLPQEYKIPGPPVFKGTASAKARAFQA

SEQ ID NO: 192 - protein, 236 aa, Myceliophthora thermophilia
AVTSYNIAGKDYPGYSGFAPTGQDVIQWQWPDYNPVLSASDPKLRCNGGTGAALYAEAAPGDTITATWAQWTHSQGPILVWMYKCPGDFSSCDGSGAGWFKIDEAGFHGDGTTVFLDTETPSGWDIAKLVGGNKSWSSKIPDGLAPGNYLVRHELIALHQANNPQFYPECAQIKVTGSGTAEPAASYKAAIPGYCQQSDPNISFNINDHSLPQEYKIPGPPVFKGTASAKARAFQA

SEQ ID NO: 193 - DNA, 675 bp, Myceliophthora thermophilia
atgaggcttctcgcaagcttgttgctcgcagctacggctgttcaagctcactttgttaacggacagcccgaagagagtgactggtcagccacgcgcatgaccaagaatgcgcagagcaagcagggcgttgagaacccaacaagcggcgacatccgctgctacacctcgcagacggcggccaacgtcgtgaccgtgccggccggctcgaccattcactacatctcgacccagcagatcaaccaccccggcccgactcagtactacctggccaaggtaccccccggctcgtcggccaagacctttgacgggtccggcgccgtctggttcaagatctcgaccacgatgcctaccgtggacagcaacaagcagatgttctggccagggcagaacacttatgagacctcaaacaccaccattcccgccaacaccccggacggcgagtacctccttcgcgtcaagcagatcgccctccacatggcgtctcagcccaacaaggtccagttctacctcgcctgcacccagatcaagatcaccggtggtcgcaacggcacccccagcccgctggtcgcgctgcccggagcctacaagagcaccgaccccggcatcctggtcgacatctactccatgaagcccgaatcgtaccagcctcccgggccgcccgtctggcgcggctaa

SEQ ID NO: 194 - protein, 224 aa, Myceliophthora thermophilia
MRLLASLLLAATAVQAHFVNGQPEESDWSATRMTKNAQSKQGVENPTSGDIRCYTSQTAANVVTVPAGSTIHYISTQQINHPGPTQYYLAKVPPGSSAKTFDGSGAVWFKISTTMPTVDSNKQMFWPGQNTYETSNTTIPANTPDGEYLLRVKQIALHMASQPNKVQFYLACTQIKITGGRNGTPSPLVALPGAYKSTDPGILVDIYSMKPESYQPPGPPVWRG

SEQ ID NO: 195 - protein, 208 aa, Myceliophthora thermophilia
HFVNGQPEESDWSATRMTKNAQSKQGVENPTSGDIRCYTSQTAANVVTVPAGSTIHYISTQQINHPGPTQYYLAKVPPGSSAKTFDGSGAVWFKISTTMPTVDSNKQMFWPGQNTYETSNTTIPANTPDGEYLLRVKQIALHMASQPNKVQFYLACTQIKITGGRNGTPSPLVALPGAYKSTDPGILVDIYSMKPESYQPPGPPVWRG

SEQ ID NO: 196 - DNA, 999 bp, Myceliophthora thermophilia
atggcgattgtcaaaggagtgaagctgctcgtcctcgggtcgctcattgcgacgtcgatcgcgaagtctttagagcgccgattcgagagcggcgacgatgacgacgatgacaccccgctgccgctggtcatttggcatggcctaggcgacacctacgaatccgaggggatgcgccgcgtcgccgagattgccgaagaagtcaaccctgggacgcttgtctaccctattcgagtggaggagaatccgtcccgcgacaggtatgcctcgttcgtgggcaacttgaccgaccacgtagccaaagtctgcgccgacatcgccgcccacccgatcttgtcgactgccccggcaatcgacgccctcggcttctcccagggcggccagttcctgcgcgcctatgtcgagcgctgcaacaaaccacccgtccgcagcctgatcacctttggctcacagcacaacggcatcaccgctttccgcgactgcaagccgaccgactggatttgccgaatcgcgatggcggttcttaaaggcgatgcgtggaccgacacggtgcagaacaagctcgtgccggcgcagtactatcgcaatcccgacgagtacgaaaaatacctggagcattccaacttcctcgccgacatcaacaacgagcgcgagatcaagaatgaagaatacaagaagaacatcgccaagctcgagaactttgtcatgtacatgttcgaggaagacacgaccgtcatccccaaggagacggcctggttcgaggatgtcaacggcaccgagagcacgccgctgcgcgcacgccaactgtatacggaggattggctcggcctgcgcgctctcgaccgcaagggcgggctcaaattccgcacggcgccgggcgaccacatgcagctgtcggaggagctgttgaaggaggcatttggcgacttttatgggccgctgaacctacatcgcggaaggtcggacccgcggccggcgaactggcgcagtgatgatctctga

SEQ ID NO: 197 - protein, 332 aa, Myceliophthora thermophilia
MAIVKGVKLLVLGSLIATSIAKSLERRFESGDDDDDDTPLPLVIWHGLGDTYESEGMRRVAEIAEEVNPGTLVYPIRVEENPSRDRYASFVGNLTDHVAKVCADIAAHPILSTAPAIDALGFSQGGQFLRAYVERCNKPPVRSLITFGSQHNGITAFRDCKPTDWICRIAMAVLKGDAWTDTVQNKLVPAQYYRNPDEYEKYLEHSNFLADINNEREIKNEEYKKNIAKLENFVMYMFEEDTTVIPKETAWFEDVNGTESTPLRARQLYTEDWLGLRALDRKGGLKFRTAPGDHMQLSEELLKEAFGDFYGPLNLHRGRSDPRPANWRSDDL

SEQ ID NO: 198 - protein, 311 aa, Myceliophthora thermophilia
KSLERRFESGDDDDDDTPLPLVIWHGLGDTYESEGMRRVAEIAEEVNPGTLVYPIRVEENPSRDRYASFVGNLTDHVAKVCADIAAHPILSTAPAIDALGFSQGGQFLRAYVERCNKPPVRSLITFGSQHNGITAFRDCKPTDWICRIAMAVLKGDAWTDTVQNKLVPAQYYRNPDEYEKYLEHSNFLADINNEREIKNEEYKKNIAKLENFVMYMFEEDTTVIPKETAWFEDVNGTESTPLRARQLYTEDWLGLRALDRKGGLKFRTAPGDHMQLSEELLKEAFGDFYGPLNLHRGRSDPRPANWRSDDL

SEQ ID NO: 199 - DNA, 1350 bp, Myceliophthora thermophilia
atgcatctcaacagactcgtctggttaccactgtgcgctctcaccattggcgcgaacgcaaacccatcaataccaagacggaatcaacaacatcaacccccatctcaagaggtcctcaatgattggtataatccgcatccgcaaggaggcaaccacccaggaaacggcggcgatggttctgaagagggagggttggaaggaggagggttggaaggagggggagggggagggggagggggaggaggcgtatctgcggccctcttctcgtcgctcgagcgcacctcccgcctcgtcgacatcacgtactgcgtcggcacagcgggaaccggcatcgccccgcctttctcgtgcctctcacgctgcaaggacttcccctcgctgcggctggtccggacgtggaacacgggcgtgctgctgaccgacagctgcgggtatatcgctgtcgaccacgggcacgggcacaggtacgggatggaggaggagacggaggaggagacggaggaggaggaaacccgggtggggacggagaatgggagaggggccagggagatcgtcgtcgcctttcgcggcacgtacagcatcacaaacaccatcgtcgacctgagcaccgcgccccaggagtacgtcccttacccggcgccgcctggagacgggaacggagatgggaacgggggcggcggcaagtgtcacaattgcaccgtgcacatgggcttcatggcctcgtggcggaacgctcgcgaggtggtgataccggccctcaaggccgcccgcgagcggtatcccgggtaccgggtgcatctcatcggacatagcctgggcggggccgtcgcggcgctcgcggcgctcgagctccggctgggactcggctggcgagacgtggtcgtcacgacctttggggaaccgagggtggggaacgcggaattggccgactacatcaaccgggcgttcgggctcggggtccgggacggagacggcgctggcgaggaggtcgcatatcgccgcgtcacgcacgctggcgacccggtgccgctcctgccgctgagcgagtggggttaccaggcgcatgccggggagatctatatcagcaagccggacctgcctccggcgccggaggacttgaggctgtgccacgggaacaacgacccacggtgtttgagcgacgctgaggcactactgggcttgggccgatggttcccggcgcggcttcagctgtggcaactgctgttcgcgcaccgagactacttctggaggttggggctctgcgtcccggggggagacccggctgactggggaagggagaaatacaacctgacggtcgacggtgctcgggatgagatacaggatttatga

SEQ ID NO: 200 - protein, 449 aa, Myceliophthora thermophilia
MHLNRLVWLPLCALTIGANANPSIPRRNQQHQPPSQEVLNDWYNPHPQGGNHPGNGGDGSEEGGLEGGGLEGGGGGGGGGGGVSAALFSSLERTSRLVDITYCVGTAGTGIAPPFSCLSRCKDFPSLRLVRTWNTGVLLTDSCGYIAVDHGHGHRYGMEEETEEETEEEETRVGTENGRGAREIVVAFRGTYSITNTIVDLSTAPQEYVPYPAPPGDGNGDGNGGGGKCHNCTVHMGFMASWRNAREVVIPALKAARERYPGYRVHLIGHSLGGAVAALAALELRLGLGWRDVVVTTFGEPRVGNAELADYINRAFGLGVRDGDGAGEEVAYRRVTHAGDPVPLLPLSEWGYQAHAGEIYISKPDLPPAPEDLRLCHGNNDPRCLSDAEALLGLGRWFPARLQLWQLLFAHRDYFWRLGLCVPGGDPADWGREKYNLTVDGARDEIQDL

SEQ ID NO: 201 - protein, 429 aa, Myceliophthora thermophilia
NPSIPRRNQQHQPPSQEVLNDWYNPHPQGGNHPGNGGDGSEEGGLEGGGLEGGGGGGGGGGGVSAALFSSLERTSRLVDITYCVGTAGTGIAPPFSCLSRCKDFPSLRLVRTWNTGVLLTDSCGYIAVDHGHGHRYGMEEETEEETEEEETRVGTENGRGAREIVVAFRGTYSITNTIVDLSTAPQEYVPYPAPPGDGNGDGNGGGGKCHNCTVHMGFMASWRNAREVVIPALKAARERYPGYRVHLIGHSLGGAVAALAALELRLGLGWRDVVVTTFGEPRVGNAELADYINRAFGLGVRDGDGAGEEVAYRRVTHAGDPVPLLPLSEWGYQAHAGEIYISKPDLPPAPEDLRLCHGNNDPRCLSDAEALLGLGRWFPARLQLWQLLFAHRDYFWRLGLCVPGGDPADWGREKYNLTVDGARDEIQDL

SEQ ID NO: 202 - DNA, 1278 bp, Myceliophthora thermophilia
atgaggttgttgtcactttcgcttcttggggcactccttgcctatgtcttatataccgtcggacccaacctctaccgggcagtgaccgtcatgggggtgctgcgcaagtatcccgacggcgcagtcattaataaaggcgaggtgattgccatcccagacacgacccagtgcgaagacctccactaccatgcccccagcggaaccatcttcactgcttgcgaggacaatgccgagacgaggttcaagtggttacctccgctcgccaactttgacagtcccgagttggcaagcaagagccggggctcaattcatgtaattgacccaaagaccatgaactctcgcaggctcgagtttgagaactttgatggcccgttcatcacccacggcatcgatgtgattgccgacgaggaacggccagagggcgaggctgtttacatctttgccatcaaccacgttcccgagactcagccgtctggcgaaaaggggccgtatgcccgctcgcagctcgagctcttccaccactttatcggctcctcgtccgtcaagcacctccgctccatctggcatcccctgataacgacgcccaacgacatctttgctcagagcccgtactcgctctatgtgaccaacgaccacctgtaccggcaccatggattaatgcgcacccttgaggatttctaccccggagcgaagtggaccggaatcatccacatccagctcgagtccctgacggcggcggcgcccaccgccggcgttgcggccgaagttgcgctatccggtatacacaacaccaacggtgttggccatgggaggtcggaccgcgagatcttgatctcgagctgcaccagcggcgttctccacttcggacgagtcccggcaggtggatcgggcaacatcaccatcgtcgactcggtcgagatcgaccacgtcgccgacaatcccagctatttctcggacccctatgccacgcccggcgacgaccggagcggtttcctcgagaccgggttgtcgagagccgtcgatattgcaaagaccatgagggacccggcagccaaggaacccgtcatggtcacgtacctgaggcaagcttctcccggtcgctgggagaagcgggtcctcctggacgacgatggtaccacgctcagaagcggcagtgccgcagtcctggtacctatcaaaccgtctgaggcagggagcgccgagggaccacgacaggcttggctctttgcaaccgggtttctgtccaacaacgtcattgctgtcaaggtcgacctctaa

SEQ ID NO: 203 - protein, 425 aa, Myceliophthora thermophilia
MRLLSLSLLGALLAYVLYTVGPNLYRAVTVMGVLRKYPDGAVINKGEVIAIPDTTQCEDLHYHAPSGTIFTACEDNAETRFKWLPPLANFDSPELASKSRGSIHVIDPKTMNSRRLEFENFDGPFITHGIDVIADEERPEGEAVYIFAINHVPETQPSGEKGPYARSQLELFHHFIGSSSVKHLRSIWHPLITTPNDIFAQSPYSLYVTNDHLYRHHGLMRTLEDFYPGAKWTGIIHIQLESLTAAAPTAGVAAEVALSGIHNTNGVGHGRSDREILISSCTSGVLHFGRVPAGGSGNITIVDSVEIDHVADNPSYFSDPYATPGDDRSGFLETGLSRAVDIAKTMRDPAAKEPVMVTYLRQASPGRWEKRVLLDDDGTTLRSGSAAVLVPIKPSEAGSAEGPRQAWLFATGFLSNNVIAVKVDL

SEQ ID NO: 204 - protein, 398 aa, Myceliophthora thermophilia
VTVMGVLRKYPDGAVINKGEVIAIPDTTQCEDLHYHAPSGTIFTACEDNAETRFKWLPPLANFDSPELASKSRGSIHVIDPKTMNSRRLEFENFDGPFITHGIDVIADEERPEGEAVYIFAINHVPETQPSGEKGPYARSQLELFHHFIGSSSVKHLRSIWHPLITTPNDIFAQSPYSLYVTNDHLYRHHGLMRTLEDFYPGAKWTGIIHIQLESLTAAAPTAGVAAEVALSGIHNTNGVGHGRSDREILISSCTSGVLHFGRVPAGGSGNITIVDSVEIDHVADNPSYFSDPYATPGDDRSGFLETGLSRAVDIAKTMRDPAAKEPVMVTYLRQASPGRWEKRVLLDDDGTTLRSGSAAVLVPIKPSEAGSAEGPRQAWLFATGFLSNNVIAVKVDL

SEQ ID NO: 205 - DNA, 876 bp, Myceliophthora thermophilia
atgcaactcctcgcctccctcgctttcctacctctcctcggcctcacatcaacggccaccccggttccgggcaccaagcgggcggaggacaccaagaccccggcaggctgcaccgacttgtcgtttgggggtaactttgcctggacggccaaggcctttgacttccacgcgtcctacatcttcagcaccccgtcccaccagaactcgtggggctacgtctcgttcgacctggtcaacccggcggaccagaccacgacccactgcgaggcgagcagcaaccagcttagcgacttcttctacggcaacttccagtacaagtgcaacgacacggagcggctcggcaagaccacgttcgacttcaaccggccggccaacctgctgcgcgtcaaccagacatggaggtgcgacgataaggaccctcagtggcccatcaccttcaccggccgcgggcaggtcgccttcaacctgacgtgcaccgaggagaaatacgagaacccggattggcagatgggcgagatctactcgagccggaccatcacctgcggcaaggtcaaccgcaccttcaagccgactgacattgacgctattgccgacgccgtcctcgcggctccagcgggcgaagcgctccctctcgcctgcgccggcgtctgcccgaaccgcggcttcgagtcggtgacgacccacagaaggggcaccaccttcacgctcagcatcaccttcaccggccgcgggcaggtcgccttcaacctgacgtgcaccgaggagaaatacgagaacccggattggcagatgggcgagatctactcgagccggaccatcacctgcggcaaggtcaaccgcaccttcaagccgactgacattgacgctattgcgtga

SEQ ID NO: 206 - protein, 291 aa, Myceliophthora thermophilia
MQLLASLAFLPLLGLTSTATPVPGTKRAEDTKTPAGCTDLSFGGNFAWTAKAFDFHASYIFSTPSHQNSWGYVSFDLVNPADQTTTHCEASSNQLSDFFYGNFQYKCNDTERLGKTTFDFNRPANLLRVNQTWRCDDKDPQWPITFTGRGQVAFNLTCTEEKYENPDWQMGEIYSSRTITCGKVNRTFKPTDIDAIADAVLAAPAGEALPLACAGVCPNRGFESVTTHRRGTTFTLSITFTGRGQVAFNLTCTEEKYENPDWQMGEIYSSRTITCGKVNRTFKPTDIDAIA

SEQ ID NO: 207 - protein, 273 aa, Myceliophthora thermophilia
ATPVPGTKRAEDTKTPAGCTDLSFGGNFAWTAKAFDFHASYIFSTPSHQNSWGYVSFDLVNPADQTTTHCEASSNQLSDFFYGNFQYKCNDTERLGKTTFDFNRPANLLRVNQTWRCDDKDPQWPITFTGRGQVAFNLTCTEEKYENPDWQMGEIYSSRTITCGKVNRTFKPTDIDAIADAVLAAPAGEALPLACAGVCPNRGFESVTTHRRGTTFTLSITFTGRGQVAFNLTCTEEKYENPDWQMGEIYSSRTITCGKVNRTFKPTDIDAIA

SEQ ID NO: 208 - DNA, 1680 bp, Myceliophthora thermophilia
atggccaaagtagcagcagcggcaatcgttgccgaacaagtcgccgcaacaggcgttgaagcagcggcagcgattgcgatcgcagcgcccaccctccccctcaagatctgcctcactcacctgccaaatccagcccccaaaggctcgccccacccggcactcgcccgctcccagcacaccctcaccgtcatccgcaacaaggccttcatatttggcggccaggacgcctccggcgcgctctgcccgccaggaatccacaccatcaccctcccagccgcgcccacggtcgccacggaccccgccagcgcctcctctctctccggccggggaggcggcggcggcggcggcggcaaggagcaggaggagggagaggagggcggagagccggacgcgggagccgcgtatacgtgctacccgccctacacgctgcaggacgcctcgacgggcgagacgctagtgccgcagccccgggcgggacacgccgcgtgcgcgcgcggcgggcggtacctgctcgtccagggcggccgcggcgcggacgggaggcccgtggaggagggcaactgcatctggcagtgggactgcgagggcctgagctgggccaagctgaggggcccatcgcagctgggggtggagatggccccggggcgctgggggcactggatgtttgcggacgaggaccaggggttcttggtgatggtgggaggcaagacaagggatgatggtggcggtgatggaggagggtcggagagggaggcgtggatgtatgacctccatgcggccgcgtggacgacgttgccgcgattgacggcccggccgctggcggcggcgtacgcggcggggaagatctatattatctcgagtggcgaaggagatatcgctcccggagacgccaagttgggcggaatggtgcacttcctggacatgagggagtcgccgacggagcgggagaagcccggcgcgttggcgtggcagagcgttcggttcccggcaaatccactcgctccagggccgcagccaagggcaggcggggcattggtgccgctgagaaccgggcacgggagagtgtacctggtttacctgtttgggtgctctgatgaggggggtcgtaaaggggagaaagagtactattcggatatctggacgctgcagctgcccgctcagacacgcagtgccgccgctgtcaaagacaagatccgggagaagctgccccgttttgagtctggggagtttcgatgggcagaggcagagattgtccctacggaacagatagcagcggatggagcccagaggttcggcctgcatgtgtttatgcgtctgtggttagagctcctatttggagagtctgacaatgacctcaaatgtgccttcttcttctgtccggcctacagggcggcgcgggcgcgcatcgctgcgcacggcggagaggtgcccgtgtacagttacgtgtacgcggggaacttcagcaacatcagccccaagggctggatgggcgcgcaccacggggcggagcagccgatggtgtttggtacgcattcactcgttcggggcgagtcgaccgaactggagtatgtgacaccgtatgcgatgcaggacgcgggggtcagctttgtggcgacggcggggagggggatgacggtggagggatgggatgcgaaggggcaagtaattagatggtggtag

SEQ ID NO: 209 - protein, 559 aa, Myceliophthora thermophilia
MAKVAAAAIVAEQVAATGVEAAAAIAIAAPTLPLKICLTHLPNPAPKGSPHPALARSQHTLTVIRNKAFIFGGQDASGALCPPGIHTITLPAAPTVATDPASASSLSGRGGGGGGGGKEQEEGEEGGEPDAGAAYTCYPPYTLQDASTGETLVPQPRAGHAACARGGRYLLVQGGRGADGRPVEEGNCIWQWDCEGLSWAKLRGPSQLGVEMAPGRWGHWMFADEDQGFLVMVGGKTRDDGGGDGGGSEREAWMYDLHAAAWTTLPRLTARPLAAAYAAGKIYIISSGEGDIAPGDAKLGGMVHFLDMRESPTEREKPGALAWQSVRFPANPLAPGPQPRAGGALVPLRTGHGRVYLVYLFGCSDEGGRKGEKEYYSDIWTLQLPAQTRSAAAVKDKIREKLPRFESGEFRWAEAEIVPTEQIAADGAQRFGLHVFMRLWLELLFGESDNDLKCAFFFCPAYRAARARIAAHGGEVPVYSYVYAGNFSNISPKGWMGAHHGAEQPMVFGTHSLVRGESTELEYVTPYAMQDAGVSFVATAGRGMTVEGWDAKGQVIRWW

SEQ ID NO: 210 - protein, 543 aa, Myceliophthora thermophilia
TGVEAAAAIAIAAPTLPLKICLTHLPNPAPKGSPHPALARSQHTLTVIRNKAFIFGGQDASGALCPPGIHTITLPAAPTVATDPASASSLSGRGGGGGGGGKEQEEGEEGGEPDAGAAYTCYPPYTLQDASTGETLVPQPRAGHAACARGGRYLLVQGGRGADGRPVEEGNCIWQWDCEGLSWAKLRGPSQLGVEMAPGRWGHWMFADEDQGFLVMVGGKTRDDGGGDGGGSEREAWMYDLHAAAWTTLPRLTARPLAAAYAAGKIYIISSGEGDIAPGDAKLGGMVHFLDMRESPTEREKPGALAWQSVRFPANPLAPGPQPRAGGALVPLRTGHGRVYLVYLFGCSDEGGRKGEKEYYSDIWTLQLPAQTRSAAAVKDKIREKLPRFESGEFRWAEAEIVPTEQIAADGAQRFGLHVFMRLWLELLFGESDNDLKCAFFFCPAYRAARARIAAHGGEVPVYSYVYAGNFSNISPKGWMGAHHGAEQPMVFGTHSLVRGESTELEYVTPYAMQDAGVSFVATAGRGMTVEGWDAKGQVIRWW

SEQ ID NO: 211 - DNA, 1776 bp, Myceliophthora thermophilia
atgactcgcctgatcccgaccgcgatcctccgcaatgtcctgcgatacctgatcccgctgtcgatcgctctgactctctacctctacctctatcccgtcttcaacacctgcgcattcccgctgccacccgacccgagcagcgcctctgtctcggccgacaccgggcgcgcagcctttgtcgagacggccaaggtgcactggcacaccgccgcgggcaccgccgaccacccgactatatttatcccttcccgcccgccggcgccgttccgtctccttgccctcggcgacccgcagctcgaaggcgacacgtctatcccgaccgactacctgggcgtcttcccgcacgcaaagagtctgttccgacatgcgaccttccgatcgaggcactcttcgctgcgacagcgcatccggcagagcttccatgacctggtcgacatagtctttgaggacaccttcaatgcgctcgagtcactgcgcaagaggatcgatttggtcggcaacgacctctacctcgcacacatctaccgcacggtgcgttggtggtcgcgcccgacgcacgtcaccgtgctgggcgacctcctgggaagccagtggatcaataacgaggagttctaccgccgcgctggccggtattggaaccgcgtgttccgcggcgccgagcgcgtgccggacgacgtcgccgcctacccggccgaggaatacgacctggcgggcaggctcggaggcgggcccttcaacgagtcgaccgcttgggtacggcgcgtcatcaacgtcgcggggaaccacgacattggctatgcgggcgacctcaacgacgagagggccgagaggttcgagcgcgcattcggcaagctcaactacgagctccgctttgagctgcccctcacgaacgcgtccctggccgggaccaactttgacgccgacccgagctcgacccgcctggtccccgagctgcgcatcatcgtgctcaacgacatgaacctcgacacccccgtcatctcgaccaagctgcaggacgacacgtacgccttcgtcaacaaggtcatcagcacatccgccgccgtcgagttcaagggccacttcaccgtcatcctcacccacatccccctgtacaagcccgtgggcgtctgcgtcgacgaccccttctttgattttcaccagcacgacggcagcctccgggagcagaaccagctgagcgtccccgccagcaagggcttcctcgagggcatcctgggtatgtcgggcgacgtcaaggcggcgggtcgcggccgcggccggccgggcatcatcctcaacgggcacgaccacgagggctgcgatacgtggcactacatcaaccagtcggtcgccgacccggagcagcggtcgtgggaggtcaagcgctggcggcaggccaagacggccggcatcgtcggccgcgacgagctccccggcgtccgggaggtgacggtccggagcatgatgggcggctttggcggcaacgccggcctgctgagcatctggttcgacgaggccagctgggagtggaggaccgagtacgcgacctgcccgctcgggacgcagcacctgtggtggctggtgcacatcttggacctgatcgtcctcgcggcgatcctgctgctcgccgtcgccgcgttcctgtcggcctccgggctaaacgtggacagggccgtgcaagagtcggccgctaaactttccacgccacagaagaagctcgcccggcccaatactcctgccaaacgctctgcgctggccaagggtggcggctcgggataa

SEQ ID NO: 212 - protein, 591 aa, Myceliophthora thermophilia
MTRLIPTAILRNVLRYLIPLSIALTLYLYLYPVFNTCAFPLPPDPSSASVSADTGRAAFVETAKVHWHTAAGTADHPTIFIPSRPPAPFRLLALGDPQLEGDTSIPTDYLGVFPHAKSLFRHATFRSRHSSLRQRIRQSFHDLVDIVFEDTFNALESLRKRIDLVGNDLYLAHIYRTVRWWSRPTHVTVLGDLLGSQWINNEEFYRRAGRYWNRVFRGAERVPDDVAAYPAEEYDLAGRLGGGPFNESTAWVRRVINVAGNHDIGYAGDLNDERAERFERAFGKLNYELRFELPLTNASLAGTNFDADPSSTRLVPELRIIVLNDMNLDTPVISTKLQDDTYAFVNKVISTSAAVEFKGHFTVILTHIPLYKPVGVCVDDPFFDFHQHDGSLREQNQLSVPASKGFLEGILGMSGDVKAAGRGRGRPGIILNGHDHEGCDTWHYINQSVADPEQRSWEVKRWRQAKTAGIVGRDELPGVREVTVRSMMGGFGGNAGLLSIWFDEASWEWRTEYATCPLGTQHLWWLVHILDLIVLAAILLLAVAAFLSASGLNVDRAVQESAAKLSTPQKKLARPNTPAKRSALAKGGGSG

SEQ ID NO: 213 - protein, 553 aa, Myceliophthora thermophilia
FPLPPDPSSASVSADTGRAAFVETAKVHWHTAAGTADHPTIFIPSRPPAPFRLLALGDPQLEGDTSIPTDYLGVFPHAKSLFRHATFRSRHSSLRQRIRQSFHDLVDIVFEDTFNALESLRKRIDLVGNDLYLAHIYRTVRWWSRPTHVTVLGDLLGSQWINNEEFYRRAGRYWNRVFRGAERVPDDVAAYPAEEYDLAGRLGGGPFNESTAWVRRVINVAGNHDIGYAGDLNDERAERFERAFGKLNYELRFELPLTNASLAGTNFDADPSSTRLVPELRIIVLNDMNLDTPVISTKLQDDTYAFVNKVISTSAAVEFKGHFTVILTHIPLYKPVGVCVDDPFFDFHQHDGSLREQNQLSVPASKGFLEGILGMSGDVKAAGRGRGRPGIILNGHDHEGCDTWHYINQSVADPEQRSWEVKRWRQAKTAGIVGRDELPGVREVTVRSMMGGFGGNAGLLSIWFDEASWEWRTEYATCPLGTQHLWWLVHILDLIVLAAILLLAVAAFLSASGLNVDRAVQESAAKLSTPQKKLARPNTPAKRSALAKGGGSG

SEQ ID NO: 214 - DNA, 1161 bp, Myceliophthora thermophilia
atgaagcgattcttcgtcaaccttttggcatggctttgggttggagttgcgctctcggctcccgtccgccgggggaaagcgtttgaccgcttcattaccatctggctcgagaatcaggactttgccaaggtcgtcgtcgacaaccgcattgtcgatctaaagaggcacggcatcctcctgaccaggtacttcgcccatacacaccctagccagcccaactaccttgccgccatcgcgggcgactacttcggcctcaaccatgacgactgggtgcgcctgcccgaagatgttgccactatcgtcgacctgctcgaagaaaaaggcgtgacatgggccggttactttgaggacatacccagcccgggctacatgggcaacgccagcgacgggtcaaccggcaccgacggatgggactatgtcaggaagcacaatccctttgtgtcgttcgacagtatcaccaacgacggcgagcggctgctgaagatcgactcgttcgatgccttccagcgggccttcgctgccaagaaggtgcccgagtacgtcttcatgagccccaacatgatgaacgacggccacaacacgacgctcgactacgccaccaagtggtcgcacaagttcctgcagccgctgctggccgctaaggcatttgacgagcgcactctgatcgctcttacctacgacgagtccgagacgtacgaggaacccaaccacatcgtcaccctgctcctgggcaacgccatcccgccggccctcaagggcaccgaagacgacaccttctacacccattacagcatgctctccacccttgagctgaactggcgcttgcacaccctgggccggtatgacgtcggggcgaatgtcttcaagttcgtcgcggatcagctcaggtacaccgcaaacaaggaaccggagaatgccgccaccgtcgacaactcggtctcgtaccccggcctgctgaacaacgatacttccgcacgactgccccttccgttcccgaacacgaaactcgtcggcgccagcgggctcgggatcttgccatcgatcgagaaagcattgtcgaggacaaagatcaccaagacgccctatgatggcagcgggaaggtatttgacggggacaagaacccgcccgtctacaagcctcccgcaggtaatccgtcatga

SEQ ID NO: 215 - protein, 386 aa, Myceliophthora thermophilia
MKRFFVNLLAWLWVGVALSAPVRRGKAFDRFITIWLENQDFAKVVVDNRIVDLKRHGILLTRYFAHTHPSQPNYLAAIAGDYFGLNHDDWVRLPEDVATIVDLLEEKGVTWAGYFEDIPSPGYMGNASDGSTGTDGWDYVRKHNPFVSFDSITNDGERLLKIDSFDAFQRAFAAKKVPEYVFMSPNMMNDGHNTTLDYATKWSHKFLQPLLAAKAFDERTLIALTYDESETYEEPNHIVTLLLGNAIPPALKGTEDDTFYTHYSMLSTLELNWRLHTLGRYDVGANVFKFVADQLRYTANKEPENAATVDNSVSYPGLLNNDTSARLPLPFPNTKLVGASGLGILPSIEKALSRTKITKTPYDGSGKVFDGDKNPPVYKPPAGNPS

SEQ ID NO: 216 - protein, 367 aa, Myceliophthora thermophilia
APVRRGKAFDRFITIWLENQDFAKVVVDNRIVDLKRHGILLTRYFAHTHPSQPNYLAAIAGDYFGLNHDDWVRLPEDVATIVDLLEEKGVTWAGYFEDIPSPGYMGNASDGSTGTDGWDYVRKHNPFVSFDSITNDGERLLKIDSFDAFQRAFAAKKVPEYVFMSPNMMNDGHNTTLDYATKWSHKFLQPLLAAKAFDERTLIALTYDESETYEEPNHIVTLLLGNAIPPALKGTEDDTFYTHYSMLSTLELNWRLHTLGRYDVGANVFKFVADQLRYTANKEPENAATVDNSVSYPGLLNNDTSARLPLPFPNTKLVGASGLGILPSIEKALSRTKITKTPYDGSGKVFDGDKNPPVYKPPAGNPS

SEQ ID NO: 217 - DNA, 711 bp, Myceliophthora thermophilia
atgaagttcgcccttttcgctgccctcttcgaggccgtggccgtcacggtcaccagcgcctatcccgtcaccgccaacggcgggcttagctgccgctccggccccggcaccagctatgccgtcaagaagacctacaagaagggtttcgatgtcaagatcagctgccagaccactggcacctcggtcaacggcaacaacatctgggataagacccaggatggctgctacgtcgccgactattacgtcaagaccggcaagaacggctttgtgaccagcaagtgccctgctagcggcggcggtggcggcggttccaccaagcttcccggccccgtcaagaacgactatccctacaagaacaactgcggcggcgtcgacccctggaaatactacaagtgccagtgcacctccttcgtggcgtggcgcatcaacgagcgcctgggcatcaagttccacaacatgtacaagggcgtcaactggggtaatgccaacacctgggacgatgccgccaagcgcaccggcgtcaaggtcgacaagactcctaagcccggcgctattgctcagaccaacgccggccggtacggccacgtcgcctgggtcacggctgtcaatggcaacaaggtcaccatcgaggagtacaactgggccaagcgcgagggctatggcacccgcaccgtcgacaagagcaccttcaactacattcatctcaaataa

SEQ ID NO: 218 - protein, 236 aa, Myceliophthora thermophilia
MKFALFAALFEAVAVTVTSAYPVTANGGLSCRSGPGTSYAVKKTYKKGFDVKISCQTTGTSVNGNNIWDKTQDGCYVADYYVKTGKNGFVTSKCPASGGGGGGSTKLPGPVKNDYPYKNNCGGVDPWKYYKCQCTSFVAWRINERLGIKFHNMYKGVNWGNANTWDDAAKRTGVKVDKTPKPGAIAQTNAGRYGHVAWVTAVNGNKVTIEEYNWAKREGYGTRTVDKSTFNYIHLK

SEQ ID NO: 219 - protein, 216 aa, Myceliophthora thermophilia
YPVTANGGLSCRSGPGTSYAVKKTYKKGFDVKISCQTTGTSVNGNNIWDKTQDGCYVADYYVKTGKNGFVTSKCPASGGGGGGSTKLPGPVKNDYPYKNNCGGVDPWKYYKCQCTSFVAWRINERLGIKFHNMYKGVNWGNANTWDDAAKRTGVKVDKTPKPGAIAQTNAGRYGHVAWVTAVNGNKVTIEEYNWAKREGYGTRTVDKSTFNYIHLK

SEQ ID NO: 220 - DNA, 1767 bp, Myceliophthora thermophilia
atgaggtcgcgccgagcagcgtcgaccctgcgccatgcacaggctgccgtctccgatgccgtggcattccggagcggcgccgtcgtgaggcccgtctgctgcaatgcggcgccggccagcacccggcggttcactgcggccacgacggctgctcccgcgacaatggctctggcccctccgggcattccaatcccgaacgtgccccggagacccggcttccgccagcaattcgctcctagggcaccggcccggcggtgcctccacgggcaaccacctcggcgcagcggcgcgccctccaacccggccatccagtttccctgtctcgacgccctcgaaaaccggtcggcaaccctcgagcggcaggcgtcggcgcgctccgacaacagcggcccggagccgcattacaccgtcggcgtgaccaaggtttaccactgcaaagagcctctcctgctcgaccatggcggccacctccacgagttcgacatcgcctacgagacgtggggccagatgaactcgacccgctccaacgtgatcctcctccacaccggcctctccgcctcctcccacgcgcactcgaccgccgagaacccgcagccgggctggtgggagaagttcatcggcccgggcctggccctcgataccaacaagtacttcgtcatctgcaccaatgtcatcggcggctgctacggctcgaccggcccctccagcatcgacccgctcgacggccagcgctacgccacccgcttccccatcctgaccatccaggacatggtgcgcgcccagttccgcctgctcgaccacctcggcgtcgacgtcctgtacgccagcgtcggctccagcatgggcggcatgcagtcgctcgccgccggcgtcgagttcccctcgcgcgtcggccgcatcgtctccatctcggcctgcgcccgcagccacccgtacagcatcgcgatgcgctacgtccagcgccgcgccatcctcaacgaccccaactggaaccgcggcttctactacggccgcgtgcccccgcacgtcggcatgaagctcgcccgcgagatcgccaccatcacctaccgctccgggcccgagtgggagcagcgcttcggtcgccgccgcgccgacccctccatgcccccggccctgtgcccggacttcctcgtcgagacctacctcgaccacgccggcgagaagttctgcctcacctacgacgccaacagcctgctctacgtcagcaaggccatggaccttttcgacctcggccgcgccaaccagctcgccaccgcccaacgccgcgccgaacgcctggccgccctctcccgatccgcagacaaatctccttcctcctccccatcctcctcttccaccactggcagcagcagcagcagcagcagtaccgccggcggcgcgcccacgtgcagcctcaccctcccggacaagccctacgaggaacagccgcagccggtagccgacacgcccatgctctcggcgctgagcgccgagaccttccccccgcaccagccgcagcagccccccgccgacctggtcgccggcctcgccccgctgcgccaccaccccgtgctggtcctcggcgtggccagcgacatcctgttccccgcctggcagcagcgagaggtggccgaggcgctacgccgggccggcaacgaccgggtcgagcaccacgagctgagcgaggtccagagcctgtttgggcacgacaccttcctcctcgacgtcgagggggtcggcggtgcggtgaagaactttctgggctga

SEQ ID NO: 221 - protein, 588 aa, Myceliophthora thermophilia
MRSRRAASTLRHAQAAVSDAVAFRSGAVVRPVCCNAAPASTRRFTAATTAAPATMALAPPGIPIPNVPRRPGFRQQFAPRAPARRCLHGQPPRRSGAPSNPAIQFPCLDALENRSATLERQASARSDNSGPEPHYTVGVTKVYHCKEPLLLDHGGHLHEFDIAYETWGQMNSTRSNVILLHTGLSASSHAHSTAENPQPGWWEKFIGPGLALDTNKYFVICTNVIGGCYGSTGPSSIDPLDGQRYATRFPILTIQDMVRAQFRLLDHLGVDVLYASVGSSMGGMQSLAAGVEFPSRVGRIVSISACARSHPYSIAMRYVQRRAILNDPNWNRGFYYGRVPPHVGMKLAREIATITYRSGPEWEQRFGRRRADPSMPPALCPDFLVETYLDHAGEKFCLTYDANSLLYVSKAMDLFDLGRANQLATAQRRAERLAALSRSADKSPSSSPSSSSTTGSSSSSSSTAGGAPTCSLTLPDKPYEEQPQPVADTPMLSALSAETFPPHQPQQPPADLVAGLAPLRHHPVLVLGVASDILFPAWQQREVAEALRRAGNDRVEHHELSEVQSLFGHDTFLLDVEGVGGAVKNFLG

SEQ ID NO: 222 - protein, 532 aa, Myceliophthora thermophilia
LAPPGIPIPNVPRRPGFRQQFAPRAPARRCLHGQPPRRSGAPSNPAIQFPCLDALENRSATLERQASARSDNSGPEPHYTVGVTKVYHCKEPLLLDHGGHLHEFDIAYETWGQMNSTRSNVILLHTGLSASSHAHSTAENPQPGWWEKFIGPGLALDTNKYFVICTNVIGGCYGSTGPSSIDPLDGQRYATRFPILTIQDMVRAQFRLLDHLGVDVLYASVGSSMGGMQSLAAGVEFPSRVGRIVSISACARSHPYSIAMRYVQRRAILNDPNWNRGFYYGRVPPHVGMKLAREIATITYRSGPEWEQRFGRRRADPSMPPALCPDFLVETYLDHAGEKFCLTYDANSLLYVSKAMDLFDLGRANQLATAQRRAERLAALSRSADKSPSSSPSSSSTTGSSSSSSSTAGGAPTCSLTLPDKPYEEQPQPVADTPMLSALSAETFPPHQPQQPPADLVAGLAPLRHHPVLVLGVASDILFPAWQQREVAEALRRAGNDRVEHHELSEVQSLFGHDTFLLDVEGVGGAVKNFLG

SEQ ID NO: 223 - DNA, 735 bp, Myceliophthora thermophilia
atggcgtcactcgtgcgggcgccgcccctgttgttcccggcgaccgcgcggcacaccgcgaccgtcatcttcgtccacggtttaggcgacacgggccacggctgggcgggcgccgttgagaactggcggaggcggcagcgccttgacgaggtcaagtttatccttccccatgcaccatcaattcccatcacttgcaactgggggatgaagatgccgggctggtatgatatccacactattgacggcaatgccgagtccctccgccgcaatgaggacgaggccggcatcctgcagagccaggcgtactttcacgagctcatccagaaggagatcgacgctggcatccctcccgagaggattgtgctgggcggcttcagccagggcggtgccatcagcatcttttccggcctgacctcgaaggtgaagctggcgggcatcgtggctctctcgtcatacctgctgctgagcctcaagttcagcgatctggtgcccaagccagagttcaacaaggagacgcccatcttcatgggtcatggtgattccgacaaggtagtgaacacagagctcggaaagatgtcgtacgagatgctcaagggcatgggttacaatgtaacaatgaagatctacaaggatatgggacactcggcctgcctggaggagatggatgatgtcgaggcgtttttgagggagcggttgccgccgttgggcgacaacaacgccaagtcggagctctag

SEQ ID NO: 224 - protein, 244 aa, Myceliophthora thermophilia
MASLVRAPPLLFPATARHTATVIFVHGLGDTGHGWAGAVENWRRRQRLDEVKFILPHAPSIPITCNWGMKMPGWYDIHTIDGNAESLRRNEDEAGILQSQAYFHELIQKEIDAGIPPERIVLGGFSQGGAISIFSGLTSKVKLAGIVALSSYLLLSLKFSDLVPKPEFNKETPIFMGHGDSDKVVNTELGKMSYEMLKGMGYNVTMKIYKDMGHSACLEEMDDVEAFLRERLPPLGDNNAKSEL

SEQ ID NO: 225 - protein, 228 aa, Myceliophthora thermophilia
RHTATVIFVHGLGDTGHGWAGAVENWRRRQRLDEVKFILPHAPSIPITCNWGMKMPGWYDIHTIDGNAESLRRNEDEAGILQSQAYFHELIQKEIDAGIPPERIVLGGFSQGGAISIFSGLTSKVKLAGIVALSSYLLLSLKFSDLVPKPEFNKETPIFMGHGDSDKVVNTELGKMSYEMLKGMGYNVTMKIYKDMGHSACLEEMDDVEAFLRERLPPLGDNNAKSEL

SEQ ID NO: 226 - DNA, 2049 bp, Myceliophthora thermophilia
atgcagcttgccggattggtcctggctctcgccggcctggcggcgggcgagtccctcaaaaaacttgacaccagcctgaccatcctgaccaagaatgatctcctgggggcttccagccctgacgcggataccgccgtgattctcaccgacgcccgcccatatcagcatgtctctgacgtgtgccacaagctgggcgagcagctgtggcgacccgggaagggcactggcaagaagaacgaaagagacgctgcagctctgccgtttgcagagtacctgaaatatgacggtatggctgatgcgtcatccaagttctgggtcggtggttccggtttcgcggccgtagacctcgccggccgtcatcagaccgcggactcggtctcgcacttgcggctcccgggattgtgcgcaaacacggcaccattttcgaaccagagcgcgcaggacacgagctccaggtggcagatcagcctagaggtcaacaaccagactcttactgggtttcgcgaccgcctctctttccgctttctcggtatccgctatgccccgcagccgcagcggttcacctattctaccctgttcaaggggtctggcgaggcggcgtctgcgctctcgtacggctcgcagtgtatccaatcgggcggcggcagcgaggactgtttgttcctgaacatctggaccccctaccttcccaatcccaacactgcgccccagaagaagaagctccgtcccgtcggcgtgtggattcacggaggcgccttcaccggcggcaccgccaacgaccccacttttgacggtgccaacatggtatccagaggcgacatggtgttggtggccatcaactatcggctcttggctttcggtttcctcgccctcaaggacggcaagtcgaacggaaactacggcctggccgaccagatcaccgccctggactgggtgcgcaacaacatccatcactttggcggagacaaggaccgcatcaccgtctttggtcagtcggcgggcgctggctcggtacgggcgctgatagcctcgcccgaggccgccggcaagttctcgggcgccatcatgctgtccaatctcggtggtatcaactacgggaccacgtactctcagtactacaccatcgacgaagaagtcgatgtcgccgctaagcctatcctctccgcgaccaactgcgccaatgccgcctctcaggttgactgcctccgcgccgtcccggcatctaccctcgccacgttcggcgatgcccgctacctcgtcgtcgatggcacctatctcaagtcccgctcccttccggtgaccgggccccggctccctatcaagctgatgatgggcatcacccgcgacgacggcgcgcccttcatctcgttccccacgacgactaacgaatcagcctacctcgactcggtcggcctgccactcccctccccgaggctcttcccgattaccccgacgggcaacgccaccctcgatctctacacgacggcgtctcggatcgcgaccgacggcatctttcgatgcatagaccaagcgacggcctcttccctcctcacccacggccggctcgaccacatctacttctacgagtttgaccggacctaccagacgcagggctggccgggcatcgacgtgtgcgagccgccccgcacgccctcccacccggccggcgacccgtctaagccgtacctgcgctgccactcgggagagttgtactacgtctttggaaacctgcaccggcagggtctgccgatgcgggacgatggcgacttggcgtttgagcagagcgtcttggacagttttgcgtcgttcatccggacgggggacccgaatccggacgacgcctggttgaaggccaggggctaccagcagcagcaacaacaacaacaacaacaacaagggcggaagagagatcggtgggagccgagcaccaagcggggcgggttgaagttgagattactggattggcctgcttcaaggatgagcgggttccgcgaggagaagcagtgcgagagtctcggcttggggctgggcttttacgagggaaaataa

SEQ ID NO: 227 - protein, 682 aa, Myceliophthora thermophilia
MQLAGLVLALAGLAAGESLKKLDTSLTILTKNDLLGASSPDADTAVILTDARPYQHVSDVCHKLGEQLWRPGKGTGKKNERDAAALPFAEYLKYDGMADASSKFWVGGSGFAAVDLAGRHQTADSVSHLRLPGLCANTAPFSNQSAQDTSSRWQISLEVNNQTLTGFRDRLSFRFLGIRYAPQPQRFTYSTLFKGSGEAASALSYGSQCIQSGGGSEDCLFLNIWTPYLPNPNTAPQKKKLRPVGVWIHGGAFTGGTANDPTFDGANMVSRGDMVLVAINYRLLAFGFLALKDGKSNGNYGLADQITALDWVRNNIHHFGGDKDRITVFGQSAGAGSVRALIASPEAAGKFSGAIMLSNLGGINYGTTYSQYYTIDEEVDVAAKPILSATNCANAASQVDCLRAVPASTLATFGDARYLVVDGTYLKSRSLPVTGPRLPIKLMMGITRDDGAPFISFPTTTNESAYLDSVGLPLPSPRLFPITPTGNATLDLYTTASRIATDGIFRCIDQATASSLLTHGRLDHIYFYEFDRTYQTQGWPGIDVCEPPRTPSHPAGDPSKPYLRCHSGELYYVFGNLHRQGLPMRDDGDLAFEQSVLDSFASFIRTGDPNPDDAWLKARGYQQQQQQQQQQQGRKRDRWEPSTKRGGLKLRLLDWPASRMSGFREEKQCESLGLGLGFYEGK

SEQ ID NO: 228 - protein, 666 aa, Myceliophthora thermophilia
ESLKKLDTSLTILTKNDLLGASSPDADTAVILTDARPYQHVSDVCHKLGEQLWRPGKGTGKKNERDAAALPFAEYLKYDGMADASSKFWVGGSGFAAVDLAGRHQTADSVSHLRLPGLCANTAPFSNQSAQDTSSRWQISLEVNNQTLTGFRDRLSFRFLGIRYAPQPQRFTYSTLFKGSGEAASALSYGSQCIQSGGGSEDCLFLNIWTPYLPNPNTAPQKKKLRPVGVWIHGGAFTGGTANDPTFDGANMVSRGDMVLVAINYRLLAFGFLALKDGKSNGNYGLADQITALDWVRNNIHHFGGDKDRITVFGQSAGAGSVRALIASPEAAGKFSGAIMLSNLGGINYGTTYSQYYTIDEEVDVAAKPILSATNCANAASQVDCLRAVPASTLATFGDARYLVVDGTYLKSRSLPVTGPRLPIKLMMGITRDDGAPFISFPTTTNESAYLDSVGLPLPSPRLFPITPTGNATLDLYTTASRIATDGIFRCIDQATASSLLTHGRLDHIYFYEFDRTYQTQGWPGIDVCEPPRTPSHPAGDPSKPYLRCHSGELYYVFGNLHRQGLPMRDDGDLAFEQSVLDSFASFIRTGDPNPDDAWLKARGYQQQQQQQQQQQGRKRDRWEPSTKRGGLKLRLLDWPASRMSGFREEKQCESLGLGLGFYEGK

SEQ ID NO: 229 - DNA, 783 bp, Myceliophthora thermophilia
atgttgtcgggacttggggcagccgcccggtggttgatcacgttcgctttgaacaaaagtcctggcctccactggcgccagaggttggcattgacatttctgcaagcccagcgagccgctttcccaatccgtcatctccggtggctcacgcgacgcgtctcgacgggggaggcagtcgtgcgatattgttcgaaaaataagattccgcacaagtctgttgtcatcgacagtcccgctgccgcgtctggcattgagggtgtgcctgcggcaaccctccatctcctcactgttccgatagttgaggaggacgtacctggccgtaccttcctgtacttccacggcggtggcttcgtcaaccctcttcgcgacgttgcccacatgcctttcatcatgcaatgtgctgaggcatgtcacgccagacaagctgttatcctcgagtacgcgctcgctccagagcatccgtatcccgcgcagctagtgcagtgcgtcgcgacgctgcagtatcttctcggagagatgaagctccgtccggaagatattgttcttgcgggggacagtgcgggcgggcagttggtcggggcgctgctcgcgcatttggcacaaccgtcgccctacgccgcggccattacggttgacggccagttccgagctgcgctcttcgtgagcccgtttgtgaggatgcccccagatgaggggagctacgaggcaaatcacgggaaagattacctaaaccgcccccaggtggaccgcttcatgtcggcttggaaggggtcgaaagactag

SEQ ID NO: 230 - protein, 260 aa, Myceliophthora thermophilia
MLSGLGAAARWLITFALNKSPGLHWRQRLALTFLQAQRAAFPIRHLRWLTRRVSTGEAVVRYCSKNKIPHKSVVIDSPAAASGIEGVPAATLHLLTVPIVEEDVPGRTFLYFHGGGFVNPLRDVAHMPFIMQCAEACHARQAVILEYALAPEHPYPAQLVQCVATLQYLLGEMKLRPEDIVLAGDSAGGQLVGALLAHLAQPSPYAAAITVDGQFRAALFVSPFVRMPPDEGSYEANHGKDYLNRPQVDRFMSAWKGSKD

SEQ ID NO: 231 - protein, 244 aa, Myceliophthora thermophilia
LNKSPGLHWRQRLALTFLQAQRAAFPIRHLRWLTRRVSTGEAVVRYCSKNKIPHKSVVIDSPAAASGIEGVPAATLHLLTVPIVEEDVPGRTFLYFHGGGFVNPLRDVAHMPFIMQCAEACHARQAVILEYALAPEHPYPAQLVQCVATLQYLLGEMKLRPEDIVLAGDSAGGQLVGALLAHLAQPSPYAAAITVDGQFRAALFVSPFVRMPPDEGSYEANHGKDYLNRPQVDRFMSAWKGSKD

SEQ ID NO: 232 - DNA, 1731 bp, Myceliophthora thermophilia
atgaagggcttcaccaccttggtcaccgccgccctcctgggccgggctgttgcggcccctccggaaccgcccacgaagattgtcgagaagagggctgcccctacggtcaccatcgcttcaggctccatcgtcggcgtgagccgccaggccaccgaggccttcaacggcatcccctttgcggaaccgccggttggcccgctgagattgaagcctcccgtcaggctcaactcatctctgggcgtctttgatgccacggggattgccccggcttgtccgcagttctttgcggactcggactcgaacgatttcctgtccagggtcatagacaccgttaccagcttgcctttcttccagaaggccctcaaggtcagcgaagactgcctgaccatcaatgtcatacggccgaagggtaccaaggctggcgacaacttacccgtcctgttctggatctttggaggaggtttcgagctaggctggagctcgatgtatgacggcggccccctggtttcgaacgccatcgacatgggcaagccatacgtgttcgtggccgtcaactaccgtgtcggcggcttcggtttcatgccgggcaaggagatcctcgcggatggctcggccaacctcggccacctcgaccagcgcatgggtctcgagtgggttgccgacaacatcgcggcgtttggcggcgaccccaacaaggtgaccatctggggcgagtcggcgggcgccatctccgtcttcaaccagatggctctctacaacggcgacaacacgtacaagggcaagcccctcttccgcggcgccatcatgaactcaggcagcatcgtccctgccgacccggtcgactgcccgaagggtcaggccgtctacgaccaagtcgtggccaaggccggctgcgccggggccagcgacaccctggattgcctccgccaggcgccttacgacaagttcctcgccgccgccaactcggtcccggccatcctgtcgtacaactcggttgccctctcgtaccttccccgtcccgacggcaaggtgatcaccaagagcccggacgtcctggtcaaggagggtaagtacgcggccgtgcccatgatcatcggtgatcaggaggacgagggcacgctcttcgccttgttccagtccaacgtcacaagcaccgacaagctcgtggagtatctcggcggtctcttcttccacggggccaccaccgagcagatcgagggtctcgtcaatacctattccacctcgatcctggcgggctcgccgttccgcagcggcatcttgaacgagatctacccgggcttcaagcggctcgccgccatcctgggcgacctcgtcttcaccctgacccgccgcgtcttcctcgaggccgccacgacggtgaaccccaacgtcccggcgtggtcgtacctggccagctacgacgagggcaccccgatcctgggcacgttccacggcagcgacctcctgcaggtcttctacggcatcctgcccaactacgcgagcaagagcatccagagctactacgccaactttgtctacaacctggaccccaacgacgcgagcggcggcaccagcgccaagagcaaggtcgccgagagctggccgcgctggaccggcacggagcgcaagctcatcaacttcttctccaaccggagcggctatctgaatgatgacttccggtccgagtcggccaactacattagctcgaacgtgggagctctttacatttga

SEQ ID NO: 233 - protein, 576 aa, Myceliophthora thermophilia
MKGFTTLVTAALLGRAVAAPPEPPTKIVEKRAAPTVTIASGSIVGVSRQATEAFNGIPFAEPPVGPLRLKPPVRLNSSLGVFDATGIAPACPQFFADSDSNDFLSRVIDTVTSLPFFQKALKVSEDCLTINVIRPKGTKAGDNLPVLFWIFGGGFELGWSSMYDGGPLVSNAIDMGKPYVFVAVNYRVGGFGFMPGKEILADGSANLGHLDQRMGLEWVADNIAAFGGDPNKVTIWGESAGAISVFNQMALYNGDNTYKGKPLFRGAIMNSGSIVPADPVDCPKGQAVYDQVVAKAGCAGASDTLDCLRQAPYDKFLAAANSVPAILSYNSVALSYLPRPDGKVITKSPDVLVKEGKYAAVPMIIGDQEDEGTLFALFQSNVTSTDKLVEYLGGLFFHGATTEQIEGLVNTYSTSILAGSPFRSGILNEIYPGFKRLAAILGDLVFTLTRRVFLEAATTVNPNVPAWSYLASYDEGTPILGTFHGSDLLQVFYGILPNYASKSIQSYYANFVYNLDPNDASGGTSAKSKVAESWPRWTGTERKLINFFSNRSGYLNDDFRSESANYISSNVGALYI

SEQ ID NO: 234 - protein, 558 aa, Myceliophthora thermophilia
APPEPPTKIVEKRAAPTVTIASGSIVGVSRQATEAFNGIPFAEPPVGPLRLKPPVRLNSSLGVFDATGIAPACPQFFADSDSNDFLSRVIDTVTSLPFFQKALKVSEDCLTINVIRPKGTKAGDNLPVLFWIFGGGFELGWSSMYDGGPLVSNAIDMGKPYVFVAVNYRVGGFGFMPGKEILADGSANLGHLDQRMGLEWVADNIAAFGGDPNKVTIWGESAGAISVFNQMALYNGDNTYKGKPLFRGAIMNSGSIVPADPVDCPKGQAVYDQVVAKAGCAGASDTLDCLRQAPYDKFLAAANSVPAILSYNSVALSYLPRPDGKVITKSPDVLVKEGKYAAVPMIIGDQEDEGTLFALFQSNVTSTDKLVEYLGGLFFHGATTEQIEGLVNTYSTSILAGSPFRSGILNEIYPGFKRLAAILGDLVFTLTRRVFLEAATTVNPNVPAWSYLASYDEGTPILGTFHGSDLLQVFYGILPNYASKSIQSYYANFVYNLDPNDASGGTSAKSKVAESWPRWTGTERKLINFFSNRSGYLNDDFRSESANYISSNVGALYI

SEQ ID NO: 235 - DNA, 2157 bp, Myceliophthora thermophilia
atgtgcggcgtgccccagataaagcgccgggttacccgcaggagaatgttgacctggtcgtggttctccgcagtcgccgtactgctgctgctctcgctctacctctacggcttcggatacgggtcaggccggcagcgggtgtctggtccgccgctggatgtgggcaaggacgacgccgagaagcccgcagcaacaacagcaacaacagcaacagcaacaacaacgacaaccaaaactactgcgacagacaccgtcaccactaccaccactgctgctcccaccgccggtcccatgcccacaacacacaaacccggcggcactgccgcagcccgccccgccgtcgttcttcggcagggcacctacatcggcaccacgctgctggcctcgcaccgcttccccagggctctcgacgcctttcgcggcgtgccatacgcccaggacacgagcggcccgaaccggttccgtccgccccagccgctgccagagtccacagaggtctttgatgcggtaaggtggggcaagatatgccccaacgacggagtggtgctgcgcaacatgagcgagaactgtctgaacgccaacatctaccggcccgccggcttggtcgaccgggatgggtacgagaagacggccgacggcaccaggaggcggccgcgcctgcccgtcgtcgtgtacatccacggcggcggcttcaacaagggcaacgggaccgagcgcaacatggccagcttcgccgcctggtccaaggaacccatagtgtccgtcagcttcaactaccgcgtcggcgcgctgggcttcctgccgtccgacgtgaccgcccgggaagggctgctgaacctgggcctgcgcgaccagcagatgctgctggactgggttcaggaaaacatcgaggccttcggcggcgaccccaagaacgtgagcgttatgggcctcagcgcgggggcgcactcgatcggccaccacattatgtactactccagcaggtccaccccgccccccttcatcaaggccatcctcgagtccggtgcgaccacggcccgtgccgtgttctacccgacccaccctcgccacctcgtccagttccgcgagttcctcatcgccgccggcgtcgccggcattcccgagtcggagctgttcgaccacctccgcaagctgcctctcgagaccatcgtgcgcgcctccaaggtcgtctgggacaagtacgtcgacagcgtgacctggcccttccagcccgtcatcgacagccccaaccacctggcccagtcgagccacgccgagctcgacgccccccgcccgccgctgatccccgacctccccatcaagtcgtggctcgccggcaaccacctccgcatccccgtcataaccggcttcagcaccaacgaggggaccatgttcatcccccacaacgccgacacggcggccgacttccgctccttcttccagaccctcatccccaccctcaccccgggcgacctcgacgagctcgaggccctctacccggaccccgtcagggtgcccacgagcccctaccgccgcggcatcccgcccggcgcgggcaggcagtgggcgcgcctcgacgccgcctactcgcactacgcctacatctgccccgtcctgcagacggcccactacatgtccctgtcgggcgtcggccccgtctacgtctaccgctacgccgccacctcgtccaacggcacggccaaccacggcgacgaggcccccgccgtcgcccacgacgtcatggagctccgcggccgcgtcggcatgcgcgccatcgcccgcgccatgcacggccgctgggcgcgcttcgtggccagcgacgcgtccagtccggacatcatcagtgcccaccaacacccccataagaaggagaggagcggcagcgtcaacgacgcggacgactacgacgaggtcgagtggccgcctttcgtctcgccgttcgggcccgacggcgaccgcgagggcacgggcaagatcatggtgttcggggaaggcaacgacgagatgggcggggggtggcaccggggggtgccggccaaggtggtcgagatgacggagctcgagaaggaggcgtgccggttctggtggccgagggtctggctgagcgaggggatgggttggaaagatgggaagcgctcggccgaggtgaggctatga

SEQ ID NO: 236 - protein, 718 aa, Myceliophthora thermophilia
MCGVPQIKRRVTRRRMLTWSWFSAVAVLLLLSLYLYGFGYGSGRQRVSGPPLDVGKDDAEKPAATTATTATATTTTTKTTATDTVTTTTTAAPTAGPMPTTHKPGGTAAARPAVVLRQGTYIGTTLLASHRFPRALDAFRGVPYAQDTSGPNRFRPPQPLPESTEVFDAVRWGKICPNDGVVLRNMSENCLNANIYRPAGLVDRDGYEKTADGTRRRPRLPVVVYIHGGGFNKGNGTERNMASFAAWSKEPIVSVSFNYRVGALGFLPSDVTAREGLLNLGLRDQQMLLDWVQENIEAFGGDPKNVSVMGLSAGAHSIGHHIMYYSSRSTPPPFIKAILESGATTARAVFYPTHPRHLVQFREFLIAAGVAGIPESELFDHLRKLPLETIVRASKVVWDKYVDSVTWPFQPVIDSPNHLAQSSHAELDAPRPPLIPDLPIKSWLAGNHLRIPVITGFSTNEGTMFIPHNADTAADFRSFFQTLIPTLTPGDLDELEALYPDPVRVPTSPYRRGIPPGAGRQWARLDAAYSHYAYICPVLQTAHYMSLSGVGPVYVYRYAATSSNGTANHGDEAPAVAHDVMELRGRVGMRAIARAMHGRWARFVASDASSPDIISAHQHPHKKERSGSVNDADDYDEVEWPPFVSPFGPDGDREGTGKIMVFGEGNDEMGGGWHRGVPAKVVEMTELEKEACRFWWPRVWLSEGMGWKDGKRSAEVRL

SEQ ID NO: 237 - protein, 681 aa, Myceliophthora thermophilia
FGYGSGRQRVSGPPLDVGKDDAEKPAATTATTATATTTTTKTTATDTVTTTTTAAPTAGPMPTTHKPGGTAAARPAVVLRQGTYIGTTLLASHRFPRALDAFRGVPYAQDTSGPNRFRPPQPLPESTEVFDAVRWGKICPNDGVVLRNMSENCLNANIYRPAGLVDRDGYEKTADGTRRRPRLPVVVYIHGGGFNKGNGTERNMASFAAWSKEPIVSVSFNYRVGALGFLPSDVTAREGLLNLGLRDQQMLLDWVQENIEAFGGDPKNVSVMGLSAGAHSIGHHIMYYSSRSTPPPFIKAILESGATTARAVFYPTHPRHLVQFREFLIAAGVAGIPESELFDHLRKLPLETIVRASKVVWDKYVDSVTWPFQPVIDSPNHLAQSSHAELDAPRPPLIPDLPIKSWLAGNHLRIPVITGFSTNEGTMFIPHNADTAADFRSFFQTLIPTLTPGDLDELEALYPDPVRVPTSPYRRGIPPGAGRQWARLDAAYSHYAYICPVLQTAHYMSLSGVGPVYVYRYAATSSNGTANHGDEAPAVAHDVMELRGRVGMRAIARAMHGRWARFVASDASSPDIISAHQHPHKKERSGSVNDADDYDEVEWPPFVSPFGPDGDREGTGKIMVFGEGNDEMGGGWHRGVPAKVVEMTELEKEACRFWWPRVWLSEGMGWKDGKRSAEVRL

SEQ ID NO: 238 - DNA, 1098 bp, Myceliophthora thermophilia
atgcttcgccatctcaacaacctcctcatcctcctccgcctccgtcgcgcctccccctggaatcctcggaccccgctcgactggctgctcgcctccccgctccagtggctcacctcgctgctctaccgccacgtcctgctccccctccgcggccggcccttccatcctccgtcgcggcacggccggggcccggtcggcagcagcagcagcagcagcagaagcagcagcaggtggaggaggaggcgcccgatccgcgtcgtctgcctctccgacacccacaacctcgtcccggaccaccgctcccccaccaccgccatcccggacggcgacctgctcatccactgcggtgacctgaccgtcggcggaacaccggccgagatccagcggcaggtcgactggctgcgcgggctcggccatcgctggaaagtcgtcgtcgggggtaatcacgactcgtggctcgacgagcgggtgagaacgcggacgggtgaagaggagggcggggaggaggaggaggaggagggcggggaggtggattggaccgggatcgagtacctctgcgacagggcggtcgagctcgagttcgaaggcggcaggcggctcaacgtgtacgggttcggggcggtgccgcggtgcggcgaggggttcgcattccagtatgacagggacaagcatccatggcggggacgggtgccggaggagacggatgtcttggtgacgcacacgccgccggcttaccacctcgacctcggcctcggctgcgccggcctgctcgacgaggtctggcgcgtcaagcccaagctgcacgtcttcgggcacgtccactacggccacggcaaggaggccgtctactacgacgagtgccagcgggcgtacgagtcgctcatggcgcggccggccgcggggcccctgcgggacctcgtgtcggtcgcccgctggagggacgccttcaacgtgctctggtacggcgtcgccagcatcctgtggaagtggatcatgctcggcccgggcaccaacaacggcgccctcatggtcaacgcgtcgctgatgtacgggaacagcgggcgcctacggaatcctgccatagtggtggatctgtag

SEQ ID NO: 239 - protein, 365 aa, Myceliophthora thermophilia
MLRHLNNLLILLRLRRASPWNPRTPLDWLLASPLQWLTSLLYRHVLLPLRGRPFHPPSRHGRGPVGSSSSSSRSSSRWRRRRPIRVVCLSDTHNLVPDHRSPTTAIPDGDLLIHCGDLTVGGTPAEIQRQVDWLRGLGHRWKVVVGGNHDSWLDERVRTRTGEEEGGEEEEEEGGEVDWTGIEYLCDRAVELEFEGGRRLNVYGFGAVPRCGEGFAFQYDRDKHPWRGRVPEETDVLVTHTPPAYHLDLGLGCAGLLDEVWRVKPKLHVFGHVHYGHGKEAVYYDECQRAYESLMARPAAGPLRDLVSVARWRDAFNVLWYGVASILWKWIMLGPGTNNGALMVNASLMYGNSGRLRNPAIVVDL

SEQ ID NO: 240 - protein, 348 aa, Myceliophthora thermophilia
SPWNPRTPLDWLLASPLQWLTSLLYRHVLLPLRGRPFHPPSRHGRGPVGSSSSSSRSSSRWRRRRPIRVVCLSDTHNLVPDHRSPTTAIPDGDLLIHCGDLTVGGTPAEIQRQVDWLRGLGHRWKVVVGGNHDSWLDERVRTRTGEEEGGEEEEEEGGEVDWTGIEYLCDRAVELEFEGGRRLNVYGFGAVPRCGEGFAFQYDRDKHPWRGRVPEETDVLVTHTPPAYHLDLGLGCAGLLDEVWRVKPKLHVFGHVHYGHGKEAVYYDECQRAYESLMARPAAGPLRDLVSVARWRDAFNVLWYGVASILWKWIMLGPGTNNGALMVNASLMYGNSGRLRNPAIVVDL

SEQ ID NO: 241 - DNA, 165 bp, Myceliophthora thermophilia
atgcctgtcccctttctggggcgcctcaacgtcaccgaatatgctgccctcgtcggatccttccttctcgtaggccttgaggccttcgtccgcattttcacgctcgcgctacgtgagcacccgcccctgaccatcaacaacgccccgccccgctcgcccgtctaa

SEQ ID NO: 242 - protein, 54 aa, Myceliophthora thermophilia
MPVPFLGRLNVTEYAALVGSFLLVGLEAFVRIFTLALREHPPLTINNAPPRSPV

SEQ ID NO: 243 - protein, 26 aa, Myceliophthora thermophilia
FVRIFTLALREHPPLTINNAPPRSPV

SEQ ID NO: 244 - DNA, 1761 bp, Myceliophthora thermophilia
atgacgcgacgcatcgtccgcacaatagtgcaaacctctaccgccaccatcttcaccctgattgtcatcttcttcctcgaccgcaacttccgcgtgctgcccaatgccatacacgagtacatgccgagccaccatgcgggcaccgtcatcaccgacgtcacgctgaccaagtgctcgtccctcaaccccttctcgtcgtgcaagctcgacgccgccgcctggcaccgcatcgagaaggacttgtacctgcgccgcgccacgttctcgtcggcctacctgcacgtccagcgcaagcgcgaggaggagctgacgcccgaggacaaggtcgtcgtggacgtcagcgtgggacggctgaacccggatgacgtggctgccaagagcagtacgaataacaggagagggaggaggacgagcgccgtggaggcggcggcggcggcggcggcggctgctccggaggccggggaggcgggcggtgagtatagccacgggaagatcgagggggagtgggaacagaggccgggtgggatctggatcaagcggagcaaccggcgcggcgtgagcgattccaaggatgcggtgaccggcctggacgtgctgtttggggacgatgcggtcgaggcgcggcccgggtgggagatgacggggacggcgatgctcttggatgcgggatcggggattcccgaggcccacatcacgatccggaggggcgccgaacaagagccgcacaaaccggtgccgaggatcatggagaatgggcggttcaagatcatgcaactggcggacctgcacctgagtacgggcgtgggacattgccgggacgccctgcccgaggattggaatggcgggaagtgcttggcggaccctaggacgctggacttcgtagagaagatcctggaggaggagaggccgaatctggtggtgctcagcggagaccaggtgaatggggagaccgcgccagatgcgcagacggccatcttcaagtacgcgcaactcctcatcaagcacaagatcccgtacgcttccatcttcggcaaccacgacgacgagggatccatgtcgcgtgccgcgcagatggaactcatcgaacagctcccctactctctgtccaaagccggccccgctgacgttgacggagtgggcaactactatatcgaggtgctggcccgcggcagctcgggtcactcggccatcactgtgtaccttctcgactcgcactcgtactcgcccaacgagcgcaagttcaaggggtatgactggatcaagcagagccagatcgactggttccgcaatacggcccggagcctcaagaggagccacgaggagtacacgcatcatcatatggacgtggcgttcatccatattcccattccggagtacacactgccgaacctgacgctggtgggcgagtggaaggagccgagcacagcgccggcttataattccggcttttacgacgcgctggtggaggaggggatatctatggtcagttgcgggcacgaccacgtgaacgagtactgcggcctgtcccagacggaagacgaaaagcccgccctctggatgtgctacgccggggcggccgggttcggcggctacgcgggctacggcggcttccaccgcaagatccgcatcttcgacttcaacatgaacgaggcgcgcatcacgacctggaagcgcgtcgagtacgggccggatgtggataagaggctcgaggaactgattctggtcgacgcgggcaaggtggtggcgccaatgcggcagtaa

SEQ ID NO: 245 - protein, 586 aa, Myceliophthora thermophilia
MTRRIVRTIVQTSTATIFTLIVIFFLDRNFRVLPNAIHEYMPSHHAGTVITDVTLTKCSSLNPFSSCKLDAAAWHRIEKDLYLRRATFSSAYLHVQRKREEELTPEDKVVVDVSVGRLNPDDVAAKSSTNNRRGRRTSAVEAAAAAAAAAPEAGEAGGEYSHGKIEGEWEQRPGGIWIKRSNRRGVSDSKDAVTGLDVLFGDDAVEARPGWEMTGTAMLLDAGSGIPEAHITIRRGAEQEPHKPVPRIMENGRFKIMQLADLHLSTGVGHCRDALPEDWNGGKCLADPRTLDFVEKILEEERPNLVVLSGDQVNGETAPDAQTAIFKYAQLLIKHKIPYASIFGNHDDEGSMSRAAQMELIEQLPYSLSKAGPADVDGVGNYYIEVLARGSSGHSAITVYLLDSHSYSPNERKFKGYDWIKQSQIDWFRNTARSLKRSHEEYTHHHMDVAFIHIPIPEYTLPNLTLVGEWKEPSTAPAYNSGFYDALVEEGISMVSCGHDHVNEYCGLSQTEDEKPALWMCYAGAAGFGGYAGYGGFHRKIRIFDFNMNEARITTWKRVEYGPDVDKRLEELILVDAGKVVAPMRQ

SEQ ID NO: 246 - protein, 552 aa, Myceliophthora thermophilia
NAIHEYMPSHHAGTVITDVTLTKCSSLNPFSSCKLDAAAWHRIEKDLYLRRATFSSAYLHVQRKREEELTPEDKVVVDVSVGRLNPDDVAAKSSTNNRRGRRTSAVEAAAAAAAAAPEAGEAGGEYSHGKIEGEWEQRPGGIWIKRSNRRGVSDSKDAVTGLDVLFGDDAVEARPGWEMTGTAMLLDAGSGIPEAHITIRRGAEQEPHKPVPRIMENGRFKIMQLADLHLSTGVGHCRDALPEDWNGGKCLADPRTLDFVEKILEEERPNLVVLSGDQVNGETAPDAQTAIFKYAQLLIKHKIPYASIFGNHDDEGSMSRAAQMELIEQLPYSLSKAGPADVDGVGNYYIEVLARGSSGHSAITVYLLDSHSYSPNERKFKGYDWIKQSQIDWFRNTARSLKRSHEEYTHHHMDVAFIHIPIPEYTLPNLTLVGEWKEPSTAPAYNSGFYDALVEEGISMVSCGHDHVNEYCGLSQTEDEKPALWMCYAGAAGFGGYAGYGGFHRKIRIFDFNMNEARITTWKRVEYGPDVDKRLEELILVDAGKVVAPMRQ

SEQ ID NO: 247 - DNA, 1314 bp, Myceliophthora thermophilia
atgaccacttacaccagggcgcgccccacgatgatgcgggtcttcctcgttcaaaccgcgcagggtctgactccctcgtcgggtggttacaaggcaaacgtcagccttctccgcagcctgagcatgcagggccacgcgactgcccagatctgctatgctgttgaggacgaaattgaccagtacgctagacgtgccgagctcaaagggattagccccaacattacccacaagccgctgcccgtcgtcgacccggccggcaaggtccatgagctgtatgtcaagacgttcaccgatgagtacaaggttcacaacgtggtcatttcgcgcaccgagttcaacgcagcctatccgcgtgacgagctcacaagccgcatggccacccttatcaaccttttttcggagcacatcgccagtttccagccgacccatgtcatcttcaacgacccgattaccatgaagattaccgagtcgcatgagattcgcgacacgttcaagcgcatcaacatcatccacacggcagagcagctgccctttggtccgtttgtcgccggtgtcgacggccattgcttgtcgccggtggtcgagaacaagatgttgcgagagctggatgggatctggtccgtttctaaggcggtccaagattacgcctggaagtacggccgcctgaagaccacattcctcgttcatccctgcatgacctacttggatcagacgtctgggggcatgcctcgcattcgcaacaacatcgacaaagaagaaattggcatggtcaatccctgcccgcacaaaggcctgtcgattctgatcgcgctcgctcagaagtttccccacatgaagtttgtcacctggaagagctggggctccagaaccgctcatgtccagcagctgcaggctcttcccaatgtgaaaatcgagccgactacccggaacaccgacgagatctgggaccgtgtcaaggttctccttgccccatccctgtggtacgaggcctggggaattgttgtcactgaggctcagttgcggggcatccccgtcattgcgtccaacgctggtggccttcccgaagcgaagatcggccttccctactgcatccctgtcaaggaagtcactggtgagcgccatgccaacggcgactacgtggtgcctgatcaggacattggcccgtgggaagatgctcttcaaaaggtcatgaccgatagggaggagtaccaggccctgcagatactcactgccaccaaggccggcgagtggctccgcagtctggaccctcgtgctcacgagaagtggctcctctctatgatggaacaggcgtaa

SEQ ID NO: 248 - protein, 437 aa, Myceliophthora thermophilia
MTTYTRARPTMMRVFLVQTAQGLTPSSGGYKANVSLLRSLSMQGHATAQICYAVEDEIDQYARRAELKGISPNITHKPLPVVDPAGKVHELYVKTFTDEYKVHNVVISRTEFNAAYPRDELTSRMATLINLFSEHIASFQPTHVIFNDPITMKITESHEIRDTFKRINIIHTAEQLPFGPFVAGVDGHCLSPVVENKMLRELDGIWSVSKAVQDYAWKYGRLKTTFLVHPCMTYLDQTSGGMPRIRNNIDKEEIGMVNPCPHKGLSILIALAQKFPHMKFVTWKSWGSRTAHVQQLQALPNVKIEPTTRNTDEIWDRVKVLLAPSLWYEAWGIVVTEAQLRGIPVIASNAGGLPEAKIGLPYCIPVKEVTGERHANGDYVVPDQDIGPWEDALQKVMTDREEYQALQILTATKAGEWLRSLDPRAHEKWLLSMMEQA

SEQ ID NO: 249 - protein, 415 aa, Myceliophthora thermophilia
LTPSSGGYKANVSLLRSLSMQGHATAQICYAVEDEIDQYARRAELKGISPNITHKPLPVVDPAGKVHELYVKTFTDEYKVHNVVISRTEFNAAYPRDELTSRMATLINLFSEHIASFQPTHVIFNDPITMKITESHEIRDTFKRINIIHTAEQLPFGPFVAGVDGHCLSPVVENKMLRELDGIWSVSKAVQDYAWKYGRLKTTFLVHPCMTYLDQTSGGMPRIRNNIDKEEIGMVNPCPHKGLSILIALAQKFPHMKFVTWKSWGSRTAHVQQLQALPNVKIEPTTRNTDEIWDRVKVLLAPSLWYEAWGIVVTEAQLRGIPVIASNAGGLPEAKIGLPYCIPVKEVTGERHANGDYVVPDQDIGPWEDALQKVMTDREEYQALQILTATKAGEWLRSLDPRAHEKWLLSMMEQA

SEQ ID NO: 250 - DNA, 612 bp, Myceliophthora thermophilia
atggcacggctccagacactgctcgcaggcctcctcggcttgtccgtctcgacacaaacccagaccgcgactgcatcgcccgcaagtccccgagaggtcgaggcgcgacactggcccagccgagacaagtcgcatcaccacgactgcaacggcacccccgcgcccatcaaccagcggacggcgcaggaggtgattacgcagctcaaccttgtcccgaacgtggagaagggttactacgtcgagacgttccgggacgcctacaacgtgacggccgaccgctccgccagcacggccatctactacctactcgagggccgcgaaggccactccaactggcaccgcgtcgacgccgtcgaggtgtggcactactacgccggcgcccccctgaccctctccctcgcccgcgacgacggctcgcccgtgcgcgaggtcacgctcggcccggacgtctttgacggccagcagccccaggtcgccatcgccaagtgggagtggcagagggcccggagcctcggagagtggaccctcgtcggcaccaccgtcgcgccgggttttgacccgagcgggttcgaaatggctgaacctggctggacgccggacgcgtcccgataa

SEQ ID NO: 251 - protein, 203 aa, Myceliophthora thermophilia
MARLQTLLAGLLGLSVSTQTQTATASPASPREVEARHWPSRDKSHHHDCNGTPAPINQRTAQEVITQLNLVPNVEKGYYVETFRDAYNVTADRSASTAIYYLLEGREGHSNWHRVDAVEVWHYYAGAPLTLSLARDDGSPVREVTLGPDVFDGQQPQVAIAKWEWQRARSLGEWTLVGTTVAPGFDPSGFEMAEPGWTPDASR

SEQ ID NO: 252 - protein, 181 aa, Myceliophthora thermophilia
ATASPASPREVEARHWPSRDKSHHHDCNGTPAPINQRTAQEVITQLNLVPNVEKGYYVETFRDAYNVTADRSASTAIYYLLEGREGHSNWHRVDAVEVWHYYAGAPLTLSLARDDGSPVREVTLGPDVFDGQQPQVAIAKWEWQRARSLGEWTLVGTTVAPGFDPSGFEMAEPGWTPDASR

SEQ ID NO: 253 - DNA, 678 bp, Myceliophthora thermophilia
atgaagtctgccctcgtcgcgaccatcgccgccttcgcggccggcgtgcaagccgccgtccaaggcttcgacatttcccactaccagcccagcgtggacttcgccgcggcctacaaatcgggtgcccgcttcgtcatcattaaggcgaccgagggcacgtcgtacatcgatcccaagttctcgtcgcactacacgggcgcgaccaaggccggcttcatccggggcgcgtaccactttgcgcacccgggccagtcgtcgggcgaggcgcaggccgactacttcctcgcgcacggcggtgggtggacgagcgacggcatcacgctgccgggtatgctggacctcgaggcctacaacgcaggccagtgctggggcctgtcgacgagcgccatggtcgcgtggatcaaggcgttcagcgaccgctaccactcgcgcaccggcgtctacccgctgctctacaccaacccgtcctggtggaaggcctgcaccggcaactccaacgccttcgtcaacaccaacccgctcgtcctcgctcgctacgccagctcgcccggcgagatccccggcggctggccgtaccagaccatctggcagaactcggactcgtacgcctacggcggcgactcggacatcttcaacggcgacctcgacggtctcaagaggctggcgaagggtccatga

SEQ ID NO: 254 - protein, 225 aa, Myceliophthora thermophilia
MKSALVATIAAFAAGVQAAVQGFDISHYQPSVDFAAAYKSGARFVIIKATEGTSYIDPKFSSHYTGATKAGFIRGAYHFAHPGQSSGEAQADYFLAHGGGWTSDGITLPGMLDLEAYNAGQCWGLSTSAMVAWIKAFSDRYHSRTGVYPLLYTNPSWWKACTGNSNAFVNTNPLVLARYASSPGEIPGGWPYQTIWQNSDSYAYGGDSDIFNGDLDGLKRLAKGP

SEQ ID NO: 255 - protein, 207 aa, Myceliophthora thermophilia
AVQGFDISHYQPSVDFAAAYKSGARFVIIKATEGTSYIDPKFSSHYTGATKAGFIRGAYHFAHPGQSSGEAQADYFLAHGGGWTSDGITLPGMLDLEAYNAGQCWGLSTSAMVAWIKAFSDRYHSRTGVYPLLYTNPSWWKACTGNSNAFVNTNPLVLARYASSPGEIPGGWPYQTIWQNSDSYAYGGDSDIFNGDLDGLKRLAKGP

SEQ ID NO: 256 - DNA, 837 bp, Myceliophthora thermophilia
atgttttctctcaagttctttatcttggccggtgggcttgctgtcctcaccgaggctcacataagactagtgtcgcccgccccttttaccaaccctgaccagggccccagcccactcctagaggctggcagcgactatccctgccacaacggcaatgggggcggttatcagggaacgccaacccagatggcaaagggttctaagcagcagctagccttccaggggtctgccgttcatgggggtggctcctgccaagtgtccatcacctacgacgaaaacccgaccgctcagagctccttcaaggtcattcactcgattcaaggtggctgccccgccagggccgagacgatcccggattgcagcgcacaaaatatcaacgcctgcaatataaagcccgataatgcccagatggacaccccggataagtatgagttcacgatcccggaggatctccccagtggcaaggccaccctcgcctggacatggatcaacactatcggcaaccgcgagttttatatggcatgcgccccggttgagatcaccggcgacggcggtagcgagtcggctctggctgcgctgcccgacatggtcattgccaacatcccgtccatcggaggaacctgcgcgaccgaggaggggaagtactacgaatatcccaaccccggtaagtcggtcgaaaccatcccgggctggaccgatttggttcccctgcaaggcgaatgcggtgctgcctccggtgtctcgggctccggcggaaacgccagcagtgctacccctgccgcaggggccgccccgactcctgctgtccgcggccgccgtcccacctggaacgcctaa

SEQ ID NO: 257 - protein, 278 aa, Myceliophthora thermophilia
MFSLKFFILAGGLAVLTEAHIRLVSPAPFTNPDQGPSPLLEAGSDYPCHNGNGGGYQGTPTQMAKGSKQQLAFQGSAVHGGGSCQVSITYDENPTAQSSFKVIHSIQGGCPARAETIPDCSAQNINACNIKPDNAQMDTPDKYEFTIPEDLPSGKATLAWTWINTIGNREFYMACAPVEITGDGGSESALAALPDMVIANIPSIGGTCATEEGKYYEYPNPGKSVETIPGWTDLVPLQGECGAASGVSGSGGNASSATPAAGAAPTPAVRGRRPTWNA

SEQ ID NO: 258 - protein, 259 aa, Myceliophthora thermophilia
HIRLVSPAPFTNPDQGPSPLLEAGSDYPCHNGNGGGYQGTPTQMAKGSKQQLAFQGSAVHGGGSCQVSITYDENPTAQSSFKVIHSIQGGCPARAETIPDCSAQNINACNIKPDNAQMDTPDKYEFTIPEDLPSGKATLAWTWINTIGNREFYMACAPVEITGDGGSESALAALPDMVIANIPSIGGTCATEEGKYYEYPNPGKSVETIPGWTDLVPLQGECGAASGVSGSGGNASSATPAAGAAPTPAVRGRRPTWNA

SEQ ID NO: 259 - DNA, 681 bp, Myceliophthora thermophilia
atggttaccctcactcgcctggcggtcgccgcggcggccatgatctccagcactggcctggctgccccgacgcccgaagctggccccgaccttcccgactttgagctcggggtcaacaacctcgcccgccgcgcgctggactacaaccagaactacaggaccagcggcaacgtcaactactcgcccaccgacaacggctactcggtcagcttctccaacgcgggagattttgtcgtcgggaagggctggaggacgggagccaccagaaacatcaccttctcgggatcgacacagcatacctcgggcaccgtgctcgtctccgtctacggctggacccggaacccgctgatcgagtactacgtgcaggagtacacgtccaacggggccggctccgctcagggcgagaagctgggcacggtcgagagcgacgggggcacgtacgagatctggcggcaccagcaggtcaaccagccgtcgatcgagggcacctcgaccttctggcagtacatctcgaaccgcgtgtccggccagcggcccaacggcggcaccgtcaccctcgccaaccacttcgccgcctggcagaagctcggcctgaacctgggccagcacgactaccaggtcctggccaccgagggctggggcaacgccggcggcagctcccagtacaccgtcagcggctga

SEQ ID NO: 260 - protein, 226 aa, Myceliophthora thermophilia
MVTLTRLAVAAAAMISSTGLAAPTPEAGPDLPDFELGVNNLARRALDYNQNYRTSGNVNYSPTDNGYSVSFSNAGDFVVGKGWRTGATRNITFSGSTQHTSGTVLVSVYGWTRNPLIEYYVQEYTSNGAGSAQGEKLGTVESDGGTYEIWRHQQVNQPSIEGTSTFWQYISNRVSGQRPNGGTVTLANHFAAWQKLGLNLGQHDYQVLATEGWGNAGGSSQYTVSG

SEQ ID NO: 261 - protein, 205 aa, Myceliophthora thermophilia
APTPEAGPDLPDFELGVNNLARRALDYNQNYRTSGNVNYSPTDNGYSVSFSNAGDFVVGKGWRTGATRNITFSGSTQHTSGTVLVSVYGWTRNPLIEYYVQEYTSNGAGSAQGEKLGTVESDGGTYEIWRHQQVNQPSIEGTSTFWQYISNRVSGQRPNGGTVTLANHFAAWQKLGLNLGQHDYQVLATEGWGNAGGSSQYTVSG

SEQ ID NO: 262 - DNA, 837 bp, Myceliophthora thermophilia
atggttgctctctcttctctcctcgtcgctgcctctgcggcggccgtggccgtggctgcgccgagcgaggccctccagaagcgccagacgctcacgagcagccagacgggcttccacgacggcttttactactccttctggaccgacggtgccggcaacgtccggtacacgaacgaggccggcggccggtacagtgtcacctggtccggcaacaacggcaactgggttggcggcaagggctggaacccgggggctgctcgcaacatcagcttcacggggcagtataaccccaacggcaactcgtacctggccgtgtacgggtggacgcgcaacccgctgatcgagtactacatcgtcgagaacttcggcacgtacgacccgtcgacgggggcgcagcggctcggcagcatcacggtggacgggtcgacgtacaacatcctcaagacgacgcgggtcaaccagccgtccatcgagggcaccagcacctttgaccagttctggtccgtccggaccaacaagcgcagcagcggctccgtcaacgtcaaggctcacttcgacgcttgggcccaggccggcctccgcctgggcacccacgactaccagatcatggccaccgagggctacttctcgagcggctccgccaccatcaccgtcggcgagggcaccagcagcggcggcggcggcgacaatggcggcggcaacaacggcggcggcggcaacaccggcacctgcagcgccctgtacggccagtgcggtggccaggggtggacgggcccgacttgctgctcccagggaacctgccgcgtctccaaccagtggtactcgcagtgcttgtaa

SEQ ID NO: 263 - protein, 278 aa, Myceliophthora thermophilia
MVALSSLLVAASAAAVAVAAPSEALQKRQTLTSSQTGFHDGFYYSFWTDGAGNVRYTNEAGGRYSVTWSGNNGNWVGGKGWNPGAARNISFTGQYNPNGNSYLAVYGWTRNPLIEYYIVENFGTYDPSTGAQRLGSITVDGSTYNILKTTRVNQPSIEGTSTFDQFWSVRTNKRSSGSVNVKAHFDAWAQAGLRLGTHDYQIMATEGYFSSGSATITVGEGTSSGGGGDNGGGNNGGGGNTGTCSALYGQCGGQGWTGPTCCSQGTCRVSNQWYSQCL

SEQ ID NO: 264 - protein, 259 aa, Myceliophthora thermophilia
APSEALQKRQTLTSSQTGFHDGFYYSFWTDGAGNVRYTNEAGGRYSVTWSGNNGNWVGGKGWNPGAARNISFTGQYNPNGNSYLAVYGWTRNPLIEYYIVENFGTYDPSTGAQRLGSITVDGSTYNILKTTRVNQPSIEGTSTFDQFWSVRTNKRSSGSVNVKAHFDAWAQAGLRLGTHDYQIMATEGYFSSGSATITVGEGTSSGGGGDNGGGNNGGGGNTGTCSALYGQCGGQGWTGPTCCSQGTCRVSNQWYSQCL

SEQ ID NO: 265 - DNA, 981 bp, Myceliophthora thermophilia
atgaaggccaatctcctggtcctcgcgccgctggccgtctcggcagcgcccgcgctcgagcaccgccaggcaactgagagcatcgacgcgctcattaaggccaagggcaagctctactttggcacctgtaccgaccagggccggctgacgtcgggcaagaacgcggacatcatcagggccaacttcggccaggtgacgcccgagaacagcatgaagtggcagagcatcgagccatcgcggggtcagttcacctggggccaggctgactacctcgtcgactgggccactcagaacaacaagaccatccgcggccacacgctcgtctggcactcgcagctcgccggctacgttcagcagatcggcgaccggaacaccttgacccagaccatccaggaccacattgccgccgtcatgggccgctacaagggcaagatctacgcctgggatgtcatcaacgagatgttcaacgaggatggctcgcttcgcagcagcgtcttctccaacgtcctcggagaggactttgttgggatcgccttcaaggcggcgcgcgaggccgaccccgacaccaagttgtacatcaacgactacaacctcgacagccccaactacgccaagctgaccaacggcatggtcgctcacgtcaagaagtggctcgcggccggcatccccatcgacggcatcggcacccagggtcacctgcagtctggccagggttccggtcttgcgcaggccatcaaggctctcgcccaggctggcgtcgaggaggttgccgtcaccgagctcgatatccagaaccagaacaccaacgactacactgccgttgtccagggctgcttggacgagcccaagtgcgtcggtatcaccgtctggggtgtccgcgatcccgactcgtggcgtccccagggcaaccccttgctcttcgacagcaacttcaaccccaaggcgaactacaatgccatcgtccagctcctcaagcagtag

SEQ ID NO: 266 - protein, 326 aa, Myceliophthora thermophilia
MKANLLVLAPLAVSAAPALEHRQATESIDALIKAKGKLYFGTCTDQGRLTSGKNADIIRANFGQVTPENSMKWQSIEPSRGQFTWGQADYLVDWATQNNKTIRGHTLVWHSQLAGYVQQIGDRNTLTQTIQDHIAAVMGRYKGKIYAWDVINEMFNEDGSLRSSVFSNVLGEDFVGIAFKAAREADPDTKLYINDYNLDSPNYAKLTNGMVAHVKKWLAAGIPIDGIGTQGHLQSGQGSGLAQAIKALAQAGVEEVAVTELDIQNQNTNDYTAVVQGCLDEPKCVGITVWGVRDPDSWRPQGNPLLFDSNFNPKANYNAIVQLLKQ

SEQ ID NO: 267 - protein, 311 aa, Myceliophthora thermophilia
APALEHRQATESIDALIKAKGKLYFGTCTDQGRLTSGKNADIIRANFGQVTPENSMKWQSIEPSRGQFTWGQADYLVDWATQNNKTIRGHTLVWHSQLAGYVQQIGDRNTLTQTIQDHIAAVMGRYKGKIYAWDVINEMFNEDGSLRSSVFSNVLGEDFVGIAFKAAREADPDTKLYINDYNLDSPNYAKLTNGMVAHVKKWLAAGIPIDGIGTQGHLQSGQGSGLAQAIKALAQAGVEEVAVTELDIQNQNTNDYTAVVQGCLDEPKCVGITVWGVRDPDSWRPQGNPLLFDSNFNPKANYNAIVQLLKQ

SEQ ID NO: 268 - DNA, 669 bp, Myceliophthora thermophilia
atggtcaagctctctctcatcgcagcgagccttgtggcacctagcgtgcttgcgggtcctctcatcggccccaagacgcaaaccgagagccagctgaacccgcgtcaaggcggctacaactacttccagaattggtccgagggaggcagcaatatccgctgcaacaacggccctgggggttcctacacggccgactggaacagcaggggcggcttcgtctgtggcaagggctggagctatggaggcaatcgcgccatcacgtacaccggcgaatacaacgccagcggccccggctacctcgccgtctacgggtggacccgcaacccgctgattgaatactacatcatcgaggcccatgccgacctcgcccccaacgagccgtggacatccaagggtaatttcagcttcgaggagggcgagtacgaggtcttcaccagcacccgcgtcaacaagccgtccatcgagggcaccaggacttttcagcagtactggtcgctgcgcaaggagcagcgggtcggcggcaccgtcaccacccagaggcactttgaagagtgggccaagctgggcatgaagctgggcaatcatgactatgtcatcctggcgaccgaaggatacactgccaacggaggatccggtagcagcgggcactcgagcattactctgcagtag

SEQ ID NO: 269 - protein, 222 aa, Myceliophthora thermophilia
MVKLSLIAASLVAPSVLAGPLIGPKTQTESQLNPRQGGYNYFQNWSEGGSNIRCNNGPGGSYTADWNSRGGFVCGKGWSYGGNRAITYTGEYNASGPGYLAVYGWTRNPLIEYYIIEAHADLAPNEPWTSKGNFSFEEGEYEVFTSTRVNKPSIEGTRTFQQYWSLRKEQRVGGTVTTQRHFEEWAKLGMKLGNHDYVILATEGYTANGGSGSSGHSSITLQ

SEQ ID NO: 270 - protein, 204 aa, Myceliophthora thermophilia
GPLIGPKTQTESQLNPRQGGYNYFQNWSEGGSNIRCNNGPGGSYTADWNSRGGFVCGKGWSYGGNRAITYTGEYNASGPGYLAVYGWTRNPLIEYYIIEAHADLAPNEPWTSKGNFSFEEGEYEVFTSTRVNKPSIEGTRTFQQYWSLRKEQRVGGTVTTQRHFEEWAKLGMKLGNHDYVILATEGYTANGGSGSSGHSSITLQ

SEQ ID NO: 271 - DNA, 657 bp, Myceliophthora thermophilia
atggtctcgttcactctcctcctcacggtcatcgccgctgcggtgacgacggccagccctctcgaggtggtcaagcgcggcatccagccgggcacgggcacccacgaggggtacttctactcgttctggaccgacggccgtggctcggtcgacttcaaccccgggccccgcggctcgtacagcgtcacctggaacaacgtcaacaactgggttggcggcaagggctggaacccgggcccgccgcgcaagattgcgtacaacggcacctggaacaactacaacgtgaacagctacctcgccctgtacggctggactcgcaacccgctggtcgagtattacatcgtggaggcatacggcacgtacaacccctcgtcgggcacggcgcggctgggcaccatcgaggacgacggcggcgtgtacgacatctacaagacgacgcggtacaaccagccgtccatcgaggggacctccaccttcgaccagtactggtccgtccgccgccagaagcgcgtcggcggcactatcgacacgggcaagcactttgacgagtggaagcgccagggcaacctccagctcggcacctggaactacatgatcatggccaccgagggctaccagagctctggttcggccactatcgaggtccgggaggcctaa

SEQ ID NO: 272 - protein, 218 aa, Myceliophthora thermophilia
MVSFTLLLTVIAAAVTTASPLEVVKRGIQPGTGTHEGYFYSFWTDGRGSVDFNPGPRGSYSVTWNNVNNWVGGKGWNPGPPRKIAYNGTWNNYNVNSYLALYGWTRNPLVEYYIVEAYGTYNPSSGTARLGTIEDDGGVYDIYKTTRYNQPSIEGTSTFDQYWSVRRQKRVGGTIDTGKHFDEWKRQGNLQLGTWNYMIMATEGYQSSGSATIEVREA

SEQ ID NO: 273 - protein, 200 aa, Myceliophthora thermophilia
SPLEVVKRGIQPGTGTHEGYFYSFWTDGRGSVDFNPGPRGSYSVTWNNVNNWVGGKGWNPGPPRKIAYNGTWNNYNVNSYLALYGWTRNPLVEYYIVEAYGTYNPSSGTARLGTIEDDGGVYDIYKTTRYNQPSIEGTSTFDQYWSVRRQKRVGGTIDTGKHFDEWKRQGNLQLGTWNYMIMATEGYQSSGSATIEVREA

SEQ ID NO: 274 - DNA, 687 bp, Myceliophthora thermophilia
atggtctcgctcaagtccctcctcctcgccgcggcggcgacgttgacggcggtgacggcgcgcccgttcgactttgacgacggcaactcgaccgaggcgctggccaagcgccaggtcacgcccaacgcgcagggctaccactcgggctacttctactcgtggtggtccgacggcggcggccaggccaccttcaccctgctcgagggcagccactaccaggtcaactggaggaacacgggcaactttgtcggtggcaagggctggaacccgggtaccggccggaccatcaactacggcggctcgttcaacccgagcggcaacggctacctggccgtctacggctggacgcacaacccgctgatcgagtactacgtggtcgagtcgtacgggacctacaacccgggcagccaggcccagtacaagggcagcttccagagcgacggcggcacctacaacatctacgtctcgacccgctacaacgcgccctcgatcgagggcacccgcaccttccagcagtactggtccatccgcacctccaagcgcgtcggcggctccgtcaccatgcagaaccacttcaacgcctgggcccagcacggcatgcccctcggctcccacgactaccagatcgtcgccaccgagggctaccagagcagcggctcctccgacatctacgtccagactcactag

SEQ ID NO: 275 - protein, 228 aa, Myceliophthora thermophilia
MVSLKSLLLAAAATLTAVTARPFDFDDGNSTEALAKRQVTPNAQGYHSGYFYSWWSDGGGQATFTLLEGSHYQVNWRNTGNFVGGKGWNPGTGRTINYGGSFNPSGNGYLAVYGWTHNPLIEYYVVESYGTYNPGSQAQYKGSFQSDGGTYNIYVSTRYNAPSIEGTRTFQQYWSIRTSKRVGGSVTMQNHFNAWAQHGMPLGSHDYQIVATEGYQSSGSSDIYVQTH

SEQ ID NO: 276 - protein, 208 aa, Myceliophthora thermophilia
RPFDFDDGNSTEALAKRQVTPNAQGYHSGYFYSWWSDGGGQATFTLLEGSHYQVNWRNTGNFVGGKGWNPGTGRTINYGGSFNPSGNGYLAVYGWTHNPLIEYYVVESYGTYNPGSQAQYKGSFQSDGGTYNIYVSTRYNAPSIEGTRTFQQYWSIRTSKRVGGSVTMQNHFNAWAQHGMPLGSHDYQIVATEGYQSSGSSDIYVQTH

SEQ ID NO: 277 - DNA, 1272 bp, Myceliophthora thermophilia
atgcggttctcgacactgttcccggtgctcagcaccgtcgtcctcccgtcctcggccgccctcgtcaaggaaggctcaaggtgcgtcgtgagccccatctcggccgccgtcgcctcctccgaggagggcggactggtcgcgcgccagtcccaggtggacgacacgccgcagatcctcgaggccttctcgcagtgcggccaggatggcaccatcatcctgcaggagggcacctatcacatccggcaggtcatggacacgaccaacctgcgcaacgtgtccatcgagatctacggcacgctggtctggagcgccgacaacctcgactactggcggcgggccagcttcgacgtcgtctacgccggccgccagaccgcctggcgcatcggcgggcgcgacatcaccatgcgcggcttcggcaaggccctcttcgacggcaacggccaggcctggatcgacctggccaacggcgcgtccaacctgaacgggaggcccatctcgctgaccgtctggtacggcaccaacgtgttgatcgacggcatcacctggcggatggcgcagttctggcacacttttgttgcccactcggagaacgtgaccatgaccaacttggacatgtacaccctctcttccaacggtaggagttcccagaacacggacgggacggatacctggaactccaagaatatcttcatcgcgaactggacggtgacctgtggtgatgactgcatcgctgtcaagggtaacagcaccaatgtccacgtcaagaacgtggcatgcaccgagtccggcgccaccgtcatcggcagcatcggctccaacgcgtggcagcccgactacgtcgagaacgtcgtgtttgagaacatcacggccaagcactcgagcaacgccgcctggatcaaaacgtaccctggaacgggatacgtccgcaacgtcaccttccgcaacatccacttcgaggacgtcaaccagcccatctacctatcctcgtgcatctactcgtacaccaactgcgactcgtcccgcctcaggatcacggacgtcacctggcagaacatcacgggcacgagccggtacaacgtggcggcggccatgcactgcagcgcggccgccccctgcgacggcttccgcttcgagaacatcgacatcaagcccaagaacggcggctccgccaaggtgctgtgctccaacatccagaaccaggccaccatgggcctcacctgtaccgggccctgtccgggctcccagccgcagcagctgtcggggaacgtgtga

SEQ ID NO: 278 - protein, 423 aa, Myceliophthora thermophilia
MRFSTLFPVLSTVVLPSSAALVKEGSRCVVSPISAAVASSEEGGLVARQSQVDDTPQILEAFSQCGQDGTIILQEGTYHIRQVMDTTNLRNVSIEIYGTLVWSADNLDYWRRASFDVVYAGRQTAWRIGGRDITMRGFGKALFDGNGQAWIDLANGASNLNGRPISLTVWYGTNVLIDGITWRMAQFWHTFVAHSENVTMTNLDMYTLSSNGRSSQNTDGTDTWNSKNIFIANWTVTCGDDCIAVKGNSTNVHVKNVACTESGATVIGSIGSNAWQPDYVENVVFENITAKHSSNAAWIKTYPGTGYVRNVTFRNIHFEDVNQPIYLSSCIYSYTNCDSSRLRITDVTWQNITGTSRYNVAAAMHCSAAAPCDGFRFENIDIKPKNGGSAKVLCSNIQNQATMGLTCTGPCPGSQPQQLSGNV

SEQ ID NO: 279 - protein, 404 aa, Myceliophthora thermophilia
ALVKEGSRCVVSPISAAVASSEEGGLVARQSQVDDTPQILEAFSQCGQDGTIILQEGTYHIRQVMDTTNLRNVSIEIYGTLVWSADNLDYWRRASFDVVYAGRQTAWRIGGRDITMRGFGKALFDGNGQAWIDLANGASNLNGRPISLTVWYGTNVLIDGITWRMAQFWHTFVAHSENVTMTNLDMYTLSSNGRSSQNTDGTDTWNSKNIFIANWTVTCGDDCIAVKGNSTNVHVKNVACTESGATVIGSIGSNAWQPDYVENVVFENITAKHSSNAAWIKTYPGTGYVRNVTFRNIHFEDVNQPIYLSSCIYSYTNCDSSRLRITDVTWQNITGTSRYNVAAAMHCSAAAPCDGFRFENIDIKPKNGGSAKVLCSNIQNQATMGLTCTGPCPGSQPQQLSGNV

SEQ ID NO: 280 - DNA, 1392 bp, Myceliophthora thermophilia
atgaagtcccttgctctcttcctatcggctgccgcctcgctggtttcggcgtccgccatcgccctcgatcgtgaagctattccagccggggcgtcgataacatttccccgtcatgaatctcagttcaacccatccgtgacacttgaaggcaggggccacggcaggggtcacggcagggagaaggacaactggggcaacgctgtcgaaaaggaccgccagaaggtcactatccgcgcgtccaagcacgaccgcgatgatatcagtgacgacttcctctgggcactcaagaaggcgaaccatggcggcctactgcatctgcagaaggggaagaaatatgtaattggcaagaagctggatctgagttttctgaacgatatctatgtcaagatcgacggtgagctaaagttcaccaacgacattgaatactggcaggccaacaacttctactatgacttccagaagagcattaccttctgggtctggggtggcaaggatatcaagatatacggctccggcgtcatcaacggcaacggccaggcatggtgggacggcttctcgggccacgagattctcgaccccgacaatgagtactaccggcccattctgtttctgaccgacaacgccaccaacgtcgaggttcgcggcctgcacctcaaggactcgccgtgctggaccaacttctttgtgcgttccaagaacattgttttcgacgacgtctacatctctgccgtgtctaccaacgcatcgaccctgcccaagaacacggacggtttcgactcgctcaacgtctcgggcctgaccgtgctcaacacgcgcgtcaacgtgggcgacgactgcttctcgcccaagcccaacacgtccgacatcctggtgcgcaacctgtggtgcaacgggacgcacggggtgagcatgggcagcatcgggcagtacgcgggcgtgctggactacatcgcggacgcgcacatcgagaacgtgacgctgctcaacggcgagaacggggcgcggctcaaggcctgggccggcccggacgtcgggtacggctacatccgcaacgtcacctacaaggacatccgggtcgagaacaccgactcccccatcgtgctcgaccagtgctacttcaacgtcaacgagaccgtctgcgcgcagtatccgagcagggtcaacatcaccgacatcaacttcatcaacgtgcgcggcaccagcagcggtaaggaggggagggtcgtggcggacctcacctgctcccccggcgcgacctgtactggcatccatctggaggggatcgacatcaccagccccaagggctcgcccccgcagattgtgtgtgagaacatcgagggagatatcggcgttgactgtatccccaaggacgaggcggactattcaggttga

SEQ ID NO: 281 - protein, 463 aa, Myceliophthora thermophilia
MKSLALFLSAAASLVSASAIALDREAIPAGASITFPRHESQFNPSVTLEGRGHGRGHGREKDNWGNAVEKDRQKVTIRASKHDRDDISDDFLWALKKANHGGLLHLQKGKKYVIGKKLDLSFLNDIYVKIDGELKFTNDIEYWQANNFYYDFQKSITFWVWGGKDIKIYGSGVINGNGQAWWDGFSGHEILDPDNEYYRPILFLTDNATNVEVRGLHLKDSPCWTNFFVRSKNIVFDDVYISAVSTNASTLPKNTDGFDSLNVSGLTVLNTRVNVGDDCFSPKPNTSDILVRNLWCNGTHGVSMGSIGQYAGVLDYIADAHIENVTLLNGENGARLKAWAGPDVGYGYIRNVTYKDIRVENTDSPIVLDQCYFNVNETVCAQYPSRVNITDINFINVRGTSSGKEGRVVADLTCSPGATCTGIHLEGIDITSPKGSPPQIVCENIEGDIGVDCIPKDEADYSG

SEQ ID NO: 282 - protein, 444 aa, Myceliophthora thermophilia
IALDREAIPAGASITFPRHESQFNPSVTLEGRGHGRGHGREKDNWGNAVEKDRQKVTIRASKHDRDDISDDFLWALKKANHGGLLHLQKGKKYVIGKKLDLSFLNDIYVKIDGELKFTNDIEYWQANNFYYDFQKSITFWVWGGKDIKIYGSGVINGNGQAWWDGFSGHEILDPDNEYYRPILFLTDNATNVEVRGLHLKDSPCWTNFFVRSKNIVFDDVYISAVSTNASTLPKNTDGFDSLNVSGLTVLNTRVNVGDDCFSPKPNTSDILVRNLWCNGTHGVSMGSIGQYAGVLDYIADAHIENVTLLNGENGARLKAWAGPDVGYGYIRNVTYKDIRVENTDSPIVLDQCYFNVNETVCAQYPSRVNITDINFINVRGTSSGKEGRVVADLTCSPGATCTGIHLEGIDITSPKGSPPQIVCENIEGDIGVDCIPKDEADYSG

SEQ ID NO: 283 - DNA, 861 bp, Myceliophthora thermophilia
atgcgagccagtgtctgcctagcggtaatgtccgctgtcctctgcccggcacgagcagcataccagggcttcaattacggcgccttcttcaccgacaacacgcccaagatgcagttggatttccaagccgagttcaagacggcccaaaacctggtgggcgcgcccgcgggcggcttccacagcgcccgcccctacaccatgatccaatggggcacggcaaccgacgtgatcagcgccgttcccgcggccatcgcaaccaacaccaacctcctcctgggcatccggtgctcggcaggcgacgcggtcgtcagcaacgagctcgcggcgcttcagaccgccatcccgacccacggcacccgcttcaccgacctcgtcgtcggcatctcggtcggtagcgaggacctgtaccgcagctcggcggccaccatcgcgtcctacgtcgcccgcgtgcgcgctgccgtccgcggcacgcccctggagggcacgccctgggccgacccggcgaaccgcgccgtgctcgagcccgtcgactttgtcggcatggacgcgtacagctactgggagagcacggtgcccaacgaggtcggcggcagccgagccaaggcgctgttcgacgccgcgatggaccataccgtcgccgccaccgcggccgtcgacgtgcgcaagatggtctggatcaccgagacggggttccccgtcagagggcacacgtccaacgaggcggtgccgtcgccggagaacgccaaggccttctgggacgcggtcgggtgcccgctctttgacatatcgtgtgcggagattgcgggtgagcggggagatgacggcgtcaacagcgatgacgacgcgtgcgatgcagagtga

SEQ ID NO: 284 - protein, 286 aa, Myceliophthora thermophilia
MRASVCLAVMSAVLCPARAAYQGFNYGAFFTDNTPKMQLDFQAEFKTAQNLVGAPAGGFHSARPYTMIQWGTATDVISAVPAAIATNTNLLLGIRCSAGDAVVSNELAALQTAIPTHGTRFTDLVVGISVGSEDLYRSSAATIASYVARVRAAVRGTPLEGTPWADPANRAVLEPVDFVGMDAYSYWESTVPNEVGGSRAKALFDAAMDHTVAATAAVDVRKMVWITETGFPVRGHTSNEAVPSPENAKAFWDAVGCPLFDISCAEIAGERGDDGVNSDDDACDAE

SEQ ID NO: 285 - protein, 267 aa, Myceliophthora thermophilia
AYQGFNYGAFFTDNTPKMQLDFQAEFKTAQNLVGAPAGGFHSARPYTMIQWGTATDVISAVPAAIATNTNLLLGIRCSAGDAVVSNELAALQTAIPTHGTRFTDLVVGISVGSEDLYRSSAATIASYVARVRAAVRGTPLEGTPWADPANRAVLEPVDFVGMDAYSYWESTVPNEVGGSRAKALFDAAMDHTVAATAAVDVRKMVWITETGFPVRGHTSNEAVPSPENAKAFWDAVGCPLFDISCAEIAGERGDDGVNSDDDACDAE

SEQ ID NO: 286 - DNA, 1218 bp, Myceliophthora thermophilia
atgcgtcccacatcagccctcgtcgcggccggcgttctcgtctcgggcacgtcggctgagaactacctcggcttcaactcgggagccaccctcgcggaccggtccgccaagttcaaggcggactggcttgccgaattcaagacggcgcagaacctggagaatgccccgggcaagttcaacgccgtgcgtctctataccaacatccaggcctactcggaggacaccccgatcgaggcgtttgaggccgccatcgagaccaacactaagattctgctgggtatctggacctcgggcaccaatagcattgagaaggaactcagcgcgctgaagaaggccatcgacaagtatggtagcaagtttaccgacctcgtcatcggcatgtcgattggtagcgaggacctctaccgcgattccgagacgggcgtcaagaacgaggccggtatcggtgcgggcccggacactctgatcaagttcatcaacgattacaagaaggcggtcgccggcacggcgctcaagggcgtccccattggccacgtcgacacatgggatgcttggacgaacggtaccaacaaggccgtgatcgacgctgtcgactggatcggcgtggacgagtacccctactacgagaacggcaagggtaacaacatcaagaactcgggcaccctctttgaccgtgccttcaatgcggttaagggcgttgccggcgacaagcccatctgggtcaccgagaccggctggccttcctcgggccccaactgggatcaggcggtctccagcgtcgagaacgccaagtactactgggacgaggtcggctgccgcaagctcttcaacaaggtgcccaccttctggtacaacctgcgcgactcgaaccccgacaacaagatgaagttcgccatcaccaacaacctctcgaccaagcccctgttcgacctgacctgccctaccaagtttgacaccccgacgtccacttccacgagcgccgcgccctcctcgactggcgtcagtgcccccagcagctctgccacgagtgcttccggctctactaacactactggcggtagcggcaccagcgccggcgctgacaacagtgctgctgagtctggtgacggaacggaggaggcggacgcgatcccgaccggaagcggcgcctccatcggcaggagcctcttcactgttgtcagcctggctctcgttgctggcgtcttcaccctgttctaa

SEQ ID NO: 287 - protein, 405 aa, Myceliophthora thermophilia
MRPTSALVAAGVLVSGTSAENYLGFNSGATLADRSAKFKADWLAEFKTAQNLENAPGKFNAVRLYTNIQAYSEDTPIEAFEAAIETNTKILLGIWTSGTNSIEKELSALKKAIDKYGSKFTDLVIGMSIGSEDLYRDSETGVKNEAGIGAGPDTLIKFINDYKKAVAGTALKGVPIGHVDTWDAWTNGTNKAVIDAVDWIGVDEYPYYENGKGNNIKNSGTLFDRAFNAVKGVAGDKPIWVTETGWPSSGPNWDQAVSSVENAKYYWDEVGCRKLFNKVPTFWYNLRDSNPDNKMKFAITNNLSTKPLFDLTCPTKFDTPTSTSTSAAPSSTGVSAPSSSATSASGSTNTTGGSGTSAGADNSAAESGDGTEEADAIPTGSGASIGRSLFTVVSLALVAGVFTLF

SEQ ID NO: 288 - protein, 386 aa, Myceliophthora thermophilia
ENYLGFNSGATLADRSAKFKADWLAEFKTAQNLENAPGKFNAVRLYTNIQAYSEDTPIEAFEAAIETNTKILLGIWTSGTNSIEKELSALKKAIDKYGSKFTDLVIGMSIGSEDLYRDSETGVKNEAGIGAGPDTLIKFINDYKKAVAGTALKGVPIGHVDTWDAWTNGTNKAVIDAVDWIGVDEYPYYENGKGNNIKNSGTLFDRAFNAVKGVAGDKPIWVTETGWPSSGPNWDQAVSSVENAKYYWDEVGCRKLFNKVPTFWYNLRDSNPDNKMKFAITNNLSTKPLFDLTCPTKFDTPTSTSTSAAPSSTGVSAPSSSATSASGSTNTTGGSGTSAGADNSAAESGDGTEEADAIPTGSGASIGRSLFTVVSLALVAGVFTLF

SEQ ID NO: 289 - DNA, 765 bp, Myceliophthora thermophilia
atgctcgccgagactgtcctcgccggccttgcgctagcctccagcgccatcgccgcgccggcaccgaacccgatcgagtttgtaaagcgggccccaacccccggcgtggtcatccagaagtgcagcacccccggagtgctcgcccttgcctacgacgacggcccgtaccagtacacgtcgcggctggtggacatcctcgacgccgccggcgccaaggccaccttcttctggaccgggacgctctacggctgcatctacaaccaggctaacgcggtcaagaaggcctttgcctcgggccaccagatcgcctctcacacatggacccacccccactgggccagcttgggcgaggcgcagatccggcaggagatcaccaagctcgaggacgccttcgtcaacctgatcggcaagaagccggcgtacgtgcgcccgccctatctcgagacgggcggccaggtcctgccggtgctgaggtcgttgggctacaaggtcatcaccaacgacatcgacacgggcgactggaaccactattcgccccagcagagcgagcaggccttcctgcaggccggcgccggcggcaacgggcacatccccctcatgcacgagacctacgactccaccgtcaacgttctcaccccctggctgatcaactgggccaagcagaacaacctgaagctcgtcactgtcgccgagtgcttgggcgaccccgacggcgcgtaccaggccggtaactttgagcctaatggccagaacagctgctattag

SEQ ID NO: 290 - protein, 254 aa, Myceliophthora thermophilia
MLAETVLAGLALASSAIAAPAPNPIEFVKRAPTPGVVIQKCSTPGVLALAYDDGPYQYTSRLVDILDAAGAKATFFWTGTLYGCIYNQANAVKKAFASGHQIASHTWTHPHWASLGEAQIRQEITKLEDAFVNLIGKKPAYVRPPYLETGGQVLPVLRSLGYKVITNDIDTGDWNHYSPQQSEQAFLQAGAGGNGHIPLMHETYDSTVNVLTPWLINWAKQNNLKLVTVAECLGDPDGAYQAGNFEPNGQNSCY

SEQ ID NO: 291 - protein, 236 aa, Myceliophthora thermophilia
APAPNPIEFVKRAPTPGVVIQKCSTPGVLALAYDDGPYQYTSRLVDILDAAGAKATFFWTGTLYGCIYNQANAVKKAFASGHQIASHTWTHPHWASLGEAQIRQEITKLEDAFVNLIGKKPAYVRPPYLETGGQVLPVLRSLGYKVITNDIDTGDWNHYSPQQSEQAFLQAGAGGNGHIPLMHETYDSTVNVLTPWLINWAKQNNLKLVTVAECLGDPDGAYQAGNFEPNGQNSCY

SEQ ID NO: 292 - DNA, 1959 bp, Myceliophthora thermophilia
atggcaggcctcgttgcccagctccaggaccacctcccatccgtaaacggatctggcctcgtcacgcccgccatgcacgctctctcgtcgctcgctgtcctcggcgcctgggccgtccagacggtcttgggccgtccggccaccctctcaaagcgggccaccgactccttcatcgagaccgagacgcctatcgcatgggaaaagctgcggtgcaacatcggcgctaacggctgtgcggcttccggagccgctgccggtgtggtcattgccagcccgtccaagtcggatccagactacttctacacctggactcgagatgccggcctggtcctgacgggtatcgtggacgccctgtcccaaaactactcggcggccctgcagaccaacattcaggactacatcatcgcccaggccaagctccagggtgtttcgaacccctccggtagcctctcggacggcaccggtcttggcgagcccaagttcaatgtcgatctcacccagttcacgggcgactggggccggccgcagcgcgacggtccgcctctccgggccatcgccctcatccgctacgccaagtggctggcttccaacggttacaaggacacggccaacagcgtcgtctggcccgtcatcaagaacgacctggcctatgccgctcagtattggaacgagactggtttcgacctgtgggaggaggttcccggcagctcgttcttcaccattgccagcacgcaccgagccttggtagagggagctgccctcgctgcccagctcggcaccgaatgcagcgcctgcatcaccgtcgcgccccaagtcctctgcttccagcagagcttctggaacccgtcgggcggttacgttgtctcgaacatcaacggcggcaacaaccggtccggcaaggatctcaactcggtcctggcctccatccacacctttgacccggcggtcggctgcgactcggtcaccttccagccctgcagcgacaaggcgctctccaaccacaaggcctacgtcgactccttccgcagcgtctacgccatcaactcgggcattgcccagggcaaggccgtcgccgtgggccgctactcggaggacgtctactacaacggcaacccgtggtacctggccaacttcgcggccgccgagcagctctacgacgccgtcttcgtctggaagaagcagcagtccatcgaggtcacccagctgtccctccccttcttcaaggacctgctccccggcatctccaccggcacctacaccccgtcgtcgtcgacgtaccagcagatcctcgacgccgtctcggcctacgccgacggcttcatcgacgtcgcggccaagtacaccccctcggacggctccctggccgagcagtacacgcgcgactcgggccagccgatctcggccaaggacctgacctggtcctacgccgccttcctctcggccgccgaccgccgcgcgggcatcgtcccggccggctggtccgccgagcacggcaagacgctgcccggctcgtgctcggccgtccaggtcgccggcacctacacccaggccaccgccacctccttcccgcccggccagacgcccaacccgaccagcgacaccccggccccgttccccacggcctgcgccgactccacccaggtcttcgtcaccttccgcgccgaggtgaccacccagtggggccagtcggtcaaggtcgtcggcagctcgtccgagctcggcaactgggacgtctccaaggccccgcgcctgtccgcgtcggcctacacggcgtcggacccgctctgggccatcacggtgcccatgaaggccggccagtcggtgcagtacaagttcgtcaaggtcaacggggacgggtcgatccagtgggagtcggacccgaaccgccagttcacggtcagctcttcctccacggccagcggctgtgcctggcagaccatcgaggcgacctggcggtag

SEQ ID NO: 293 - protein, 652 aa, Myceliophthora thermophilia
MAGLVAQLQDHLPSVNGSGLVTPAMHALSSLAVLGAWAVQTVLGRPATLSKRATDSFIETETPIAWEKLRCNIGANGCAASGAAAGVVIASPSKSDPDYFYTWTRDAGLVLTGIVDALSQNYSAALQTNIQDYIIAQAKLQGVSNPSGSLSDGTGLGEPKFNVDLTQFTGDWGRPQRDGPPLRAIALIRYAKWLASNGYKDTANSVVWPVIKNDLAYAAQYWNETGFDLWEEVPGSSFFTIASTHRALVEGAALAAQLGTECSACITVAPQVLCFQQSFWNPSGGYVVSNINGGNNRSGKDLNSVLASIHTFDPAVGCDSVTFQPCSDKALSNHKAYVDSFRSVYAINSGIAQGKAVAVGRYSEDVYYNGNPWYLANFAAAEQLYDAVFVWKKQQSIEVTQLSLPFFKDLLPGISTGTYTPSSSTYQQILDAVSAYADGFIDVAAKYTPSDGSLAEQYTRDSGQPISAKDLTWSYAAFLSAADRRAGIVPAGWSAEHGKTLPGSCSAVQVAGTYTQATATSFPPGQTPNPTSDTPAPFPTACADSTQVFVTFRAEVTTQWGQSVKVVGSSSELGNWDVSKAPRLSASAYTASDPLWAITVPMKAGQSVQYKFVKVNGDGSIQWESDPNRQFTVSSSSTASGCAWQTIEATWR

SEQ ID NO: 294 - protein, 608 aa, Myceliophthora thermophilia
RPATLSKRATDSFIETETPIAWEKLRCNIGANGCAASGAAAGVVIASPSKSDPDYFYTWTRDAGLVLTGIVDALSQNYSAALQTNIQDYIIAQAKLQGVSNPSGSLSDGTGLGEPKFNVDLTQFTGDWGRPQRDGPPLRAIALIRYAKWLASNGYKDTANSVVWPVIKNDLAYAAQYWNETGFDLWEEVPGSSFFTIASTHRALVEGAALAAQLGTECSACITVAPQVLCFQQSFWNPSGGYVVSNINGGNNRSGKDLNSVLASIHTFDPAVGCDSVTFQPCSDKALSNHKAYVDSFRSVYAINSGIAQGKAVAVGRYSEDVYYNGNPWYLANFAAAEQLYDAVFVWKKQQSIEVTQLSLPFFKDLLPGISTGTYTPSSSTYQQILDAVSAYADGFIDVAAKYTPSDGSLAEQYTRDSGQPISAKDLTWSYAAFLSAADRRAGIVPAGWSAEHGKTLPGSCSAVQVAGTYTQATATSFPPGQTPNPTSDTPAPFPTACADSTQVFVTFRAEVTTQWGQSVKVVGSSSELGNWDVSKAPRLSASAYTASDPLWAITVPMKAGQSVQYKFVKVNGDGSIQWESDPNRQFTVSSSSTASGCAWQTIEATWR

SEQ ID NO: 295 - DNA, 1464 bp, Myceliophthora thermophilia
atgtccacgaggccgcgcgctttgccgtcttgtgccatcctcccactcagcccctccctcctcatccactacacccagtccagtctgcccaccatgtaccggcaggtcgcgaccgctctctccttcaccagcctcgtgctcggccagcaagcgggaaccctcaccgaggagatccacccctcgcttcccatcgaggtgtgcacagctcccggctcgtgcactaaggaggacaccaccgtggtcctggacgccaactggcgctggacacacgtcaccgacggctacaccaactgctacacgggcaacgcctggaacgagacggcctgccccgacggcgtgacgtgcgcggccaactgcgccatcgacggcgccgactacgagggcacgtacggtatcacgacgccgtccgatggcgcactcaagctcaactttgtcaccaagaaccagaacggccagaacgtcggctcgcgcgtctacctgatgaagggtgacgacaagtaccgcctcttcaacctgctcaacaaggagttcacctttgacgttgacgtgtccaacctgccctgcggcctgaacggcgctgtctatttcagcgagatggacgaggacggcggcatgtcccgcttcgagggcaacaaggccggcgccaagtacggcaccggctactgcgacagccagtgcccgcaggacatcaagtttatcaacggcgaggccaacaccgagggctggggcggcactgacggaaactccggcaccggcaagtacggcacctgctgcgccgagatggacatctgggaggccaactcagacgccaccgcctacactccgcacccgtgcaaggttaacgagcagacccggtgcgagagtgaggaggagtgcggtgcgggagacaaccggtacgccggcctgtgcgacaaggatggctgcgacttcaacagcttccgcctgggaaacaaggagttctacggcccaggcatgacggtcgacacgagcaagcccttcacggtggtaacgcagttcatcactgacgacaacaccgacacgggcgccctcaaggagatccgccgcttctacgtgcaggacggcaccgtgatccccaactcgcagaccgtcatcgaaggcgtcgaccccaccaactccatcacggacgagttttgcgagcagcagaagacggcctttggcgacaccaactacttcaagacggtcggtggcctgtccgccatgggcaagtcgctcgagaagatggtgctcgtcctcagcgtttgggatgatcatgccgccgccatgaactggctggacagcaactaccccaccgatggcgacccgtccaagcccggtgttgcccgtggccgttgcgacgccgaggccgggctgcccgagaatgtcgaggccgagcaccccgacgcctcggtcacttactccaacatcaagatcggcgccatcaactcgaccttcaccgccgcttag

SEQ ID NO: 296 - protein, 487 aa, Myceliophthora thermophilia
MSTRPRALPSCAILPLSPSLLIHYTQSSLPTMYRQVATALSFTSLVLGQQAGTLTEEIHPSLPIEVCTAPGSCTKEDTTVVLDANWRWTHVTDGYTNCYTGNAWNETACPDGVTCAANCAIDGADYEGTYGITTPSDGALKLNFVTKNQNGQNVGSRVYLMKGDDKYRLFNLLNKEFTFDVDVSNLPCGLNGAVYFSEMDEDGGMSRFEGNKAGAKYGTGYCDSQCPQDIKFINGEANTEGWGGTDGNSGTGKYGTCCAEMDIWEANSDATAYTPHPCKVNEQTRCESEEECGAGDNRYAGLCDKDGCDFNSFRLGNKEFYGPGMTVDTSKPFTVVTQFITDDNTDTGALKEIRRFYVQDGTVIPNSQTVIEGVDPTNSITDEFCEQQKTAFGDTNYFKTVGGLSAMGKSLEKMVLVLSVWDDHAAAMNWLDSNYPTDGDPSKPGVARGRCDAEAGLPENVEAEHPDASVTYSNIKIGAINSTFTAA

SEQ ID NO: 297 - protein, 460 aa, Myceliophthora thermophilia
SLPTMYRQVATALSFTSLVLGQQAGTLTEEIHPSLPIEVCTAPGSCTKEDTTVVLDANWRWTHVTDGYTNCYTGNAWNETACPDGVTCAANCAIDGADYEGTYGITTPSDGALKLNFVTKNQNGQNVGSRVYLMKGDDKYRLFNLLNKEFTFDVDVSNLPCGLNGAVYFSEMDEDGGMSRFEGNKAGAKYGTGYCDSQCPQDIKFINGEANTEGWGGTDGNSGTGKYGTCCAEMDIWEANSDATAYTPHPCKVNEQTRCESEEECGAGDNRYAGLCDKDGCDFNSFRLGNKEFYGPGMTVDTSKPFTVVTQFITDDNTDTGALKEIRRFYVQDGTVIPNSQTVIEGVDPTNSITDEFCEQQKTAFGDTNYFKTVGGLSAMGKSLEKMVLVLSVWDDHAAAMNWLDSNYPTDGDPSKPGVARGRCDAEAGLPENVEAEHPDASVTYSNIKIGAINSTFTAA

SEQ ID NO: 298 - DNA, 1449 bp, Myceliophthora thermophilia
atggccaagaagcttttcatcaccgccgcgcttgcggctgccgtgttggcggcccccgtcattgaggagcgccagaactgcggcgctgtgtggactcaatgcggcggtaacgggtggcaaggtcccacatgctgcgcctcgggctcgacctgcgttgcgcagaacgagtggtactctcagtgcctgcccaacagccaggtgacgagttccaccactccgtcgtcgacttccacctcgcagcgcagcaccagcacctccagcagcaccaccaggagcggcagctcctcctcctcctccaccacgcccccgcccgtctccagccccgtgaccagcattcccggcggtgcgacctccacggcgagctactctggcaaccccttctcgggcgtccggctcttcgccaacgactactacaggtccgaggtccacaatctcgccattcctagcatgactggtactctggcggccaaggcttccgccgtcgccgaagtccctagcttccagtggctcgaccggaacgtcaccatcgacaccctgatggtccagactctgtcccaggtccgggctctcaataaggccggtgccaatcctccctatgctgcccaactcgtcgtctacgacctccccgaccgtgactgtgccgccgctgcgtccaacggcgagttttcgattgcaaacggcggcgccgccaactacaggagctacatcgacgctatccgcaagcacatcattgagtactcggacatccggatcatcctggttatcgagcccgactcgatggccaacatggtgaccaacatgaacgtggccaagtgcagcaacgccgcgtcgacgtaccacgagttgaccgtgtacgcgctcaagcagctgaacctgcccaacgtcgccatgtatctcgacgccggccacgccggctggctcggctggcccgccaacatccagcccgccgccgagctgtttgccggcatctacaatgatgccggcaagccggctgccgtccgcggcctggccactaacgtcgccaactacaacgcctggagcatcgcttcggccccgtcgtacacgtcgcctaaccctaactacgacgagaagcactacatcgaggccttcagcccgctcttgaactcggccggcttccccgcacgcttcattgtcgacactggccgcaacggcaaacaacctaccggccaacaacagtggggtgactggtgcaatgtcaagggcaccggctttggcgtgcgcccgacggccaacacgggccacgagctggtcgatgcctttgtctgggtcaagcccggcggcgagtccgacggcacaagcgacaccagcgccgcccgctacgactaccactgcggcctgtccgatgccctgcagcctgcccccgaggctggacagtggttccaggcctacttcgagcagctgctcaccaacgccaacccgcccttctaa

SEQ ID NO: 299 - protein, 482 aa, Myceliophthora thermophilia
MAKKLFITAALAAAVLAAPVIEERQNCGAVWTQCGGNGWQGPTCCASGSTCVAQNEWYSQCLPNSQVTSSTTPSSTSTSQRSTSTSSSTTRSGSSSSSSTTPPPVSSPVTSIPGGATSTASYSGNPFSGVRLFANDYYRSEVHNLAIPSMTGTLAAKASAVAEVPSFQWLDRNVTIDTLMVQTLSQVRALNKAGANPPYAAQLVVYDLPDRDCAAAASNGEFSIANGGAANYRSYIDAIRKHIIEYSDIRIILVIEPDSMANMVTNMNVAKCSNAASTYHELTVYALKQLNLPNVAMYLDAGHAGWLGWPANIQPAAELFAGIYNDAGKPAAVRGLATNVANYNAWSIASAPSYTSPNPNYDEKHYIEAFSPLLNSAGFPARFIVDTGRNGKQPTGQQQWGDWCNVKGTGFGVRPTANTGHELVDAFVWVKPGGESDGTSDTSAARYDYHCGLSDALQPAPEAGQWFQAYFEQLLTNANPPF

SEQ ID NO: 300 - protein, 465 aa, Myceliophthora thermophilia
APVIEERQNCGAVWTQCGGNGWQGPTCCASGSTCVAQNEWYSQCLPNSQVTSSTTPSSTSTSQRSTSTSSSTTRSGSSSSSSTTPPPVSSPVTSIPGGATSTASYSGNPFSGVRLFANDYYRSEVHNLAIPSMTGTLAAKASAVAEVPSFQWLDRNVTIDTLMVQTLSQVRALNKAGANPPYAAQLVVYDLPDRDCAAAASNGEFSIANGGAANYRSYIDAIRKHIIEYSDIRIILVIEPDSMANMVTNMNVAKCSNAASTYHELTVYALKQLNLPNVAMYLDAGHAGWLGWPANIQPAAELFAGIYNDAGKPAAVRGLATNVANYNAWSIASAPSYTSPNPNYDEKHYIEAFSPLLNSAGFPARFIVDTGRNGKQPTGQQQWGDWCNVKGTGFGVRPTANTGHELVDAFVWVKPGGESDGTSDTSAARYDYHCGLSDALQPAPEAGQWFQAYFEQLLTNANPPF

SEQ ID NO: 301 - DNA, 1146 bp, Myceliophthora thermophilia
atgcgcgtctctagtttggtcgcggcccttgctaccggtggtcttgtcgccgccacgcctaagcccaaggggtcgtcgccccctggggccgtggacgcgaaccctttcaagggcaagacgcagttcgtcaacccggcatgggcggccaagctggaacagaccaaaaaggcgttcctggccaggaacgacaccgtcaatgccgccaagacggagaaggtccagcagaccagctcgttcgtctgggtctcgaggatcgccgagctctccaacatcgacgacgccatcgcggctgcccgcaaggcgcagaagaagacgggcaggaggcagatcgtcggcctggtgctctacaaccttccggaccgcgactgcagcgcgggcgagagcgcgggcgagctcagcagcgacaagaacgggctcgagatctacaagactgagttcgtcaagcccttcgccgacaaggtggcggccgcaaaggacctcgacttcgccatcgtcctggagcccgactcgctggccaacctggtcaccaacctgggcatcgagttctgcgccaacgccgcccccgtctaccgcgagggcatcgcctatgccatctccagccttcagcagccaaacgtgcacttgtacatcgatgctgcccacggcggctggctcggctgggacgacaacctgccgctggccgccaaggagtttgccgaggtggtcaagcttgccggcgagggcaagaagatccgcggcttcgtcaccaacgtgtccaactacaaccccttccacgccgtcgtgcgcgagaactttaccgagtggagcaactcgtgggacgagtctcactacgcctcctcgctcacaccgttcctcgagaaagaggggctgccggcacgcttcatcgtcgaccagggtcgcgttgccctcccgggagcccgcaaggagtggggtgaatggtgcaacgtggcacccgccggatttggccccgcgcccacgaccagggtcaacaacaccgtcgtcgatgctctcgtctgggtcaagcctggcggcgagagcgacggcgagtgtggcttggctggcgcccccaaggccggccagtggttcgacgagtacgcccagatgctggtcgagaatgcccacccgtctgtcgtccacaagtggtag

SEQ ID NO: 302 - protein, 381 aa, Myceliophthora thermophilia
MRVSSLVAALATGGLVAATPKPKGSSPPGAVDANPFKGKTQFVNPAWAAKLEQTKKAFLARNDTVNAAKTEKVQQTSSFVWVSRIAELSNIDDAIAAARKAQKKTGRRQIVGLVLYNLPDRDCSAGESAGELSSDKNGLEIYKTEFVKPFADKVAAAKDLDFAIVLEPDSLANLVTNLGIEFCANAAPVYREGIAYAISSLQQPNVHLYIDAAHGGWLGWDDNLPLAAKEFAEVVKLAGEGKKIRGFVTNVSNYNPFHAVVRENFTEWSNSWDESHYASSLTPFLEKEGLPARFIVDQGRVALPGARKEWGEWCNVAPAGFGPAPTTRVNNTVVDALVWVKPGGESDGECGLAGAPKAGQWFDEYAQMLVENAHPSVVHKW

SEQ ID NO: 303 - protein, 363 aa, Myceliophthora thermophilia
TPKPKGSSPPGAVDANPFKGKTQFVNPAWAAKLEQTKKAFLARNDTVNAAKTEKVQQTSSFVWVSRIAELSNIDDAIAAARKAQKKTGRRQIVGLVLYNLPDRDCSAGESAGELSSDKNGLEIYKTEFVKPFADKVAAAKDLDFAIVLEPDSLANLVTNLGIEFCANAAPVYREGIAYAISSLQQPNVHLYIDAAHGGWLGWDDNLPLAAKEFAEVVKLAGEGKKIRGFVTNVSNYNPFHAVVRENFTEWSNSWDESHYASSLTPFLEKEGLPARFIVDQGRVALPGARKEWGEWCNVAPAGFGPAPTTRVNNTVVDALVWVKPGGESDGECGLAGAPKAGQWFDEYAQMLVENAHPSVVHKW

SEQ ID NO: 304 - DNA, 1395 bp, Myceliophthora thermophilia
atggggcagaagactctccaggggctggtggcggcggcggcactggcagcctcggtggcgaacgcgcagcaaccgggcaccttcacgcccgaggtgcatccgacgctgccgacgtggaagtgcacgacgagcggcgggtgcgtccagcaggacacgtcggtggtgctcgactggaactaccgctggttccacaccgaggacggtagcaagtcgtgcatcacctctagcggcgtcgaccggaccctgtgcccggacgaggcgacgtgcgccaagaactgcttcgtcgagggcgtcaactacacgagcagcggggtcgagacgtccggcagctccctcaccctccgccagttcttcaagggctccgacggcgccatcaacagcgtctccccgcgcgtctacctgctcgggggagacggcaactatgtcgtgctcaagctcctcggccaggagctgagcttcgacgtggacgtatcgtcgctcccgtgcggcgagaacgcggccctgtacctgtccgagatggacgcgacgggaggacggaacgagtacaacacgggcggggccgagtacgggtcgggctactgtgacgcccagtgccccgtgcagaactggaacaacgggacgctcaacacgggccgggtgggctcgtgctgcaacgagatggacatcctcgaggccaactccaaggccgaggccttcacgccgcacccctgcatcggcaactcgtgcgacaagagcgggtgcggcttcaacgcgtacgcgcgcggttaccacaactactgggcccccggcggcacgctcgacacgtcccggcctttcaccatgatcacccgcttcgtcaccgacgacggcaccacctcgggcaagctcgcccgcatcgagcgcgtctacgtccaggacggcaagaaggtgcccagcgcggcgcccgggggggacgtcatcacggccgacgggtgcacctccgcgcagccctacggcggcctttccggcatgggcgacgccctcggccgcggcatggtcctggccctgagcatctggaacgacgcgtccgggtacatgaactggctcgacgccggcagcaacggcccctgcagcgacaccgagggtaacccgtccaacatcctggccaaccacccggacgcccacgtcgtgctctccaacatccgctggggcgacatcggctccaccgtcgacaccggcgatggcgacaacaacggcggcggccccaacccgtcatccaccaccaccgctaccgctaccaccacctcctccggcccggccgagcctacccagacccactacggccagtgtggagggaaaggatggacgggccctacccgctgcgagacgccctacacctgcaagtaccagaacgactggtactcgcagtgcctgtag

SEQ ID NO: 305 - protein, 464 aa, Myceliophthora thermophilia
MGQKTLQGLVAAAALAASVANAQQPGTFTPEVHPTLPTWKCTTSGGCVQQDTSVVLDWNYRWFHTEDGSKSCITSSGVDRTLCPDEATCAKNCFVEGVNYTSSGVETSGSSLTLRQFFKGSDGAINSVSPRVYLLGGDGNYVVLKLLGQELSFDVDVSSLPCGENAALYLSEMDATGGRNEYNTGGAEYGSGYCDAQCPVQNWNNGTLNTGRVGSCCNEMDILEANSKAEAFTPHPCIGNSCDKSGCGFNAYARGYHNYWAPGGTLDTSRPFTMITRFVTDDGTTSGKLARIERVYVQDGKKVPSAAPGGDVITADGCTSAQPYGGLSGMGDALGRGMVLALSIWNDASGYMNWLDAGSNGPCSDTEGNPSNILANHPDAHVVLSNIRWGDIGSTVDTGDGDNNGGGPNPSSTTTATATTTSSGPAEPTQTHYGQCGGKGWTGPTRCETPYTCKYQNDWYSQCL

SEQ ID NO: 306 - protein, 442 aa, Myceliophthora thermophilia
QQPGTFTPEVHPTLPTWKCTTSGGCVQQDTSVVLDWNYRWFHTEDGSKSCITSSGVDRTLCPDEATCAKNCFVEGVNYTSSGVETSGSSLTLRQFFKGSDGAINSVSPRVYLLGGDGNYVVLKLLGQELSFDVDVSSLPCGENAALYLSEMDATGGRNEYNTGGAEYGSGYCDAQCPVQNWNNGTLNTGRVGSCCNEMDILEANSKAEAFTPHPCIGNSCDKSGCGFNAYARGYHNYWAPGGTLDTSRPFTMITRFVTDDGTTSGKLARIERVYVQDGKKVPSAAPGGDVITADGCTSAQPYGGLSGMGDALGRGMVLALSIWNDASGYMNWLDAGSNGPCSDTEGNPSNILANHPDAHVVLSNIRWGDIGSTVDTGDGDNNGGGPNPSSTTTATATTTSSGPAEPTQTHYGQCGGKGWTGPTRCETPYTCKYQNDWYSQCL

SEQ ID NO: 307 - DNA, 1188 bp, Myceliophthora thermophilia
atgaagttcgtgcagtccgccaccctggcgttcgccgccacggccctcgctgcgccctcgcgcacgactccccagaagccccgccaggcctcggcgggctgcgcgtcggccgtgacgctcgatgccagcaccaacgtgttccagcagtacacgctgcaccccaacaacttctaccgtgccgaggtcgaggctgccgccgaggccatctccgactcggcgctggccgagaaggcccgcaaggtcgccgacgtcggtaccttcctgtggctcgacaccatcgagaacattggccggctggagcccgcgctcgaggacgtgccctgcgagaacatcgtgggtctcgtcatctacgacctcccgggccgtgactgcgcggccaaggcctccaacggcgagctcaaggtcggcgagctcgacaggtacaagaccgagtacatcgacaagatcgccgagatcctcaaggcccactccaacacggccttcgccctcgtcatcgagcccgactcgctccccaacctggtcaccaatagcgacctgcagacgtgccagcagagcgcttccggctaccgcgagggtgtcgcctatgccctcaagcagctcaacctccccaacgtggtcatgtacatcgatgccggccacggtggctggctcggctgggacgccaacctcaagcccggcgcccaggagctcgccagcgtctacaagtctgctggttcgccctcgcaagtccgcggtatctccaccaacgtggctggttggaacgcctgggaccaggagcccggtgagttctcggacgcctcggatgcccagtacaacaagtgccagaacgagaagatctacatcaacacctttggcgctgagctcaagtctgccggcatgcccaaccacgccatcatcgacactggccgcaacggtgtcaccggtctccgcgacgagtggggtgactggtgcaacgtcaacggcgccggcttcggtgtgcgcccgactgccaacactggcgacgagctcgccgacgccttcgtgtgggtcaagcccggtggcgagtccgacggcaccagcgactcgtcggcggcgcgctacgacagcttctgcggcaagcccgacgccttcaagcccagccccgaggccggtacctggaaccaggcctacttcgagatgctcctcaagaacgccaacccgtccttctaa

SEQ ID NO: 308 - protein, 395 aa, Myceliophthora thermophilia
MKFVQSATLAFAATALAAPSRTTPQKPRQASAGCASAVTLDASTNVFQQYTLHPNNFYRAEVEAAAEAISDSALAEKARKVADVGTFLWLDTIENIGRLEPALEDVPCENIVGLVIYDLPGRDCAAKASNGELKVGELDRYKTEYIDKIAEILKAHSNTAFALVIEPDSLPNLVTNSDLQTCQQSASGYREGVAYALKQLNLPNVVMYIDAGHGGWLGWDANLKPGAQELASVYKSAGSPSQVRGISTNVAGWNAWDQEPGEFSDASDAQYNKCQNEKIYINTFGAELKSAGMPNHAIIDTGRNGVTGLRDEWGDWCNVNGAGFGVRPTANTGDELADAFVWVKPGGESDGTSDSSAARYDSFCGKPDAFKPSPEAGTWNQAYFEMLLKNANPSF

SEQ ID NO: 309 - protein, 378 aa, Myceliophthora thermophilia
APSRTTPQKPRQASAGCASAVTLDASTNVFQQYTLHPNNFYRAEVEAAAEAISDSALAEKARKVADVGTFLWLDTIENIGRLEPALEDVPCENIVGLVIYDLPGRDCAAKASNGELKVGELDRYKTEYIDKIAEILKAHSNTAFALVIEPDSLPNLVTNSDLQTCQQSASGYREGVAYALKQLNLPNVVMYIDAGHGGWLGWDANLKPGAQELASVYKSAGSPSQVRGISTNVAGWNAWDQEPGEFSDASDAQYNKCQNEKIYINTFGAELKSAGMPNHAIIDTGRNGVTGLRDEWGDWCNVNGAGFGVRPTANTGDELADAFVWVKPGGESDGTSDSSAARYDSFCGKPDAFKPSPEAGTWNQAYFEMLLKNANPSF

SEQ ID NO: 310 - DNA, 1266 bp, Myceliophthora thermophilia
atgctccttgaccgcgaggcgggccagctgcccttaacccggtcaccaaccatggtgtcgttttcgagcctggccatcctcggcctaaacctagccgcacgagtatcttcaaccattcttcagaatggccaagtaagaaagaccaatttcccagatactcgaattaatccggcagactactcgtttacgacgtacccggccaatgccaccgagatctcgtacaaagggcggtgggactcgaaacatgtctcctggtggtcagcccccggtatcaagtttggctataccggaaagacagtagccatcacctttggcaacctgacggataatggcgttctcgtcggctatcgcattggagggctcgactggatgttcaccaacattacagcaggggctactcacctcctcgtgagcccagaaacgccgggttcaaatgagacaggcccaatcaacccgtggacgtttgagatgcgggtgtcgaattgggcatacggcgtgcaaatcgactccgttcacgttgccgccggggagaagctggtcaagatcccggattttggccgccggatcgaggtaattggcgatagcctcgccgcgggcatgtacacgaccggcctgggagctggcctgggcaacaccgagttcacggtgactgctcagctccgcgagcctcctgacgctgcgacgactctcacacaccatggcacagacgacccagagccctgggactttgcgaaacacccagctgcagacattgtcgtcatcaacatcggcacgaacgacaggaatgaggcgaacaatgtttcgacagaggcctacatcgatgcgttgacaaagatcattgagggcatccacggcaagtggccgaaggcccaggtcatagtcatgtctctctggctcggattctaccagagcgggaacacctacctccccaatgcgccagatggctgggtcaaggaaatctatgacatggttcggtggttcaactcggacgactacctccgcaacccaattatttacgacggcgtcaccaaaaagacatcaagaaccggaaaacgggcaaagccctttgtccactacttcaacacgacaggcatcatgcaacacaacgacattggcccgctgtggcacccgactgatgtaggcgccgtcaaggtggccagtcacctgcagcagttcattcgtatcaagttcgggtgggacttttatgccaccggcccggagatattccacgagaccctgtactggaatgacgagccgaactactaa

SEQ ID NO: 311 - protein, 421 aa, Myceliophthora thermophilia
MLLDREAGQLPLTRSPTMVSFSSLAILGLNLAARVSSTILQNGQVRKTNFPDTRINPADYSFTTYPANATEISYKGRWDSKHVSWWSAPGIKFGYTGKTVAITFGNLTDNGVLVGYRIGGLDWMFTNITAGATHLLVSPETPGSNETGPINPWTFEMRVSNWAYGVQIDSVHVAAGEKLVKIPDFGRRIEVIGDSLAAGMYTTGLGAGLGNTEFTVTAQLREPPDAATTLTHHGTDDPEPWDFAKHPAADIVVINIGTNDRNEANNVSTEAYIDALTKIIEGIHGKWPKAQVIVMSLWLGFYQSGNTYLPNAPDGWVKEIYDMVRWFNSDDYLRNPIIYDGVTKKTSRTGKRAKPFVHYFNTTGIMQHNDIGPLWHPTDVGAVKVASHLQQFIRIKFGWDFYATGPEIFHETLYWNDEPNY

SEQ ID NO: 312 - protein, 384 aa, Myceliophthora thermophilia
TILQNGQVRKTNFPDTRINPADYSFTTYPANATEISYKGRWDSKHVSWWSAPGIKFGYTGKTVAITFGNLTDNGVLVGYRIGGLDWMFTNITAGATHLLVSPETPGSNETGPINPWTFEMRVSNWAYGVQIDSVHVAAGEKLVKIPDFGRRIEVIGDSLAAGMYTTGLGAGLGNTEFTVTAQLREPPDAATTLTHHGTDDPEPWDFAKHPAADIVVINIGTNDRNEANNVSTEAYIDALTKIIEGIHGKWPKAQVIVMSLWLGFYQSGNTYLPNAPDGWVKEIYDMVRWFNSDDYLRNPIIYDGVTKKTSRTGKRAKPFVHYFNTTGIMQHNDIGPLWHPTDVGAVKVASHLQQFIRIKFGWDFYATGPEIFHETLYWNDEPNY

SEQ ID NO: 313 - DNA, 840 bp, Myceliophthora thermophilia
atgatctcggttcctgctctcgctctggcccttctggccgccgtccaggtcgtcgagtctgcctcggctggctgtggcaaggcgcccccttcctcgggcaccaagtcgatgacggtcaacggcaagcagcgccagtacattctccagctgcccaacaactacgacgccaacaaggcccacagggtggtgatcgggtaccactggcgcgacggatccatgaacgacgtggccaacggcggcttctacgatctgcggtcccgggcgggcgacagcaccatcttcgttgcccccaacggcctcaatgccggatgggccaacgtgggcggcgaggacatcacctttacggaccagatcgtagacatgctcaagaacgacctctgcgtggacgagacccagttctttgctacgggctggagctatggcggtgccatgagccatagcgtggcttgttctcggccagacgtcttcaaggccgtcgcggtcatcgccggggcccagctgtccggctgcgccggcggcacgacgcccgtggcgtacctaggcatccacggagccgccgacaacgtcctgcccatcgacctcggccgccagctgcgcgacaagtggctgcagaccaacggctgcaactaccagggcgcccaggaccccgcgccgggccagcaggcccacatcaagaccacctacagctgctcccgcgcgcccgtcacctggatcggccacgggggcggccacgtccccgaccccacgggcaacaacggcgtcaagtttgcgccccaggagacctgggacttctttgatgccgccgtcggagcggccggcgcgcagagcccgatgacataa

SEQ ID NO: 314 - protein, 279 aa, Myceliophthora thermophilia
MISVPALALALLAAVQVVESASAGCGKAPPSSGTKSMTVNGKQRQYILQLPNNYDANKAHRVVIGYHWRDGSMNDVANGGFYDLRSRAGDSTIFVAPNGLNAGWANVGGEDITFTDQIVDMLKNDLCVDETQFFATGWSYGGAMSHSVACSRPDVFKAVAVIAGAQLSGCAGGTTPVAYLGIHGAADNVLPIDLGRQLRDKWLQTNGCNYQGAQDPAPGQQAHIKTTYSCSRAPVTWIGHGGGHVPDPTGNNGVKFAPQETWDFFDAAVGAAGAQSPMT

SEQ ID NO: 315 - protein, 259 aa, Myceliophthora thermophilia
ASAGCGKAPPSSGTKSMTVNGKQRQYILQLPNNYDANKAHRVVIGYHWRDGSMNDVANGGFYDLRSRAGDSTIFVAPNGLNAGWANVGGEDITFTDQIVDMLKNDLCVDETQFFATGWSYGGAMSHSVACSRPDVFKAVAVIAGAQLSGCAGGTTPVAYLGIHGAADNVLPIDLGRQLRDKWLQTNGCNYQGAQDPAPGQQAHIKTTYSCSRAPVTWIGHGGGHVPDPTGNNGVKFAPQETWDFFDAAVGAAGAQSPMT

SEQ ID NO: 316 - DNA, 876 bp, Myceliophthora thermophilia
atgctggttcgctcgttcctcgggttcgccgtcttggcggcaacatgcctcgccgcctcgctgcaggaggtcaccgagtttggagacaacccgaccaacattcagatgtacatctacgtgcccgatcagctggacaccaaccccccagtgatcgttgcgctccatccctgcggcggaagcgcccagcagtggttcagcgggacccagctgccgtcgtatgccgacgacaacggcttcatcctcatctaccctagcacgccgcacatgagcaactgctgggacatccagaacccggacaccctgacccacggccagggcggcgacgcgctgggtatcgtcagcatggtcaactacaccctcgacaagcactcgggcgacagctcgcgcgtgtacgccatgggcttctcgtccggcggcatgatgaccaaccagctcgccggctcgtacccggacgtgttcgaggccggcgccgtgtactcgggtgtggcctttggttgtgctgcgggcgccgaatctgctacgccgttcagtcccaaccagacctgcgcccagggcctacagaagacagcgcaggagtggggcgactttgtccggaatgcctatgcgggatataccgggcggcggccgcggatgcagatcttccacgggcttgaagacactctcgtcaggccgcagtgcgccgaggaggcgctcaagcagtggtccaacgtcctgggcgtcgagttgacgcaggaggtgagcggagtgccgtcccccgggtggacccagaagatctatggcgacgggacgcagctgcagggattctttggccagggcatcggccatcagtcgacagtgaacgagcagcagctgctccagtggtttggcttgatctga

SEQ ID NO: 317 - protein, 291 aa, Myceliophthora thermophilia
MLVRSFLGFAVLAATCLAASLQEVTEFGDNPTNIQMYIYVPDQLDTNPPVIVALHPCGGSAQQWFSGTQLPSYADDNGFILIYPSTPHMSNCWDIQNPDTLTHGQGGDALGIVSMVNYTLDKHSGDSSRVYAMGFSSGGMMTNQLAGSYPDVFEAGAVYSGVAFGCAAGAESATPFSPNQTCAQGLQKTAQEWGDFVRNAYAGYTGRRPRMQIFHGLEDTLVRPQCAEEALKQWSNVLGVELTQEVSGVPSPGWTQKIYGDGTQLQGFFGQGIGHQSTVNEQQLLQWFGLI

SEQ ID NO: 318 - protein, 273 aa, Myceliophthora thermophilia
ASLQEVTEFGDNPTNIQMYIYVPDQLDTNPPVIVALHPCGGSAQQWFSGTQLPSYADDNGFILIYPSTPHMSNCWDIQNPDTLTHGQGGDALGIVSMVNYTLDKHSGDSSRVYAMGFSSGGMMTNQLAGSYPDVFEAGAVYSGVAFGCAAGAESATPFSPNQTCAQGLQKTAQEWGDFVRNAYAGYTGRRPRMQIFHGLEDTLVRPQCAEEALKQWSNVLGVELTQEVSGVPSPGWTQKIYGDGTQLQGFFGQGIGHQSTVNEQQLLQWFGLI

SEQ ID NO: 319 - DNA, 678 bp, Myceliophthora thermophilia
atgcgcttctcgctctacatggcgctcatttccacgctcgcggcggtagccgagtgcagcagcttccagcagcagtgctccaagctcgccagcaagctcaagatcgagaatgctaccgcctggttctccgagtacgtggccgctggcaccaacatgtccttcccagacacggacccgtcgtgcgcccagggcagcctggtggtcgatgtcgacttctgccgcgtcgccccgtacgttgccacgtcccaccgttcgggcatcagcatggaggcctggctgcccaagaactggaccggccggttcctgagcacgggcaacggcggtctcaatggctgtctctcgtacgacgacatggcctacacggtcgagcttggcttctccaccgtcggcgccaaaaactgccacaacggccacaacggcacctcgggcgcccccttcctcaataaccccgacgtattagtcgtggactttgcctggccgtccgttcacaccaacgctgtggcggctacgtcgacggcatcatcgaggacccggaactctgccggtaccgccttcgtcggcggccgcgccggcggcgaggtcgccttccgccgcaggcattgcaagtacccgctgcggaacacgtacgggggcaagggagaccccaaggatcccgacagctggcagtgcgttctgtga

SEQ ID NO: 320 - protein, 225 aa, Myceliophthora thermophilia
MRFSLYMALISTLAAVAECSSFQQQCSKLASKLKIENATAWFSEYVAAGTNMSFPDTDPSCAQGSLVVDVDFCRVAPYVATSHRSGISMEAWLPKNWTGRFLSTGNGGLNGCLSYDDMAYTVELGFSTVGAKNCHNGHNGTSGAPFLNNPDVLVVDFAWPSVHTNAVAATSTASSRTRNSAGTAFVGGRAGGEVAFRRRHCKYPLRNTYGGKGDPKDPDSWQCVL

SEQ ID NO: 321 - protein, 206 aa, Myceliophthora thermophilia
SSFQQQCSKLASKLKIENATAWFSEYVAAGTNMSFPDTDPSCAQGSLVVDVDFCRVAPYVATSHRSGISMEAWLPKNWTGRFLSTGNGGLNGCLSYDDMAYTVELGFSTVGAKNCHNGHNGTSGAPFLNNPDVLVVDFAWPSVHTNAVAATSTASSRTRNSAGTAFVGGRAGGEVAFRRRHCKYPLRNTYGGKGDPKDPDSWQCVL

SEQ ID NO: 322 - DNA, 1356 bp, Myceliophthora thermophilia
atgcgcatttcgtcggccacgctcaccgcggcgctctccagcgttgcctcggcttcgctgcaggtcgtgccaggaggaacatggaccacgccggacggcgagcacttgcaggcccatggtgcaggtttcattgaggtcaacgggacgtactacatgatcggcgaggacaagagcggcggccactcgttcaccaacgtcaactgctactcgtcgacggatcttgtccagtggacctatgtcggcgccctcctctcccagacgagctccggtgatctggggcccaaccgcgtcgtggagcggcccaaggtcatctacaacgacaagacgggcaagtacgtgctctggatgcacatggacagcagcaactacggcgaggcgagggttgccgtcgcaacgggcgactcggtgtgcggcaagtacgaatacatcaggagctttcaaccactcgggagggagagccgggatatggggcttttcaaggacgacgacggcaaggcctacttgctgaccgaagatagaaactacggcctccgcattgtcgcgctttcggatgactatctgactcccacgactgacgtcttctcctggagactcgagggggggaaccgggtcgaggccccggccatggtcaagctcggcgacacgtacttcttgttcgcctccatgatgaccggatgggaccccaacgacaaccagtacacgacatccaagagcctcggatccggttggtccgagtggaagaagtttgccgaccagggaacaaatacgtacaactcgcaaacgacttacatcctcaagacgagcgagagcagcgccatctacatgggcgacaggtgggtcaaggacaatctgatggcgagcacctacgtgtggctgcccctgagcatcagcggcaccagcgtcagcatgaagaactttgtcagctgggtgccgacgtccaacttcgcctcgtggcagaacccgccggccgagacgagctacgaggccgaggcggccacgtacggcggcaaggcgcgcaacatcgactgctccggctgctccggcaaggtcgccgccggctacatcggcggcccggacaacggcagcgtcaccttcaccggcatccgcagcgacatcgacggcctgaccaccatccgcatcaagttcctcaacggcgacagcagtccgcgctacgccaacgtccgcgtcaacggcgacgccggcaggaagatcgccttcctcactgcccgtggcgatcccgcctccagcaccttgcatgcccagctcaagaagggctccgacaacaccatagttatcgagggcatcaacggcggatggggccccgacgtcgaccgcctgatggtgccggtacagtga

SEQ ID NO: 323 - protein, 451 aa, Myceliophthora thermophilia
MRISSATLTAALSSVASASLQVVPGGTWTTPDGEHLQAHGAGFIEVNGTYYMIGEDKSGGHSFTNVNCYSSTDLVQWTYVGALLSQTSSGDLGPNRVVERPKVIYNDKTGKYVLWMHMDSSNYGEARVAVATGDSVCGKYEYIRSFQPLGRESRDMGLFKDDDGKAYLLTEDRNYGLRIVALSDDYLTPTTDVFSWRLEGGNRVEAPAMVKLGDTYFLFASMMTGWDPNDNQYTTSKSLGSGWSEWKKFADQGTNTYNSQTTYILKTSESSAIYMGDRWVKDNLMASTYVWLPLSISGTSVSMKNFVSWVPTSNFASWQNPPAETSYEAEAATYGGKARNIDCSGCSGKVAAGYIGGPDNGSVTFTGIRSDIDGLTTIRIKFLNGDSSPRYANVRVNGDAGRKIAFLTARGDPASSTLHAQLKKGSDNTIVIEGINGGWGPDVDRLMVPVQ

SEQ ID NO: 324 - protein, 433 aa, Myceliophthora thermophilia
SLQVVPGGTWTTPDGEHLQAHGAGFIEVNGTYYMIGEDKSGGHSFTNVNCYSSTDLVQWTYVGALLSQTSSGDLGPNRVVERPKVIYNDKTGKYVLWMHMDSSNYGEARVAVATGDSVCGKYEYIRSFQPLGRESRDMGLFKDDDGKAYLLTEDRNYGLRIVALSDDYLTPTTDVFSWRLEGGNRVEAPAMVKLGDTYFLFASMMTGWDPNDNQYTTSKSLGSGWSEWKKFADQGTNTYNSQTTYILKTSESSAIYMGDRWVKDNLMASTYVWLPLSISGTSVSMKNFVSWVPTSNFASWQNPPAETSYEAEAATYGGKARNIDCSGCSGKVAAGYIGGPDNGSVTFTGIRSDIDGLTTIRIKFLNGDSSPRYANVRVNGDAGRKIAFLTARGDPASSTLHAQLKKGSDNTIVIEGINGGWGPDVDRLMVPVQ

SEQ ID NO: 325 - DNA, 966 bp, Myceliophthora thermophilia
atgaagagatccggccttctggggacggtggctcttctgttcccggccctcgtttctgcctatgcgctcccgggcgaatgtactggagtctgcaacaactcccacgacccgtcaatcatccgccgcgcagatgggacgtacttccgcttctcgactggtggcaagatcgccattcacacggcgccgagcctgaccggcccgtggacctataggggcgccgccttgccggccgggtcctccatcaacttggacgggaaccaggacctctgggcccccgatgttgcacaggtcggagaccagtactacctgtactactccgtcagcaccttcggcgtccagaactcggccatcggcatagcccgctcatcgagcctggacgccggcacctggaccgacctcgggtctaccggtgtcacctccagcacgggctcggcgtacaacgccatcgacggcaacctgatcaacgagccggggaccagcaactacttcctcacgtttggcagcttctggaacggcatccatcgcgtccgcatgacgcccaccaagacgaacggcaacgtgtaccaggtcgcctttgatcccaacgacccggccatggaaggcccgaccgtcttcaagtacggcgactactactaccttttcttctccaagggcacgtgctgcggctacgaccagaacaggccgcccgccggacaggagtacaggatcatggtgtgcaggtcgacctcgcccaccggccccttcgaggacagggacggcaagtcgtgccgctcgggcggtggaactctggtgctcccgtctcacgactgggtgtacggccccggcggccaaggtgtctaccaggaccccgaacacggaccggtcttgtactaccattatgttgatactcgcattggctatgcggacggccagaagaagtttggttggaatcgcatcgacttttcaagcggttggccggttgtctga

SEQ ID NO: 326 - protein, 321 aa, Myceliophthora thermophilia
MKRSGLLGTVALLFPALVSAYALPGECTGVCNNSHDPSIIRRADGTYFRFSTGGKIAIHTAPSLTGPWTYRGAALPAGSSINLDGNQDLWAPDVAQVGDQYYLYYSVSTFGVQNSAIGIARSSSLDAGTWTDLGSTGVTSSTGSAYNAIDGNLINEPGTSNYFLTFGSFWNGIHRVRMTPTKTNGNVYQVAFDPNDPAMEGPTVFKYGDYYYLFFSKGTCCGYDQNRPPAGQEYRIMVCRSTSPTGPFEDRDGKSCRSGGGTLVLPSHDWVYGPGGQGVYQDPEHGPVLYYHYVDTRIGYADGQKKFGWNRIDFSSGWPVV

SEQ ID NO: 327 - protein, 301 aa, Myceliophthora thermophilia
YALPGECTGVCNNSHDPSIIRRADGTYFRFSTGGKIAIHTAPSLTGPWTYRGAALPAGSSINLDGNQDLWAPDVAQVGDQYYLYYSVSTFGVQNSAIGIARSSSLDAGTWTDLGSTGVTSSTGSAYNAIDGNLINEPGTSNYFLTFGSFWNGIHRVRMTPTKTNGNVYQVAFDPNDPAMEGPTVFKYGDYYYLFFSKGTCCGYDQNRPPAGQEYRIMVCRSTSPTGPFEDRDGKSCRSGGGTLVLPSHDWVYGPGGQGVYQDPEHGPVLYYHYVDTRIGYADGQKKFGWNRIDFSSGWPVV

SEQ ID NO: 328 - DNA, 963 bp, Myceliophthora thermophilia
atgaagggtgtttccatcgcaggggccttctcgggcctccttagcttggcctcagctgcctctttctcgaatcctctcaaacccttcaacgggtcagatcctcatatgacctactatgatgggtactattatctgatgacgacaacatggaccgacctgcagataacccgagccaagaccttagagggcctcaaaaacggagagaccagggtggtttggactgactcggatccctcccgctgctgcaatgtctgggcacccgagcttcacaagattgacaacaagtggtacatctactacacagctggaaacaaccagaacctagatggccagcggtctcatgtcctagaaggtggttctgacccgtggggccagtactcctatgccggacagctcacccaagactggggcatcgacggtacgattctccgcgtccagaaccagaactactttgtttggtcctgcttctcggacggtatccagtccctctgcattgcgcctttgcagtcaccgacttcgattggctctccccgagtgctctcgcaaccgctcctggactgggaacgggtcgacactccggttaatgaggggccggcaccgctctaccatgatggaaaaatcttcctcgcctatagtgccagtttctgctggacacctagctaccaactcggcctccttacttacaacgggggggatccgactgcagccagcagctggacaaagacggggcccttcttcagctcggcaaatggaaactacggtccgggacacaattcgtttgtcaatagcccggacggcaccgagatctggaacatctaccatgcgacctccatctcaactggtaattgtgatggcaacaggtacaccgcggccaagaaggtgacctggaattcggatggctctcccaactttggcagccccgatcccctaggcgttgtcactcctgggccctcgggggagtaa

SEQ ID NO: 329 - protein, 320 aa, Myceliophthora thermophilia
MKGVSIAGAFSGLLSLASAASFSNPLKPFNGSDPHMTYYDGYYYLMTTTWTDLQITRAKTLEGLKNGETRVVWTDSDPSRCCNVWAPELHKIDNKWYIYYTAGNNQNLDGQRSHVLEGGSDPWGQYSYAGQLTQDWGIDGTILRVQNQNYFVWSCFSDGIQSLCIAPLQSPTSIGSPRVLSQPLLDWERVDTPVNEGPAPLYHDGKIFLAYSASFCWTPSYQLGLLTYNGGDPTAASSWTKTGPFFSSANGNYGPGHNSFVNSPDGTEIWNIYHATSISTGNCDGNRYTAAKKVTWNSDGSPNFGSPDPLGVVTPGPSGE

SEQ ID NO: 330 - protein, 301 aa, Myceliophthora thermophilia
ASFSNPLKPFNGSDPHMTYYDGYYYLMTTTWTDLQITRAKTLEGLKNGETRVVWTDSDPSRCCNVWAPELHKIDNKWYIYYTAGNNQNLDGQRSHVLEGGSDPWGQYSYAGQLTQDWGIDGTILRVQNQNYFVWSCFSDGIQSLCIAPLQSPTSIGSPRVLSQPLLDWERVDTPVNEGPAPLYHDGKIFLAYSASFCWTPSYQLGLLTYNGGDPTAASSWTKTGPFFSSANGNYGPGHNSFVNSPDGTEIWNIYHATSISTGNCDGNRYTAAKKVTWNSDGSPNFGSPDPLGVVTPGPSGE

SEQ ID NO: 331 - DNA, 2283 bp, Myceliophthora thermophilia
atggccttcctttcctcctttgcccttgccgccctcggggcactcgtcgtcccggcgaggggcggcgtgacgtacccggactgcgcaaacggaccgctcaagtcaaatacggtgtgcgatacgtcggcgtccccgggagcccgagccgctgctcttgtgagtgtaatgaacaacaacgaaaaacttgcaaatcttgtcaacaattcgcccggcgtctcgcggctcggcctgagtgcgtaccagtggtggaacgaagccctccacggagtagcccataaccgcggcattacctggggcggcgagttcagcgcggcaacccagttcccgcaggctatcacgacttccgccactttcgatgacgctttgatcgagcaaatcggcaccattatcagcaccgaggcccgtgcctttgccaacaatgggcgcgctcatctcgacttctggacgcccaacgtcaacccgtttcgagacccgcgatggggtcgcggacacgagacgccgggagaggatgcattcaagaataagaagtgggccgaggccttcgtcaagggcatgcaaggacccggaccgacgcaccgagtcatcgccacatgtaagcactacgccgcctacgacctcgagaactccgggagcacgacccgattcaacttcgatgcgaaggtgtcaactcaagatctcgccgagtactatctccctccgttccaacagtgcgcccgggactctaaggtgggctccatcatgtgcagctacaatgcggtcaatgaaatcccggcctgcgcgaatccttacctgatggataccatcctgcggaaacattggaattggaccgacgagcaccagtatattgtgagcgactgcgatgccgtgtactatctcggcaatgcgaacggcggccaccgatacaagccgagctatgcggcggcgatcggagcatctctcgaggctggttgcgataacatgtgctgggcgaccggcggcaccgccccggatcccgcctcagccttcaattccggccagttcagccagacgacactggacacggctattttgcgccagatgcagggcctcgtcctagcgggatactttgacggtccgggcggtatgtaccgcaacctgagcgtggcggacgtgaacacgcagaccgcccaggacactgcactcaaggcggcggaaggaggcatcgtgctcctcaagaacgatgggatccttccgctgtcggttaacggttccaatttccaggtcgctatgatcgggttctgggcgaacgcagccgacaagatgctcgggggttacagcgggagcccgccgttcaaccatgatcccgtgaccgctgcaagatcgatgggcatcacggtcaactacgtcaacgggccattgacgcaacccaacggggatacgtcggcagcactcaatgcggcccaaaagtccaacgcggtggtattctttggtggaatcgacaatacggtggagaaggagagtcaggacagaacgtccatcgagtggccctcagggcaactggctctgattcggaggctagccgaaaccggcaaaccagtcatcgtcgtcaggctcgggacgcacgtcgacgacaccccgctcctcagcattccgaatgtgagagccattttgtgggcaggatacccgggtcaagacggcgggactgctgtggtgaaaatcattaccggccttgctagtccggcggggaggctgcccgccactgtgtatccgtcttcgtacaccagccaagcgccctttacaaacatggccctgaggccttcttcgtcctatcccgggcgaacataccgctggtacagtaacgccgtctttccatttggccacggcctacattataccaatttcagtgtctcggtgcgggactttccggccagcttcgcgattgccgatctcctggcttcctgcggggattccgtggcgtatcttgatctttgccccttcccgtccgtgtcgctcaatgtgaccaatacaggcacccgcgtgtccgattacgttgcgcttgggttcttgtcgggagattttggtcccagcccacatcccatcaagacattggcgacgtataagcgcgtgtttaacatcgaacctggggaaacacaggtggccgagctagactggaagctggagagcctggtccgggtagatgagaagggcaacagggtactctaccccggaacatatacgcttcttgtggatcagccaaccttggcaaatatcacctttattttgacaggagaagaggcagtgttggatagttggccgcagccgtga

SEQ ID NO: 332 - protein, 760 aa, Myceliophthora thermophilia
MAFLSSFALAALGALVVPARGGVTYPDCANGPLKSNTVCDTSASPGARAAALVSVMNNNEKLANLVNNSPGVSRLGLSAYQWWNEALHGVAHNRGITWGGEFSAATQFPQAITTSATFDDALIEQIGTIISTEARAFANNGRAHLDFWTPNVNPFRDPRWGRGHETPGEDAFKNKKWAEAFVKGMQGPGPTHRVIATCKHYAAYDLENSGSTTRFNFDAKVSTQDLAEYYLPPFQQCARDSKVGSIMCSYNAVNEIPACANPYLMDTILRKHWNWTDEHQYIVSDCDAVYYLGNANGGHRYKPSYAAAIGASLEAGCDNMCWATGGTAPDPASAFNSGQFSQTTLDTAILRQMQGLVLAGYFDGPGGMYRNLSVADVNTQTAQDTALKAAEGGIVLLKNDGILPLSVNGSNFQVAMIGFWANAADKMLGGYSGSPPFNHDPVTAARSMGITVNYVNGPLTQPNGDTSAALNAAQKSNAVVFFGGIDNTVEKESQDRTSIEWPSGQLALIRRLAETGKPVIVVRLGTHVDDTPLLSIPNVRAILWAGYPGQDGGTAVVKIITGLASPAGRLPATVYPSSYTSQAPFTNMALRPSSSYPGRTYRWYSNAVFPFGHGLHYTNFSVSVRDFPASFAIADLLASCGDSVAYLDLCPFPSVSLNVTNTGTRVSDYVALGFLSGDFGPSPHPIKTLATYKRVFNIEPGETQVAELDWKLESLVRVDEKGNRVLYPGTYTLLVDQPTLANITFILTGEEAVLDSWPQP

SEQ ID NO: 333 - protein, 739 aa, Myceliophthora thermophilia
GVTYPDCANGPLKSNTVCDTSASPGARAAALVSVMNNNEKLANLVNNSPGVSRLGLSAYQWWNEALHGVAHNRGITWGGEFSAATQFPQAITTSATFDDALIEQIGTIISTEARAFANNGRAHLDFWTPNVNPFRDPRWGRGHETPGEDAFKNKKWAEAFVKGMQGPGPTHRVIATCKHYAAYDLENSGSTTRFNFDAKVSTQDLAEYYLPPFQQCARDSKVGSIMCSYNAVNEIPACANPYLMDTILRKHWNWTDEHQYIVSDCDAVYYLGNANGGHRYKPSYAAAIGASLEAGCDNMCWATGGTAPDPASAFNSGQFSQTTLDTAILRQMQGLVLAGYFDGPGGMYRNLSVADVNTQTAQDTALKAAEGGIVLLKNDGILPLSVNGSNFQVAMIGFWANAADKMLGGYSGSPPFNHDPVTAARSMGITVNYVNGPLTQPNGDTSAALNAAQKSNAVVFFGGIDNTVEKESQDRTSIEWPSGQLALIRRLAETGKPVIVVRLGTHVDDTPLLSIPNVRAILWAGYPGQDGGTAVVKIITGLASPAGRLPATVYPSSYTSQAPFTNMALRPSSSYPGRTYRWYSNAVFPFGHGLHYTNFSVSVRDFPASFAIADLLASCGDSVAYLDLCPFPSVSLNVTNTGTRVSDYVALGFLSGDFGPSPHPIKTLATYKRVFNIEPGETQVAELDWKLESLVRVDEKGNRVLYPGTYTLLVDQPTLANITFILTGEEAVLDSWPQP

SEQ ID NO: 334 - DNA, 1071 bp, Myceliophthora thermophilia
atgaagtggacgagattgtctctcgctacggcctccctcttcggcctcgctgtcgccggatcaaagaacaagatccagatcggccaacaagtcatctactcgtaccccggcgaaacgccgccggagcacctcttcgatctcatcagggcaggccaagtgggcgggctcatcctcttcggcgagaacgtcaacgatgagctccccgcgaccatcgaacagttcctctcggcctaccgcgagagcccggcctacgccgacctcaagacgcccttcctgatcatgaccgaccaggagggcggccaggtccgccgtctgcccggcgcgcccgtggagtcggcgaaggaggtgggcgagtcggcggacccagtcgcggccgcgggccgggcgggcgccggcgcggcggagacgctgctccggtacaacatgaacgcgaacctcgcgcccgtcctggacgtctaccgggaggagggcgacttcacggacaattacgagcggtcgttcagcaacgacgcgacggtggtggccgggtgcgcggcgcagttcgtccgggaccagcagcgcgccaaggtcctcgcgacggcgaagcacttccccggcctgggcgccgccaagaaggacgagaacacggatgcgcgccccgtcaccatcgacctgacgctggaggagatccgcgcggtcgacgaggtcccctatcacgacgcgatcggcgccggcatcgccatgatcatgccgtcctgggccatctacccggcctttgacgccgagcggccggccgggctgagctcacgctggatacgagacgagctgcgcggaaggctgggcttcgacggcgtcattgtcaccgacgcgatcgaggccgggtccctgaaggcgtttggcgacgacgccgatcgggcgttgctggccaagaaggctggcgtggatctgattcttgcgtcggggaggaatgtgactcagggggagagcatcgtttctgcgttggccgccgcgctggagaatggagacctgtcgcagcaagagttggacgcgtcggacaagagggtacaggcggcccgggcgaagctcgcatag

SEQ ID NO: 335 - protein, 356 aa, Myceliophthora thermophilia
MKWTRLSLATASLFGLAVAGSKNKIQIGQQVIYSYPGETPPEHLFDLIRAGQVGGLILFGENVNDELPATIEQFLSAYRESPAYADLKTPFLIMTDQEGGQVRRLPGAPVESAKEVGESADPVAAAGRAGAGAAETLLRYNMNANLAPVLDVYREEGDFTDNYERSFSNDATVVAGCAAQFVRDQQRAKVLATAKHFPGLGAAKKDENTDARPVTIDLTLEEIRAVDEVPYHDAIGAGIAMIMPSWAIYPAFDAERPAGLSSRWIRDELRGRLGFDGVIVTDAIEAGSLKAFGDDADRALLAKKAGVDLILASGRNVTQGESIVSALAAALENGDLSQQELDASDKRVQAARAKLA

SEQ ID NO: 336 - protein, 337 aa, Myceliophthora thermophilia
GSKNKIQIGQQVIYSYPGETPPEHLFDLIRAGQVGGLILFGENVNDELPATIEQFLSAYRESPAYADLKTPFLIMTDQEGGQVRRLPGAPVESAKEVGESADPVAAAGRAGAGAAETLLRYNMNANLAPVLDVYREEGDFTDNYERSFSNDATVVAGCAAQFVRDQQRAKVLATAKHFPGLGAAKKDENTDARPVTIDLTLEEIRAVDEVPYHDAIGAGIAMIMPSWAIYPAFDAERPAGLSSRWIRDELRGRLGFDGVIVTDAIEAGSLKAFGDDADRALLAKKAGVDLILASGRNVTQGESIVSALAAALENGDLSQQELDASDKRVQAARAKLA

SEQ ID NO: 337 - DNA, 2334 bp, Myceliophthora thermophilia
atgaggttcctcccctcgacgttgcttcttgcggcggccgccctggctgccgacaaggggcgcccgagtctcaagaatgctgtgtacaagaaccccaaagcctcggtcgaggaccgtgtagccgaccttctctcccgaatgaccatcgaggagaaggcatcccagcttctccaaggtgacatccgcaactggatgaacgagacgaccaatgcgctcaaccagaccggtctggaatggagcaccagataccgggggagcgccttttatgtaggcgtccccgttcccaatgagtggctcacaaagcacatcaaggccgcccaggattacatccagaaggagacctacctgggtatcccggcctttgttcagaccgagggtcttcacggttttcttgctcacaatgccaccatcttcagctcgcccataggactcggctgctcatggaacccgtccctggttgaggagatggcggctgccattgccaaagaggcgcgcgcccttggcgtcaaccagctctttgccccggtcgccgacctcgcgcgggaactccgccacggccgtgtcgaggagatgtacagcgaggacggcctcctcgccggcgagttcgcccgtgcctatgtcaagggcgcgcagtcggccggtgtcagtgccatggtcaagcactttgccgcctttggcgtgacggagcagggcttgaacacggggcccgtccacggcggcgaacgagagctgcgcacaacctatctgccgccctaccagcgcgccatcatcgacggaggggtctattccatcatgacggcctaccacagctacgacggcatccccgccgtgtccgacccccacctgctcaccgacatcctccgggacgaatggggttacggatacttcaccatgacagacgccggcgcctcggaccgcctctgcgccgacttcaagatgtgcgcctcggatcccatcgacaaggaagccatcgtcaagtacatcctcccggccggcggcgacgtggagatgggaggcgggtcgtactcgttcgagaagatccccgagctggtgtccagcggcaaggtcgaggaggagctcgtcgataccgccgtcgcccgcgtccttcgggccaagtttgagctcggcctcttcgagaaccccttcccgggcctcccgtccgaggaggcgaacaaggtgatccacgcgcccgagcacgtcgccctggcgaagaagctggacgaggagtccatcgtcctcctggagaaccacaacaacgtcctgccgctgagcaaggatgcgtccgtggccgtcatcggacccatggcgcacggattcatgaactacggcgactacgtcgtcgtcaactcttcgacccgcgggatcacgcccctcgacggcatcaaggcggccagccggggcaaggtcacgtacgcgaaaggctgcgagcgctggtccaactcgcaagacgggtttcccgaggccgtcgcggccgccgaggccgccgacgtcgccgtcgtcgtggtcggcacctggtctcgggaccagaacgagctctggcagggcctgaacgccaccacgggcgagcacgtcgacgtggacagcctcgacctggttggcgcccaggaggccctcgtccgcgccatcgtcgagacgggcaagccgaccgtggtcgtcttctcgtccggcaagcccgtcaccgcgccgtcgatctcggagcacgccgccgccctcgtccagcagttctacccctcggagcagggaggcgccgccctcgcctccatcctcttcggcgacgtgaacccgagcggcaggctcagcgtcagcttcccccgcagcgtcggcgacctgccggtctactacgactacttgaactcgggacgcggcgcctcgcctgatgcgggcgtcgcttacgagaacggcactctggtgtttgggcatcagtacgtcctgggtgacccgaggcctctgtacgagttcggttacgggctgagttactccaagttcgagtacggcgacgtcactgtcgacaagacgatcgtgacggcccaagacaccgtcaccgtcaccgtcaccgtcaagaacgtgtcgagtcgggaaggtcaggaggtcgtccaggtctacgtcaaggacctgatcgccagcgtcgtcgttcccaacattcggctgaggggattccagaagctgaagctgaggccgggagagagcaagcgagtgagcatcaaggtcaacgtacaggacctgggcgtctgggacgcgaggatgcgatacgttgttgagcccggcgactttctgttcctcgttggtgcgtcgagcaacgatttcaggggaaatgtcactgttactgtcaagtag

SEQ ID NO: 338 - protein, 777 aa, Myceliophthora thermophilia
MRFLPSTLLLAAAALAADKGRPSLKNAVYKNPKASVEDRVADLLSRMTIEEKASQLLQGDIRNWMNETTNALNQTGLEWSTRYRGSAFYVGVPVPNEWLTKHIKAAQDYIQKETYLGIPAFVQTEGLHGFLAHNATIFSSPIGLGCSWNPSLVEEMAAAIAKEARALGVNQLFAPVADLARELRHGRVEEMYSEDGLLAGEFARAYVKGAQSAGVSAMVKHFAAFGVTEQGLNTGPVHGGERELRTTYLPPYQRAIIDGGVYSIMTAYHSYDGIPAVSDPHLLTDILRDEWGYGYFTMTDAGASDRLCADFKMCASDPIDKEAIVKYILPAGGDVEMGGGSYSFEKIPELVSSGKVEEELVDTAVARVLRAKFELGLFENPFPGLPSEEANKVIHAPEHVALAKKLDEESIVLLENHNNVLPLSKDASVAVIGPMAHGFMNYGDYVVVNSSTRGITPLDGIKAASRGKVTYAKGCERWSNSQDGFPEAVAAAEAADVAVVVVGTWSRDQNELWQGLNATTGEHVDVDSLDLVGAQEALVRAIVETGKPTVVVFSSGKPVTAPSISEHAAALVQQFYPSEQGGAALASILFGDVNPSGRLSVSFPRSVGDLPVYYDYLNSGRGASPDAGVAYENGTLVFGHQYVLGDPRPLYEFGYGLSYSKFEYGDVTVDKTIVTAQDTVTVTVTVKNVSSREGQEVVQVYVKDLIASVVVPNIRLRGFQKLKLRPGESKRVSIKVNVQDLGVWDARMRYVVEPGDFLFLVGASSNDFRGNVTVTVK

SEQ ID NO: 339 - protein, 761 aa, Myceliophthora thermophilia
ADKGRPSLKNAVYKNPKASVEDRVADLLSRMTIEEKASQLLQGDIRNWMNETTNALNQTGLEWSTRYRGSAFYVGVPVPNEWLTKHIKAAQDYIQKETYLGIPAFVQTEGLHGFLAHNATIFSSPIGLGCSWNPSLVEEMAAAIAKEARALGVNQLFAPVADLARELRHGRVEEMYSEDGLLAGEFARAYVKGAQSAGVSAMVKHFAAFGVTEQGLNTGPVHGGERELRTTYLPPYQRAIIDGGVYSIMTAYHSYDGIPAVSDPHLLTDILRDEWGYGYFTMTDAGASDRLCADFKMCASDPIDKEAIVKYILPAGGDVEMGGGSYSFEKIPELVSSGKVEEELVDTAVARVLRAKFELGLFENPFPGLPSEEANKVIHAPEHVALAKKLDEESIVLLENHNNVLPLSKDASVAVIGPMAHGFMNYGDYVVVNSSTRGITPLDGIKAASRGKVTYAKGCERWSNSQDGFPEAVAAAEAADVAVVVVGTWSRDQNELWQGLNATTGEHVDVDSLDLVGAQEALVRAIVETGKPTVVVFSSGKPVTAPSISEHAAALVQQFYPSEQGGAALASILFGDVNPSGRLSVSFPRSVGDLPVYYDYLNSGRGASPDAGVAYENGTLVFGHQYVLGDPRPLYEFGYGLSYSKFEYGDVTVDKTIVTAQDTVTVTVTVKNVSSREGQEVVQVYVKDLIASVVVPNIRLRGFQKLKLRPGESKRVSIKVNVQDLGVWDARMRYVVEPGDFLFLVGASSNDFRGNVTVTVK

SEQ ID NO: 340 - DNA, 2202 bp, Myceliophthora thermophilia
atgacccttcaagcctttgcgctgctggcggcggcggcccttgtacggggcgagaccccgaccaaggtccctcgcgacgctccgagaggagctgctgcttgggaagctgcccactcctcagcagccgctgccttgggaaagctgtcccagcaggacaagatcaacatcgtgacgggcgtcggctggaacaaggggccctgcgtgggcaatactcccgctatcagctccatcaactacccgcagctctgcctccaagacggacccctgggcgtccgcttcggttccagcatcaccgctttcactccaggcattcaggccgcgtcgacgtgggatgtggacctgatccgacaacgaggcgagtacatgggcgccgagttcaaggggtgtggcatccacgtccagctaggccccgtggccgggcccttgggtaaggttccgcaaggcggccgcaactgggagggctttggcgtggatccctacctcaccggcattgccatggccgagaccatcgaggggatacagtcagcgggcgtgcaagccaccgccaagcattacatcctcaacgagcaggagctcaaccgcgagaccatgagcagcaatgtcgacgaccgcaccttgcacgagctgtacctctggccttttgcagacgctgttcactctaacgtggccagcgtcatgtgcagttacaacaagatcaacggcacgtgggcgtgcgagaacgaccgggtgctgaacgtcattctgaagcaggagcttgggtttccgggctatgtgatgagcgactggaacgcgcagcactcgaccgacgacgcggccaaccacggcatggacatgacgatgcccggcagcgacttcaacggagggacgatcctctggggcccgcagctcgacagcgccgtcaacagcggccgggtgcccaagtcccgcctcgacgacatggtcgagcgcatcctcgcggcgtggtaccttctcggtcaggacagcaattacccggctatcaacatcggcgccaacgtacagggcaaccacaaggagaacgtgcgggcggtcgcgcgcgatggcatcgtgctcctcaagaacgacgacggcatcctcccgctcaagaagcccgccaagctcgccctcatcggttcggccgccgtcgtcaacccgcagggactgaactcctgccaggatcagggctgcaacaaaggcgcgctgggcatgggatgggggtccggggcggtcaactacccgtactttgtcgcgccgtacgacgcgctcaaggcccgcgcccaagaggacgggacgacggtcagcctgcacaactcggacagcacgagcggggtggcgaacgtggcctcggacgcggacgcggccatcgtggtcatcacggccgactcgggcgagggttacatcacagtcgaaggcgccgccggggaccggctgaacctcgacccgtggcacaacggcaacgagctggtaaaggcggtggcggcggccaacaagaacaccatcgtcgtcgtgcacagcgtcgggcccatcatcctcgagaccatcctggcaaccgaaggggtcaaggcgattgtgtgggccggcctgccaagccaggagaatggtaacgcgctggtggacatcctgtacggtctggcctcgccgtcgggcaagctggtctacaccatcgccaagcgagaacaggactacggcactgcggtcgttcgcggagacgacacatttccggagggcctgtttgtcgactaccggcactttgacaaggagaacatcgagccgcggtacgagtttgggtttgggctgtcatacaccaacttcacgtacgccgacctcgaactcacctcgaccgccacggccggcccagcgacgggcgagaccatccccggcggcgcggccgacctctgggaggaggtggccacggtcacggcgaccatcaccaacagcggcggcgtggacggcgccgaggtggcccagctgtacctgacgttgccgtcgtcggcgccggcgaccccgcccaagcagctccgcggcttcgccaagctcaagctggcggccggcgccagcgggaccgcgacgtttagtctgcgcaggcgcgacctcagctactgggacaccggccgcgggcagtgggtggtgccggagggcgagtttggcgtctcggtcggggcgagctcgcgcgatatccggctgacggggagcttccgagtatga

SEQ ID NO: 341 - protein, 733 aa, Myceliophthora thermophilia
MTLQAFALLAAAALVRGETPTKVPRDAPRGAAAWEAAHSSAAAALGKLSQQDKINIVTGVGWNKGPCVGNTPAISSINYPQLCLQDGPLGVRFGSSITAFTPGIQAASTWDVDLIRQRGEYMGAEFKGCGIHVQLGPVAGPLGKVPQGGRNWEGFGVDPYLTGIAMAETIEGIQSAGVQATAKHYILNEQELNRETMSSNVDDRTLHELYLWPFADAVHSNVASVMCSYNKINGTWACENDRVLNVILKQELGFPGYVMSDWNAQHSTDDAANHGMDMTMPGSDFNGGTILWGPQLDSAVNSGRVPKSRLDDMVERILAAWYLLGQDSNYPAINIGANVQGNHKENVRAVARDGIVLLKNDDGILPLKKPAKLALIGSAAVVNPQGLNSCQDQGCNKGALGMGWGSGAVNYPYFVAPYDALKARAQEDGTTVSLHNSDSTSGVANVASDADAAIVVITADSGEGYITVEGAAGDRLNLDPWHNGNELVKAVAAANKNTIVVVHSVGPIILETILATEGVKAIVWAGLPSQENGNALVDILYGLASPSGKLVYTIAKREQDYGTAVVRGDDTFPEGLFVDYRHFDKENIEPRYEFGFGLSYTNFTYADLELTSTATAGPATGETIPGGAADLWEEVATVTATITNSGGVDGAEVAQLYLTLPSSAPATPPKQLRGFAKLKLAAGASGTATFSLRRRDLSYWDTGRGQWVVPEGEFGVSVGASSRDIRLTGSFRV

SEQ ID NO: 342 - protein, 716 aa, Myceliophthora thermophilia
ETPTKVPRDAPRGAAAWEAAHSSAAAALGKLSQQDKINIVTGVGWNKGPCVGNTPAISSINYPQLCLQDGPLGVRFGSSITAFTPGIQAASTWDVDLIRQRGEYMGAEFKGCGIHVQLGPVAGPLGKVPQGGRNWEGFGVDPYLTGIAMAETIEGIQSAGVQATAKHYILNEQELNRETMSSNVDDRTLHELYLWPFADAVHSNVASVMCSYNKINGTWACENDRVLNVILKQELGFPGYVMSDWNAQHSTDDAANHGMDMTMPGSDFNGGTILWGPQLDSAVNSGRVPKSRLDDMVERILAAWYLLGQDSNYPAINIGANVQGNHKENVRAVARDGIVLLKNDDGILPLKKPAKLALIGSAAVVNPQGLNSCQDQGCNKGALGMGWGSGAVNYPYFVAPYDALKARAQEDGTTVSLHNSDSTSGVANVASDADAAIVVITADSGEGYITVEGAAGDRLNLDPWHNGNELVKAVAAANKNTIVVVHSVGPIILETILATEGVKAIVWAGLPSQENGNALVDILYGLASPSGKLVYTIAKREQDYGTAVVRGDDTFPEGLFVDYRHFDKENIEPRYEFGFGLSYTNFTYADLELTSTATAGPATGETIPGGAADLWEEVATVTATITNSGGVDGAEVAQLYLTLPSSAPATPPKQLRGFAKLKLAAGASGTATFSLRRRDLSYWDTGRGQWVVPEGEFGVSVGASSRDIRLTGSFRV

SEQ ID NO: 343 - DNA, 1836 bp, Myceliophthora thermophilia
atgttcttcgcttctctgctgctcggtctcctggcgggcgtgtccgcttcaccgggacacgggcggaattccaccttctacaaccccatcttccccggcttctaccccgatccgagctgcatctacgtgcccgagcgtgaccacaccttcttctgtgcctcgtcgagcttcaacgccttcccgggcatcccgattcatgccagcaaggacctgcagaactggaagttgatcggccatgtgctgaatcgcaaggaacagcttccccggctcgctgagaccaaccggtcgaccagcggcatctgggcacccaccctccggttccatgacgacaccttctggttggtcaccacactagtggacgacgaccggccgcaggaggacgcttccagatgggacaatattatcttcaaggcaaagaatccgtatgatccgaggtcctggtccaaggccgtccacttcaacttcactggctacgacacggagcctttctgggacgaagatggaaaggtgtacatcaccggcgcccatgcttggcatgttggcccatacatccagcaggccgaagtcgatctcgacacgggggccgtcggcgagtggcgcatcatctggaacggaacgggcggcatggctcctgaagggccgcacatctaccgcaaagatgggtggtactacttgctggctgctgaaggggggaccggcatcgaccatatggtgaccatggcccggtcgagaaaaatctccagtccttacgagtccaacccaaacaaccccgtgttgaccaacgccaacacgaccagttactttcaaaccgtcgggcattcagacctgttccatgacagacatgggaactggtgggcagtcgccctctccacccgctccggtccagaatatcttcactaccccatgggccgcgagaccgtcatgacagccgtgagctggccgaaggacgagtggccaaccttcacccccatatctggcaagatgagcggctggccgatgcctccttcgcagaaggacattcgcggagtcggcccctacgtcaactcccccgacccggaacacctgaccttcccccgctcggcgcccctgccggcccacctcacctactggcgatacccgaacccgtcctcctacacgccgtccccgcccgggcaccccaacaccctccgcctgaccccgtcccgcctgaacctgaccgccctcaacggcaactacgcgggggccgaccagaccttcgtctcgcgccggcagcagcacaccctcttcacctacagcgtcacgctcgactacgcgccgcggaccgccggggaggaggccggcgtgaccgccttcctgacgcagaaccaccacctcgacctgggcgtcgtcctgctccctcgcggctccgccaccgcgccctcgctgccgggcctgagtagtagtacaactactactagtagtagtagtagtcgtccggacgaggaggaggagcgcgaggcgggcgaagaggaagaagagggcggacaagacttgatgatcccgcatgtgcggttcaggggcgagtcgtacgtgcccgtcccggcgcccgtcgtgtacccgataccccgggcctggagaggcgggaagcttgtgttagagatccgggcttgtaattcgactcacttctcgttccgtgtcgggccggacgggagacggtctgagcggacggtggtcatggaggcttcgaacgaggccgttagctggggctttactggaacgctgctgggcatctatgcgaccagtaatggtggcaacggaaccacgccggcgtatttttcggattggaggtacacaccattggagcagtttagggattga

SEQ ID NO: 344 - protein, 611 aa, Myceliophthora thermophilia
MFFASLLLGLLAGVSASPGHGRNSTFYNPIFPGFYPDPSCIYVPERDHTFFCASSSFNAFPGIPIHASKDLQNWKLIGHVLNRKEQLPRLAETNRSTSGIWAPTLRFHDDTFWLVTTLVDDDRPQEDASRWDNIIFKAKNPYDPRSWSKAVHFNFTGYDTEPFWDEDGKVYITGAHAWHVGPYIQQAEVDLDTGAVGEWRIIWNGTGGMAPEGPHIYRKDGWYYLLAAEGGTGIDHMVTMARSRKISSPYESNPNNPVLTNANTTSYFQTVGHSDLFHDRHGNWWAVALSTRSGPEYLHYPMGRETVMTAVSWPKDEWPTFTPISGKMSGWPMPPSQKDIRGVGPYVNSPDPEHLTFPRSAPLPAHLTYWRYPNPSSYTPSPPGHPNTLRLTPSRLNLTALNGNYAGADQTFVSRRQQHTLFTYSVTLDYAPRTAGEEAGVTAFLTQNHHLDLGVVLLPRGSATAPSLPGLSSSTTTTSSSSSRPDEEEEREAGEEEEEGGQDLMIPHVRFRGESYVPVPAPVVYPIPRAWRGGKLVLEIRACNSTHFSFRVGPDGRRSERTVVMEASNEAVSWGFTGTLLGIYATSNGGNGTTPAYFSDWRYTPLEQFRD

SEQ ID NO: 345 - protein, 595 aa, Myceliophthora thermophilia
SPGHGRNSTFYNPIFPGFYPDPSCIYVPERDHTFFCASSSFNAFPGIPIHASKDLQNWKLIGHVLNRKEQLPRLAETNRSTSGIWAPTLRFHDDTFWLVTTLVDDDRPQEDASRWDNIIFKAKNPYDPRSWSKAVHFNFTGYDTEPFWDEDGKVYITGAHAWHVGPYIQQAEVDLDTGAVGEWRIIWNGTGGMAPEGPHIYRKDGWYYLLAAEGGTGIDHMVTMARSRKISSPYESNPNNPVLTNANTTSYFQTVGHSDLFHDRHGNWWAVALSTRSGPEYLHYPMGRETVMTAVSWPKDEWPTFTPISGKMSGWPMPPSQKDIRGVGPYVNSPDPEHLTFPRSAPLPAHLTYWRYPNPSSYTPSPPGHPNTLRLTPSRLNLTALNGNYAGADQTFVSRRQQHTLFTYSVTLDYAPRTAGEEAGVTAFLTQNHHLDLGVVLLPRGSATAPSLPGLSSSTTTTSSSSSRPDEEEEREAGEEEEEGGQDLMIPHVRFRGESYVPVPAPVVYPIPRAWRGGKLVLEIRACNSTHFSFRVGPDGRRSERTVVMEASNEAVSWGFTGTLLGIYATSNGGNGTTPAYFSDWRYTPLEQFRD

SEQ ID NO: 346 - DNA, 966 bp, Myceliophthora thermophilia
atgaggccaacacgccccggtatcgtgctcctcgccaccgcgacctcggttgccggacagtcatgcgagctcccctcctcgtaccgctggacatcaaccggcgcgctggcacagccgaaaagcccgtgggtgtcgctcaaggacttcaccgtcgtcccgtacgacggccagcacctggtctacgcaacgacaaacgacgggaccaactggggctccatgggcttcagcctcttcagcgactgggatgccatgggctcggcgacgcagacgggcatgagctccagcgcggtggcgcccaccctgttctacttcgagcccaagaacgtttggatcctcgcccaccagtggggcccgacggccttctcgtaccggacgtccaacgattccaccaaccccaacagctggtcccagccccagcccctcttcaccggcaccatctcgggctcgagcaccggccccatcgaccagaccctcatcggcgacgaccagaatatgtacctcttcttctgcggcgacaacggcaagatctaccgcgccagcatgcccatcggcaacttccccggaaactttggcagcgagtcgaccgtcgtcatgagcgacagcaccaacaacctcttcgaggccgtccaggtgtacaaggtgaacgggaggcagcagtacctcatgctcgtcgaggccatcggcgcccagggccgctacttccgctccttcacggccacgaggctcgacggcgagtggacgcccaacgcggtcagcgaggctagtcccttcgccggcaaggccaactcgggcgccagctggaccaacgacatcagccacggcgagctcgtccgcctcagcgccgaccagaccttccccatcgacccctgcaacctgcagctgctctaccagggccgcgaccccagctcgggaggcgattacaaccgcctgccctaccgccccggcgtccttaccctgcagcgctga

SEQ ID NO: 347 - protein, 321 aa, Myceliophthora thermophilia
MRPTRPGIVLLATATSVAGQSCELPSSYRWTSTGALAQPKSPWVSLKDFTVVPYDGQHLVYATTNDGTNWGSMGFSLFSDWDAMGSATQTGMSSSAVAPTLFYFEPKNVWILAHQWGPTAFSYRTSNDSTNPNSWSQPQPLFTGTISGSSTGPIDQTLIGDDQNMYLFFCGDNGKIYRASMPIGNFPGNFGSESTVVMSDSTNNLFEAVQVYKVNGRQQYLMLVEAIGAQGRYFRSFTATRLDGEWTPNAVSEASPFAGKANSGASWTNDISHGELVRLSADQTFPIDPCNLQLLYQGRDPSSGGDYNRLPYRPGVLTLQR

SEQ ID NO: 348 - protein, 302 aa, Myceliophthora thermophilia
QSCELPSSYRWTSTGALAQPKSPWVSLKDFTVVPYDGQHLVYATTNDGTNWGSMGFSLFSDWDAMGSATQTGMSSSAVAPTLFYFEPKNVWILAHQWGPTAFSYRTSNDSTNPNSWSQPQPLFTGTISGSSTGPIDQTLIGDDQNMYLFFCGDNGKIYRASMPIGNFPGNFGSESTVVMSDSTNNLFEAVQVYKVNGRQQYLMLVEAIGAQGRYFRSFTATRLDGEWTPNAVSEASPFAGKANSGASWTNDISHGELVRLSADQTFPIDPCNLQLLYQGRDPSSGGDYNRLPYRPGVLTLQR

SEQ ID NO: 349 - DNA, 1113 bp, Myceliophthora thermophilia
atgcgtctcaccaagacggacctcagcgtcgcgctgctcgcgtcggccctacccgcaacccaggcggcgtgcagcctcccctcgtcctaccggtggacgtcgacgggcgcgttggctcagcccaaatcggggtgggctaacctcaaggacttcacccacgtgccttacaacggcaagcaccttgtgtacgggagctactactctaacgcctacggctcaatgaacttcggcctcttctcggactggagcgagatgggctcggccagccagaaccagatgagccaggccgcggtcgcgcccacgctcttctacttctccccaaagaacatctgggtcctggcctaccagtggggtgccacccctttctcctaccgcacctcgaccgatccgaccaaccccaacggctggtccgctccccagccgctcttctcgggctccatctccgactcggacacgggccccatcgaccagaccctgatcggcgacgacaagaacatgtacctgttcttcgccggcgacaacggcaagatctaccgcgccagcatgccgctcggcaacttcccgggcaactttggctcggccgccaccgtcgtcctgagcggcgcccgctacgacctgttcgaggccgtgcaggtatacacggtcgtcggccagagctcgccgacctatctgatgatcgtcgagtccatcggcgcgcgcgggcgctacttccgctcctacacggccagccggctcgacggcgcctggacggcccaggcggccagcgagagccagccgttcgccggcgcggccaacagcggcgcctcctggaccagcgacatcagccacggcgacctcatccgcatcgacgccaaccacaccatgcccgtcgacccctgccgcctccagctgctctaccagggccgctccggcgacagcgccgactacaactccctcccctaccgcccgggcctgctcaccctgcagggcgcttcttccggcggcggcgacaacggcggcggcggcggcggcgtaaccgtcccccggtacggccagtgcggtggccagggctacacggggccgacaacgtgcgagagcccatacacgtgcaagtaccagaatgattgtaagtga

SEQ ID NO: 350 - protein, 370 aa, Myceliophthora thermophilia
MRLTKTDLSVALLASALPATQAACSLPSSYRWTSTGALAQPKSGWANLKDFTHVPYNGKHLVYGSYYSNAYGSMNFGLFSDWSEMGSASQNQMSQAAVAPTLFYFSPKNIWVLAYQWGATPFSYRTSTDPTNPNGWSAPQPLFSGSISDSDTGPIDQTLIGDDKNMYLFFAGDNGKIYRASMPLGNFPGNFGSAATVVLSGARYDLFEAVQVYTVVGQSSPTYLMIVESIGARGRYFRSYTASRLDGAWTAQAASESQPFAGAANSGASWTSDISHGDLIRIDANHTMPVDPCRLQLLYQGRSGDSADYNSLPYRPGLLTLQGASSGGGDNGGGGGGVTVPRYGQCGGQGYTGPTTCESPYTCKYQNDCK

SEQ ID NO: 351 - protein, 348 aa, Myceliophthora thermophilia
ACSLPSSYRWTSTGALAQPKSGWANLKDFTHVPYNGKHLVYGSYYSNAYGSMNFGLFSDWSEMGSASQNQMSQAAVAPTLFYFSPKNIWVLAYQWGATPFSYRTSTDPTNPNGWSAPQPLFSGSISDSDTGPIDQTLIGDDKNMYLFFAGDNGKIYRASMPLGNFPGNFGSAATVVLSGARYDLFEAVQVYTVVGQSSPTYLMIVESIGARGRYFRSYTASRLDGAWTAQAASESQPFAGAANSGASWTSDISHGDLIRIDANHTMPVDPCRLQLLYQGRSGDSADYNSLPYRPGLLTLQGASSGGGDNGGGGGGVTVPRYGQCGGQGYTGPTTCESPYTCKYQNDCK

SEQ ID NO: 352 - DNA, 792 bp, Myceliophthora thermophilia
atgcgaccgtggtcgactctcctcgccgcggggcttgctgcctcgggggctcacgccactccggtcgaggccgctcggcgggcgacgccaacggtctacctcgccggcgacagcaccatggccaagacgggcaacgggcttatgggctggggcgagtacctcccgaactacatcacgctccccgtagtcaacaaggccatctccgggcggtcggcccgcagctacaccaacgaagggcgcttcgccgagatcgagtcgctggtgcggaccgacgacattgtagtgatcgagtttggccacaacgacggcgggtcgcccaactcggccaacgacaacggccgcagcgactgcccgggcacggccgacgagatttgctactcgggcaagacgggcgagatcgtctacaccttcaaccactacgtcgaggcggcggcgcggagctacatcgccaagggggcccgcgtcatcatcagcagccagacgcccaacaacatgtgggagggcggcacctacaacaacgcgccctcgcgcttcgtcggctacgccgccacggccgccaagaacgtcggcgccggcgccagctttgtcgaccacttccaggccgtcggcgccatgttcctgcgcctcggcaacgcggccaccaacggcctctacccgcaggaccacacccacaccagccccgagggcgccgacttggtcgctcaggccttcgtgcaggccgtgagcctcgatttcaacgggacaacgccgctcaaggagtatctcaagaccccggtgcctcaggtgttctaa

SEQ ID NO: 353 - protein, 263 aa, Myceliophthora thermophilia
MRPWSTLLAAGLAASGAHATPVEAARRATPTVYLAGDSTMAKTGNGLMGWGEYLPNYITLPVVNKAISGRSARSYTNEGRFAEIESLVRTDDIVVIEFGHNDGGSPNSANDNGRSDCPGTADEICYSGKTGEIVYTFNHYVEAAARSYIAKGARVIISSQTPNNMWEGGTYNNAPSRFVGYAATAAKNVGAGASFVDHFQAVGAMFLRLGNAATNGLYPQDHTHTSPEGADLVAQAFVQAVSLDFNGTTPLKEYLKTPVPQVF

SEQ ID NO: 354 - protein, 244 aa, Myceliophthora thermophilia
TPVEAARRATPTVYLAGDSTMAKTGNGLMGWGEYLPNYITLPVVNKAISGRSARSYTNEGRFAEIESLVRTDDIVVIEFGHNDGGSPNSANDNGRSDCPGTADEICYSGKTGEIVYTFNHYVEAAARSYIAKGARVIISSQTPNNMWEGGTYNNAPSRFVGYAATAAKNVGAGASFVDHFQAVGAMFLRLGNAATNGLYPQDHTHTSPEGADLVAQAFVQAVSLDFNGTTPLKEYLKTPVPQVF

SEQ ID NO: 355 - DNA, 1068 bp, Myceliophthora thermophilia
atggcgactgcaactcgcaccttcacccgcgccctgcgcacctcggcccggcccgccttcgccgccgctccccgggtggcattccgccaggctggccgtcgcttctactcgtcggagcctgctccgaagagcagctcgtcggcgtggatctgggctgccggtgccgccgctgccggtgccggtggctggtacttcctgaacaaccagagctcggccactccccaggtcttcaagcccaagtacgaggactaccaggccgtgtacaacgagattgcgaaccgcctcgaggagaactcggattatgacgatggcagctatggccctgtgctgctgcgtctcgcctggcacgccagcggcacctatgacaaggagaccggcaccggcggcagcaacggcgccaccatgcgcttctctccggaggccgatcacggcgccaacgccggcctgaaggctgcgcgggatttccttgagcctgtgaagcagaagttcccttggatttcttactctgatctctggatcctcgctggcgtctgcgccatccaggagatgctgggcccccagattcccttccgccccggccgccaggacaaggatgtctccgcctgcacccccgacggccgcctccctgatgccgcccagggccaggaccacctgcgcaacatcttctatcgcatgggcttcaacgaccaggagattgttgctctggctggcgcgcacgctctcggccgctgccacaccgaccgctccggctactctggcccctggaccttctcgcccaccgtcctgaccaacgactactacaagctgctgcttgacgagaagtggcagtggaagaagtggaacggccccaagcagtacgaggacaagaagaccaagtcgctcatgatgctgccggccgacatggcgctcgtccaggacaagaagttcaaggagtgggttcagaagtacgctgccgacaacgacctgttcttcagggatttcgcagccgttatcaccaagctgtttgagctcggtgtgcccttccccgagaacacggagcggtgggttttcaagcccgtcaacgcctaa

SEQ ID NO: 356 - protein, 355 aa, Myceliophthora thermophilia
MATATRTFTRALRTSARPAFAAAPRVAFRQAGRRFYSSEPAPKSSSSAWIWAAGAAAAGAGGWYFLNNQSSATPQVFKPKYEDYQAVYNEIANRLEENSDYDDGSYGPVLLRLAWHASGTYDKETGTGGSNGATMRFSPEADHGANAGLKAARDFLEPVKQKFPWISYSDLWILAGVCAIQEMLGPQIPFRPGRQDKDVSACTPDGRLPDAAQGQDHLRNIFYRMGFNDQEIVALAGAHALGRCHTDRSGYSGPWTFSPTVLTNDYYKLLLDEKWQWKKWNGPKQYEDKKTKSLMMLPADMALVQDKKFKEWVQKYAADNDLFFRDFAAVITKLFELGVPFPENTERWVFKPVNA

SEQ ID NO: 357 - protein, 293 aa, Myceliophthora thermophilia
WYFLNNQSSATPQVFKPKYEDYQAVYNEIANRLEENSDYDDGSYGPVLLRLAWHASGTYDKETGTGGSNGATMRFSPEADHGANAGLKAARDFLEPVKQKFPWISYSDLWILAGVCAIQEMLGPQIPFRPGRQDKDVSACTPDGRLPDAAQGQDHLRNIFYRMGFNDQEIVALAGAHALGRCHTDRSGYSGPWTFSPTVLTNDYYKLLLDEKWQWKKWNGPKQYEDKKTKSLMMLPADMALVQDKKFKEWVQKYAADNDLFFRDFAAVITKLFELGVPFPENTERWVFKPVNA

SEQ ID NO: 358 - DNA, 1851 bp, Myceliophthora thermophilia
atgaagtccttcatcagcgccgcgacgcttttggtgggcattctcacccctagcgttgctgctgcccctccatccacccctgagcagcgcgacctgctcgtcccgatcacggagagggaggaggcagccgtgaaggctcgccagcagagctgcaacacccccagcaaccgggcgtgctggactgacggatacgacatcaacaccgactacgaagtggacagcccggacacgggtgttgttcggccgtacactctgactctcaccgaagtcgacaactggaccggacctgatggcgtcgtcaaggagaaggtcatgctggttaacagaccaacaatctttgcggactggggcgacacgatccaggtaacggtcatcaacaacctcgagaccaacggcacgtcgatccactggcacggactgcaccagaagggcaccaacctgcacgacggcgccaacggtatcaccgagtgcccgatcccgcccaagggagggaggaaggtgtaccggttcaaggctcagcagtacgggacgagctggtaccactcgcacttctcggcccagtacggcaacggcgtggtcggggccattcagatcaacgggccggcctcgctgccgtacgacaccgacctgggcgtgttccccatcagcgactactactacagctcggccgacgagctggtggaactcaccaagaactcgggcgcgcccttcagcgacaacgtcctgttcaacggcacggccaagcacccggagacgggcgagggcgagtacgccaacgtgacgctcaccccgggccggcggcaccgcctgcgcctgatcaacacgtcggtcgagaaccacttccaggtctcgctcgtcaaccacaccatgaccatcatcgccgccgacatggtgcccgtcaacgccatgacggtcgacagcctcttcctcggcgtcggccagcgctacgatgtcgtcatcgaagccagccgaacgcccgggaactactggtttaacgtcacatttggcggcggcctgctctgcggcggctccaggaatccctacccggccgccatcttccactacgccggcgcccccggcggcccgcccacggacgagggcaaggccccggtcgaccacaactgcctggacctccccaacctcaagcccgtcgtggcccgcgacgtgcccctgagcggcttcgccaagcggcccgacaacacgctcgacgtcaccctcgacaccacgggcacgcccctgttcgtctggaaggtcaacggcagcgccatcaacatcgactggggcaggcccgtcgtcgactacgtcctcacgcagaacaccagcttcccacccgggtacaacattgtcgaggtgaacggagctgatcagtggtcgtactggttgatcgagaacgatcccggcgcacctttcaccctaccgcatccgatgcacctgcacggccacgacttttacgtgctgggccgctcgcccgacgagtcgccggcatccaacgagcggcacgtgttcgatccggcgcgggacgcgggcctgctgagcggggccaaccctgtgcggcgggacgtgacgatgctgccggcgttcgggtgggtggtgctggccttccgggccgacaacccgggcgcctggctgttccactgccacatcgcctggcacgtctcgggcggcctgggcgtcgtctacctcgagcgcgccgacgacctgcgcggggccgtctcggacgccgacgccgacgacctcgaccgcctctgcgccgactggcgccgctactggcctaccaacccctaccccaagtccgactcgggcctcaagcaccgctgggtcgaggagggcgagtggctggtcaaggcgtga

SEQ ID NO: 359 - protein, 616 aa, Myceliophthora thermophilia
MKSFISAATLLVGILTPSVAAAPPSTPEQRDLLVPITEREEAAVKARQQSCNTPSNRACWTDGYDINTDYEVDSPDTGVVRPYTLTLTEVDNWTGPDGVVKEKVMLVNRPTIFADWGDTIQVTVINNLETNGTSIHWHGLHQKGTNLHDGANGITECPIPPKGGRKVYRFKAQQYGTSWYHSHFSAQYGNGVVGAIQINGPASLPYDTDLGVFPISDYYYSSADELVELTKNSGAPFSDNVLFNGTAKHPETGEGEYANVTLTPGRRHRLRLINTSVENHFQVSLVNHTMTIIAADMVPVNAMTVDSLFLGVGQRYDVVIEASRTPGNYWFNVTFGGGLLCGGSRNPYPAAIFHYAGAPGGPPTDEGKAPVDHNCLDLPNLKPVVARDVPLSGFAKRPDNTLDVTLDTTGTPLFVWKVNGSAINIDWGRPVVDYVLTQNTSFPPGYNIVEVNGADQWSYWLIENDPGAPFTLPHPMHLHGHDFYVLGRSPDESPASNERHVFDPARDAGLLSGANPVRRDVTMLPAFGWVVLAFRADNPGAWLFHCHIAWHVSGGLGVVYLERADDLRGAVSDADADDLDRLCADWRRYWPTNPYPKSDSGLKHRWVEEGEWLVKA

SEQ ID NO: 360 - protein, 595 aa, Myceliophthora thermophilia
APPSTPEQRDLLVPITEREEAAVKARQQSCNTPSNRACWTDGYDINTDYEVDSPDTGVVRPYTLTLTEVDNWTGPDGVVKEKVMLVNRPTIFADWGDTIQVTVINNLETNGTSIHWHGLHQKGTNLHDGANGITECPIPPKGGRKVYRFKAQQYGTSWYHSHFSAQYGNGVVGAIQINGPASLPYDTDLGVFPISDYYYSSADELVELTKNSGAPFSDNVLFNGTAKHPETGEGEYANVTLTPGRRHRLRLINTSVENHFQVSLVNHTMTIIAADMVPVNAMTVDSLFLGVGQRYDVVIEASRTPGNYWFNVTFGGGLLCGGSRNPYPAAIFHYAGAPGGPPTDEGKAPVDHNCLDLPNLKPVVARDVPLSGFAKRPDNTLDVTLDTTGTPLFVWKVNGSAINIDWGRPVVDYVLTQNTSFPPGYNIVEVNGADQWSYWLIENDPGAPFTLPHPMHLHGHDFYVLGRSPDESPASNERHVFDPARDAGLLSGANPVRRDVTMLPAFGWVVLAFRADNPGAWLFHCHIAWHVSGGLGVVYLERADDLRGAVSDADADDLDRLCADWRRYWPTNPYPKSDSGLKHRWVEEGEWLVKA

SEQ ID NO: 361 - DNA, 1920 bp, Myceliophthora thermophilia
atggctaggacatctctctggctgctgctatgcgcctgtctttctcaagtctcttgggccgccacggtccggaagagcttgcgtctcacttggggcgaaggcgctccgaatggacggtcaagggagatgatcttcatcaatggccagttcccggggccgaacctcatctttgacgaggacgacgatgttgagattacagtgcacaatgacatgccccggaatgcaaccgttcactggcacgggatcgcccaaacgggcactccatggtctgatggtgtcatcggactctctcagagacccattctgccgggcgagtctttcgtctaccgcttcaaggcctctccccccggaacgcactggtaccattctcacgaacgcatgtcgctcgaggatggtctttacggggcaatttttgtcaggccaaagcaaaatctcaagggactgtggtcccaaatcagcaatgacaccaaggacatcaaggctatggagaaggccgcacgcaatccaaagctcatggtcctgtcagagtggacaagcttcacttctgaggcatggtggaaagccgtccaggaatcgggcctgttaatcttctgcgtcgatagcatcctgttgaacggccagggagaggcctactgcccgcctcacgaattcctcatcaaccagacaaatcccggccccaagatgaccagttttcccgaccagaacgtcaccgacaaaggctgcttccccttaacagcgccgggaatccagggaccatgggtacataactcgagcgacatcaccaaggttcccaaccatctccaatggggatgcatcccgtcgagcggaagcaactacacgctcgaggttgatcccgccgacgggtgggtcagcctgaatttcatcgcgacgcagtccaataagcaagtcgatttctccatcgacgagcacacaatgtggctctacgaggttgacggagcctacgtggagccgcgagagttcgtcgccgccgccatcagctcgggcgagcgcttctccgtcatggtgaagctcgacaagacccccgcccgctacaccatccgcctgcccgactcgggcgcgacccaggtcctctcgggcttcgccgagatggtgtacaagggcgccgagcacagcaccaggcagtcgatcccgtacgttacctacggcggcatgagcgcgctccccatcaccgacaccatgagctacaccccgtacgacctctcatccgacacgatgacgccgtggccgccggtcgcgccggcaccggtggcggacgaggagttcctcctggtgatgggtcgcgcggggtcctcgatcaagtacaccatgaacgccaaatacctctaccctcccgacttcaaggcggaccggcccatgctcttctacccgaacgacacgctggggacggaggacgagaacctggtgatccggaccaagaacgggtcctgggtcgacctgatcctgcaggtcgcctcgctgcccggcgacgagatggccttccagcacgtcatgcacaagcacggcagcaagacgtggaggatcggcagcggcgtggggccgtggaagtacagcagcgtggccgaggcgatcgacgcggagcccgagagcttcaacctggtcaacccgggataccgggacacctggatgaccgtctttgccaccgagccgacgggcggatactggaccgtctaccgctaccaggtgaccgatccgggcccgtggttgttccactgccactttgagctgcacatgatgggaggcatgtccatggccatcctggacggcgttgacgcgtggcccgaggtgccgcccgagtaccgattgaccaagccgtcttctaacaacccgtggaagaacatcttggagtggctccgcgacttgctcgaccgtcttaaaggaggccgccattccaaggcctga

SEQ ID NO: 362 - protein, 639 aa, Myceliophthora thermophilia
MARTSLWLLLCACLSQVSWAATVRKSLRLTWGEGAPNGRSREMIFINGQFPGPNLIFDEDDDVEITVHNDMPRNATVHWHGIAQTGTPWSDGVIGLSQRPILPGESFVYRFKASPPGTHWYHSHERMSLEDGLYGAIFVRPKQNLKGLWSQISNDTKDIKAMEKAARNPKLMVLSEWTSFTSEAWWKAVQESGLLIFCVDSILLNGQGEAYCPPHEFLINQTNPGPKMTSFPDQNVTDKGCFPLTAPGIQGPWVHNSSDITKVPNHLQWGCIPSSGSNYTLEVDPADGWVSLNFIATQSNKQVDFSIDEHTMWLYEVDGAYVEPREFVAAAISSGERFSVMVKLDKTPARYTIRLPDSGATQVLSGFAEMVYKGAEHSTRQSIPYVTYGGMSALPITDTMSYTPYDLSSDTMTPWPPVAPAPVADEEFLLVMGRAGSSIKYTMNAKYLYPPDFKADRPMLFYPNDTLGTEDENLVIRTKNGSWVDLILQVASLPGDEMAFQHVMHKHGSKTWRIGSGVGPWKYSSVAEAIDAEPESFNLVNPGYRDTWMTVFATEPTGGYWTVYRYQVTDPGPWLFHCHFELHMMGGMSMAILDGVDAWPEVPPEYRLTKPSSNNPWKNILEWLRDLLDRLKGGRHSKA

SEQ ID NO: 363 - protein, 619 aa, Myceliophthora thermophilia
ATVRKSLRLTWGEGAPNGRSREMIFINGQFPGPNLIFDEDDDVEITVHNDMPRNATVHWHGIAQTGTPWSDGVIGLSQRPILPGESFVYRFKASPPGTHWYHSHERMSLEDGLYGAIFVRPKQNLKGLWSQISNDTKDIKAMEKAARNPKLMVLSEWTSFTSEAWWKAVQESGLLIFCVDSILLNGQGEAYCPPHEFLINQTNPGPKMTSFPDQNVTDKGCFPLTAPGIQGPWVHNSSDITKVPNHLQWGCIPSSGSNYTLEVDPADGWVSLNFIATQSNKQVDFSIDEHTMWLYEVDGAYVEPREFVAAAISSGERFSVMVKLDKTPARYTIRLPDSGATQVLSGFAEMVYKGAEHSTRQSIPYVTYGGMSALPITDTMSYTPYDLSSDTMTPWPPVAPAPVADEEFLLVMGRAGSSIKYTMNAKYLYPPDFKADRPMLFYPNDTLGTEDENLVIRTKNGSWVDLILQVASLPGDEMAFQHVMHKHGSKTWRIGSGVGPWKYSSVAEAIDAEPESFNLVNPGYRDTWMTVFATEPTGGYWTVYRYQVTDPGPWLFHCHFELHMMGGMSMAILDGVDAWPEVPPEYRLTKPSSNNPWKNILEWLRDLLDRLKGGRHSKA

SEQ ID NO: 364 - DNA, 1968 bp, Myceliophthora thermophilia
atggagctgcttcgagtctccctcgccgctgttgcactctccccattaatattattcggcgttgcagccgcccaccctaccgcccgatccattgcccgctccacgattcttgacggagccgatggccttcttccggagtatgactacatcatcatcgggggcggcacgtccggattgactgtcgccgacagactcacggagaatagaaagcgcaagttttcccgctctcccctcccaacgtcacccgcccgatcgtcaccggcgtggtgttattctgttcttgttttggaaagaggcattttccagaactctagctcggtgaccaccatttctgggggaagcagaggcctcttcgatccaagtctgaccttcaacatcaactccgttccccaagctgggctggacaaccgcagcattgccgtcattggcgggttgatcctcggcggcagctccggcgtcaacgggcttcaagtcctccgtggacaaagagaagactatgaccgctggggatcgtactttgggccaaactctgactggagttggaaaggtctcctgccgtatttcaagaaggcatggaatttccatccgcccaggccagagctggtcagtcagttcgacatcaagtacgaccccagctactggggcaacacgtctgacgtgcacgcatctttcccaaccactttctggccggtgctcaaattggagatggctgcatttggtgacatccctggggtcgaatatccgcccgactctgcttctggcgagaccggggcgtattggcacccagcgtccgttgacccagcgacagtcctccgctccttcgctcggcccgcgcattgggacaacattgaggcggcacgtcccaattaccacaccctgaccgggcaacgcgtattgaaggtcgcatttgatggcaatcgagcgaccagcgtcgtcttcgtgccggcgaatgcaacggatcacagcactgccaggtccgtgaaggccaagaaggagatcgtcttggccgccggcgccattcacacgccccaaatcctacaggcgagcggagtagggccgaagcaggtcctgaaggaagcaggcgtgccgcttgtcgttgacgctcccggtgtcggcagcaatttccaagaccagccgtatgtggttgctcccaccttcaattttaccaagttccccttccacccggacttctacgacatgattctgaaccagacttttatcgccgaggctcaggcccagtttgaaaaggaccgtaccggacctcacaccatcgcatccggctattgcggcagctggctccccctccagatcattgccccaaattcgtggaaggacatcgctaggcggtacgaatcccaagacccagccgcctacctccccgccggcaccgatgagaccgtcatcgaggggtacagggcgcagcagaaagcactagcgaggtccatgaggagcaagcaatcggcaatgtataacttcttcctgaggggcggctacgaagagggttctgtcgtctacttgcacccaaccagccgtggcaccgttcgcatcaaccgatccgaccccttcttctcgccgcccgaggtcgactacagggcactgagcaaccctaccgacctggaggtcctgctcgaattcactcccttcacccgcaggtacttcttggagacgaggttgaagtccctcgacccggtcgagctgtcgcccggtgccaacgtcacggcgcccgccgacatcgaggcctggcttcgcagcgtcatgatcccgtcctccttccatcccatcggcacggccgccatgttgcctaggcacctcggtggtgtcgtggacgagaaccttctggtgtacggggtcgaaggcttgagtgtcgtcgacgccagcgtcatgcccgacttgccgggctcatacacgcagcagaccgtgtatgctattgctgagaaggccgcggatctcattaagagcagggcttga

SEQ ID NO: 365 - protein, 655 aa, Myceliophthora thermophilia
MELLRVSLAAVALSPLILFGVAAAHPTARSIARSTILDGADGLLPEYDYIIIGGGTSGLTVADRLTENRKRKFSRSPLPTSPARSSPAWCYSVLVLERGIFQNSSSVTTISGGSRGLFDPSLTFNINSVPQAGLDNRSIAVIGGLILGGSSGVNGLQVLRGQREDYDRWGSYFGPNSDWSWKGLLPYFKKAWNFHPPRPELVSQFDIKYDPSYWGNTSDVHASFPTTFWPVLKLEMAAFGDIPGVEYPPDSASGETGAYWHPASVDPATVLRSFARPAHWDNIEAARPNYHTLTGQRVLKVAFDGNRATSVVFVPANATDHSTARSVKAKKEIVLAAGAIHTPQILQASGVGPKQVLKEAGVPLVVDAPGVGSNFQDQPYVVAPTFNFTKFPFHPDFYDMILNQTFIAEAQAQFEKDRTGPHTIASGYCGSWLPLQIIAPNSWKDIARRYESQDPAAYLPAGTDETVIEGYRAQQKALARSMRSKQSAMYNFFLRGGYEEGSVVYLHPTSRGTVRINRSDPFFSPPEVDYRALSNPTDLEVLLEFTPFTRRYFLETRLKSLDPVELSPGANVTAPADIEAWLRSVMIPSSFHPIGTAAMLPRHLGGVVDENLLVYGVEGLSVVDASVMPDLPGSYTQQTVYAIAEKAADLIKSRA

SEQ ID NO: 366 - protein, 631 aa, Myceliophthora thermophilia
HPTARSIARSTILDGADGLLPEYDYIIIGGGTSGLTVADRLTENRKRKFSRSPLPTSPARSSPAWCYSVLVLERGIFQNSSSVTTISGGSRGLFDPSLTFNINSVPQAGLDNRSIAVIGGLILGGSSGVNGLQVLRGQREDYDRWGSYFGPNSDWSWKGLLPYFKKAWNFHPPRPELVSQFDIKYDPSYWGNTSDVHASFPTTFWPVLKLEMAAFGDIPGVEYPPDSASGETGAYWHPASVDPATVLRSFARPAHWDNIEAARPNYHTLTGQRVLKVAFDGNRATSVVFVPANATDHSTARSVKAKKEIVLAAGAIHTPQILQASGVGPKQVLKEAGVPLVVDAPGVGSNFQDQPYVVAPTFNFTKFPFHPDFYDMILNQTFIAEAQAQFEKDRTGPHTIASGYCGSWLPLQIIAPNSWKDIARRYESQDPAAYLPAGTDETVIEGYRAQQKALARSMRSKQSAMYNFFLRGGYEEGSVVYLHPTSRGTVRINRSDPFFSPPEVDYRALSNPTDLEVLLEFTPFTRRYFLETRLKSLDPVELSPGANVTAPADIEAWLRSVMIPSSFHPIGTAAMLPRHLGGVVDENLLVYGVEGLSVVDASVMPDLPGSYTQQTVYAIAEKAADLIKSRA

SEQ ID NO: 367 - DNA, 1383 bp, Myceliophthora thermophilia
atgaggactgcagcgctcttgtccgcggtcggggctgcgaccgctgtgcacggcaacccgacggcgaccgtcaggtcgaagccgcgcgctactgagctcgagcctatcacggtgacgggcaatgccttcttcaagggcaatgagaggttctacatccgcggcatcgactaccagcccggcggcgccgcagccaacgtcgaccctctggccgaccctgacatctgcctgaaggatatcgccaagttcaagaagctcggtgtcaacgtgattcgcgtctactcgaccgacaactcgctggaccacgacgagtgcatgaacgcgctcgccgacgccggcatctacgttgtgctcgacgccaacaacccgctgtactcgatcaaccgcgaggacccccacggctcgtacaacacgccctatctgcagagcgtgtttgccaccatcgatgcctttgccaagtactccaacaccatggccttcttctccggcaacgaggtcatccacgacctcctcaacaccacccgcaccgctccctacgtgaaggccaccgaccgtgacatgcgtcgttacatcaaggcccgcggctatcgcaagatccccgtcgggtactcggccgccgatgtgacgaccaaccggatgcagactgcccactacttcaactgcggctccgatgaggagcgcagcgacttcttcgcttttaacgactactcctggtgcagcaccgacttcgtcacgtctggctggaacaagaaggtcgaggacttcaagggctacggcatccccctgttcctgtccgagtacggctgcatcgacaacccgcgcgactttggcgagatcgagtcgctcatgcaccgcaacatgacgggcgtctactccggcggcctgctgtacgagtacagcatggagccgaacaactatggtatcgtcaagatcaagggcggccaggacaacggcggtgccgaccagacgggcgagcgcgaggagctgcccgaattctcggcctttgccgctgcgctcaagaagtggcccgctcccacggacgacggcggctacaccaagacctccaaggcttccgagtgcccgaccaaggacgcccactgggacgtcgagtcgtctgtgctcccggacactcccgagggtgccctcaagttctttgaggagggcgctggcaagggtcccggcctgaagggccccggctcccagtgggccgtcgaccaggcttcgaccagctcgggcggcaagagcagcagcggtacctccgaggacggcgagtctagcagctccagcgccgccattcgcggctctgttcccgccctggacaaggccccatttgtcatctctggtgttgtgcttctcttcactctggttggcgccgcggctttctaa

SEQ ID NO: 368 - protein, 460 aa, Myceliophthora thermophilia
MRTAALLSAVGAATAVHGNPTATVRSKPRATELEPITVTGNAFFKGNERFYIRGIDYQPGGAAANVDPLADPDICLKDIAKFKKLGVNVIRVYSTDNSLDHDECMNALADAGIYVVLDANNPLYSINREDPHGSYNTPYLQSVFATIDAFAKYSNTMAFFSGNEVIHDLLNTTRTAPYVKATDRDMRRYIKARGYRKIPVGYSAADVTTNRMQTAHYFNCGSDEERSDFFAFNDYSWCSTDFVTSGWNKKVEDFKGYGIPLFLSEYGCIDNPRDFGEIESLMHRNMTGVYSGGLLYEYSMEPNNYGIVKIKGGQDNGGADQTGEREELPEFSAFAAALKKWPAPTDDGGYTKTSKASECPTKDAHWDVESSVLPDTPEGALKFFEEGAGKGPGLKGPGSQWAVDQASTSSGGKSSSGTSEDGESSSSSAAIRGSVPALDKAPFVISGVVLLFTLVGAAAF

SEQ ID NO: 369 - protein, 442 aa, Myceliophthora thermophilia
NPTATVRSKPRATELEPITVTGNAFFKGNERFYIRGIDYQPGGAAANVDPLADPDICLKDIAKFKKLGVNVIRVYSTDNSLDHDECMNALADAGIYVVLDANNPLYSINREDPHGSYNTPYLQSVFATIDAFAKYSNTMAFFSGNEVIHDLLNTTRTAPYVKATDRDMRRYIKARGYRKIPVGYSAADVTTNRMQTAHYFNCGSDEERSDFFAFNDYSWCSTDFVTSGWNKKVEDFKGYGIPLFLSEYGCIDNPRDFGEIESLMHRNMTGVYSGGLLYEYSMEPNNYGIVKIKGGQDNGGADQTGEREELPEFSAFAAALKKWPAPTDDGGYTKTSKASECPTKDAHWDVESSVLPDTPEGALKFFEEGAGKGPGLKGPGSQWAVDQASTSSGGKSSSGTSEDGESSSSSAAIRGSVPALDKAPFVISGVVLLFTLVGAAAF

SEQ ID NO: 370 - DNA, 1164 bp, Myceliophthora thermophilia
atgctttccaaggtcttcgcgacggtggccctcgcggcctcgctggtctctgcgcagactttcacggactgcgaccccaccaagcgtgatgactgccccaaccccaaggctgtcggctccaagcccgtcgacatcgacttccgtcagggccccaacagcttcttcaagctggccgatggcacgagcctcaagtacgacaaggatctcggcgcggtcttctcgatcagcaaggagacggatgcccccaccatctcttccaacaagtacatcttcttcggccaggttgacgtgacggtgcgcgctgcccgcggtacgggcgtcgtcaccagcttcgtgctgcagtcggacgacctcgacgagatcgactgggagtggctcggcggcgacgccacccaggtccagaccaactacttcagcaagggctgcaccgagacctacgaccgtggcggtttctctcccgtcgccgacccgatcaaccagttccacacctacaccatcaagtggactcccgagcagctcgactggatcattgacggcaacgtcgtccgcacgctcaagaacacgggcgtcgagggctgctccggctacccgcagtcccccatgcagatcaagctcggtacctgggtcgctggccgcaaggacgcgccccagggcaccatcgactgggctggcggtctgaccgacttcagccaggctccgtttgacggatactaccagagcctgcacattgtggactacatgggcggtcgcggcgccaaggaggccaccgagtaccactacacggaccgcagcggcaagtgggagagcatcgaggttatcaacgacggcaagggatccgacgacgacaccaccacctcctccaagaccagcgcgacctcgaccaaggccacctcgacctccaagcctagctcgtccagctcgcccagctcgtctcacatcggccacaccctcaccaccctcaccaccgtgagctcctcggctacccggagcgccagcagcaccgacggcgcggcttccaccagcggcccgaccagcaccagcggcaatgaggttgatcccacctccactgcctctcagaccgtgtccacaggtgctgccccgagcatggctggcaatctagccgccgtgggcgctgctgccctctttggctacctcgccctctaa

SEQ ID NO: 371 - protein, 387 aa, Myceliophthora thermophilia
MLSKVFATVALAASLVSAQTFTDCDPTKRDDCPNPKAVGSKPVDIDFRQGPNSFFKLADGTSLKYDKDLGAVFSISKETDAPTISSNKYIFFGQVDVTVRAARGTGVVTSFVLQSDDLDEIDWEWLGGDATQVQTNYFSKGCTETYDRGGFSPVADPINQFHTYTIKWTPEQLDWIIDGNVVRTLKNTGVEGCSGYPQSPMQIKLGTWVAGRKDAPQGTIDWAGGLTDFSQAPFDGYYQSLHIVDYMGGRGAKEATEYHYTDRSGKWESIEVINDGKGSDDDTTTSSKTSATSTKATSTSKPSSSSSPSSSHIGHTLTTLTTVSSSATRSASSTDGAASTSGPTSTSGNEVDPTSTASQTVSTGAAPSMAGNLAAVGAAALFGYLAL

SEQ ID NO: 372 - protein, 369 aa, Myceliophthora thermophilia
QTFTDCDPTKRDDCPNPKAVGSKPVDIDFRQGPNSFFKLADGTSLKYDKDLGAVFSISKETDAPTISSNKYIFFGQVDVTVRAARGTGVVTSFVLQSDDLDEIDWEWLGGDATQVQTNYFSKGCTETYDRGGFSPVADPINQFHTYTIKWTPEQLDWIIDGNVVRTLKNTGVEGCSGYPQSPMQIKLGTWVAGRKDAPQGTIDWAGGLTDFSQAPFDGYYQSLHIVDYMGGRGAKEATEYHYTDRSGKWESIEVINDGKGSDDDTTTSSKTSATSTKATSTSKPSSSSSPSSSHIGHTLTTLTTVSSSATRSASSTDGAASTSGPTSTSGNEVDPTSTASQTVSTGAAPSMAGNLAAVGAAALFGYLAL

SEQ ID NO: 373 - DNA, 1677 bp, Myceliophthora thermophilia
atgtggccctcatccgtccgcgcctccggcgccgcaggcgccgcgcttctggtgtggtccgccttggtcggcaatgccgccgcccaggtccataccgactgctaccccatgaatcagacgtgcccgccggaccccgccttcggcctggatgtcaacttcaatttcaacaccacaccaaatgtcgacgtttgggagacacaagtcggtcccgtcacctgggatcccgagaacggggccggcttcacgatcaccaagcaaggcgattcccccaccattcggaccaagttctactacttctggggccgcaccgaggtccacatgaaggcggccaagggcaccggcgtcatcagctccatcatgatgctcagcgacaatctggatgagatcgactgggagttctttggcggcaacaagaccaccgcccagagcaactactttgggaaaggcgtcatccccgatgtccccaacgccgtctaccaccagatccccggcagcgtgtcggacgatttccacaactacaccactgtctggaccaaggactacttggacttctacatcgacggagacaaggtccgcaccctgctgccccaggacgccaacaactcgtactactaccctcagactcccatgaggctgtccatcggcatctgggctggcggtgacccgcgcttaccccaaggcacgcgcgactgggccggcggcaccaccgactactctcagggccccttcgagatgctcgtcaagagcgctcacatcaccgacttcagcagcggcaaggagtatgtctacaccgacaggagcggctcgtgggagagcataaagattgtcgagggtaactccaccgtcaaggagatcctcgagaaaccgcctgagaagtcgctctcggagaaatgggctgacctgccgcaaggctccaagatcgccatctacgcctgcgcgtccggctttgtcggcctgttgttcttcgcgggcctcttctactgcatccgacagcggcgccgcggcgcgcgcgaggccaaggccgccgaggcccgcgccgaggccgagcgcctcgagctcgagcgctaccgcaaggccggcatcgacccggacagcttcgcctccgactcgcaagcgcacgagtacaacgccaaggagatgcgccgcgacggcttcgtcgacgacgacagctacagcgtgcacgactcgcccgccgccaaccccatgaccccggcctccccgctcgaccacaggtacgactccgcggccgccacggccctgggtgcgagcgccgccggcggtgccgctgccgccgccgccgccgcctcttcctcccccacgcgcagccccgtcgtcccccgcctcagcgaccgcgcgcagcccccccgcgtcggcaccccgggccctccttctccccggcacgccccgtcctcccccggccagggcagcgtgcgcagcccgtcgtcgccgcagcactacccggagccgccgtcccgcagccaaaccagcccccgcatcgggtcgccgggcccgcagcagatggcgcacccgcagccccagaggagcttcacgacggacgcgtaccgcgaccccgggcatgacgggcagggtggtggcgggtacaacggaggaaacggtcaggggtatgggcagcagggaggcaggggaaatgatggttactggggctatgctaggtaa

SEQ ID NO: 374 - protein, 558 aa, Myceliophthora thermophilia
MWPSSVRASGAAGAALLVWSALVGNAAAQVHTDCYPMNQTCPPDPAFGLDVNFNFNTTPNVDVWETQVGPVTWDPENGAGFTITKQGDSPTIRTKFYYFWGRTEVHMKAAKGTGVISSIMMLSDNLDEIDWEFFGGNKTTAQSNYFGKGVIPDVPNAVYHQIPGSVSDDFHNYTTVWTKDYLDFYIDGDKVRTLLPQDANNSYYYPQTPMRLSIGIWAGGDPRLPQGTRDWAGGTTDYSQGPFEMLVKSAHITDFSSGKEYVYTDRSGSWESIKIVEGNSTVKEILEKPPEKSLSEKWADLPQGSKIAIYACASGFVGLLFFAGLFYCIRQRRRGAREAKAAEARAEAERLELERYRKAGIDPDSFASDSQAHEYNAKEMRRDGFVDDDSYSVHDSPAANPMTPASPLDHRYDSAAATALGASAAGGAAAAAAAASSSPTRSPVVPRLSDRAQPPRVGTPGPPSPRHAPSSPGQGSVRSPSSPQHYPEPPSRSQTSPRIGSPGPQQMAHPQPQRSFTTDAYRDPGHDGQGGGGYNGGNGQGYGQQGGRGNDGYWGYAR

SEQ ID NO: 375 - protein, 530 aa, Myceliophthora thermophilia
QVHTDCYPMNQTCPPDPAFGLDVNFNFNTTPNVDVWETQVGPVTWDPENGAGFTITKQGDSPTIRTKFYYFWGRTEVHMKAAKGTGVISSIMMLSDNLDEIDWEFFGGNKTTAQSNYFGKGVIPDVPNAVYHQIPGSVSDDFHNYTTVWTKDYLDFYIDGDKVRTLLPQDANNSYYYPQTPMRLSIGIWAGGDPRLPQGTRDWAGGTTDYSQGPFEMLVKSAHITDFSSGKEYVYTDRSGSWESIKIVEGNSTVKEILEKPPEKSLSEKWADLPQGSKIAIYACASGFVGLLFFAGLFYCIRQRRRGAREAKAAEARAEAERLELERYRKAGIDPDSFASDSQAHEYNAKEMRRDGFVDDDSYSVHDSPAANPMTPASPLDHRYDSAAATALGASAAGGAAAAAAAASSSPTRSPVVPRLSDRAQPPRVGTPGPPSPRHAPSSPGQGSVRSPSSPQHYPEPPSRSQTSPRIGSPGPQQMAHPQPQRSFTTDAYRDPGHDGQGGGGYNGGNGQGYGQQGGRGNDGYWGYAR

SEQ ID NO: 376 - DNA, 843 bp, Myceliophthora thermophilia
atgcacttcacttcgtacctctcggttctgtccgtcctgggcaccagcggcggcgtcctggcctgggcaccccccagctacgacgggtacaggctggtctggtcggacgcgttcccgggcgcccccgggacgctgccgaacgagaacaactggaacatcatcacgggcaacctgggcgtcaacaacgagctcgaggtctaccagcgggacccgcgcaacctgcagatgagcggcggcaacacgctgcagatcgtcccctggctcgacggctccacctggtcctcgggccggatcgagtccaagtacaccttcacgccccagcccggcggccgcaccatggccgaggcccagatccgcttcggctccaacgacatcagcaccaagcagggcctctggcccgccttctggctgctcggcgactccatccgccacggcaccggctggcccgcgtgcggcgagctcgacattttggagaccatcaacggccagctgacgggctacggaaccgcccactgcaccgcctgcaatgaacccgtcggtcgcggtggctcggtccccatccccaatcaggacttccagcggtggcggatcgtctgggacctcaccaatggcgactggcgcgcccagaccatcacctggttcatgaacgaccagcagttccaccagctcagcggtgctaccatcggagaccagggcgtctggtccaccctgactaacaagccgctcttcttcatcctcaacatggccgtcggcggcaactggcccggctatcccaacgacaggacccagggtggctacggagccatgatggaggtgggctatgttgctcattactcgacctag

SEQ ID NO: 377 - protein, 280 aa, Myceliophthora thermophilia
MHFTSYLSVLSVLGTSGGVLAWAPPSYDGYRLVWSDAFPGAPGTLPNENNWNIITGNLGVNNELEVYQRDPRNLQMSGGNTLQIVPWLDGSTWSSGRIESKYTFTPQPGGRTMAEAQIRFGSNDISTKQGLWPAFWLLGDSIRHGTGWPACGELDILETINGQLTGYGTAHCTACNEPVGRGGSVPIPNQDFQRWRIVWDLTNGDWRAQTITWFMNDQQFHQLSGATIGDQGVWSTLTNKPLFFILNMAVGGNWPGYPNDRTQGGYGAMMEVGYVAHYST

SEQ ID NO: 378 - protein, 259 aa, Myceliophthora thermophilia
WAPPSYDGYRLVWSDAFPGAPGTLPNENNWNIITGNLGVNNELEVYQRDPRNLQMSGGNTLQIVPWLDGSTWSSGRIESKYTFTPQPGGRTMAEAQIRFGSNDISTKQGLWPAFWLLGDSIRHGTGWPACGELDILETINGQLTGYGTAHCTACNEPVGRGGSVPIPNQDFQRWRIVWDLTNGDWRAQTITWFMNDQQFHQLSGATIGDQGVWSTLTNKPLFFILNMAVGGNWPGYPNDRTQGGYGAMMEVGYVAHYST

SEQ ID NO: 379 - DNA, 858 bp, Myceliophthora thermophilia
atgcgtgccgctctagccttgttggctctctactcgtcgctggcttgcgccacgccggctcccgcctaccccggcttcaagctgttgtggtcggatagcttctcaggtgccgccggagatacgcccgaccagaagaaatggaacatcatcaccgacgtccaaaccaacggcgaggtgcagaactactccaagtcgaataagaacctgcagatctcggggggtgacacggtgcagctggtgccgttcaagtcccccaagggcacgtggacgtcggcgcggatcgagtccaaggaggcgttcacgcccccgcagggcaagctgaccatgttcgaggcggcgatccggttcggcgacacgccggcggtgaacaagcagggcatctggcccgcgttctggctgctcggcgacgccgtccaccacggcaccccctggccgcgctgcggcgagctcgacatcatggagacggtcaacggcctgcccgccgcctacggcaccacacactgcggcaacggcgagcaaggcgggccctgcaacgagcccatcggccgcggcgccgccgtccccctgctcgactacggctggcacacctggaccctgcagatcgaccgcaccaacgcctccggcgactggaaggacgaggtcatccgctggctggttgacggcaacgtcttccaccagatccgcggctccgacattggcgaccagggcatctggggcactctcgtgcactcgcccatgttcatcatcttgaacgtggccgtgggcggcaactggccgggtgctcccaacagcctgacggccgacggctatggcagcatgatggaagttgagtacgtggctgtgtacacgtcctcttag

SEQ ID NO: 380 - protein, 285 aa, Myceliophthora thermophilia
MRAALALLALYSSLACATPAPAYPGFKLLWSDSFSGAAGDTPDQKKWNIITDVQTNGEVQNYSKSNKNLQISGGDTVQLVPFKSPKGTWTSARIESKEAFTPPQGKLTMFEAAIRFGDTPAVNKQGIWPAFWLLGDAVHHGTPWPRCGELDIMETVNGLPAAYGTTHCGNGEQGGPCNEPIGRGAAVPLLDYGWHTWTLQIDRTNASGDWKDEVIRWLVDGNVFHQIRGSDIGDQGIWGTLVHSPMFIILNVAVGGNWPGAPNSLTADGYGSMMEVEYVAVYTSS

SEQ ID NO: 381 - protein, 268 aa, Myceliophthora thermophilia
TPAPAYPGFKLLWSDSFSGAAGDTPDQKKWNIITDVQTNGEVQNYSKSNKNLQISGGDTVQLVPFKSPKGTWTSARIESKEAFTPPQGKLTMFEAAIRFGDTPAVNKQGIWPAFWLLGDAVHHGTPWPRCGELDIMETVNGLPAAYGTTHCGNGEQGGPCNEPIGRGAAVPLLDYGWHTWTLQIDRTNASGDWKDEVIRWLVDGNVFHQIRGSDIGDQGIWGTLVHSPMFIILNVAVGGNWPGAPNSLTADGYGSMMEVEYVAVYTSS

SEQ ID NO: 382 - DNA, 810 bp, Myceliophthora thermophilia
atggtgactctcagtacactcgccagagcggtcagcattcccgcccttgccggctggaacattgtctcgaccatcacctttgatggcgaagccggcaagtcggtagaccaatccacgtgggaggtcataaccaacatccacgtcaacaacgaggttcaggagtacaccacctcgccggacaacgctcacctctccggcaacggcaccctgctcatcatcccgctcaagtccgagacgggccagtggacgtcggcccgcctcgggtccaagcagtcgttcacgcccgaggacggcaagacgacgcggtaccagtccgagctccgcttcggcgactccccccaggacaagcagcagggcatctggcccgccttctggatgctcggccagtcctcccgcgaggggacgccgtggcccgagtgcggcgagctcgacatcatggagcgcaagaacggcgagcccaccggccacggcaccccgcactgcggcaccggcgactcctgcggcgggctcaccaagagcgtgcccctggacggcaacggctggcatacctgggccatcgagatcgatcggacaaacaagaactgggcggaccagaccatctcctggttcctggacgacaacaagtataacagcatcaagggctccgatgttcaggacgaggacacctggaaggccattgcgcactcgccgatgtatttcattctgaacatcgctgtcggtggtgactggcctggaaagcccaacgaccagacagccgatggcatggacaacatgatggaggtcaagtatatcgctatatactcgaagtag

SEQ ID NO: 383 - protein, 269 aa, Myceliophthora thermophilia
MVTLSTLARAVSIPALAGWNIVSTITFDGEAGKSVDQSTWEVITNIHVNNEVQEYTTSPDNAHLSGNGTLLIIPLKSETGQWTSARLGSKQSFTPEDGKTTRYQSELRFGDSPQDKQQGIWPAFWMLGQSSREGTPWPECGELDIMERKNGEPTGHGTPHCGTGDSCGGLTKSVPLDGNGWHTWAIEIDRTNKNWADQTISWFLDDNKYNSIKGSDVQDEDTWKAIAHSPMYFILNIAVGGDWPGKPNDQTADGMDNMMEVKYIAIYSK

SEQ ID NO: 384 - protein, 251 aa, Myceliophthora thermophilia
WNIVSTITFDGEAGKSVDQSTWEVITNIHVNNEVQEYTTSPDNAHLSGNGTLLIIPLKSETGQWTSARLGSKQSFTPEDGKTTRYQSELRFGDSPQDKQQGIWPAFWMLGQSSREGTPWPECGELDIMERKNGEPTGHGTPHCGTGDSCGGLTKSVPLDGNGWHTWAIEIDRTNKNWADQTISWFLDDNKYNSIKGSDVQDEDTWKAIAHSPMYFILNIAVGGDWPGKPNDQTADGMDNMMEVKYIAIYSK

SEQ ID NO: 385 - DNA, 744 bp, Myceliophthora thermophilia
atgcagccgtttctgctcttgttcctctcgtcggtcacggcggcgagccccctgacggcgctcgacaagcggcagcaggcgacgttgtgcgagcagtacggctactggtcgggcaacggttacgaggtcaacaacaacaactggggcaaggattcggcctcgggcggccatcagtgcacctacgtcgacagcagcagctccagcggcgtcgcctggcacacgacctggcagtgggaaggaggccagaaccaggtcaagagcttcgccaactgcggcctgcaggtgcccaagggcaggaccatctcgtccatcagcaacctgcagacctccatctcgtggtcctacagcaacaccaacatccgcgccaacgtggcctacgacctcttcaccgcggcagacccgaaccacgcgaccagcagcggcgactacgagctcatgatctggctggcgagattcggcgacgtctaccccatcggctcgtcccagggccacgtcaacgtggccggccaggactgggagctgtggacgggcttcaacggcaacatgcgggtctacagcttcgtagcgcccagcccccgcaacagcttcagcgccaacgtcaaggacttcttcaactatctccagtccaaccagggcttcccggccagcagccaataccttctcatcttccaggcgggcaccgagcccttcaccggcggcgagaccacccttaccgtcaacaactactctgcaagggttgcttaa

SEQ ID NO: 386 - protein, 247 aa, Myceliophthora thermophilia
MQPFLLLFLSSVTAASPLTALDKRQQATLCEQYGYWSGNGYEVNNNNWGKDSASGGHQCTYVDSSSSSGVAWHTTWQWEGGQNQVKSFANCGLQVPKGRTISSISNLQTSISWSYSNTNIRANVAYDLFTAADPNHATSSGDYELMIWLARFGDVYPIGSSQGHVNVAGQDWELWTGFNGNMRVYSFVAPSPRNSFSANVKDFFNYLQSNQGFPASSQYLLIFQAGTEPFTGGETTLTVNNYSARVA

SEQ ID NO: 387 - protein, 232 aa, Myceliophthora thermophilia
SPLTALDKRQQATLCEQYGYWSGNGYEVNNNNWGKDSASGGHQCTYVDSSSSSGVAWHTTWQWEGGQNQVKSFANCGLQVPKGRTISSISNLQTSISWSYSNTNIRANVAYDLFTAADPNHATSSGDYELMIWLARFGDVYPIGSSQGHVNVAGQDWELWTGFNGNMRVYSFVAPSPRNSFSANVKDFFNYLQSNQGFPASSQYLLIFQAGTEPFTGGETTLTVNNYSARVA

SEQ ID NO: 388 - DNA, 1233 bp, Myceliophthora thermophilia
atggccaaggactcggtccgccatctcgccgccgttctcgccgcggccgccttggtcgcggtggcccggggcggtaatagtaataataacaataataataatcccctgacaacggactcggactgccaatgctacaaaaccaacgggacggcagccagctacttctcacaccaccggttcttcgactttggctcgctccaccggtacgtcaatgtcacgaaaccgattgacgactttcgggccaacgccgaggcgccgcccacgagctcctacttcctgcgccccgagttcgccgacacgtgggacattcagaggtgggacaacacggagctcatggcgctgaacgacgagacgatcaacgacgcgaccatcaagatggtcaacagccccaacaacatctacatcgagcacgacgacgacgacgacgacgacgacgacgggcaggcgacgcacctgacgctgcggacggtccggcacgcggccgggttccagtctgcggccgagatcgagtcgctcagcaaggggttccgctacctctcggtgcggatgcgggcgcgcacgaggggggcccgcggggcggtgacggccatgttcacataccgggacccgccgccggggcaggggcaggggcccgacgacgactacgtggcgcagacgcaggaggcggacctggagatcctgacgcgggaggacgagccgccgacgcgggtgcagtacacgaaccagccgtcgtgggacgaggccggcgacatccccgaggcgacgcgcaacgtgacgctcccgcgcggccgccggtggaccgactgggtcgactaccggatggactggacgcccgggagcagcacgtggtacgtcgacgggcagccggccgcccgcatcaccttccaggcgccgcgcgacccgctgcaggtcatcttcaacgcctggagcgacggcggcacctggtccgggcgcatgcccgtcggcgccgaggctttcctgcagatcaagtggatcgagattgtctacaacaccacggacaagcaccccggcagcagcggtggcggcggcaaggccaaggaggaggaggatgcggagccggaggcgggatgccgcaaggtgtgcagcatcgacgagacaagcaggatcggcacgccggtgctgttgtcggcgggcaccagcgccgttgcagtctcggcgttgccctggctgtccgcgttgttgacagtctgtgcctgcttcatgctgtgctga

SEQ ID NO: 389 - protein, 410 aa, Myceliophthora thermophilia
MAKDSVRHLAAVLAAAALVAVARGGNSNNNNNNNPLTTDSDCQCYKTNGTAASYFSHHRFFDFGSLHRYVNVTKPIDDFRANAEAPPTSSYFLRPEFADTWDIQRWDNTELMALNDETINDATIKMVNSPNNIYIEHDDDDDDDDDGQATHLTLRTVRHAAGFQSAAEIESLSKGFRYLSVRMRARTRGARGAVTAMFTYRDPPPGQGQGPDDDYVAQTQEADLEILTREDEPPTRVQYTNQPSWDEAGDIPEATRNVTLPRGRRWTDWVDYRMDWTPGSSTWYVDGQPAARITFQAPRDPLQVIFNAWSDGGTWSGRMPVGAEAFLQIKWIEIVYNTTDKHPGSSGGGGKAKEEEDAEPEAGCRKVCSIDETSRIGTPVLLSAGTSAVAVSALPWLSALLTVCACFMLC

SEQ ID NO: 390 - protein, 386 aa, Myceliophthora thermophilia
GNSNNNNNNNPLTTDSDCQCYKTNGTAASYFSHHRFFDFGSLHRYVNVTKPIDDFRANAEAPPTSSYFLRPEFADTWDIQRWDNTELMALNDETINDATIKMVNSPNNIYIEHDDDDDDDDDGQATHLTLRTVRHAAGFQSAAEIESLSKGFRYLSVRMRARTRGARGAVTAMFTYRDPPPGQGQGPDDDYVAQTQEADLEILTREDEPPTRVQYTNQPSWDEAGDIPEATRNVTLPRGRRWTDWVDYRMDWTPGSSTWYVDGQPAARITFQAPRDPLQVIFNAWSDGGTWSGRMPVGAEAFLQIKWIEIVYNTTDKHPGSSGGGGKAKEEEDAEPEAGCRKVCSIDETSRIGTPVLLSAGTSAVAVSALPWLSALLTVCACFMLC

SEQ ID NO: 391 - DNA, 1188 bp, Myceliophthora thermophilia
atggggccgattcgtcgcattctctgtctccccacgtccctttcctcactcgtcttcttcctcgtctcggccaccgctcccggaatagcggcggcggggaaagaccctgccttgactgatgattcacaatgcggctgctacctgaacaagggcaactccagcacctacttcacatatcaccgattctttgacttccggagcctcccccagtacgcgggcgtgccggccgtcatccaggacgccgagtccagcccggatgccgacccgacgagcgactacttcaagcgggacgagtggtcgagcttctggctgctgggcagctggaacaacagcaacggggcgcggcccgacgccaccgtgaccatggtcaactcgcctaacaacgtctacatcgaggccaacacggagccggacccgtcgtcgcagacgtacctgacgctgcgcacgcagcggctgagcgacttccagacggcggccgagatcgagtcggcctcgtcgggcttcaagtacctgtcgctgcgcatgcgcgcgcgcacggtgggtgcggcgggcgccatcacggccgtcttcacctaccgcggttcggacatgctcgcggacgtgcaggagtcggacctcgagatccgcacggctgacaagcgcaacctggtgcactacaccaaccagccggcctacaccgacgacggcgacgtcgtgcccgaggccacccgcaaggccaccatgccgcacggcctcgactggaccgcctgggccatccaccgcctcgactggaccccgggcctaacgacctggtatgtcgacgacgtcgaggttgcccgcattgccttccaggcgccccgcgacgagagcaacatcatcctcaacgcctggagcgacggcggccgttggaccggcaacatgacccgcttcgacgccgcctacctgcaggtccagtggctcgagctgctctacaacagcaccgacccggacgagacgaagcggagtaggcggcggcagcagcaggacggggacgggtgcaacgccgtctgcagcatcgacgagacgccggagctgggtaccccggtgctgctctggaaaaacgggccgtctcaggtcaacggcgccggcggcaggagcgtctcgacgggttcggtgccgatctggggggtcgtggtgatggtgctgtttgcaatggagctgttcatctaa

SEQ ID NO: 392 - protein, 395 aa, Myceliophthora thermophilia
MGPIRRILCLPTSLSSLVFFLVSATAPGIAAAGKDPALTDDSQCGCYLNKGNSSTYFTYHRFFDFRSLPQYAGVPAVIQDAESSPDADPTSDYFKRDEWSSFWLLGSWNNSNGARPDATVTMVNSPNNVYIEANTEPDPSSQTYLTLRTQRLSDFQTAAEIESASSGFKYLSLRMRARTVGAAGAITAVFTYRGSDMLADVQESDLEIRTADKRNLVHYTNQPAYTDDGDVVPEATRKATMPHGLDWTAWAIHRLDWTPGLTTWYVDDVEVARIAFQAPRDESNIILNAWSDGGRWTGNMTRFDAAYLQVQWLELLYNSTDPDETKRSRRRQQQDGDGCNAVCSIDETPELGTPVLLWKNGPSQVNGAGGRSVSTGSVPIWGVVVMVLFAMELFI

SEQ ID NO: 393 - protein, 363 aa, Myceliophthora thermophilia
GKDPALTDDSQCGCYLNKGNSSTYFTYHRFFDFRSLPQYAGVPAVIQDAESSPDADPTSDYFKRDEWSSFWLLGSWNNSNGARPDATVTMVNSPNNVYIEANTEPDPSSQTYLTLRTQRLSDFQTAAEIESASSGFKYLSLRMRARTVGAAGAITAVFTYRGSDMLADVQESDLEIRTADKRNLVHYTNQPAYTDDGDVVPEATRKATMPHGLDWTAWAIHRLDWTPGLTTWYVDDVEVARIAFQAPRDESNIILNAWSDGGRWTGNMTRFDAAYLQVQWLELLYNSTDPDETKRSRRRQQQDGDGCNAVCSIDETPELGTPVLLWKNGPSQVNGAGGRSVSTGSVPIWGVVVMVLFAMELFI

SEQ ID NO: 394 - DNA, 1113 bp, Myceliophthora thermophilia
atgaaggccatcttcgccctcggcacctgcctgctttccgcggcccaatgccttccttcagcacgcgcgacggcctcgtccggcgccgaggggactcgcttctccatcgacggcaagacggggtacttcgcaggcaccaactcgtactggatcggcttcctgaccaacaacaaggaccttgacaccaccttggatcacatcgcctcctccggcctcaagatcctgcgtgtgtggggcttcaacgacgtcaacagcaggccgagtcccggcaccgtctggttccagctcctctcgtcctcgggttctgagatcaacatgggtcccgacggcctgcagcggctcgactatgtggtccagtcggcagagaagcgcggcgtcaagctgatcatcaacttcgtcaacaactgggatgactacggcggcatgaacgcctatgtcaaggcttttggcggcaccaaggagggctggtacaccaatgcccgggcccaagcgcagtacaagaagtacatacaggcggtggttagccgttacgacatgtccgacgccgtctttgcgtgggagttcgccaacgagccccggtgcaaggggtgcagcacggacgtcatctacaagtgggcgacggatatctcggcgtacatccgcagcctcgatccgagccacatgatcacgctgggcgacgagggtttcgggcttcccggagacggaacatacccctaccagtacagcgagggtgtggactttgtcaagaatttgaagatcaaggacttggatttcgggaccttccacatgtaccccgacagctggggcgttccgtactccttcgccaacggctggatcaagagtcatgcggacgcgtgcaaagccgcgaacaagccatgtcttctggaagagtacggcgcctacgctagctgcgatatccagaaaccctggcagcagacagctctttcgttcgctgccgacggtgtgagcggcgacctgttttggcggtggggcgaccagctcagttacggcctgtcgccaaacgacggcaacacggtctattacggttcatcacttgctcaatgcctcgtgacggatcatgttaaggctattaatggctcaggtgccgtttga

SEQ ID NO: 395 - protein, 370 aa, Myceliophthora thermophilia
MKAIFALGTCLLSAAQCLPSARATASSGAEGTRFSIDGKTGYFAGTNSYWIGFLTNNKDLDTTLDHIASSGLKILRVWGFNDVNSRPSPGTVWFQLLSSSGSEINMGPDGLQRLDYVVQSAEKRGVKLIINFVNNWDDYGGMNAYVKAFGGTKEGWYTNARAQAQYKKYIQAVVSRYDMSDAVFAWEFANEPRCKGCSTDVIYKWATDISAYIRSLDPSHMITLGDEGFGLPGDGTYPYQYSEGVDFVKNLKIKDLDFGTFHMYPDSWGVPYSFANGWIKSHADACKAANKPCLLEEYGAYASCDIQKPWQQTALSFAADGVSGDLFWRWGDQLSYGLSPNDGNTVYYGSSLAQCLVTDHVKAINGSGAV

SEQ ID NO: 396 - protein, 353 aa, Myceliophthora thermophilia
LPSARATASSGAEGTRFSIDGKTGYFAGTNSYWIGFLTNNKDLDTTLDHIASSGLKILRVWGFNDVNSRPSPGTVWFQLLSSSGSEINMGPDGLQRLDYVVQSAEKRGVKLIINFVNNWDDYGGMNAYVKAFGGTKEGWYTNARAQAQYKKYIQAVVSRYDMSDAVFAWEFANEPRCKGCSTDVIYKWATDISAYIRSLDPSHMITLGDEGFGLPGDGTYPYQYSEGVDFVKNLKIKDLDFGTFHMYPDSWGVPYSFANGWIKSHADACKAANKPCLLEEYGAYASCDIQKPWQQTALSFAADGVSGDLFWRWGDQLSYGLSPNDGNTVYYGSSLAQCLVTDHVKAINGSGAV

SEQ ID NO: 397 - DNA, 1233 bp, Myceliophthora thermophilia
atgcgctgtttaacttcaaggcttcttgccgccagtctgctgatccttagtactgccacggcggcccctggtcgttccaatttcgtgacggtcgagggagggatcttcaagctctcgggcaaggactttcactttgctgggagcaacgcttactactttcccttcaatggcgaccagcaagatattgaaaaggggctaacagccgccaagcgagccgggctctctgtcttccgcacctgggggtttaacgagaagaacagcacatacaaccccgatggtttgccccagtatggcggagaaggcgctggtcctaccgaagtcgtgtttcagaggtggtaccctaacggcacttccatcattgacatcagcggcttcgacaaagtggtcaaggctgcagaaaagactggaatcaagctccttgtcgctctgaccaacaactgggccgattatggcggcatggacgtctatactgtcaatctgggcggcagataccacgacgatttctataccgtccccagaatcaaggaagccttcaagcgctatgtaaaggcggtcgtgactcggtacaaagattcgccgaccatctttgcttgggaactcgccaacgagccccgctgtggcgccgatggggtccgcaatcttccgcggagcgataactgcacgccccaggttctctcgtcttggatctcggagatgagcgcgtacatcaagagcctcgaccgcaaccatttggttacctggggaggcgagggaggcttcaaccgcgagtccgacgactgggcgtacaatggtgccgacggcggcgactttgaccatgagctctcgctcaagaccatcgactttggcgtcttccactcttatcctgactggtgggataagactgtcgagtggacgcaccagtggatccgtgatcatgctgccgccggtcggaaggctcgcaagcccgtcgtgcacgaagagtacggctggctgacgccggacaagaggctggagtacaccggcaaggtcgacaacaggacgagggtcgaggtactcggtggttggcaaaagacgactgtcagggaggagctggccgggagcatgtactggcagtacggatactcgaattattcctatggtcggaaccacgacgatggttttaccatctacttggacgacgaggaagccaagacgcttgtgtacgggcatgcgaaggaaatgaatgcccttaaccatcaccgtggtcggaagtag

SEQ ID NO: 398 - protein, 410 aa, Myceliophthora thermophilia
MRCLTSRLLAASLLILSTATAAPGRSNFVTVEGGIFKLSGKDFHFAGSNAYYFPFNGDQQDIEKGLTAAKRAGLSVFRTWGFNEKNSTYNPDGLPQYGGEGAGPTEVVFQRWYPNGTSIIDISGFDKVVKAAEKTGIKLLVALTNNWADYGGMDVYTVNLGGRYHDDFYTVPRIKEAFKRYVKAVVTRYKDSPTIFAWELANEPRCGADGVRNLPRSDNCTPQVLSSWISEMSAYIKSLDRNHLVTWGGEGGFNRESDDWAYNGADGGDFDHELSLKTIDFGVFHSYPDWWDKTVEWTHQWIRDHAAAGRKARKPVVHEEYGWLTPDKRLEYTGKVDNRTRVEVLGGWQKTTVREELAGSMYWQYGYSNYSYGRNHDDGFTIYLDDEEAKTLVYGHAKEMNALNHHRGRK

SEQ ID NO: 399 - protein, 389 aa, Myceliophthora thermophilia
APGRSNFVTVEGGIFKLSGKDFHFAGSNAYYFPFNGDQQDIEKGLTAAKRAGLSVFRTWGFNEKNSTYNPDGLPQYGGEGAGPTEVVFQRWYPNGTSIIDISGFDKVVKAAEKTGIKLLVALTNNWADYGGMDVYTVNLGGRYHDDFYTVPRIKEAFKRYVKAVVTRYKDSPTIFAWELANEPRCGADGVRNLPRSDNCTPQVLSSWISEMSAYIKSLDRNHLVTWGGEGGFNRESDDWAYNGADGGDFDHELSLKTIDFGVFHSYPDWWDKTVEWTHQWIRDHAAAGRKARKPVVHEEYGWLTPDKRLEYTGKVDNRTRVEVLGGWQKTTVREELAGSMYWQYGYSNYSYGRNHDDGFTIYLDDEEAKTLVYGHAKEMNALNHHRGRK

SEQ ID NO: 400 - DNA, 1455 bp, Myceliophthora thermophilia
atgcacctcaccggaaccttcctcacggtggcggcagccatgagcggcgccgccgcagcccccagtgagaggcctatcgaagcacgccaagcaaacactatcacggtcgacctctcccagacgtaccagcgcatggatggattcggcttcagcctggcgttccagcgggcgaacttgatcaccaacatgtcggacaagaccaagcagcgagagctgctcgacctgctcttcaaccggacgacgggggccggcttcagcatcctgcggaatggcattgggtcgtcgcccaacagcaactcggacttcatgaacaccatcgcgcccaacaacccggggagccccaacgcggagccccagtacatgtgggacggcaaggacagcgggcagctgtgggtgtcgcagcaggcagtgaacttgtatggggtcaagaatatctacgccgacgcctggagcgctccggggtacatgaagaccaacgggcgcgacaccaacggcggcaccctctgcggggtgccgggagcgcagtgtgcgtccggcgactggcggcaggcgtacgccaactatctggtggcctacattggcttctacgcggaggaaggcgttaacatcacgcacctggggttcctcaacgagccggactacagcgccagctacgcgtcaatgcaatccaacggcaaccaggcggccgacttcatcaagatcctgcacccaacactcgaggccgtagggcttggggaccgggtacggatcgtgtgctgcgactcaatgggctggaacaaccaggtgagcatggtctcgcagatccggtcggccggcgccgaggacctgctggggaccgtgacctcgcacacgtattcggggggcccgggcgggccgatgagctcgcgggctcccgtctggctgtcggagcagtgcgacctcaacggggcctggaccacggcctggtactcgtacggcggcgcgggcgaggggctgacgtgggccagtaacatctacaacgcggtcgtcaacgccaacatctcgggctacctgtactgggagggtgtccagtggcctaacccaaacaccaatgagaagctcatccgcgtggacaacacgaccaacacgtacgaagtgtcgagcaggctgtgggcttttgccaactggtcacgctacgtgcggcccggggctgtgcgggtgggggtcagcggcggggggaatggactgcgcacggcggccttcagaaacgaagacggcacgattgcggtcattgccatcagctcgggggggtcggcggcgaacgtgagcatcaagatctctggaggccccggcgcagccgcggtgcaggcgtttgtgtctgacaacacgagaaaatgcgagtctacgccggcgacggtggcaggtgatggaaccatctcagggtcagtcgcagccagatcaatcacgaccttctttatcttgccggagagctcctga

SEQ ID NO: 401 - protein, 484 aa, Myceliophthora thermophilia
MHLTGTFLTVAAAMSGAAAAPSERPIEARQANTITVDLSQTYQRMDGFGFSLAFQRANLITNMSDKTKQRELLDLLFNRTTGAGFSILRNGIGSSPNSNSDFMNTIAPNNPGSPNAEPQYMWDGKDSGQLWVSQQAVNLYGVKNIYADAWSAPGYMKTNGRDTNGGTLCGVPGAQCASGDWRQAYANYLVAYIGFYAEEGVNITHLGFLNEPDYSASYASMQSNGNQAADFIKILHPTLEAVGLGDRVRIVCCDSMGWNNQVSMVSQIRSAGAEDLLGTVTSHTYSGGPGGPMSSRAPVWLSEQCDLNGAWTTAWYSYGGAGEGLTWASNIYNAVVNANISGYLYWEGVQWPNPNTNEKLIRVDNTTNTYEVSSRLWAFANWSRYVRPGAVRVGVSGGGNGLRTAAFRNEDGTIAVIAISSGGSAANVSIKISGGPGAAAVQAFVSDNTRKCESTPATVAGDGTISGSVAARSITTFFILPESS

SEQ ID NO: 402 - protein, 465 aa, Myceliophthora thermophilia
APSERPIEARQANTITVDLSQTYQRMDGFGFSLAFQRANLITNMSDKTKQRELLDLLFNRTTGAGFSILRNGIGSSPNSNSDFMNTIAPNNPGSPNAEPQYMWDGKDSGQLWVSQQAVNLYGVKNIYADAWSAPGYMKTNGRDTNGGTLCGVPGAQCASGDWRQAYANYLVAYIGFYAEEGVNITHLGFLNEPDYSASYASMQSNGNQAADFIKILHPTLEAVGLGDRVRIVCCDSMGWNNQVSMVSQIRSAGAEDLLGTVTSHTYSGGPGGPMSSRAPVWLSEQCDLNGAWTTAWYSYGGAGEGLTWASNIYNAVVNANISGYLYWEGVQWPNPNTNEKLIRVDNTTNTYEVSSRLWAFANWSRYVRPGAVRVGVSGGGNGLRTAAFRNEDGTIAVIAISSGGSAANVSIKISGGPGAAAVQAFVSDNTRKCESTPATVAGDGTISGSVAARSITTFFILPESS

SEQ ID NO: 403 - DNA, 3243 bp, Myceliophthora thermophilia
atgcaaatcaaaggcatcactctgcaacaggatgagatcaaaccggactacgccaacgaggccgtcttccgacgaaacactctgcctccgcggtcctactacatcccaaagacgtcgcttgctctgaacggccgctggaacttccattacacgtcgactccgttgaaggctcctgttccaagctctggcacccaagcttccccaaccccgtctgcatctgatcatcccgacgaaacgtggacagccatcgaggtccccggccattggcaacttcagggccatggcatcccccattacacaaacgttcagtatccaattcccgtttgcccgccatatgtgcctaccgaaaatccgacggggacttacaagagaaccttccatgtgccgtcctcgtgggatcgtgcatcgcaactccgtctgcgcttcgatggggtcgacagcgcatatcacgtctgggtcaacggaaccttaatcggttacgctcaggggtccagaaaccctcacgagttcgatgttacgccgtacgtcaaccgagacggagccaatgaggtctgggtcagggtataccagtggtctgacggttcttacatcgaggatcaggaccaatggtggctctccggcatttatcgcgacgttcacctcatttcgttgccctcggagacgcgcatcgaagattggtttctacggactgatctcgatgccgagtacagcgacgggacactggacgccaccatcgatgtcgtgacttctacgactgccacagtttccgtggcgttacgagagcttgccaaaaacgggggcgagactctcggagatgcgcagcaggaggtcaatggcgacggcaaggttcacctcaccataccggtcaagaaaccggcaaagtggactgccgagacgccgtacctttattccgtcgagctgtcaatcaccacggcctccggcacacaaacgattcaccagagagtaggattccgcaaggtcgaactgaagaacggcttgatctgtgtcaacggccggcccatcaggctccgcggggtaaaccgacacgaccaccatccgcgtttcgggcgtgccgttcccctcgactttgtccggagagacttgctcctgatgaagacgcacaacatcaacgccctccggtgcagtcactaccccagtgaccctaggctgttcgatattgcagacgagctcggattatgggtgattgacgaggcggacctcgagtgccacgggttctacgacgccgttgcgcgccccaaggacatcccggaggagatggactacgaggagcgcaagaagctgacctttgcagaagcagccaaatacaccagcgacaacccatcgtggaaggccgcctacgtcgatcggatggagcagatggtgcatcgcgacaagaaccacccctccgtcatcatctggtctctcggcaacgaggccttctacggccagaaccacaaggccatgtacgaatacgcaaaggaggttgaccccgggcgcctggtccactacgagggcgatgtgcatgccgagtccgccgacatgttctcgtacatgtacccctctgttgagcgtctgatcaagctggccaagaccgagggtgtcagaccagatggcacttttgacaagcccgtggtcctttgcgaatacgcacatgcgatgggcaacggacccgggtggctagaagattacgaggaggcgttccgttcctatccccgcctccagggcggattcgtctgggagtgggcaaatcacggcttgtggaaagagaatccagacggcaagtcgtactacgcttacgggggcgactttggtgacttcccaaacgatggcacgttcgtcatggacggcctcttgcacagcacccaccagccaacgccgggtttgatcgagctcaaaaaggtgattgaacccgtaaaggtcaagatagatcgagaccagcttgtcgtgtcgaacctctacaactttgtcggcctcgatcatctcactgcaacttacaaagtagagcagttttccgaaagcaccacccttctagcgtctggagtgttggatctccccaagatcgagccaggctccagcgccccggtcgcccttccgagcgcagtacataagttcgagggtgaggcaggtgccgagacacatctgaccgtctccttcacccttgcaaccgcaacaccgtgggccgaggcgggacacgaggttgcctggtttcaacaccaacttcaagcggccgagccgctcaaatcggcaggtcagcttcgcgcatctaaggcccttgacctggcgatatccaacagtgccatcaccgtcaccggcccaagtttccaactttccttcgacaaagcccgtggctacatcacgcactggtccgtcaacaacaccccgcttctcgagccggacccggtcaccggcgcggccatcataccctctttctggcgcccgccgacggacaacgacaatccctcctccctcccttactggcgccgcttcggcgtagacgtcctcacatcccaactccgctccaccaacctgtccacggaagcctcggccggccgcatccacgacaaggacagcggcaacaatgtcgaactgactttcaccacctaccacgccccgccggtccttgactggggctacctcgccacgacaacctacaccatctccccgcgcgggaccctctccgtcgccgtccgcctccggctggcaggatcctatccgcccgagcacgtcccgcgcgtcgggctggacctccgcctgccccgccgcctggacagcgtcaagtggttaggcctcgggccgggggagtcgtacccggacaagtgctccgcgcagcgggtcggggtgtggacggccgagtcggtggacgcgctgcagacgccgtacgaggtgccgcaggagggcggcaaccggatgggcacgcggtgggtgacgctgcgggagcgcggccccgccggggttgggttgcgcgtgacgaaggcggagggggagtggtcgggcaattgcgagagcgagcctgccgcctccgcgggagggttcagcttccgcgctggccggtacagggacgcggtcgtcgcggctgccaagcacccttgcgacctggttccggaggacgctaccctgctgaggctggacgccagggtggccggggtgggcacgggggcgtgcgggccgggggtgagggaggatttgctggtccctgtggaggattacgagtttggctttctcttggagccagtcgatggttga

SEQ ID NO: 404 - protein, 1080 aa, Myceliophthora thermophilia
MQIKGITLQQDEIKPDYANEAVFRRNTLPPRSYYIPKTSLALNGRWNFHYTSTPLKAPVPSSGTQASPTPSASDHPDETWTAIEVPGHWQLQGHGIPHYTNVQYPIPVCPPYVPTENPTGTYKRTFHVPSSWDRASQLRLRFDGVDSAYHVWVNGTLIGYAQGSRNPHEFDVTPYVNRDGANEVWVRVYQWSDGSYIEDQDQWWLSGIYRDVHLISLPSETRIEDWFLRTDLDAEYSDGTLDATIDVVTSTTATVSVALRELAKNGGETLGDAQQEVNGDGKVHLTIPVKKPAKWTAETPYLYSVELSITTASGTQTIHQRVGFRKVELKNGLICVNGRPIRLRGVNRHDHHPRFGRAVPLDFVRRDLLLMKTHNINALRCSHYPSDPRLFDIADELGLWVIDEADLECHGFYDAVARPKDIPEEMDYEERKKLTFAEAAKYTSDNPSWKAAYVDRMEQMVHRDKNHPSVIIWSLGNEAFYGQNHKAMYEYAKEVDPGRLVHYEGDVHAESADMFSYMYPSVERLIKLAKTEGVRPDGTFDKPVVLCEYAHAMGNGPGWLEDYEEAFRSYPRLQGGFVWEWANHGLWKENPDGKSYYAYGGDFGDFPNDGTFVMDGLLHSTHQPTPGLIELKKVIEPVKVKIDRDQLVVSNLYNFVGLDHLTATYKVEQFSESTTLLASGVLDLPKIEPGSSAPVALPSAVHKFEGEAGAETHLTVSFTLATATPWAEAGHEVAWFQHQLQAAEPLKSAGQLRASKALDLAISNSAITVTGPSFQLSFDKARGYITHWSVNNTPLLEPDPVTGAAIIPSFWRPPTDNDNPSSLPYWRRFGVDVLTSQLRSTNLSTEASAGRIHDKDSGNNVELTFTTYHAPPVLDWGYLATTTYTISPRGTLSVAVRLRLAGSYPPEHVPRVGLDLRLPRRLDSVKWLGLGPGESYPDKCSAQRVGVWTAESVDALQTPYEVPQEGGNRMGTRWVTLRERGPAGVGLRVTKAEGEWSGNCESEPAASAGGFSFRAGRYRDAVVAAAKHPCDLVPEDATLLRLDARVAGVGTGACGPGVREDLLVPVEDYEFGFLLEPVDG

SEQ ID NO: 405 - DNA, 1056 bp, Myceliophthora thermophilia
atgtcgtcttcacaacgcaagtcccctgtcgtgtacaccaatgctgtctactggcccaactaccgggtcttccatggggactcgccaggccagctgaactacgggtgcatcaaccgggtctactacgcctttgccacggtaacggcgaacggaggggtgtttctcagtaacgaggaggccgatgccgaggtagcctgtgacggagtcaagggagcgctggggtctctgatgcacctcaagcagaaacatacccatttacaagtcgtcttgtcgatcggcggcggcgcctcggccgaaacgtttcccatcgtggcatccagtcccatcctccgggacaactttgcccgctcggcccgtggcctactcgacgcatccggcctgaatggcattgacatcgtctgggagtatccttgcacaccggaacagggaagcgacttcctcgcgctggtcgcggcgatccgcatctacctccccgaggagcactacctgctcacggccaccctgccggccgtccgtgcagtcctccagaacatcgacctcggacaggcggccgagtacctcgacaccatcaacttggcggcgtacgacttcttcggtccctggtcgcacaagagcggacaccaagcgcagctgtacgctatgaacaaggacgagccatcgggcgcgagcggcgtccgggacctgatgtcggcgggcgtgccgagccgtaagatcctcctgggaatcccactctttggccgcagcttcctgcacgtttccgggccgggacacaagaaccggggcgcgggcggcggcccggatggctcgtttgagtactcccagctgccccgaaaggggactaaagagcaggtggacaagcgggccgtggcggcgcagtgcgtcggcggcgacggcggcttcgtctcgtacgacaacccggacacggtcagaatgaaggcagcgttttgcaagcagaagaggctcggagggctcttctactggagcgcgccgagcgactcgaaggatccgaaacggagtcttatcgcgacggggttcaaggcgctacacagctcttga

SEQ ID NO: 406 - protein, 351 aa, Myceliophthora thermophilia
MSSSQRKSPVVYTNAVYWPNYRVFHGDSPGQLNYGCINRVYYAFATVTANGGVFLSNEEADAEVACDGVKGALGSLMHLKQKHTHLQVVLSIGGGASAETFPIVASSPILRDNFARSARGLLDASGLNGIDIVWEYPCTPEQGSDFLALVAAIRIYLPEEHYLLTATLPAVRAVLQNIDLGQAAEYLDTINLAAYDFFGPWSHKSGHQAQLYAMNKDEPSGASGVRDLMSAGVPSRKILLGIPLFGRSFLHVSGPGHKNRGAGGGPDGSFEYSQLPRKGTKEQVDKRAVAAQCVGGDGGFVSYDNPDTVRMKAAFCKQKRLGGLFYWSAPSDSKDPKRSLIATGFKALHSS

SEQ ID NO: 407 - DNA, 3255 bp, Myceliophthora thermophilia
atgggtggcgagacaccgtcccagaggggtcctcggagcgactatcccctccaagccccaaagcccgtgggccaactgatttccaacatctacaaagaccgcatcagtcagttctactcgggcggccaatatgagcaccagaacctccttgccatgatgaaagaggccgtcgtctctggcgagccccatgtgcagctttccgtgtggcatgctccggaccagactcgcccgaccttcaagaacgctacgtcccacaagttcacaaagacgagcgtcggcgagtggtttggcccctcgtggacgacccactggttcagggtcatcttgaaggtcccagaggagctccgggacaagaggctcctcgagtttcattgggacgccaacaatgaggggatggtgtggaacgaggacggccacccgctccagggcctcacaggcggcggcgagcgtgtcgagtggatcctcccggactcgttccgcgacggcaaggagcacaccatctacatcgaaatggcctgcaacggcatgtttggcaatgccccgggaggggactcgatccagccaccagacccgaacaagtactaccgccttgaccgagccgagattgttgccgtcgatccggatgcacgccagctgtacatcgacatctggatcatcggcgacgctgcgagggagtttccccaggactcgtgggagcagcacaaggcgctcaagacctgcaacgagatcgtcgacgccttcgagatcggaaacagggagtcgctcaagacctgccggaggattgccgagcaatacctcgggcccaacgtcaactcggccaaggtgtacgagagcggcaaagaacccgtcgttttcggcatcggacactgccacatcgacagctgctggctgtggccctttgccgagaccaaacggaaggtggccaggtcgtggtccagccagtgcgacctgatggaccggtaccccgagctcaactttgcctgctcccaggcccagcagtacaagtggctcaaggagctgtacccttccgtctttgaccgggtcaagaggaaggtcgacgagggccgcttccaccccatcggaggcagctgggtcgagcacgacaccaacatgccgagcggcgagtcgctggtccgtcagttcttgtacggccagcgcttctacgagagcaactttgggaaacgctgccagaccttctggttgcccgacacgttcggttattcgagccagctgccgcagctctgccgtctggccggcatgacgcgcttcctcacgcagaagctcagctggaataacatcaaccgcttcccccacaccaccttcaactgggttgccttggacggcacccaggtcatctgccacatgcctcccgccgagacgtacacggccgaagcccacttcggcgacgtcaagcgcagcatgtcgcagcacaagtcgctagaccaggacgccacatccctgctcgtatttggcaagggagacggcggcggcggccctacctggcagcagatcgagaagctgcgtcgctgccgtggcatcagcgacactgtcggcctactgccccgagtacacatgggcgagtcagtcgacgacttcttcgacaggatcgaacgcaaggcagactccctcgtaacatggtacggcgagctgtatttcgaactgcaccgcggcacgtacacgacccaggccaagaataaacgcgacaatcgcaggtccgaggttgtgcttcgagacctggagctgctagccaccattgcgtccatcaaagacaagtcctacaagtacccgaagaaggagtttgatgacatgtgggagctggtgcttctctgccagttccacgactgccttccggggagctcgatcgagatggcctaccgggaatccgacgagatgtatgcccaggtcttcaagaccgccgagagcgccttgaaggatatttccaaggtgctaggtttctcccaggtgcagaccaccacggtcgcagacggtctcgctctcaacacgctaccatggcatcgcaaggaggttgtcgatatttctgaaaacgaggccgctgtcgcgtgcggcaatggcccgctgctgaagctgcggactttgaagacgagccaagacaagcccctcgtcacccttcagcaaccctcgaagagtgtttttgtccttgagaatgatcaactcagggtcagggtagaagcgggtgttatcacgtcgctctacgatcgaaccgccgagcgcgagatcatccccaagggccagaaggctaaccaatacgtcatctttgacgacaagcccctctactggcaggcttgggacgtcgaggtctaccacctcgacactcgcaaacctcttcagcctggcgagaccagagtccacgaaatcaagaaccaccgcgttagcgtcgtcacccggaccaagatcagcgacgagtcctccatcgaaaccatcatcagtctcaccgccgccctcccgggccaacaatcccacgttgagatctccagcaccgtcgagtggcatgaaacgatgaagttcctcaaggtcgagttccccgtcgacatccgcaacacggaagcgtcgtacgagacgcagtttggtatcgtccggcgcccgacccactataacacctcgtgggacatggccaagttcgaggtctgctcgcaccgcttcgccgacctctcggagcacggctacggcgtgtccatcctcaacgactccaagtacggcttcgccaccgccggcaacgtcatgcgcctgtcgctgctgcgcagccccaaggcccccgacgcccacgccgacatgggcacccaccacatccgctgggccatcctcccccaccagggcgccctgtcgcacgtcaccgtccgcaaagccgccgagttcaacagtccgctcaagctcgctgcccccgccggcgccggcgccggcgccgccttggcggacctgtcctcgccgcccgtgtatctgacgcccgactcgagcgaggccctggtgctggacacagtcaagcgcggcgaggacgacgaggacgtctcgcgcggggagctgccagtcaagaagggccggagcgtcatcctgcgcatctacgacagcctcggcggtcgggcccggggcaccgtggccaccacctgggatgtcgcgaaggtgtacaaggtcaacctgctggaagacgagctggaggaggtggtactggctgaggggggccggtttgccgtggacctgaggccctttgaagttgccagttacaagttgcagctggcgtag

SEQ ID NO: 408 - protein, 1084 aa, Myceliophthora thermophilia
MGGETPSQRGPRSDYPLQAPKPVGQLISNIYKDRISQFYSGGQYEHQNLLAMMKEAVVSGEPHVQLSVWHAPDQTRPTFKNATSHKFTKTSVGEWFGPSWTTHWFRVILKVPEELRDKRLLEFHWDANNEGMVWNEDGHPLQGLTGGGERVEWILPDSFRDGKEHTIYIEMACNGMFGNAPGGDSIQPPDPNKYYRLDRAEIVAVDPDARQLYIDIWIIGDAAREFPQDSWEQHKALKTCNEIVDAFEIGNRESLKTCRRIAEQYLGPNVNSAKVYESGKEPVVFGIGHCHIDSCWLWPFAETKRKVARSWSSQCDLMDRYPELNFACSQAQQYKWLKELYPSVFDRVKRKVDEGRFHPIGGSWVEHDTNMPSGESLVRQFLYGQRFYESNFGKRCQTFWLPDTFGYSSQLPQLCRLAGMTRFLTQKLSWNNINRFPHTTFNWVALDGTQVICHMPPAETYTAEAHFGDVKRSMSQHKSLDQDATSLLVFGKGDGGGGPTWQQIEKLRRCRGISDTVGLLPRVHMGESVDDFFDRIERKADSLVTWYGELYFELHRGTYTTQAKNKRDNRRSEVVLRDLELLATIASIKDKSYKYPKKEFDDMWELVLLCQFHDCLPGSSIEMAYRESDEMYAQVFKTAESALKDISKVLGFSQVQTTTVADGLALNTLPWHRKEVVDISENEAAVACGNGPLLKLRTLKTSQDKPLVTLQQPSKSVFVLENDQLRVRVEAGVITSLYDRTAEREIIPKGQKANQYVIFDDKPLYWQAWDVEVYHLDTRKPLQPGETRVHEIKNHRVSVVTRTKISDESSIETIISLTAALPGQQSHVEISSTVEWHETMKFLKVEFPVDIRNTEASYETQFGIVRRPTHYNTSWDMAKFEVCSHRFADLSEHGYGVSILNDSKYGFATAGNVMRLSLLRSPKAPDAHADMGTHHIRWAILPHQGALSHVTVRKAAEFNSPLKLAAPAGAGAGAALADLSSPPVYLTPDSSEALVLDTVKRGEDDEDVSRGELPVKKGRSVILRIYDSLGGRARGTVATTWDVAKVYKVNLLEDELEEVVLAEGGRFAVDLRPFEVASYKLQLA

SEQ ID NO: 409 - DNA, 3159 bp, Myceliophthora thermophilia
atgcctgtcttcgatggccacgagtacctcaccgaagaagagcggaggttgaaggaggaccgcgagcggaagaagtactggaagaaatggggatcctacctctctgagaggcagtgggcgaccgtgcgcgaggattacagcgcggacggagatgcttggagtcacttcccgcacgatcatgcccggtcccgcgcgtacagatggggcgaggacggcattgctggtgtttgcgacacgcatggcctgcagaacattgcgtttgctttctggaacgagaaggacccattcctcaaggaacgactgttcggcttgtccaacccacaggggaaccacggtgagagcatcaaggaggctcattttcacttggacaatacgccacactcgtatatgaaatacctgtacaagtacccgcagaaggagttcccttacgaggatctgctcaaggagaatgcgaggcgcggcaaacaggacagggaatatcagattctcgacaccggcgtcttcgacgaggaccgctactgggatatcttcatcgaaaccgccaaggaagacgatgacccggatgagctcctcttccgcgtgactgcatggaacaggggccccgagcgcgcacctctccacatcatcccgcacgtctggttccggaatacctggtcatggggccgcgaacccgcagagaaccggccttctatgggtgtctacgatgagaacttgataaagtcgaagcatcaccgcttaggagagcgttatgtcctcttctcgccatcgcccggcgtcggacctagcggggaggatgttcagccggacttgctctttactgagaacgaaacgaactttgagctcctgtatggtgggaaaaatgagtcaaaatacgtcaaggacgcgttccatcgctacatcgttaaccgcgagaaggacgccgtgaatccggctcaggttggaaccaaagcggccgcctggttcgcgttcaatgaagcaggcggtgtcaatcctggcgagtgcgcagttgttcgcttccgattctccaggaaagccgagacatacctcgatgaggaggaattcgacgatatcattgagaggaagcgggaggaagctgacgatttttattaccacatcagccccctgccgatgtctgatgatctccgcaacatccagaggcaggccttcgccggtatgatgtggtgcaagcaacactacctgttcatctgggacgagtgggcacatggcgaccccagccagccgccgccgccacccggccggaaggggattcgcaacgctgcctggaaacacttgcactgtgacgacattctctcgatgccagactcctgggagtacccattcttcgccgcgtgggatacgagcttccactgcatcacattggccatgatggacccggacttcgccaagaagcagctggatctcttcacccgcgagtggtactgccatcccaatggccaacttcctgcatacgagtggaactttggcgatgtcaatcctcctgtccacgcctgggcgacgttccgcgtgttcaagatcgagcgcaagttgtacggcaggcaagacctcgacttcctcgagcgggtctttcagaagttgttgctcaacttcacctggtgggtgaaccggaaagacgttgagggcaagaatgtctttgagggtggcttcctcgggctggataacatcggcttgttcaaccgctcggagccactcccaaccggcggcacgctggaacaagcggacagcacgggctggatggctttctactgtctcaacatgctcaacattgccctggagctcgccaaacatcggcggatctacgaggacattgctaccaagttctttgagcactttgtcctcatcagtgacgccatgacgttccggatgggtcagaaggacgagaagtcgctctggaacgaagaagacggcttctactacgacgcgatttcgtggggcggcccctggattcagcagatgcctgtcaggtccctggttggcctgatccccctgtacgcgactctcacgctcgaacccgagctcatcaacaagctccccaccttcaaaaagcgcgttgagtggttcatggccaaccgctgcgatgttgccgaaaggacaatgcacagcatccgcacccgcggcaagggcaacaggatcctcctgtcgcttgtgaacaaggagcggctcatcaagatcctcgagcgtatgctggatgaagacgaattcttgagcccacatggtatccgttccctgtccaagtaccacaaggatcacccttactccatgcaagttaacggccaggtcttcaaggtcggctatgtccctggcgactcggacagcggccttttcggcggcaacagcaactggcggggaccaatctggctgtgtgtcaacttcctcctggtcgagtcgctccagcgcttctacctattttttggacaggatctgaaagtcgagtgccccgtgggatcaggcgattacatgcatcttgggcatgtctcggaggagatacagcaccggctgcagcatctctttgctcgcgacaacgacggccgccgcagcatcaacggcggcaacgacatcctcgacttcgatccgcattggagagactatctctggttctacgagttctttgacggagacaccggccgcggccttggtgcaacccatcaatgtggttggacaggcctcatcgcacggatgatccacgacactggcgtaaactgccgcctcccacaaaccccacgcaccccgcgtgctggtctgtcccactactttgacgacatcctccaccgcggcgcatacctgaacgggccccagacccctatgctctcccctaccgccccgcgcctccgccgcagctcgaccagccgctcgctcgccgcccgcagcgactacagcgtaagcgatataaacctcaacgtcgggtatgacgggcacagtgacgaggacgagaatggcgagggtggcggcggaacgaattctttaagaagggggtcagtcaacccggcgctgctcaacgatccggaaagggtcaaggcgagggccgaggcggacgcgcacctgcattcgtacatcacccagcagctcgagaaggtcaagatggagaggctagaggatggatatgagactctcgaaggggacgaattcgagaccaaggcttag

SEQ ID NO: 410 - protein, 1052 aa, Myceliophthora thermophilia
MPVFDGHEYLTEEERRLKEDRERKKYWKKWGSYLSERQWATVREDYSADGDAWSHFPHDHARSRAYRWGEDGIAGVCDTHGLQNIAFAFWNEKDPFLKERLFGLSNPQGNHGESIKEAHFHLDNTPHSYMKYLYKYPQKEFPYEDLLKENARRGKQDREYQILDTGVFDEDRYWDIFIETAKEDDDPDELLFRVTAWNRGPERAPLHIIPHVWFRNTWSWGREPAENRPSMGVYDENLIKSKHHRLGERYVLFSPSPGVGPSGEDVQPDLLFTENETNFELLYGGKNESKYVKDAFHRYIVNREKDAVNPAQVGTKAAAWFAFNEAGGVNPGECAVVRFRFSRKAETYLDEEEFDDIIERKREEADDFYYHISPLPMSDDLRNIQRQAFAGMMWCKQHYLFIWDEWAHGDPSQPPPPPGRKGIRNAAWKHLHCDDILSMPDSWEYPFFAAWDTSFHCITLAMMDPDFAKKQLDLFTREWYCHPNGQLPAYEWNFGDVNPPVHAWATFRVFKIERKLYGRQDLDFLERVFQKLLLNFTWWVNRKDVEGKNVFEGGFLGLDNIGLFNRSEPLPTGGTLEQADSTGWMAFYCLNMLNIALELAKHRRIYEDIATKFFEHFVLISDAMTFRMGQKDEKSLWNEEDGFYYDAISWGGPWIQQMPVRSLVGLIPLYATLTLEPELINKLPTFKKRVEWFMANRCDVAERTMHSIRTRGKGNRILLSLVNKERLIKILERMLDEDEFLSPHGIRSLSKYHKDHPYSMQVNGQVFKVGYVPGDSDSGLFGGNSNWRGPIWLCVNFLLVESLQRFYLFFGQDLKVECPVGSGDYMHLGHVSEEIQHRLQHLFARDNDGRRSINGGNDILDFDPHWRDYLWFYEFFDGDTGRGLGATHQCGWTGLIARMIHDTGVNCRLPQTPRTPRAGLSHYFDDILHRGAYLNGPQTPMLSPTAPRLRRSSTSRSLAARSDYSVSDINLNVGYDGHSDEDENGEGGGGTNSLRRGSVNPALLNDPERVKARAEADAHLHSYITQQLEKVKMERLEDGYETLEGDEFETKA

SEQ ID NO: 411 - DNA, 2010 bp, Myceliophthora thermophilia
atgttctccaggcacgacaacaggctcgtctactcgtacgacgccgagaagctctggatcgagccgtggggccccgattcgctgcgcatccgcgcgacccagctcagcgcgatgccgcccgaggactgggccctcctgccgcctcccgaaccagccaccagcccggagatcaccatctccccggactcggctacgctcaccaacggcaagatcagggccaccgtcagcgcgcggggcaagctcaccgtgtctgacgcccgcacgggcaccgtcctgctcgaggagtattcgcgcaaccggctggacgtgcgggaccccaagtgcagcgcgctcaacgtggccgcgcgcgagttcaaggcggtgccgcggggcggggacgcgcaccacatcacggcgcggttcgagagcctggaccggcaagagcgcctcttcggcatgggccagtaccagcaaccgctcttcaacctcaagggcgccgacctcgagctggcccaccgcaactcgcaggccagcgtgcccttcctgctctcgtcgcgcggctacggcctgctgtggaacaacccggccgtcggccgcgccgtcctcggcaccaacctcatgaccttcgaggcctactcggcccgcgccctcgactactgggtcgtggccggcgaccgcccggccgacatcgtccgcgcctacgccgccgccaccggcagggtgcccatgatgcccgagttcggcctcggcttctggcagtgcaagctgcgctaccagacccaggaggagctgctcggggtcgcgcgcgagtaccgccggcgcgggctgccgctcgacgtcatcgtcgtcgacttcttccactggcccctgcagggcgagtggaagttcgacccggcctactggcccgacccggacgccatggtgcgggagctcaaggagttgggcgtggagctgatggtgtcggtctggccgacggtcgacaagcggtccgagaactgggacgagatggtcgagcgcggcctgctggtccgcgtcgaccggggcatgcgcaccacgatggacttccagggcgacacggtccacttcgacgcgaccaacccggcggcgcgcgagttcgtgtgggccaaggtgcgccagaactactacgccaaggggatccggctcttctggctcgacgaggccgagcccgagtactcggcctacgacttcgacaactaccgctaccacagcggctccgtcctgagcaccggcaacatctacccggccgagtacgcgcgcgccttctacgagggcctcgcgcgcgagggccacgccgacgacgccgtcagcctcgtccgctgcgcctgggccggcagccagcggtacggcgcgctggtctggagcggcgacgtcgcctcgtcctggtccagcttccgcagccagctggccgcgggcctgcacatggccgtcgccggcctgccctggtggaccaccgacatcggcggcttccacggcggcgacccgcgcgagccggccttccgcgagctcttcgtccgctggttccagtggggcgccttctgccccgtcttccgcctgcacggcgaccgcgagccccgccagccccagcacggcaccaccggcggcgccgcctgcctcagcggcggcccgaacgaggtctggtcctacgggcccgaggtgtacgagatctgcaagaagtacatggccctccgcgagcacatgcgcccttacgtccgccggctgatgcggcaggcccacgaggacggcacgccggtcatgcgccccctcttcctcgagttcccggacgatccccgctgttggaacacgggcgaggagtacatgttcggggacaagtacctggtttgcccggtcatgcagccgggcgtcgctaagctcgccgtgtacctgcctgccggcgccaagtggtcggcgctcgaaggcggcggcggcggcgaggagattgagggcggccaggtaattgaggcagactgccccatcgactacatgccggtgtttgtgagagtagctgcgtaa

SEQ ID NO: 412 - protein, 669 aa, Myceliophthora thermophilia
MFSRHDNRLVYSYDAEKLWIEPWGPDSLRIRATQLSAMPPEDWALLPPPEPATSPEITISPDSATLTNGKIRATVSARGKLTVSDARTGTVLLEEYSRNRLDVRDPKCSALNVAAREFKAVPRGGDAHHITARFESLDRQERLFGMGQYQQPLFNLKGADLELAHRNSQASVPFLLSSRGYGLLWNNPAVGRAVLGTNLMTFEAYSARALDYWVVAGDRPADIVRAYAAATGRVPMMPEFGLGFWQCKLRYQTQEELLGVAREYRRRGLPLDVIVVDFFHWPLQGEWKFDPAYWPDPDAMVRELKELGVELMVSVWPTVDKRSENWDEMVERGLLVRVDRGMRTTMDFQGDTVHFDATNPAAREFVWAKVRQNYYAKGIRLFWLDEAEPEYSAYDFDNYRYHSGSVLSTGNIYPAEYARAFYEGLAREGHADDAVSLVRCAWAGSQRYGALVWSGDVASSWSSFRSQLAAGLHMAVAGLPWWTTDIGGFHGGDPREPAFRELFVRWFQWGAFCPVFRLHGDREPRQPQHGTTGGAACLSGGPNEVWSYGPEVYEICKKYMALREHMRPYVRRLMRQAHEDGTPVMRPLFLEFPDDPRCWNTGEEYMFGDKYLVCPVMQPGVAKLAVYLPAGAKWSALEGGGGGEEIEGGQVIEADCPIDYMPVFVRVAA

SEQ ID NO: 413 - DNA, 4518 bp, Myceliophthora thermophilia
atggatacagtgaactcgactgccctcgcggcggcgacggctgtggcgggaaccgtcgaccgtcatcccaacccgctgtcgtcggccgttgctgcagctagcgatgtcgccaacgcccatggctcgtcttcgtggctcggcctcttcgcgaggctagttctctggattctgcagtttgtctcgatggtgctttactatgcaatcaagctggccaccatctcggtccctacactgctgtacaccctcttctcgacgagcttgacggtcaccatgaatgcgacaactctgatgctcatcattgcggccatgatagccgccatcagctgggttgtccgttaccgctacctcaacatgtactcgcggctgccccccgaaccccagcgcaaggagccggacgtcgacctcttccccgacagccacgaagagggcatcaagcccggcctgtccaactactttgacgaatttctcagcgccatcaagatcttcggctatctcgagcggcctgtatttcatgagctgacccgcagtatgcagacccggaagcttatcgccggcgagacattcaacctagaggaggagaaaggcttctgcctcgtcgtcgacggcctggtggagatttttgtcaagtcatcaaattacagccgccgctacgctcacagtccttacgccgcgagcgaggcgccttctagcgacgacgaacaccctgcccctggacagcaacgataccagttgctgaccgaggtccgaaatggcgctcccatgtcgtcgttattctcgatcatgtctctctttaccgaagacgtcccgctgcggcaaacagatgaagacgggtcggagcccggcaccgctcaccatagtgccctcttttcaaactaccctcagagtgcagattttcgaagacctccggtcagatcggactcgctcccgcccactcctcagctggaggagtctgcatcgaactcggtagagaacctgcctgagcacctcgaccctagcctcccccgtgttccccccatctcccttgacggcaatggcttccccaaacctcagagaccggttcccaagaggattagcaccacttcggctcatcccgacatcatcgcgagggcgacggtagacacgactgttgcgatcattcctgctagcgcctttcgacgattgatcaagatctaccccaaggccacagcacatattgttcacgtcattttgtcacgctttcagagggtcactcttgcaaccgcatacaactatctcggcttgtccaccgaggtcctgcaaatagagcgccagatgctcaagtacacgacccaccaactccccaaccatctccgtggggatgctctcgacagactcaaggaaaagttcaggcgagagagggagcggatcggcgaggtggatgtcagcaagggaatagctctgcacaatcctcgcgccggccgccggcgccgttcgacagccggtcttcggaaggaggcagcgttgcaggctttctccaagcagcgtactctctccatggctggctcgtcgtctctggtggtccctagtgcgggagatcttgcaacgcacctgcagcagtcgagaggaggcgccagcagatcgcagagcgttgcttttaccgatggatcggcttctcagttcgagctgcggagagaagccacgtctcctctggctcagcggtccttcgacccgtttgcgactcagcgaaatgtccatattccgctcgacaagagagacacgatggacgaggacaacttattccgcgagtcgatcctcgagtgtatgttcagggccatcggcctgaccggaaacagcggtctgaataaggacacggattcgaaccaggcctcgccacggctcatatcgcttgaacagcgacgccagaaaacgcactttaccaaccacgcctttggcttcatggatgggcttgatggatcgttcgacggcgagaccgagtcaatgacgtccgcatccatgccttcttcgccaaacccacagattctggcgcaagacatgcaggacgagatggagatcgtcttcttccccaaggggtcggtgttggtggaacaaggagagaggaaccccggtctatactatgtcgtggacggcttcctggacatctgcacccgagagattgcttcatcctccgacgccgcccatgctcatggcaggtcatcgatctatgctatggacaacgcccagccacgctatccctcacaccggtttgcggaccctatgcgcagtggcgataatgtagacggcgccgaagctagacccaagacgagtcgccgaagtgttggcttgatcaagcccggtggcctcgccggttacgtcggtaccatctcgtcgtacaggtccttcatcgaggtcgtggcgaagacggacgtctatgtcggcttcctcccgctcgcatccattgagaggattgtcgacaaatatcccattgtcctcctcgccatggcgaagaggctgaccaatctgcttccccggctgattctgcacatcgacttcgccctggagtggctgcaggtcaacgccggccaggtcatctaccacgagcgagacgagagcgaggccatctacattgtgttgaacgggcgcctgagattggtcgaagaccggaagggcggcggtatgaatgtcaaggccgaattcggccagggcgagagtgttggcgagctcgaggtgctcaccgagtcctcccgctccggcaccctgcacgccatacgggatacggagctcgtcaagttcccccgcacgctgttcaagagcctggctcaagagcacccgaatattaccatcaagatctcaaggatcatcgcgtcccgtatgagggcgctgatcgacgatccgtcgacgatgctgggcttcaaggatccttccggcaggagctcggtaaacaagagctcgaccacgctcaatctgaggactgttgccatcttgcccgtctctgctggcgtgcccgtagcggagtttggcaataggctgctcaatgctttgaccgaggtcggaactccaaacggcgccacgtcgttgaacagcgcggccgtcctgaaccatctcgggaagcacgcattcaacagaatgggcaagctcaagctatcgcagtatctggcggacctggaggagaagtacggactcgtgatctacgtggccgacacgaatgtcaacgctccttggacacaaacctgcatcgcacaagccgactgcgtcctcctagtcggcctggccgatggctcccccgaaatcggagagtacgagcgcttcatgctcggcatgaagtccactgcgaggaagattctcgtactcatccatcaggaacgcgactccaccccgggtctcacgaggaagtggctcaaaaaccgggtttggatcaacggaggccatttccacgtgcagatgacctacagtcccaacgcggtgccgatccacccgccagccaagccggggggcccgagtctccgggaacgagttcaggttctgcaagccgagatccaaaagtacacgtccaggaaattgcggcacagccccttctactctcccgacgcgccgttcaagggcgatttccaccggctggcccggcgtctgtgcggcaaatccgtaggcttagtcctcggcgggggcggcgcgaggggcctcgcgcacattggcatcatccgggcgatgcaggaggccggcatccccatcgacattgtgggtggcacctcgattggcgccttcatcggcgccctgtacgcgcggcacgccgactttgtgccgatcgtgaacgcggccaagaagttctcgggccgcatggccagcgtgtggcggttcgcgctcgacctgacgtacccgtcggcgtcgtacacgacgggccacgagttcaaccggggcatcttcaaggcgtttggcaacacgcagatcgaggacttctggctcgactactactgcaacacgaccaacatctccaagtcgcgggccgagttccacacgagcgggtacgcgtggcggtacgtgagggcgtccatgtcgctggccgggctgctgccgccgctgtgcgacgagggcagcatgctgctcgacggcggctacatcgacaacctgaccgtgtcgcacatgaagtcgctcggggccgacgtcatcttcgccgtcgacgtcggcgccctcgacgacgacaccccgcaggcctttggcgactcgctctcgggcctgtgggccttcttcaaccggtggaaccccttctcgtcggtgccgaacccgcccacgctggccgagatccaggcgcgcctggcctacgtcagcagcgtggacgcgctcgagcgggccaagacgctgccgggctgcatctacatgcggccgccggtggaggagtacgggacgctcgagtttggcaagttcaacgagatctacgccgtcggctacgagtacgggcaggagtttctggcgaagctgcgggagcgcggggtgctgcctctcggggaggagatgggcggcaagaaggcgctcaggaggacgatggcgccgaggagggcaagcatatag

SEQ ID NO: 414 - protein, 1505 aa, Myceliophthora thermophilia
MDTVNSTALAAATAVAGTVDRHPNPLSSAVAAASDVANAHGSSSWLGLFARLVLWILQFVSMVLYYAIKLATISVPTLLYTLFSTSLTVTMNATTLMLIIAAMIAAISWVVRYRYLNMYSRLPPEPQRKEPDVDLFPDSHEEGIKPGLSNYFDEFLSAIKIFGYLERPVFHELTRSMQTRKLIAGETFNLEEEKGFCLVVDGLVEIFVKSSNYSRRYAHSPYAASEAPSSDDEHPAPGQQRYQLLTEVRNGAPMSSLFSIMSLFTEDVPLRQTDEDGSEPGTAHHSALFSNYPQSADFRRPPVRSDSLPPTPQLEESASNSVENLPEHLDPSLPRVPPISLDGNGFPKPQRPVPKRISTTSAHPDIIARATVDTTVAIIPASAFRRLIKIYPKATAHIVHVILSRFQRVTLATAYNYLGLSTEVLQIERQMLKYTTHQLPNHLRGDALDRLKEKFRRERERIGEVDVSKGIALHNPRAGRRRRSTAGLRKEAALQAFSKQRTLSMAGSSSLVVPSAGDLATHLQQSRGGASRSQSVAFTDGSASQFELRREATSPLAQRSFDPFATQRNVHIPLDKRDTMDEDNLFRESILECMFRAIGLTGNSGLNKDTDSNQASPRLISLEQRRQKTHFTNHAFGFMDGLDGSFDGETESMTSASMPSSPNPQILAQDMQDEMEIVFFPKGSVLVEQGERNPGLYYVVDGFLDICTREIASSSDAAHAHGRSSIYAMDNAQPRYPSHRFADPMRSGDNVDGAEARPKTSRRSVGLIKPGGLAGYVGTISSYRSFIEVVAKTDVYVGFLPLASIERIVDKYPIVLLAMAKRLTNLLPRLILHIDFALEWLQVNAGQVIYHERDESEAIYIVLNGRLRLVEDRKGGGMNVKAEFGQGESVGELEVLTESSRSGTLHAIRDTELVKFPRTLFKSLAQEHPNITIKISRIIASRMRALIDDPSTMLGFKDPSGRSSVNKSSTTLNLRTVAILPVSAGVPVAEFGNRLLNALTEVGTPNGATSLNSAAVLNHLGKHAFNRMGKLKLSQYLADLEEKYGLVIYVADTNVNAPWTQTCIAQADCVLLVGLADGSPEIGEYERFMLGMKSTARKILVLIHQERDSTPGLTRKWLKNRVWINGGHFHVQMTYSPNAVPIHPPAKPGGPSLRERVQVLQAEIQKYTSRKLRHSPFYSPDAPFKGDFHRLARRLCGKSVGLVLGGGGARGLAHIGIIRAMQEAGIPIDIVGGTSIGAFIGALYARHADFVPIVNAAKKFSGRMASVWRFALDLTYPSASYTTGHEFNRGIFKAFGNTQIEDFWLDYYCNTTNISKSRAEFHTSGYAWRYVRASMSLAGLLPPLCDEGSMLLDGGYIDNLTVSHMKSLGADVIFAVDVGALDDDTPQAFGDSLSGLWAFFNRWNPFSSVPNPPTLAEIQARLAYVSSVDALERAKTLPGCIYMRPPVEEYGTLEFGKFNEIYAVGYEYGQEFLAKLRERGVLPLGEEMGGKKALRRTMAPRRASI

SEQ ID NO: 415 - DNA, 2130 bp, Myceliophthora thermophilia
atgaaaggcgctattgttcaggaatcatctcatgcttcgcagcctcgggcccatccgctaggtcctcttacggcacaggagattactcagactgcggcacttattcgtgcatgttggccggacaacatcgattgccacttcaaggtcgtgactctgctcgaacctcccaaagctcaactggccccctatctggctgcggaacgagaagggcaggatccgggcagcatagaccggcgggcattcgtggtctactatctcaggggaacacacaacctccacgaggcggtggtgaacatcaccacaggcagggtcgaagccaatgccaaactaggcccgtttacgcatccaaacggagacggagaggagatcatcgcggtagaaaaggcgttgctcgcgcacccagaggttcaagcggaattagccaaacttcaactccctcccgggacggtggtggtgtcggatccgtggctctatggtgccgatggtgtcaaggagggcaagttctacgacgacaagcgagtcatgcagtgtttcttgtacatgcgggatccgcagaacccgtccgagccggacagctgccattacgcctttcctcttcccttctcccccgtcatggaccccatcacgctggaattggtccgcatcgactatctacccacggggcacgatgagaaggtgaagcccccggctccgtggcagccggcaccgcctagcgagtacatccccgaggctcaaacgctgcgcaaggacctcaagccgctgcgtgtcacgcaaccagaagcagcgtccttctcggtcgagcacttctcggagctgggccgcctgatccgttggcagaagtgggacttcaaggtcggcttcaatcagcgggagggcatggtcctctacgacgtgcactacgacaacaagcccctgttctaccggctcagcctgtccgacatgtgcatcccttacgccgacccgcggaacccgttccatcgcaaggcggcgttcgacctcggagacgttggggccggcatcatggccaacaacctgcaactgggttgcgactgcctgggcagtatttactacatcgacggagtgctggtcaacggcaagggagagcctatccgcatgcccaacgtgatatgcgtccatgagcaggatgcgggcatcctgtggaagcacaccaactaccgaacgaaccgggccgtcgtggtccgaaaccgcgagttggtgctgcagaccatcctgacggtgagcaactacgagtacatactctctttcgtcttcaacacggcgggggatctcgcctatgaggcgcgggccacggggatcttgtcgacgcagcctgtcgaccgcgacctaaccgcaacgccgcatccgttcggcaccgtcgtgcacccgggagtgctcggcggattccatcagcacttcttcagcctccggatcgaccccatgattgccgggcacggcaactcgattgtgtacgacgaggcggtgccaatcccgcgcgacccaaagctcaacccgcacggcgtgggatacacggtgcagcggaccgaggtggaaacgtcgggcggcttcgacctggacactaccaagaaccgcaccttcaagatcattaacccggccgtgcacaacccggtcaacggggcggcggtcgggtacaaggtcgtggtcccacccatgcagcccatcctggccgacagggacagcttccattacaggcgcgccgagttcaccgaccacagcatctacgtcacccgctacgcggacggggagctctacgccggcggcctctacaccaaccagagccgcggcgggaacggcgtgcgcagctgggccgaccgcaaggacagcctcaagggaggcgacccggtgctctgggtccagttcggcatcaaccacatcccgcgcgtcgaggacttccccgtcatgcccgcggagacgctgcgggtcacgttgaggccggtcaacttcttcgaccggaacccggccatcgacgtgccgcccagcaggcaagaggtgaaccgaagcgtgagtctgaacgagccgggggacgacgtacaagagaatatgaacgggctgtccctgggaggcgagggtgggagcctgggttcttgttgcgcctctcacgggagcgtttga

SEQ ID NO: 416 - protein, 709 aa, Myceliophthora thermophilia
MKGAIVQESSHASQPRAHPLGPLTAQEITQTAALIRACWPDNIDCHFKVVTLLEPPKAQLAPYLAAEREGQDPGSIDRRAFVVYYLRGTHNLHEAVVNITTGRVEANAKLGPFTHPNGDGEEIIAVEKALLAHPEVQAELAKLQLPPGTVVVSDPWLYGADGVKEGKFYDDKRVMQCFLYMRDPQNPSEPDSCHYAFPLPFSPVMDPITLELVRIDYLPTGHDEKVKPPAPWQPAPPSEYIPEAQTLRKDLKPLRVTQPEAASFSVEHFSELGRLIRWQKWDFKVGFNQREGMVLYDVHYDNKPLFYRLSLSDMCIPYADPRNPFHRKAAFDLGDVGAGIMANNLQLGCDCLGSIYYIDGVLVNGKGEPIRMPNVICVHEQDAGILWKHTNYRTNRAVVVRNRELVLQTILTVSNYEYILSFVFNTAGDLAYEARATGILSTQPVDRDLTATPHPFGTVVHPGVLGGFHQHFFSLRIDPMIAGHGNSIVYDEAVPIPRDPKLNPHGVGYTVQRTEVETSGGFDLDTTKNRTFKIINPAVHNPVNGAAVGYKVVVPPMQPILADRDSFHYRRAEFTDHSIYVTRYADGELYAGGLYTNQSRGGNGVRSWADRKDSLKGGDPVLWVQFGINHIPRVEDFPVMPAETLRVTLRPVNFFDRNPAIDVPPSRQEVNRSVSLNEPGDDVQENMNGLSLGGEGGSLGSCCASHGSV

SEQ ID NO: 417 - DNA, 1983 bp, Myceliophthora thermophilia
atgcagcgcttctcgtccgccgacttggggacggagcggcgcgagctacttcggactctctccacgctagtcctggtttacaagaccgccgccagcgtcatggttgtccgtcagcccgagcctaagatatgtggtctcccggatgaatatcaaaccacgtacaacatggtctcgggtaacgagcctcctcctcctccggtgaacatatcggatgccgcgagcctggccgcctccggaccctggaaagagcggccttatcgagggcgaggggattcaataggaccctcgcggccttcctcagaacacctctttcccccggtctcttacggactaaaggtgccaagtctgtcgacccttccgccgtctttcttctcccggaccatcacgatggagggactcgcattgattctgctatacctggctgtcccgagccttctattctcggccgtcaagaagctcatgtcgtggagaaagaaccccggacccaaggctcgattccccggaccgcggcagttccccatcttgggtcgcgtacatgacctgccgcgattctcgctctggctgaagttcaaggaatgggccgacatgtacgggccgatctactacacccgggcactggatcaacggttcgtcatcgtcacggacgagaagattgccgaggagctgctggtgaagaggggtcacatctactcgggccggccgcagatccgctcgctcatcaggcacaaggacggtcccgcgtattccgccttgatggaccgccatgacatctggaaggcccagcgcaaatgggtgcacgctgccatggccgaggcgtacaagcagcacttctacgggcacgtggagcgcgagacgaggcggtatttgggcctgctgctcctggacccggcgcggttcctcgactacacgcgcgagtactgcgggcgcgtcatgtcgcggctggcctgggacgacgcgacgcaggggcgggccaacggcgagagcgccgacacgacgctgcactgcatgagcgtgtcgggccccatcaccaacacggccacgcccctgtggcacctgcccgccttcgccaacccctggtaccgcttcgagatccgccgcgagcgcgagcagcgcgcctggtggctcagcaacttccgcctggccaaggaccgcatgcggaggggcgacctgcccggcgacacgtgggcgtaccgctactttgagcaggtcgggagagaggggaacggcgatctcgaccagaccgaggaccaggaggtgtttgcgagctgcatgatcggcttcctcaacctcgtcggggtcattaccatcagcgggcccctgaagttcttcctcatggccatggccctgcatccggactgccaaatcaaggcacaggccgagatcgaccgcgtctgcggcgaccgcatgccgacgatgcaggactttgccgatctgccgacggtccgggcgtgcatgaaagagacggtccggtggaggtcgagtgtgcccttgggtgtccctcatcaagcagagcgcgacgacgagtacaggggggtaaagatcaagatgggaaccgttgtcctcgcctgcgaatgggccctcaaccgcgtgccgagccggtatccggacggggacagcttccggccagagcgttggctagagcccgggtggccgacgtaccaggagccgctgacgcggtaccccaacttccgcgagggccaggcgatgcacacgttcggctggggccgccgcacctgcctgggccagcacctggtcgacgacgagaccttcgtcttcgccgccgccgtcctgtgggcctttgacctccgccccaaggcctgcccgcgcaccggcgaacccgtgcccatcgacagccaggcgaccaacagccacgtcatcctcgaacccaggccgtaccagctcagcatccgcgtccgcagcgccgagcggggcaagcgggtgctggagggctaccgtgaggtcatgggcgagttgaggctctaa

SEQ ID NO: 418 - protein, 660 aa, Myceliophthora thermophilia
MQRFSSADLGTERRELLRTLSTLVLVYKTAASVMVVRQPEPKICGLPDEYQTTYNMVSGNEPPPPPVNISDAASLAASGPWKERPYRGRGDSIGPSRPSSEHLFPPVSYGLKVPSLSTLPPSFFSRTITMEGLALILLYLAVPSLLFSAVKKLMSWRKNPGPKARFPGPRQFPILGRVHDLPRFSLWLKFKEWADMYGPIYYTRALDQRFVIVTDEKIAEELLVKRGHIYSGRPQIRSLIRHKDGPAYSALMDRHDIWKAQRKWVHAAMAEAYKQHFYGHVERETRRYLGLLLLDPARFLDYTREYCGRVMSRLAWDDATQGRANGESADTTLHCMSVSGPITNTATPLWHLPAFANPWYRFEIRREREQRAWWLSNFRLAKDRMRRGDLPGDTWAYRYFEQVGREGNGDLDQTEDQEVFASCMIGFLNLVGVITISGPLKFFLMAMALHPDCQIKAQAEIDRVCGDRMPTMQDFADLPTVRACMKETVRWRSSVPLGVPHQAERDDEYRGVKIKMGTVVLACEWALNRVPSRYPDGDSFRPERWLEPGWPTYQEPLTRYPNFREGQAMHTFGWGRRTCLGQHLVDDETFVFAAAVLWAFDLRPKACPRTGEPVPIDSQATNSHVILEPRPYQLSIRVRSAERGKRVLEGYREVMGELRL

SEQ ID NO: 419 - DNA, 858 bp, Myceliophthora thermophilia
atgtcgggtctctcatccggcaccgcatctggcacgggctccccctcgtggacctccccatcccaaactgccgtcaacacgcccgcgactggcagcagcaccgccaactccggctccaacactccacgtagcttgaagaagatccgtatcctgatgctccacggctacacgcaatctgggcccatcttcaaaggaaaaaccaacggtctccagaagaagctcgccaagagctttgccacactggggttcgaaccagtgctgatctaccccacagcacccaacaaactcacggtcgacgacgtggtggggtgggagcggcgccagccagccatcaaggactttgagccggacacgtgggcgtggtaccgcagcgacgagctgcaggataagtacctgtacctggaggaggggatgaaccggatcgcggagacgttgcggcaggcgcgagaggaagcgaggcaggagggagacgaggacggcggggtggacggcgtgatcgggttcagccagggcgggtgcatggcggggatgctggcgtcggcgctggagccggtgcacaagccgcgggcggcggcggagcgggcgcacgagcgctggctcgagacggtgcgcgaggccaacggcgggcgcccgctcaacctggacacggtggtgggcgaggagcggagcatgggcctggcgaacaagtgcgtcgaccccgtggtcctgaaccaccccggcggccacttcgtgccgatcgaccccaagtacgtcagcgcgctcgtctcgttcatccatcagcacatccaggagaagaaggatcagaaggcgcaggcagcggatgaagacgcgggaaaggatggcgaagggttagactag

SEQ ID NO: 420 - protein, 285 aa, Myceliophthora thermophilia
MSGLSSGTASGTGSPSWTSPSQTAVNTPATGSSTANSGSNTPRSLKKIRILMLHGYTQSGPIFKGKTNGLQKKLAKSFATLGFEPVLIYPTAPNKLTVDDVVGWERRQPAIKDFEPDTWAWYRSDELQDKYLYLEEGMNRIAETLRQAREEARQEGDEDGGVDGVIGFSQGGCMAGMLASALEPVHKPRAAAERAHERWLETVREANGGRPLNLDTVVGEERSMGLANKCVDPVVLNHPGGHFVPIDPKYVSALVSFIHQHIQEKKDQKAQAADEDAGKDGEGLD

SEQ ID NO: 421 - DNA, 717 bp, Myceliophthora thermophilia
atgcatgccaaaacgaaaccctcgatcgtcttcctccacggctccggcaccaacccggacatcttccgcatgcagacccgcaagctcgccgccctcctgcagcaccacttcacccttcactacctggcggcgcccctgccacgcgggcccgggccgggcgtgctgcccttcttcgagggctgcggaccctacctgacgtggatggacgactcgtccgccgaggcggagaaggagtactgggatggcagcccgctctttgagcggcttctggagcagatcaagcggctgtccgggccggaaggcggcagcgccggcgccgggcccgtcgtcgcgctggtggggttctccatgggcggcaaggtggcgatggagctgacgcgccggctggagggggagggggaccgcagaatcaagatggtgattcccgtctgcgggacggtgccgctgcagggcgggttcgatgagggcggcgcccggaacgagaccaaggagaaggggtaccgagagatcctgggccggggcccggtcaaggccaagagcatacacctcatcggcgaggacgacccgtggcggccggagagcgaggtcttggtggacttctttgacgagacggggaggagcgtgatccggttcaagggggcccaccacatgccgctggatgacgccctaaacagacaggtcgctaggatgatcttggcggcgtgcaaggatggatga

SEQ ID NO: 422 - protein, 238 aa, Myceliophthora thermophilia
MHAKTKPSIVFLHGSGTNPDIFRMQTRKLAALLQHHFTLHYLAAPLPRGPGPGVLPFFEGCGPYLTWMDDSSAEAEKEYWDGSPLFERLLEQIKRLSGPEGGSAGAGPVVALVGFSMGGKVAMELTRRLEGEGDRRIKMVIPVCGTVPLQGGFDEGGARNETKEKGYREILGRGPVKAKSIHLIGEDDPWRPESEVLVDFFDETGRSVIRFKGAHHMPLDDALNRQVARMILAACKDG

SEQ ID NO: 423 - DNA, 1410 bp, Myceliophthora thermophilia
atggccccaatttccaaggagaccgacttcctcgtcataggaggcggcagcggaggtctcggcgccgctcgtgcagccagcgcgagatacggggccaaggccatggtcattgagggcaagcggctaggagggacatgcgtcaacgtgggttgcgttcccaagaaggtcaccttcaacgccgccgcgatcgccgaggcgcttcacgacgccaagtcgtacggcttcaacgtgcaagaaaccgccccctttgactggaccacattcaagcagaagcgcgacgcctacgtcctgcgactaaacggcatctacgagcgcaacctggccaacgacaaggtcgaatatgtgcacggctgggccaagcttctctcgcgcaacgaggtcgaagtgacgctcgacgatggcaccaagaccgtcgtcaatgccaagaagatcctcatcgccgtgggcgggaacccgaccatcccgcctcagatccccggggccgaatatggcaccaacagcgacggcttcttcgacatcgacacgctgccaaagaaggtggccctcgtcggcgccgggtacattgccgtcgagtttgcgggcatgttcaacgcgctcggcgtcgagacacacctgttcatccgttacgacaccttcctgcggcactttgatcccatgatccaggagggtgtgaccaaggagtacgagcgcctcggagtcaaggtgcataagcgaagccaggccaagaaggtggagaaggacgagaagacgggcaagctcacgatccactacaaggagggggacgacgagggcgtcgtttccgacgttgaccacctcatctgggccatcgggcgcacccccgcgacggcgggcctcggattggagtccgctggcgtcaaggtcgacgagaagggccacgtggtcgtggacgaataccaaaacacaacggtcgacggcatctatgcgctcggcgacgtgacgggccggtgggagctcacgccggtggccatcgcggcgggccggaggctcgctgcgcgcctctttggcccggagcagttcaggacagcaaagctcgactacacgaacatcccctctgttgtctttgcgcaccccgaggttggcgcgatcggcctgacggagccggaggcgatcgagaagtacgggcgtgagaacgtcaaggtctacaagaccaatttcaccgccctgtactacgccatgatggatcccgaggagaaggcccctacggcgtacaagctcgtctgcgtcggcccggaggagaaggtggtcggtctgcacatcatgggtctcggcagcggcgagattctgcagggcttcggcgttgccgtcaagatgggggctaccaaggctgactttgacaactgtgtggccatccacccgacgagcgcggaggagttggtgacgctgaaatag

SEQ ID NO: 424 - protein, 469 aa, Myceliophthora thermophilia
MAPISKETDFLVIGGGSGGLGAARAASARYGAKAMVIEGKRLGGTCVNVGCVPKKVTFNAAAIAEALHDAKSYGFNVQETAPFDWTTFKQKRDAYVLRLNGIYERNLANDKVEYVHGWAKLLSRNEVEVTLDDGTKTVVNAKKILIAVGGNPTIPPQIPGAEYGTNSDGFFDIDTLPKKVALVGAGYIAVEFAGMFNALGVETHLFIRYDTFLRHFDPMIQEGVTKEYERLGVKVHKRSQAKKVEKDEKTGKLTIHYKEGDDEGVVSDVDHLIWAIGRTPATAGLGLESAGVKVDEKGHVVVDEYQNTTVDGIYALGDVTGRWELTPVAIAAGRRLAARLFGPEQFRTAKLDYTNIPSVVFAHPEVGAIGLTEPEAIEKYGRENVKVYKTNFTALYYAMMDPEEKAPTAYKLVCVGPEEKVVGLHIMGLGSGEILQGFGVAVKMGATKADFDNCVAIHPTSAEELVTLK

SEQ ID NO: 425 - DNA, 639 bp, Myceliophthora thermophilia
atgcagctcatccagagtgttgcacgagtggctgccttcctgggcctcgcccggagacaattcgagcccgattcgtccccgtatgaggacccggaaaccggcctgacgttcgcctcgtacaccagcgaccgcggtatcacgttccgcgtggccattcctgatcccgtccctgaggacaaggtattcgacacgctccttcagattgtggcacccaaggagctcggctgggttggctgggcctggggcggctccatgacatacaacccgctcactgtcgtctgggcggacggggacaacgtcgtcctgtcgtcacggattgcctacggctacttcagcccgcccgagaaccctgacgcgcagtacactgtcttggagacgggaacgcacgtcaacgagacgcacttccaggtcacggccaagtgcaccggctgctcgaggtggggcgacgaagacacgggctacaccgagctcgacccggcatatcagaccaccttcgcattcgcctactcggagacgcctgtggagacccccagcgacccggcttccaactttggcatccacgacagcctgggacatccgatctacgacctggctacggcccagaatgccaactttgacgaggtggtgggagcgctttaa

SEQ ID NO: 426 - protein, 212 aa, Myceliophthora thermophilia
MQLIQSVARVAAFLGLARRQFEPDSSPYEDPETGLTFASYTSDRGITFRVAIPDPVPEDKVFDTLLQIVAPKELGWVGWAWGGSMTYNPLTVVWADGDNVVLSSRIAYGYFSPPENPDAQYTVLETGTHVNETHFQVTAKCTGCSRWGDEDTGYTELDPAYQTTFAFAYSETPVETPSDPASNFGIHDSLGHPIYDLATAQNANFDEVVGAL

SEQ ID NO: 427 - DNA, 777 bp, Myceliophthora thermophilia
atgactcccgcttctagattgtcatggaaaaagctaattcgcaagctgtttacactgacaccacccacgcgcacgcgcgagacccaggccggctatgacaccgaacgatcccgcagaggcgagagccccgggccgcccccggggggggggggggggggtatggttgtttactcagcggcgaggctatgcaccatcgcgagcatcacgggtccaggcagcgaatcaccaccccggatgcccggtccaggggggagccgcaccgaccaggtgggagaccgggcgtacacgtacgagaacctgcgcaagtactacgagcacagcttcaactttggcggtgagatctcgagcgcccggctaagcaacaccacgccctcgttcgaccgggccgacgttggcacgggcggccaggtccccatcagcttccccctcttcgcccagagctggagcacgtgggcggccaagggctttgaggcagtcggcatcaagcccatcaccgccctgctgcacggcgagctgctcggctcgacctggcagatcgatttgatcgactccagcacaaaaatggaggctgccatcgcccagttcaacgaggaccgcaccggccccctggcgagcccgggaggcgacttttacgccggcgagagactgccggcgcagctgaagtcccggctctccagcgagaccaagagaccaagaaaggttggcccttctgtccaggctacagtttacgtgctggccgagaagatcgcagacgataatatcaagaatgggaactaa

SEQ ID NO: 428 - protein, 258 aa, Myceliophthora thermophilia
MTPASRLSWKKLIRKLFTLTPPTRTRETQAGYDTERSRRGESPGPPPGGGGGGMVVYSAARLCTIASITGPGSESPPRMPGPGGSRTDQVGDRAYTYENLRKYYEHSFNFGGEISSARLSNTTPSFDRADVGTGGQVPISFPLFAQSWSTWAAKGFEAVGIKPITALLHGELLGSTWQIDLIDSSTKMEAAIAQFNEDRTGPLASPGGDFYAGERLPAQLKSRLSSETKRPRKVGPSVQATVYVLAEKIADDNIKNGN

SEQ ID NO: 429 - DNA, 1518 bp, Myceliophthora thermophilia
atgctgtcgcagagattaataggccgcactgcggtcaagtccgcgttcaaaccgtcagggctgccatccattgttggcgcgtcaaggtggaggcggacatatgccaccgaggctgaaacgagggatctcgtcatcatcggcggcggcgtcgccggctacgtcgccgccatcaaagctggccaggagggcatgaaggttacatgtattgagaagcgcgggaccctcggcggtacctgcctcaacgtgggctgcatcccatcaaaatcgctccttaacaattcgcacttgtaccaccagattctccacgactcgaagcatcgcggcatcgaggtcggcgacgtcaagctcaacctgaagcagctgatgaaggcgaaggagcagtcagtcgcaggcctgaccaagggtgtcgagttcctgttcaagaagaacggcgtcgagtacctgaagggtacggggtcgttccaggatgagcacacgatcaaggttcagctcaacgatggcggcgagacgagcgtgacgggcaaaaacattcttatcgcgaccggtagcgaggctacccccttccccggcctcgagattgacgagaagagggtgattaccagcaccggtgccattgcccttgaggaggttcccaagaagttggcggtcattggcggcggcatcattggtctcgagatggcgtctgtgtggtctcgcctcggatctgaggtcaccgtggttgagttcctcgatcagattggcggtcccggcatggactccgagattgcgaagagcatccagaagatcctgaagaagcagggtatcaacttcaagacgggcaccaaggttgtcagtggcgacaagagcagcgaaggcgttaagctgaacatcgactcagccaagggtggcaagccggagacgctcgacgctgacgttgtcctggtcgcgatcggccgtcgcccgtatacccaagggcttggcttggagaacattggccttgagctcgacgagcgcggccgtgtgatcatcgactcggagtaccgcaccaagatcccacacatccgctgcgtcggcgacgtcaccttcggccccatgctcgcgcacaaggctgaagaggaagctgttgctgccgtcgagtacatcaagaagggctacggccacgtcaactacggctgcatcccatccgtcatgtacaccttccccgaggtcgcgtgggttggccagtcggagcaagacctcaagaaggcgggcgtcaactaccgcgtcggtaccttccccttcagtgccaactcgcgcgccaagaccaacctggacacggaaggcatggtcaagatgcttgccgatgctgagacggaccggctgcttggcatccatatcatcggccccaatgccggcgagatgattgccgaaggtacgctggcgctcgagtacggcgcgtcgagcgaggatatcgcgcgcacttgccacgcgcaccccaccctcgccgaggctttcaaggaggcggccatggcgacgtactcaaagccgatccatttctaa

SEQ ID NO: 430 - protein, 505 aa, Myceliophthora thermophilia
MLSQRLIGRTAVKSAFKPSGLPSIVGASRWRRTYATEAETRDLVIIGGGVAGYVAAIKAGQEGMKVTCIEKRGTLGGTCLNVGCIPSKSLLNNSHLYHQILHDSKHRGIEVGDVKLNLKQLMKAKEQSVAGLTKGVEFLFKKNGVEYLKGTGSFQDEHTIKVQLNDGGETSVTGKNILIATGSEATPFPGLEIDEKRVITSTGAIALEEVPKKLAVIGGGIIGLEMASVWSRLGSEVTVVEFLDQIGGPGMDSEIAKSIQKILKKQGINFKTGTKVVSGDKSSEGVKLNIDSAKGGKPETLDADVVLVAIGRRPYTQGLGLENIGLELDERGRVIIDSEYRTKIPHIRCVGDVTFGPMLAHKAEEEAVAAVEYIKKGYGHVNYGCIPSVMYTFPEVAWVGQSEQDLKKAGVNYRVGTFPFSANSRAKTNLDTEGMVKMLADAETDRLLGIHIIGPNAGEMIAEGTLALEYGASSEDIARTCHAHPTLAEAFKEAAMATYSKPIHF

SEQ ID NO: 431 - DNA, 1272 bp, Myceliophthora thermophilia
atggactggttcggccgtgcaaagatcgcctttactcactctcccacgccgttgaccctgcagaggaaagatggcacggtcacggatcttctgaaggtctgcgaagctagcacgcctccctgccagctcaaccccctgctcttcaacggcgacatccagaccatgtggactgccgttcaggagcacggcccgccgatcttctaccgcaggaggatcttcgtcgcggaccacaagacgtacactggcacttttgccgttgacttcgcggtggagccccacaccgatgtcgacgagggattgccgccgaggacagcattttactcggacgaagactttgccaagatcgcctccgacgatagcagacctatgctcatcgtgctccacggtctgtctggcggctcgcatgagatctacctccggcacgccatcgcacccttggtattgaacggcgggaactgggaagtgtgcgtcgtgaactcccgaggctgcgccaacagcaaggtgacgagcggactgctgttcaacgcgagggctacctgggatatccggcaggtcgtgaagtgggccagggaaacctttcctaaccggccgctgttcgccctcggtttctcacttggtgccaacattttgaccaactatgtgggagaagaaggcgcaaactgcccccttaagggcgccattgccgtgggcaacccattcgacctagaggtggcgaacaagtcgctccagcggacatttctggggaagcaggtctactcgcgggtcatggggagcaacatgaagaagctcatcaatgcccacaaggacgccattctgaagcatacaaacctcaacttcgaccggatccaacaggtcacttacctccacgagtttgaccgcgaagtccagaccgtgacgtggggttatcccaccgagaacgcctactaccgggacgcatcatcctcggacgccgtgctcgccatcagaatcccgttccttgctatttccgctttggatgatccgattgccgtctatgacgccattcctttccaggagtttacgcaaaacccatacaccgtgctgctgaccacttcgctcggcggacatctctcgtggtttgagcttggcggtggaagatggcacgctcgtccgatttgcaactttctcaaccgcatggtcaccgagatcaatctggacgcgatcactccagacgccaacgggaccaagcttgagactcagtttgtgacagagttcaaccctgtgcgacggaagctgcaaatcctcaacaactaa

SEQ ID NO: 432 - protein, 423 aa, Myceliophthora thermophilia
MDWFGRAKIAFTHSPTPLTLQRKDGTVTDLLKVCEASTPPCQLNPLLFNGDIQTMWTAVQEHGPPIFYRRRIFVADHKTYTGTFAVDFAVEPHTDVDEGLPPRTAFYSDEDFAKIASDDSRPMLIVLHGLSGGSHEIYLRHAIAPLVLNGGNWEVCVVNSRGCANSKVTSGLLFNARATWDIRQVVKWARETFPNRPLFALGFSLGANILTNYVGEEGANCPLKGAIAVGNPFDLEVANKSLQRTFLGKQVYSRVMGSNMKKLINAHKDAILKHTNLNFDRIQQVTYLHEFDREVQTVTWGYPTENAYYRDASSSDAVLAIRIPFLAISALDDPIAVYDAIPFQEFTQNPYTVLLTTSLGGHLSWFELGGGRWHARPICNFLNRMVTEINLDAITPDANGTKLETQFVTEFNPVRRKLQILNN

SEQ ID NO: 433 - DNA, 1332 bp, Myceliophthora thermophilia
atgacggacgtacgcgatctgcgcatcgtcatcatcggtgcgggcatgggagggttggggaccgcactcgcgtttgccaagaaggggttcaagaacatcgacgtattcgagacggcgtccaacttgggcttcgtcggcgcgggcatccagatgccgcccaacgtcatccgggtgctccatcgcctagggtgttgggaagacatcttcgccgaggcgaccaacgtcaaggcgactagcatcaggcaggggagcacgaatgccgagctctcgcacgtggagatgccagacatcgaggagaagtacgggttcccgcactgcacggggcaccggtcgtcgctcgccggcggcctgttcaacggctgcaagaaggagaaggccatcaagttccacttctcgacggcgctggtgcgggtcaactcgttcgggcccaggccgagcatcacgctcaagccccgcgacggcgacgagtacacactcgaggccgacatagtcctggcgtcggacggcatcaagtcggtgacgcgcacgcagatgctcgccgagctgggtacggagtcgcaggaggaggacacgggccaggcggcctaccgcatcatgctcaagcggtccgagatggagcacgacccggagttgcgggagctcatcgacagcgacacggtggtgcgctgggtcggcgagcggcgccacatcatcgcgtacccggtcagcagcaagcagatctacaacctgtcgacggcccatcccgacatccacttcgcctcggccaccaacgccacgtacacgacgcggggctccaagtcggccatgctgcagatgttcgaggacttctgccccctcgtgcaccgcatgctcaacctggtgcccgacggcgaggtgtgcgagtggaagctgcgcgtgcacaagccgctgcccacctgggtgcgcgggtcggtggcgctgctgggcgacgcctgccacccgaccctgccgcaccttagccagggcgcggccatggcgatcgaggacggcgccgtgctggccgaggtcgtcagccgcatccccgccgacaaggtccacgacccggagaccatcaccaagacgctcaaggtgtacgagctgctgcgcaagccgcactgcaccgccctcgtcgacctggccacccactcgggccgcatcctgcatctcggcgagggcaaggcccgggaggagcgcgaccgcgagttccgcctcaacggcaagaacggctccgtccccgacaagtgggccagcccggacgtgcaaaacatgatttactcgcacgactgggtccaggaggccattaataggtatgatgagctatatgccagcttgtga

SEQ ID NO: 434 - protein, 443 aa, Myceliophthora thermophilia
MTDVRDLRIVIIGAGMGGLGTALAFAKKGFKNIDVFETASNLGFVGAGIQMPPNVIRVLHRLGCWEDIFAEATNVKATSIRQGSTNAELSHVEMPDIEEKYGFPHCTGHRSSLAGGLFNGCKKEKAIKFHFSTALVRVNSFGPRPSITLKPRDGDEYTLEADIVLASDGIKSVTRTQMLAELGTESQEEDTGQAAYRIMLKRSEMEHDPELRELIDSDTVVRWVGERRHIIAYPVSSKQIYNLSTAHPDIHFASATNATYTTRGSKSAMLQMFEDFCPLVHRMLNLVPDGEVCEWKLRVHKPLPTWVRGSVALLGDACHPTLPHLSQGAAMAIEDGAVLAEVVSRIPADKVHDPETITKTLKVYELLRKPHCTALVDLATHSGRILHLGEGKAREERDREFRLNGKNGSVPDKWASPDVQNMIYSHDWVQEAINRYDELYASL

SEQ ID NO: 435 - DNA, 1809 bp, Myceliophthora thermophilia
atgacgtacgactgtgacgtcctcatcgtgggggcgggcccagtcggcaccgctctagcgttggagctcgccctacaccgcgtatgcttccgcatagttgatcgggaacccatcaggaacgacaagagccgggcactgggcatccagccccggactctggagcttctcaaccgccatggagccgccgacacgatcgtccagagaggccgcatccttcgcggtgcggttacgcacatcgacagacagcgtgtttcccgccttaccctggatgacctcggcaccacggacaccgaattccccttgccccttatcctctcccaggtcgaaacggagaggtttctggatgagtgtctctccgagtatggcatgagcgttgagcgccccgtcatcgccagcaatatcatccagcacgacgccggagtcaccgtcactctcgagcgcccggacgggaagagcgacacaatacgtaccaagtacgtggtcggctgcgacggggctcacagtaccgtccgccatgcctccaagaagatgacctttcccggaggtgcctacccccaagactttgtcctttgcgacgcccgcttgcgggactccaacattgctcgagacagcctgagcgtctaccttaacaaccagggcctcgtcggcactctaccgctcgatcaggagctcgtccgcgtggttgtgtcgcggagtcccgtcgccgttccaggccaagaagcgcccaccctggaccagctgcaggcttacttcaccaccatgacgccgcccggctctggcacccttcacgatccactctggcttacccgcttccgccttcatcaccgctgcgtcaaccagtaccgcgacggccgcctcttcgtcgcgggcgacgccgcccacatccattctcccgccgccgggcagggcatgaacgcgggcatccaggactcgatcaacctgggctggaagctcgcgcgtgccctgtccctccaaaccgagtcggctctcccccgatcccaggcttgggccgcggctgacgccctcctcgacacgtacgatctagagcgccgccccgtcggcttgatgctgctccggggaacggaccgcatcttctccttcctcacagagcccaacccttggttcacgccgttccgcaacttccttatccggtttttcgccccgcgcatctcgcgcgatcgggcgtggaggaagtcggtgttccacttcatgtctcagtttggagtccactatcgcgggcgcacccggctcgtgggggaggcgagcggcttctggtggcgcccgaccatccggggcggcgatcggttaccggacgggaagatctggtccaagagcgaagcgagagagacgagcctgcagagagtatgcgtgggagcgccgcaccatctgctgctcttttccggaaatgctgcaagggggggcctgggagaggaggcgttgaggagcgcggcggacggggtggtggcagcctgcaagaccgagctccgggtacactacatcgccggcgatgacagaccgacgccgggacctgattggtacaccgattcggccggcaggttgcacgacaagtttgggttcgggaggaaggccgggtatgtgcttgtccgaccggacgggtacattgcccatattgggccgctgtctaagctgcggcagttactctcgttcctagacacgtaccttgtctcacccaacgtcgcgccgtctccatcaccctttacctatgtcaaacctcttgcttgggcggttgtggtcgcctatttcgcaccccaagtgataagatgggttgctcagagagtctggtcctga

SEQ ID NO: 436 - protein, 602 aa, Myceliophthora thermophilia
MTYDCDVLIVGAGPVGTALALELALHRVCFRIVDREPIRNDKSRALGIQPRTLELLNRHGAADTIVQRGRILRGAVTHIDRQRVSRLTLDDLGTTDTEFPLPLILSQVETERFLDECLSEYGMSVERPVIASNIIQHDAGVTVTLERPDGKSDTIRTKYVVGCDGAHSTVRHASKKMTFPGGAYPQDFVLCDARLRDSNIARDSLSVYLNNQGLVGTLPLDQELVRVVVSRSPVAVPGQEAPTLDQLQAYFTTMTPPGSGTLHDPLWLTRFRLHHRCVNQYRDGRLFVAGDAAHIHSPAAGQGMNAGIQDSINLGWKLARALSLQTESALPRSQAWAAADALLDTYDLERRPVGLMLLRGTDRIFSFLTEPNPWFTPFRNFLIRFFAPRISRDRAWRKSVFHFMSQFGVHYRGRTRLVGEASGFWWRPTIRGGDRLPDGKIWSKSEARETSLQRVCVGAPHHLLLFSGNAARGGLGEEALRSAADGVVAACKTELRVHYIAGDDRPTPGPDWYTDSAGRLHDKFGFGRKAGYVLVRPDGYIAHIGPLSKLRQLLSFLDTYLVSPNVAPSPSPFTYVKPLAWAVVVAYFAPQVIRWVAQRVWS

SEQ ID NO: 437 - DNA, 1809 bp, Myceliophthora thermophilia
atgacgacgacggaagccgagaaggtggacgtgctcatctgcggcagcgggtcggccgggctgtgcgcggccgtgtggctcgcccggttcggcgtcaactaccggatcctcgagcggcgggacgggccgctgaagacggggcaggccgacggggtgcagacgcggacggtcgagattttcgacagcttcggcattgccgaggagctgctccgggaggcctaccacgtcctcgaggtcgccttctgggcgccggacccgcgcgaccccggcgagatcgcccggacgcggtacgccgccgacaaggagacggccatcagccaccagccccacgtgatcctcaaccaggcccgcctgaatgcgctcatgacggggctgttggggccggagccgccggtcgagtacggctgcgaggtgagggaggtccgggtcgacgacggggccgccgccgaggacccggacgcgtacgccgtgacggtgacggcggtcaaggacggggtagagaggacctacagggccaaatacgtcctgggctgcgacggggcgcacagcacggtccggcggtcgctcgggttcaagatggtgggcgacagcagcgacgcggtctggggcgtcatggacgtgtacccgcggacggatttccccgacatccgcaagaagtgcgtcatcaactcggcggccggcagcatcctcgtggtgccgcgcgagggcgacgcgctggtccgcctctacacggagctgccggcgggcacgcgcgtggccgacgtgagcctcgagggcctgcaggcgcacgcgcgccgcgtctttggcggccgctacccgctcgactttgccgagacggcctggtggtcggcctactccatcggccagcgcctcgccgaccgcttccaccgcgcccaccgcgtcttcctcaccggcgacgcctgccacacccactcgcccaaggccggccagggcatgaacgtcagcctgcaggacggccacaacgtcggctggaagctcggaatggtcctgcgccgcctcgcccgcccggacgtcctgctgcccacgtacgtgctcgagcgcgagcgcaccgccgccgatctcatcgacttcgaccgcgcctttgcccgcctcttcgactcgcgctaccgccgagagaaccacgtgtcgccccgggacgtcgccgaccacttcgtccgcgccggccgctacaccgcggggcaggccgtccgctacgacccctccgtcatcacggccgccaccccttcctcttcttcttcttcttcttcttctgtagcctcgggcctcaccgtcggcatggccttccgcagcgcccaggtcgtccgcttctgcgacgccaaggccatgcagctcgtcaagggcatgcccgccaacggccagtggtacctcgtcgtctttgccggcgacctggcccggcccgagtccgcggcgcgcctgagagaggtcacccgctcgctcgagcgcatcgcctaccgcttcaccccgccgggggccgacccggacagcgtcatcgaccggatcttggtcctcgcgtccgaccggaaaacggtcgagcaggacgagatccctgcattcttcacccccgtgacgggcaaacggggcatgaaatgcctgaccaaggtgtttgccgacgaggagagctacaactcgggacacgggcacgcatacgaggcgtacggggtccatcccgagagaggagcgctggtggtcgtgcggccggatcactacgtgtccaagatcgcttccctggacgaggccgactcgttagagcagtttttcgaagggtttatgattccgcagcggacctga

SEQ ID NO: 438 - protein, 602 aa, Myceliophthora thermophilia
MTTTEAEKVDVLICGSGSAGLCAAVWLARFGVNYRILERRDGPLKTGQADGVQTRTVEIFDSFGIAEELLREAYHVLEVAFWAPDPRDPGEIARTRYAADKETAISHQPHVILNQARLNALMTGLLGPEPPVEYGCEVREVRVDDGAAAEDPDAYAVTVTAVKDGVERTYRAKYVLGCDGAHSTVRRSLGFKMVGDSSDAVWGVMDVYPRTDFPDIRKKCVINSAAGSILVVPREGDALVRLYTELPAGTRVADVSLEGLQAHARRVFGGRYPLDFAETAWWSAYSIGQRLADRFHRAHRVFLTGDACHTHSPKAGQGMNVSLQDGHNVGWKLGMVLRRLARPDVLLPTYVLERERTAADLIDFDRAFARLFDSRYRRENHVSPRDVADHFVRAGRYTAGQAVRYDPSVITAATPSSSSSSSSSVASGLTVGMAFRSAQVVRFCDAKAMQLVKGMPANGQWYLVVFAGDLARPESAARLREVTRSLERIAYRFTPPGADPDSVIDRILVLASDRKTVEQDEIPAFFTPVTGKRGMKCLTKVFADEESYNSGHGHAYEAYGVHPERGALVVVRPDHYVSKIASLDEADSLEQFFEGFMIPQRT

SEQ ID NO: 439 - DNA, 1950 bp, Myceliophthora thermophilia
atggcggcccaaacgaagaggcatccgagcctcaaccactacgacatcgtcatcgtgggcgccggccccgttggcttgatgctgtcaacctgcctggcgagatggggatacaggatcaagcacatcgacaacaggccggagccgaccccaactggtcgggccgatggtatccagccccggtcgcttgacttgctccggaacatggggctcaagtccgccatcatggccaacaagcccgcccgcgtctacgaggttgccttctgggacccgccaaagtccggcaagggaattgtgcggaccggcacctgggctagctgccccagctttattgacgctagatacccttttaccactcttcttcaccagggcctgattgagcgcgtcttcatcggcgacctcgaaaagaatggcgtcagcatccagcggccatggaccatcaagggcttcacctcgaacgagaaagaggaccccgagtaccccgtcaccgtcgacctggagcacgttgatggcaccttcaaggaaaccgtcaaggcgaagtatctgttcggtggcgaaggttctcggtccttcattcgtgaccagctgaagatcggcatcaagcacaaagaccccatcgcctatgtatggggtgtcatggacggcgttgtcaagaccgatttccctgatatcaagatgaaatgcacgattcactcggagcacggttccattatggtcattccccgcgagaacaacatggttcgcctctacatccagatcgcatcctccaccgacccggacttcaacccccggaagacggcaaccgccgaggaagtccaggcttccgctaagcgcatcttgcagccctattccatcgagtgggagagggtggagtggtactcggtctaccccatcggccagggcatttccgacaagtacactctagaccaccgggtgttcctgggtggcgatgcctgccacacccacagccccaaagccggtcagggcatgaacacggcgtttctggatgcgctgaacctggcatggaagatccacgccgtggaggccggctttgctaaccgcagcttactcgagacctacgagcccgagcgcaagacggtcgccgagaacctgcttgcctttgacaacaagtacgccaagctcttctcagagcgcccgcccgccgccaacgaggtcgccgccgcctccgcccataccaacaacaacgacaagaacaaggccggcggccaggaagagaacgagttcatcaagaccttcaaggaatcctgcgagttcaccagcggctacggcgtcttctaccagcccaacgccatcaactggtcgccctcccacccggcccagtcccacgtcgtccaccccaagagcaccaagctcgtcccgggccgcctcttcatcatcgccgacgtcacccgcgtcgtcgacgccaacgtcgtccacctcgagcaggaggtccccctcaacggctccttccgcctcttcgtcttcgccggcgcgcccgccgtcaccgcccgcgccctgcgcgatctggccgacaacatggccaagcggaactcgttctactcggcctacgccttcccggacgcggtccgcgagcaaatcagccaccacgagcgccacaatccgcactcgcccttcttcacggtctgcaccgtcttcgccgccccgcgcgcctcgatcgagatcactcgcgaggtgcccccgctgctggcgcgctaccgcgaccacatctacgccgacgaccgctgggaccgccgcgtccccgacgcccgcgcctgcgcccacgccaagatgggcctcgacgaggaccgcggcggcgtcgtcgtcgtccgccccgacggctacgtcggcatcgtcgtcgccctcgaggagggcagcgccaccgtcgacgcgctcaatagctattttagcgccttctgcactaagaagctaggcgagacgcaggcgcagctttga

SEQ ID NO: 440 - protein, 649 aa, Myceliophthora thermophilia
MAAQTKRHPSLNHYDIVIVGAGPVGLMLSTCLARWGYRIKHIDNRPEPTPTGRADGIQPRSLDLLRNMGLKSAIMANKPARVYEVAFWDPPKSGKGIVRTGTWASCPSFIDARYPFTTLLHQGLIERVFIGDLEKNGVSIQRPWTIKGFTSNEKEDPEYPVTVDLEHVDGTFKETVKAKYLFGGEGSRSFIRDQLKIGIKHKDPIAYVWGVMDGVVKTDFPDIKMKCTIHSEHGSIMVIPRENNMVRLYIQIASSTDPDFNPRKTATAEEVQASAKRILQPYSIEWERVEWYSVYPIGQGISDKYTLDHRVFLGGDACHTHSPKAGQGMNTAFLDALNLAWKIHAVEAGFANRSLLETYEPERKTVAENLLAFDNKYAKLFSERPPAANEVAAASAHTNNNDKNKAGGQEENEFIKTFKESCEFTSGYGVFYQPNAINWSPSHPAQSHVVHPKSTKLVPGRLFIIADVTRVVDANVVHLEQEVPLNGSFRLFVFAGAPAVTARALRDLADNMAKRNSFYSAYAFPDAVREQISHHERHNPHSPFFTVCTVFAAPRASIEITREVPPLLARYRDHIYADDRWDRRVPDARACAHAKMGLDEDRGGVVVVRPDGYVGIVVALEEGSATVDALNSYFSAFCTKKLGETQAQL

SEQ ID NO: 441 - DNA, 1311 bp, Myceliophthora thermophilia
atgaaggagacacagacgccgacggcgcagatccaggtgcggaacaaccgggcgaaccggctgctttcgtactgctacacgctggtggcgacgccgttcctgctctcgcgctttgcgctcgacgtggtgctgtatctggtgccgtggatgcggccggccagggagtggacgctcaaccaggcggtgcgcgtgcgcgtcgtccgcctcgtcctgctctactggtccctcctgcgctggggggaccgcctgcacctgcgaccgggccgagaggggaaccggttcgaggtgctgcggccaccgcggcggcagaagcagcagcagcagcagcagcaggaggaggaggaggggtcggaggagaagccggaggactacgactactactactaccggggcgacctcgccgtcaccaccaccaccgccgcagaagacgacgacgacgacgacgccgtgcggcccgagcccatcggggcgacctggacgccggcgcggccgcccccgccggcgctggtgcggccggggctggtggtggcgctgcacttccacgggggcggcttcgcggtcggcaacgggcgcgacgcggacgcgggcttcgcggcgcagacgctgatccggcacatggggtgcacgcacgtgtgcgcgccgcagtaccggctggccagcagcggcagcggcaacgggcggttccccgcgccggtgcaggacgcgctgacggcgtacctgttcctggtgcgggagcgggggatccccgggcggcagatcgtggtgtcgggcgactcggcgggaggcacgatcgcgctcgggctggtgcgctacatcgccgagcacggggcggcgctgggcatcccgcgccccggcgccgtcgccctctggtcgccctgggtcgacgtcgcggcggccctgcagcacgacatgcgcgcctcgcccaactaccgcaccgactacctcaacaacgagtttggccgctggggcgccgccgccgtctcgggctacggcgccgtcgacccgtccgggccctacctggcgccgctgcaccacccgttccggctgggagaagaagaagaggaagaggcgcggccgccgcccatgttcatccacggcggcgaccgcgaggtgctctgggacgatatcgagctgctcgcccggcgttacgccgacgcgggctggacggtgcacctgcaccggtcccggcactgcccgcacgacctcatcctgctcggcccccgcatcggcttcgccgccgaggccgaggaggccgccagggcggcacgcacctttttcctggcctcgaccgatctcaagctgaggtgctga

SEQ ID NO: 442 - protein, 436 aa, Myceliophthora thermophilia
MKETQTPTAQIQVRNNRANRLLSYCYTLVATPFLLSRFALDVVLYLVPWMRPAREWTLNQAVRVRVVRLVLLYWSLLRWGDRLHLRPGREGNRFEVLRPPRRQKQQQQQQQEEEEGSEEKPEDYDYYYYRGDLAVTTTTAAEDDDDDDAVRPEPIGATWTPARPPPPALVRPGLVVALHFHGGGFAVGNGRDADAGFAAQTLIRHMGCTHVCAPQYRLASSGSGNGRFPAPVQDALTAYLFLVRERGIPGRQIVVSGDSAGGTIALGLVRYIAEHGAALGIPRPGAVALWSPWVDVAAALQHDMRASPNYRTDYLNNEFGRWGAAAVSGYGAVDPSGPYLAPLHHPFRLGEEEEEEARPPPMFIHGGDREVLWDDIELLARRYADAGWTVHLHRSRHCPHDLILLGPRIGFAAEAEEAARAARTFFLASTDLKLRC

SEQ ID NO: 443 - DNA, 822 bp, Myceliophthora thermophilia
atgtatttgtcagaagagtggcttgcctacgagcggaagctgggtttccggcctgtcatcatcggcacggcccaggagatccgcactgggtacaactcgcttgcccagaccattggcaagcagctgccgccgcacgatcccacgctgacagttcacaactgccgctacatcgcccaaaacacaccttgcatcctcgtctcggtcgacttccgcctcgcccctgagcaccccgtcccagctcaggttgacgacgtgctcgccggttacctctggacccgcgaaaacattgatgccctgaacggcgacccggccaaggtcttcttgatcggcgcctcggtgggcggcgggctggcgctgagcgtggccctcaagctgatcgcgcggggccagggtgggcaggtggccggcatcgtggcgctggcgcccatcacgatgcacccggagcacgtcccagacgagttccgggccgactacacggcgtacgaggagaacgccgagggcccgctcatcaaccgcgccgccatgtatgtcttcaactcgatcaacggctgcgacgagcgcaaggacgacccttacgtcttccccgccctgcaccccctcctcgggtccgagctgccgcccacctacatctccacctgcggcgccgaccccctgcgcgacgatggcaccgtcatccagcgcgccctctcccgccacggcgtccgctgccgcctcaagaaccacgagggcctgccgcacttcttctggatctaccccgaaatccccaccggcgacaccttccgcgccgacacggtcgagggtgtcaggttcgtgctagagtga

SEQ ID NO: 444 - protein, 273 aa, Myceliophthora thermophilia
MYLSEEWLAYERKLGFRPVIIGTAQEIRTGYNSLAQTIGKQLPPHDPTLTVHNCRYIAQNTPCILVSVDFRLAPEHPVPAQVDDVLAGYLWTRENIDALNGDPAKVFLIGASVGGGLALSVALKLIARGQGGQVAGIVALAPITMHPEHVPDEFRADYTAYEENAEGPLINRAAMYVFNSINGCDERKDDPYVFPALHPLLGSELPPTYISTCGADPLRDDGTVIQRALSRHGVRCRLKNHEGLPHFFWIYPEIPTGDTFRADTVEGVRFVLE

SEQ ID NO: 445 - DNA, 906 bp, Myceliophthora thermophilia
atggggattcatggctcaagcctgtcgcggccgtccgcgcttagcggcttgggcagagagatagctcatgactacgccctgttgagagacagttacgaggccccccagcaccccatcgtccttgtccatggcctccttggttttgccgagctgaagctggccggttcctacctgcccagcattcaatactggcgtggcatcaaagaagcgcttagtgccaacaatgcagaagtcatcaccgcctcggtgccccctaccggttccatcgagcagcgggcggccaagctggccaaggacatcgaagcccaagcccgtggcaagagtgtcaacattgtggctcacagtatgggcggcctggacgcccggtacatgatctcgcatctccggcccgccagtgtcaacgtcaagtccctcatcaccgtggccactccgcatcacggcagtccctttgccgactatctcatcgagagcatcgggccgggctacttgcctcgcctgtatgacctgtggcagcggacgacgggctgggaaccgagcgccttttcccagctgacgacgaggtacatggttgaggagttcaatcctaagacccccgacaacacaacgatacgctacttctcctacggcgccatggtcaagcacaagccgcccctgctgagcccgtttcgccactctcaccaagtgatcgaggagcgcgaaggaccgaatgacggccttgtcagtgtcgagagcagcaaatggggcacctacaagggcaccctgctgggtgtcaaccaccttgacttgattaattggagcaaccggctccggtttacggtgcaaaaatggatgggtcatccgccatccttcaatgcagtagccttctatctcgacataggcgacatgcttgccaaggaagggctctaa

SEQ ID NO: 446 - protein, 301 aa, Myceliophthora thermophilia
MGIHGSSLSRPSALSGLGREIAHDYALLRDSYEAPQHPIVLVHGLLGFAELKLAGSYLPSIQYWRGIKEALSANNAEVITASVPPTGSIEQRAAKLAKDIEAQARGKSVNIVAHSMGGLDARYMISHLRPASVNVKSLITVATPHHGSPFADYLIESIGPGYLPRLYDLWQRTTGWEPSAFSQLTTRYMVEEFNPKTPDNTTIRYFSYGAMVKHKPPLLSPFRHSHQVIEEREGPNDGLVSVESSKWGTYKGTLLGVNHLDLINWSNRLRFTVQKWMGHPPSFNAVAFYLDIGDMLAKEGL

SEQ ID NO: 447 - DNA, 2427 bp, Myceliophthora thermophilia
atgaacgttcgcgatcccttcaacctccgcaacggcaccttgaaccggccccccatcgccacctggaaggccaacaggaactacaatctccaatacagcagcgcctctccgctgcaacacatcatccgagccgccgccaccgcaacccagtccgcagccgccgacctccgcgacaaggccagcgaggttgttcactcggcacaacaggccttcaccgaggcggccgccaccaccctcgacctcgacctcgagaaagcggcccacctcgagcccggccccgaagccaagcccgaagtcgaacccaaagtcgaagctaaagctaaagcccgggagcatcaccgccgcgaaagcgcccggcccacccacaccgcgagggcccctgcggactccccatcacgacaagaactagcgcccaagaccgagcgtgggcaggcccaagaacaggacatgtcgttcgccatccccaagaatgtaccctcattctccagcccgcagcgccagctcgaagaccaactctgggccgcctcctccaggaaccgccagcgatcttccctcgtaggcaacgtccagggcttcctctcccccggcagccgcgccggcctgcccatgtacaaggacaagccgtacatgtacccgcccggacggggcggcggctcctatgcctggaggcggccgctgtaccggaggaagcggacgacgtgcgccctcctcttgctggtcgtggccgggctggcgtggtggacgggcttgtttgcgggacagcaggcacgggtcggcggaggtcttagttggtccgggtggctggcgcaggagacgggcggggaagcgaacgcggccgagtgggcgaagcggcgggagagagtggtggaggcgatggagttgagttgggatgcttacgagcgatatgcttggggctatgacgagttccatcccgagtcaaagaagggccggcagatggcgcccaaggggttggggtggatcatcatcgactcgctcgacacgttgatgatcatgaacatgaccagccggctgacgcacgcgcgcgagtggttgtccaaatccctgacgtgggatcaggaccaggacgtcaacacgtttgagacgaccattcgtatgctgggcggcttgctgtcggcgcactacctctcgaccgagtatcccgacatggccccaatatcagacgacgacccaggacagcccggggaggatctgtacctggagaaggcaaaggacctggcggaccgcttgatggccgccttcgactcgccgtccggggtcccctacgccagcgtcaatctggcacagtacaagggtatcgtgtcccatgctgacctaggggcgtcatcaacagccgagacgacaactctgcagctggagttcaagtacctcgccaagctgaccggcgagaaggagtattgggacaaggccgagagggtcatgaaactggtggacgacaatggcgcgaaggacggcctggtacccatcttcatctacgccacaacgggcaagttccagggcgagaacatccggctcggcagccgtggcgactcgtactacgaatacctgatcaagcagtacctgcagaccaacaagcaggaacccatctatcaggagatgtggcgggaggcgctgcagggcatcaggaagcacctcatcacctacacggagccgtcccggttcaccatcgtcggtgagcggcccggcggtttgggcggcgacctctcgcccaagatggatcacctcgtctgcttcctgccgggcaccatcgcgctggcggtgacgggcgggctcaccgaacgggaagcgaggaagctacccacctggaccgagcaagacgaggccgacatgcagctcgcgcgcgagctgatgcacacgtgctggggcatgtacaagttcatggcgacgggcctcgccgccgagatcacccacttcaagatcgacaaccctcccctgcccgagtcggccccgcacaaggcgcccgacgagttcgacccgtccccggatgcggagtggcgcaaggacttcgaggtccgtccgttcgacagccacaacctgcagcggcccgagacggccgagagcttgttctacatgtggcgcatcacgggcgacatcaagtaccgcgagtgggggtgggagatgttcaagagcttcatgaactacacggccgtcgccgacaacggcgggttcacgagcctgtccaacgccaacaagatcccgcccgtcacgagggacaacatggagagcttctggctggccgagacgctcaagtatttctacctgctgttctcgcccaacgacctgttgccgctggataagattgtgctcaacaccgaggcgcacccgttcccgcgctttgacatggggccgttattctcgaccgggtggcagcgaaagccgagggataaggaagggaggatcatcgaataa

SEQ ID NO: 448 - protein, 808 aa, Myceliophthora thermophilia
MNVRDPFNLRNGTLNRPPIATWKANRNYNLQYSSASPLQHIIRAAATATQSAAADLRDKASEVVHSAQQAFTEAAATTLDLDLEKAAHLEPGPEAKPEVEPKVEAKAKAREHHRRESARPTHTARAPADSPSRQELAPKTERGQAQEQDMSFAIPKNVPSFSSPQRQLEDQLWAASSRNRQRSSLVGNVQGFLSPGSRAGLPMYKDKPYMYPPGRGGGSYAWRRPLYRRKRTTCALLLLVVAGLAWWTGLFAGQQARVGGGLSWSGWLAQETGGEANAAEWAKRRERVVEAMELSWDAYERYAWGYDEFHPESKKGRQMAPKGLGWIIIDSLDTLMIMNMTSRLTHAREWLSKSLTWDQDQDVNTFETTIRMLGGLLSAHYLSTEYPDMAPISDDDPGQPGEDLYLEKAKDLADRLMAAFDSPSGVPYASVNLAQYKGIVSHADLGASSTAETTTLQLEFKYLAKLTGEKEYWDKAERVMKLVDDNGAKDGLVPIFIYATTGKFQGENIRLGSRGDSYYEYLIKQYLQTNKQEPIYQEMWREALQGIRKHLITYTEPSRFTIVGERPGGLGGDLSPKMDHLVCFLPGTIALAVTGGLTEREARKLPTWTEQDEADMQLARELMHTCWGMYKFMATGLAAEITHFKIDNPPLPESAPHKAPDEFDPSPDAEWRKDFEVRPFDSHNLQRPETAESLFYMWRITGDIKYREWGWEMFKSFMNYTAVADNGGFTSLSNANKIPPVTRDNMESFWLAETLKYFYLLFSPNDLLPLDKIVLNTEAHPFPRFDMGPLFSTGWQRKPRDKEGRIIE

SEQ ID NO: 449 - DNA, 3633 bp, Myceliophthora thermophilia
atgttgctgctccatcagacaggcagcgtcaagatcggcgaggtggtccgctataccgtgacttacaagccgtcggtcgaccacatccttccctctcccgagtttctgtacctgcgcatcaagaacacctgcgccatcgcccttcgtgccgcctttgtccatgggccatacaccctcggggtcgccgcataccccgcgacattcaagcccttcgaaaagttcgagaatccgcgtcgatatggcgtgcccgagttcgagcccatgctcaaggccggcgctgtctggaactgccccttgatcgtaccggacaacatccgccagagcgctggcgagggcagcagcaaacatggacactttgggagcgggcccgagcatgatgaggacactgtctcttgggtgattgaggtttcctcccaagtcatcttttccgcctccgcgtcggtgcactatgagatcctgctggcgcgcgacgagaagtcgctgaatcttggctccgtgatgcccgtcatcgggggccaagtgcaagcaccccagcctggccgggtgagcgacttccagcagagcgctggctcatcgaaacaccatcccgcacagcccaagggcgtcttctccaaggcaatacacctcaaagttcaagataccgcagccctgtggaatactccggaaatcccaggttggaacgagattggatggctccgggcgagggaagaggactgctccgacgctcccgccgaagccggcgcggccaccagaaattctggcgaggcaaagcggccgccaaagcaccgacaaaagaagattcatctagttgtgcttacccacgggttgcacagcaatctaggcggcgacatgctgttcatgaaggagagcatagatgcagcagtgaagcaggcaaaggttgacgcgaaagcgcgcaaagcaagggaacgcgcggcaaggcggcgtgcgcgcaagggcgctactacgacgggcgactcttttgaaaggggcgaccagggttcaaacctcgatccgaatctgggactcaaagcgggtactgacaccgctagccgacggaaagaaggcgacgaaggcgagcagctcgaggacgaggaggacgatgaggaggtggacgacgacgaagaagtcattgtacgcggcttttccggaaacgcggcaaagaccgagaggggaatcaaatacctgggtaaacggcttgccaggtatatcttgcttatgacgtttccagatcagccatgcttgcccaccgccaaggcagcttcagaggccatcacccactcgctcaagacaggagcccaaaagaaggccatcgaagaagcacacaagcacagctccgcccacctggcagcctctccgggcggaaaacgtttgtacaaattcaccaagatcagcttcatcggccattccctcggaggcttggtgcagatgtacgcaatagcgtacatccagaaacactcaccgcagttcttcgatcttatcgagccgatcaacttcattgcgctggcatccccgttccttggcctaaaccatgagaatccgctctacgtgaagtttgcgttagactttggcctggtagggaggacaggacaagacctgggcctgacctggagagcgccaacgatcgcccggaatggatggggcgcgctcatgagcaatcttggggagcacgcgcacaagcgcgtatatggagaatatcagcccgagtccaagcccctcctgcggatcctgccaacggggccggctcacaaagcgctcaagaagttccgtaaccgaacggtctattccaacgtggtcaacgacgggatcgttccactccggacaagctgtctcctctttctggactggcagggccttggtcgagtcgaaaaggctcgtcgagaggcagggctcgtgggaacagtcgtggggtttggctgggccgaactgactggagccaacatgacgactcctagactcgctccttggtcgccggccgaacaagaagataaagatgacgctgaaagcgcgggcaagacaactccaaccggtcatgaggattctcaccgggtcccgcagccgccgactaatgccatgctggaagacgatcggcaaagcctgaggtcgatagccaaaccgtaccgagagacaccttcagagctgcagcatcttcagaattcgagcacaaacaacacgtcgaatcctctttccggcatcttcaatttcttccgcagcgagacaccaaaatcgccgcccctggcgtctcctaaaataaacaagatctaccagcggagccagacgctcaaatcggatcagtggccggcctcggattcgggtacctcgtccaaatccagagtgacggctgggaacgagctcagcgaggatgcagagggaatgtcggcgcctccaaaaacgagcatcttcgagtcggctggtgaccttctcaacccaaaactacccccagtcgagtttctcattgatccatcgaaacgtcctcgaactatctttcatgaccgtgtctatcacccggcggacatccccccaccacccgtcaaagagcggccttcgggcactttgagcctacggcgccggacgccagctgcaagctcctcttttctaaaatccaacgacgacaccacctcttcgtcgagatcccacccggtcaaccaaaacgacacctccccggattcaccgcgatcccaacaatccaaacccgcgcccccctctactgccgccagcgacgaagcctcgactgtccacagcccttcttcggacgccactcacggcgaggccgccgctaccgaggacgtcgccgacgtagatatcgacacctcccagatgcgcgtcgaagagaaaattgcgcgcgcctaccaccgcggtctctcgtggcgcaaggttctcgtcaagctcgaacccgacgcgcacaataacattatcgtgcgccgcaccttcgccaacgcgttcggctggccagtgatccagcacctggtcgaagcgcacttcagtgactccgcgacggcgcggctcagagacgaggacgagccgaacgccgaaagggcgaaaccgattggggagggaacggacgaaggtggcggcgagataagggcggctgcgagggggttgaacgcgagaggggaggatgtcagtatcaggaacggaagggatggtgatgaggatgaggatgaggatgagggtgatgctgatgagaaacaggatacggtgtctgagttgccgcaaggcccggggctgtcgccttcgctggccaacgccaacagcaacaacgcgcaaggcgctttccctgcccagtctagcactgctgctggcaagggtagtggcggtacgtcaacgacgacgtggccgccgccggacagggttgattcagtgacgtggagcgatcgagactgggcagatagcggggatgagagtgatgacggggtgggcggaagattgagtggtacgagaaaggaagcggccggcggtgagggaaaggggaaggggattgggctaggaattccgttcggtggcggtgagaggagctccagtccgctgagctggaattggacggagaagatcgttggcaaggggggcctggggcggtcgaagtcgccttctggtgacagcggagctggttctaccgctggaaaggacgccaactga

SEQ ID NO: 450 - protein, 1210 aa, Myceliophthora thermophilia
MLLLHQTGSVKIGEVVRYTVTYKPSVDHILPSPEFLYLRIKNTCAIALRAAFVHGPYTLGVAAYPATFKPFEKFENPRRYGVPEFEPMLKAGAVWNCPLIVPDNIRQSAGEGSSKHGHFGSGPEHDEDTVSWVIEVSSQVIFSASASVHYEILLARDEKSLNLGSVMPVIGGQVQAPQPGRVSDFQQSAGSSKHHPAQPKGVFSKAIHLKVQDTAALWNTPEIPGWNEIGWLRAREEDCSDAPAEAGAATRNSGEAKRPPKHRQKKIHLVVLTHGLHSNLGGDMLFMKESIDAAVKQAKVDAKARKARERAARRRARKGATTTGDSFERGDQGSNLDPNLGLKAGTDTASRRKEGDEGEQLEDEEDDEEVDDDEEVIVRGFSGNAAKTERGIKYLGKRLARYILLMTFPDQPCLPTAKAASEAITHSLKTGAQKKAIEEAHKHSSAHLAASPGGKRLYKFTKISFIGHSLGGLVQMYAIAYIQKHSPQFFDLIEPINFIALASPFLGLNHENPLYVKFALDFGLVGRTGQDLGLTWRAPTIARNGWGALMSNLGEHAHKRVYGEYQPESKPLLRILPTGPAHKALKKFRNRTVYSNVVNDGIVPLRTSCLLFLDWQGLGRVEKARREAGLVGTVVGFGWAELTGANMTTPRLAPWSPAEQEDKDDAESAGKTTPTGHEDSHRVPQPPTNAMLEDDRQSLRSIAKPYRETPSELQHLQNSSTNNTSNPLSGIFNFFRSETPKSPPLASPKINKIYQRSQTLKSDQWPASDSGTSSKSRVTAGNELSEDAEGMSAPPKTSIFESAGDLLNPKLPPVEFLIDPSKRPRTIFHDRVYHPADIPPPPVKERPSGTLSLRRRTPAASSSFLKSNDDTTSSSRSHPVNQNDTSPDSPRSQQSKPAPPSTAASDEASTVHSPSSDATHGEAAATEDVADVDIDTSQMRVEEKIARAYHRGLSWRKVLVKLEPDAHNNIIVRRTFANAFGWPVIQHLVEAHFSDSATARLRDEDEPNAERAKPIGEGTDEGGGEIRAAARGLNARGEDVSIRNGRDGDEDEDEDEGDADEKQDTVSELPQGPGLSPSLANANSNNAQGAFPAQSSTAAGKGSGGTSTTTWPPPDRVDSVTWSDRDWADSGDESDDGVGGRLSGTRKEAAGGEGKGKGIGLGIPFGGGERSSSPLSWNWTEKIVGKGGLGRSKSPSGDSGAGSTAGKDAN

SEQ ID NO: 451 - DNA, 1356 bp, Myceliophthora thermophilia
atggcaaagaaggtcgacgccatcctcaagagctatgtcgccgacggcactgcgaccaaggacaagctccttggagcggcatttgttgtcgtgaacaaggatggccccatctaccaaggctcggcaggccgcaccggcatcgacccaagctcggccgccttcactcctcactcaatcgcctggacggcgtccctgtcgaagctggtgacgacgctgacgctgatgcacctcgtcgagcaccgtgacgacaagaacaaaaacaacaacaacaacaacaacaacaacaacaacatccagagcacgctcgacgaggatgtgcgcccgcgcgtacccgagctcgcacggctgccgatcctgcgaggcttcgccgcgggggggctggcaacgcgtcacccggacaacaagaaagaggaaggcgagccgctgctggagcccaacacggcacccatcacgctgcgccacctgctcgcgcacacggccgggctgggcctcgacattgccgacgcggacctggaacgctggtcgcgctgggtcggccgcaccgcccgcgccagcacgtccaccgtcgagggctggtcgaccccgctccgcttcccgccgggggaagggtggtactacggcacgggccccgactgggccggccaggtgctcgagcgcgtcaccggccgccggctgagcgagtacatggacgagcacgtcctgcggccgctcgggatcacccggggcacgggtttctacatcgacaagctggtcggcggggacgagaaagaggaggatgaggagggcgggagggacggcggccgacagctggtgaccctgacggagcgcgacgggcagacgggcgagctcagggagcgagacgtgccgttcccggtcgagcccccctgcgagagcggaggggccgggctgtacacgaacgcggccgactacgggagggttctgcaggagctgctgagggctttggcgggagacgagggagccgtcatcaagaaagagacggccgaggagatgttccggccccagctgaatgacaagcagagggagtggcagaggagcatcgtctgggaattcggcgcggccgcagagatcccggagggctcgctcgttgactttgggctggggggaatgctgaacatggaggatgtagagggcaagagaaagaagggtagcatgatgtggtcgggcttctgtaacgggcgatggatcatcgagtggatcgattcccggacaggcattgccgccgtcatgtttacctgcctattcccgtactcggatccgaccgccatcgagctctatgacaagctagagcggaccgtgtatgcggaccttattccggattggcaggcgtcgaagtaa

SEQ ID NO: 452 - protein, 451 aa, Myceliophthora thermophilia
MAKKVDAILKSYVADGTATKDKLLGAAFVVVNKDGPIYQGSAGRTGIDPSSAAFTPHSIAWTASLSKLVTTLTLMHLVEHRDDKNKNNNNNNNNNNNIQSTLDEDVRPRVPELARLPILRGFAAGGLATRHPDNKKEEGEPLLEPNTAPITLRHLLAHTAGLGLDIADADLERWSRWVGRTARASTSTVEGWSTPLRFPPGEGWYYGTGPDWAGQVLERVTGRRLSEYMDEHVLRPLGITRGTGFYIDKLVGGDEKEEDEEGGRDGGRQLVTLTERDGQTGELRERDVPFPVEPPCESGGAGLYTNAADYGRVLQELLRALAGDEGAVIKKETAEEMFRPQLNDKQREWQRSIVWEFGAAAEIPEGSLVDFGLGGMLNMEDVEGKRKKGSMMWSGFCNGRWIIEWIDSRTGIAAVMFTCLFPYSDPTAIELYDKLERTVYADLIPDWQASK

SEQ ID NO: 453 - DNA, 1698 bp, Myceliophthora thermophilia
atgtaccagcctgaaccaacgtcatttctccagttgtcgaccggctttgcgatcccgcagagctttcctgactacgccttcgacgagatccagttacgcttgagtgacgggcgaggcgccactgcggcaggcgctggcggcaacacggcgagtgcactgctctacgagacccatctgttcaacgccgccaatagcgccgttgtcggccccgcaccctcggcctcgggctccttcgactttcacctcaacccgccgtcatcggcaaccaccgccgccgccgccgccgctgccaccgccgccactgtgactgtcgccgcgccgcctcacccccaatcttcgataccaatctcgctcaagatggaaacgcaccccgacgaccttgctgtccaggaggccgccgctcgggaataccagccacagctcgtgggacccctcgtcggcgaaaagacgccgagtacggtgatcatggaggaatatgccaaggccgacccgatatacatacagaagacgatggtgttgcctcaaacatacacgcattaccggcccatccaaggagatggaaactgcggctggcgggcaattggcttcggctacttcgagaccctggtcaagctgggcgacaaggcccgcatcgaagccgagaggcaacggctggaggggttgaacgccctcatcgagaacatcggccagttttcgccctatgtgttccaggacttcgtcgaggagaccttgaatctcctgcagaagatcgcaggcctgtctggccacaaggagcaggcaatgacggcgctgcaggaagccttcaacacgccagaggtctccaactcgatcgtctatcactttaggatgctggccagctcgtacctcaagggcaatcgggaggcatacggcgccttcatcaccggtgacgacgccggtgtcgacggctattgccaaaacgtgcttgagcgtcacaatgtcgagatcgaccacctaggactggtcctgctggtcaacgtgctcctgaaggacgctggattcgtgctcgaggtagcctatctcgaccggagccccgggtccgaggttaacacatatcgtttccccgaagaggccaacgggcgtcttagttcggagctgggacccatcattcaccttctctaccgcccagaccattacgacatcctgtacgctcccgaaccggtcaatctgcaggtccaccgcgtggccggcttttcgcagagctaccagatccagagcacgcccatggccatgcaaaactttggttcggtcgacatgcaaacgctatcactcatccccgggttcggtgcccccgcgacgggtctggcgcccattctggacactaccccgtccccgctcagcacatacagcccaagccctgtgtcaccatggccctatgtggacacattacagcaagcaaccccggcaccgttgccagtcccaactccggcgccggcaccaacaccggccccggcgcagcagacgcacccgctacggttcagcgagtactgccagcttcgcgagtacgtcgacaacaacacgtggcgggagccggcgctgcagaccacgacattcaaaaatagccatttcaatgtggcgcactacaacaatcccaacttccagccggaagagtacaagccaggagccgacgaccacgatacgccgccgcgggtcagcggccgcaagcgaggcagtgtataa

SEQ ID NO: 454 - protein, 565 aa, Myceliophthora thermophilia
MYQPEPTSFLQLSTGFAIPQSFPDYAFDEIQLRLSDGRGATAAGAGGNTASALLYETHLFNAANSAVVGPAPSASGSFDFHLNPPSSATTAAAAAAATAATVTVAAPPHPQSSIPISLKMETHPDDLAVQEAAAREYQPQLVGPLVGEKTPSTVIMEEYAKADPIYIQKTMVLPQTYTHYRPIQGDGNCGWRAIGFGYFETLVKLGDKARIEAERQRLEGLNALIENIGQFSPYVFQDFVEETLNLLQKIAGLSGHKEQAMTALQEAFNTPEVSNSIVYHFRMLASSYLKGNREAYGAFITGDDAGVDGYCQNVLERHNVEIDHLGLVLLVNVLLKDAGFVLEVAYLDRSPGSEVNTYRFPEEANGRLSSELGPIIHLLYRPDHYDILYAPEPVNLQVHRVAGFSQSYQIQSTPMAMQNFGSVDMQTLSLIPGFGAPATGLAPILDTTPSPLSTYSPSPVSPWPYVDTLQQATPAPLPVPTPAPAPTPAPAQQTHPLRFSEYCQLREYVDNNTWREPALQTTTFKNSHFNVAHYNNPNFQPEEYKPGADDHDTPPRVSGRKRGSV

SEQ ID NO: 455 - DNA, 2280 bp, Myceliophthora thermophilia
atgtcgctgcagccgttgaaaacgaccgccgtcggcggccgcgacccctcgctcctctcgccctccgaatacgacgccgacgccatttccattcgcagcgaccaggacaccgacagcgatgacgacgagcgtcagcttcgtgcgaggaacagccgcgagctccgcgcgcacgacaggctggtgctgatggaggaggaagagctggaccacttggtcatcgaaaaccggaggaagcaggaacgccagcgtaggggttccgggctgccgatacccaacccgctcaggttgttgaccaggcggctcagtgacgtatcaccatcgtcgtcgaggagcccgtctgtgcagccgggcgagtcggttgacgaccttagggcagaaaagaggcgggcgaggcggcagaggagagagatgaagcgagatcggctgctggctgatgcacagcacggcgaggacggcgagctcatgtacgagatggaagagggcggcatgaaggagggcagctcgaccggcgaaagcagcgaacgagaggatagcgacgaggtcgaccggaagcacttgctgcatgttaccgataccaagtcgaagcgaaaacgcaactgttgccgttgggtgttgttttacgccatcattgccgtcgcctttgccatcctcgtccttgtggcgtggaaggtatccctggatcggaagacgacgcgttatagccagaaactcgtcagcaacggcaccgccatgttcgcacccaccacaatcattatcagcttggacgggttccgggccgattttctcaatcgggggttgacgccgaggctcaacgccctcgttaaggagggcgtatcacccctctatatgctcccgtcttttcctagtgtcacgtttcccaaccactacacgatggctacagggctctacccggagtcccacggcgttgtgggcaacagcttctgggacccgatgttgcgggaagagttttattatacggacccttcgcggagcatggatcccaagtggtggaaaggtgaacccttttgggttacagcgcagaagcaagggctcaagaccgccatacacatgtggcccggcagcgaggcaaacatcctcaatgttgaccccacgtatttggacaagtacaacggaaaagagctgttgccgaagaaggtggacaggattcttgagtttttggacatgccggactcggaccggcctcaaatcatcgcggcgtatgttcctaacgtcgatgctgacgggcacaagtacgggccgaatagtactgagatccggtccaccatccagaaggtggacaagatgctggacgacttgttcaaggggctagaagaacggcatctggcggacattgtcaatatcatcgtggtttctgaccatggcatggcgactacggacgtctcccggctggtacagctcgaggatctggtggacctgagcaagatcgagcacacggacggctggccactgatcggattaaggccaaaagatcccgctgatctcaaggacatatacaatgggctgatcgagaaaacgaaggggaaccccaacctcgaggtctacctccgcgacgttgacatgccagcacggtatcacttttctaacaaccagcgcattgctccgttgtggatcgtgcctaaggcgggctgggcgctggtcaagatggacgagatgaacttgaaagaggcacaggctcaaggggcggtgtatcatccgaggggccttcacggctatgatcatgaacatccgctgatgagggcaatattcatcgcccgtggcccggctttcccgcaccagccaaacagcaaactcgaggtattccaaaatatcgaggtttacaacatgctgtgcgactccgtagggatcgagccagcgcccaataacggcacccttcggctgcccctcaagccaatcgggctgcatgatgactcggccacggacggcctggacacgccagccgatcccgtggaggctcacaccatttcaaccgcttctacaagcagcgctcagacgagcgtcccgtcgaagtccgttggcgttgaccagccggtgccgccgccgcggccgacccaggcgccctcgggctcggacaatggcggcgaaagtgacagtgacgatgacgacgaccacaaggatgattcctcggccgtcgacaatgccgagtcgaaagttaaggagttttgggattggttcaccggaaaggtgagcacctggtgggggaaagtgacgggtaacggcaaggaaggtgaggatggtggcaaagacaattcctccggatag

SEQ ID NO: 456 - protein, 759 aa, Myceliophthora thermophilia
MSLQPLKTTAVGGRDPSLLSPSEYDADAISIRSDQDTDSDDDERQLRARNSRELRAHDRLVLMEEEELDHLVIENRRKQERQRRGSGLPIPNPLRLLTRRLSDVSPSSSRSPSVQPGESVDDLRAEKRRARRQRREMKRDRLLADAQHGEDGELMYEMEEGGMKEGSSTGESSEREDSDEVDRKHLLHVTDTKSKRKRNCCRWVLFYAIIAVAFAILVLVAWKVSLDRKTTRYSQKLVSNGTAMFAPTTIIISLDGFRADFLNRGLTPRLNALVKEGVSPLYMLPSFPSVTFPNHYTMATGLYPESHGVVGNSFWDPMLREEFYYTDPSRSMDPKWWKGEPFWVTAQKQGLKTAIHMWPGSEANILNVDPTYLDKYNGKELLPKKVDRILEFLDMPDSDRPQIIAAYVPNVDADGHKYGPNSTEIRSTIQKVDKMLDDLFKGLEERHLADIVNIIVVSDHGMATTDVSRLVQLEDLVDLSKIEHTDGWPLIGLRPKDPADLKDIYNGLIEKTKGNPNLEVYLRDVDMPARYHFSNNQRIAPLWIVPKAGWALVKMDEMNLKEAQAQGAVYHPRGLHGYDHEHPLMRAIFIARGPAFPHQPNSKLEVFQNIEVYNMLCDSVGIEPAPNNGTLRLPLKPIGLHDDSATDGLDTPADPVEAHTISTASTSSAQTSVPSKSVGVDQPVPPPRPTQAPSGSDNGGESDSDDDDDHKDDSSAVDNAESKVKEFWDWFTGKVSTWWGKVTGNGKEGEDGGKDNSSG

SEQ ID NO: 457 - DNA, 1605 bp, Myceliophthora thermophilia
atgggctctgtcttctctcgtcccgcggcggctgccgcaacgcccacggtgcttccgactctgaccatccgcaacctcaccgtcactccgctagagctgaggctggtcgagcacctgaagtcagtccatcatcatcacccgcacctccacaagcccaacggcctcgtcaagacctcgtcacgctcaagcaacccagagcagtcgcacgaacaaccggatgcgccattaccgtcgacggcaacgcccgtcagcggcaccattgagcccttctcggagtgccgcaccgcagtttacgccccggatgcggcccgtcatgagcagctgcggctgaccttcgaagaccccgccaccggacaccgctacagcgccgacatcccaggctcgtcgcggcggagcatagtcctcaaggcgcaccatcccgccggtgccggggacggcgagaccaaggagttcacggccatctacctgcccgagcacgcctacctcgccctcttcagctcggccaacctctcctcctggatgtccaccctggacccggccctgcccctgtccgccctctccatcccgggcacccacaactcgcccacctgctacgtcgccctcccctcggtccgctgccaggccgtctccgtcctcgaccagctcaacaacggcgtgcgcttcctcgacgtgcgcgtctcctgcccgccctaccgcgccagcaccgtatccgcaccctccaattcttccccaaagggaggggaagaagaagaaggagaagaagagcaggagggaggaggagaaggcacgcgcgtgccggagctcgccctggtgcactcggccttccccgtgtccctgacgggacccaagtacctctcggggctgctggcgaccgtgtacgacttcctggccgcgcacccgaccgagacggtgctgctgtcgctcaagcgcgagggcaccggacggggcagctacgccgacctggcacggatccctgcaccggcactacgtgcgcccgcgccgggaccggtgtgccgcggccgcgtcgtgctcgtccgccgcttcggcctcggccgctcccccgccgccgtccccgcctccgaggccggcatcgacgggtccgcctggcccgacaacgtggccgacggcacctgcggcagcggcaccatccgcatccaggactactacggcgtcggcagcggcagcgacatccagaagaagctgcgctatgcccaggaggggctggcgagggctgccgcgcaggcgcaggcggtcgtggccgaggtgcgctcctcctcctcctcctcctcctcttcttcttcttccgcggcggcagccgcgacgacgcctctaccaccaccgccgccgctgtttatcaactttttgagcgcgagcaacttcttcaatgccagttgctggccggaacggatcgctttcaagatcaacccttccatgatcgagtatctgtgcatgaagcacggtaccgaagggcaagggtctggagagtttggcgccggagacgcagttacgggcatcgtcgtgacagactgggttgggcaccgcggagactgggacctcctgcgatgcatcgtggggtggaacgccaggttacagctgcggcagtag

SEQ ID NO: 458 - protein, 534 aa, Myceliophthora thermophilia
MGSVFSRPAAAAATPTVLPTLTIRNLTVTPLELRLVEHLKSVHHHHPHLHKPNGLVKTSSRSSNPEQSHEQPDAPLPSTATPVSGTIEPFSECRTAVYAPDAARHEQLRLTFEDPATGHRYSADIPGSSRRSIVLKAHHPAGAGDGETKEFTAIYLPEHAYLALFSSANLSSWMSTLDPALPLSALSIPGTHNSPTCYVALPSVRCQAVSVLDQLNNGVRFLDVRVSCPPYRASTVSAPSNSSPKGGEEEEGEEEQEGGGEGTRVPELALVHSAFPVSLTGPKYLSGLLATVYDFLAAHPTETVLLSLKREGTGRGSYADLARIPAPALRAPAPGPVCRGRVVLVRRFGLGRSPAAVPASEAGIDGSAWPDNVADGTCGSGTIRIQDYYGVGSGSDIQKKLRYAQEGLARAAAQAQAVVAEVRSSSSSSSSSSSSAAAAATTPLPPPPPLFINFLSASNFFNASCWPERIAFKINPSMIEYLCMKHGTEGQGSGEFGAGDAVTGIVVTDWVGHRGDWDLLRCIVGWNARLQLRQ

SEQ ID NO: 459 - DNA, 2034 bp, Myceliophthora thermophilia
atggtgtgcttcaagttccgaaaggaggagaagtcgagtttcttccgccggatgacaacctttggattcggctcgcctgttcacgggagaaatgtcatgcgagaggtgatagtcgcagcactcgcctgcaacgtcaaaaccctcattggtgtccacatatcgtcgagctttcacgagagcgtcaagaggcacgtcaggcacgtctacgacgagatccggaacgacgaccgactcttgtcgcgcgagaaactcggtgcctttctcagggagacccagggcgtcgagcagtttgacctcgattctaaggaccgccgagatatcaagttcgacgagttcttttggctttggagccagaatgaatcggcctggcgcgcagcaggagagagccgacagaaggaggtggatgccacacatccgataagtcactactttataagcagcagccacaacacttacctcgagggcaatcaactgtcctcgaggagttctgctgatgcttaccgcgcggtactgaggaacgggtgccgctgtatcgagattgatgtctggaacggggccgctccccggacgccatccaggtccccgaatccgggacataaaagacatttttcttctagctccctcccgcgcttcgccggggaaaagctcggcgccaaagtgagccggcaccacagccgcagtccgagcgccgtccagaccgctttcccgccattggatcccagggaaagtagcaccacgctggatccaaaagagctgagcgacgaccgcctcgaaaagtccagagactcgtccaggtcgaatcagggagtcgagccggtagtccaccatcacggcacaatgacctccaccgtaggttttcgggaagtctgccgggccattcgagagagtgcgtttgagaacaacccgctcccgatcattgtcagcctcgaggtaggcgcggacagggaacaacaagaggtcatggtggacatcatgaaggaggaatggggagagctgttactggataggcactttgacgcttgtgacccgactcagcggcagccccggctagaggagctgtacgaaaagatcttgatcaaagtgaagcgtctggacgacagccgggtcgtgggcgacgtggagaggggacgcagcatcacgatcccaaccctgaatggcaaaccgcccatctgcgaagccctcgccgagctcgccatctacacccacagcgagcattacgtggacgagaactcgctcagcagttgcgaatcgcccagtcacatctttagcatcaacgaaggcagtttcctgtccctggtcgaagacgagtcgaagctgcacaaggtcctcaagcacaaccgggatttcttcatgcgcatctaccccaagggcctgcgcttcgacagcagcaacccggatccgagcttctgctggcgccggggcgtgcagatggtcgccatgaactggcagaagaccgacgaccccatgatgctcaacgatgccatgtttgcgggcaccaacggctgggtcctcaaaccccccgcgctgctcggcgacggcgcgcttaccgagacatccaccaacaacagcacggccgggagtgtgtcccacaaccgcaccctcgacctgcaaatcaccgtgctcgccggccagttcttgccactccccgacgatcggaggaagagcagtgggtttggcatcacgagcgacaggaagttccggcccaaagtcaaggtggagctgcatgtcgacaagcctcaaaaatcccttacaagagagacggcggccgcgaggacggaacatcccgactggggacagaatgcgaagagtctggacttcctgggcgtgaaaggagtcatggaggagattacttttgtgagattcaaagttgctgatagctcgagcaattttggaagcgacctcgttgcctgggcttgcattcgcctagaccgccttcaacaaggataccgctgtcttgatctctatcacccggtcactcgtcggccttgcgacggcaagttgtttgtcaagatcagcaaggttttgaaggactaa

SEQ ID NO: 460 - protein, 677 aa, Myceliophthora thermophilia
MVCFKFRKEEKSSFFRRMTTFGFGSPVHGRNVMREVIVAALACNVKTLIGVHISSSFHESVKRHVRHVYDEIRNDDRLLSREKLGAFLRETQGVEQFDLDSKDRRDIKFDEFFWLWSQNESAWRAAGESRQKEVDATHPISHYFISSSHNTYLEGNQLSSRSSADAYRAVLRNGCRCIEIDVWNGAAPRTPSRSPNPGHKRHFSSSSLPRFAGEKLGAKVSRHHSRSPSAVQTAFPPLDPRESSTTLDPKELSDDRLEKSRDSSRSNQGVEPVVHHHGTMTSTVGFREVCRAIRESAFENNPLPIIVSLEVGADREQQEVMVDIMKEEWGELLLDRHFDACDPTQRQPRLEELYEKILIKVKRLDDSRVVGDVERGRSITIPTLNGKPPICEALAELAIYTHSEHYVDENSLSSCESPSHIFSINEGSFLSLVEDESKLHKVLKHNRDFFMRIYPKGLRFDSSNPDPSFCWRRGVQMVAMNWQKTDDPMMLNDAMFAGTNGWVLKPPALLGDGALTETSTNNSTAGSVSHNRTLDLQITVLAGQFLPLPDDRRKSSGFGITSDRKFRPKVKVELHVDKPQKSLTRETAAARTEHPDWGQNAKSLDFLGVKGVMEEITFVRFKVADSSSNFGSDLVAWACIRLDRLQQGYRCLDLYHPVTRRPCDGKLFVKISKVLKD

SEQ ID NO: 461 - DNA, 1935 bp, Myceliophthora thermophilia
atgccgcttcgaattacgacatggaacgttaacggcattcggaatccgtttagctaccaaccatggcgcgaaaaccgcacattccaggccatgttcgacactctggaagcggacatcgttgtgttgcaggagaccaaaattcagcggaaagatcttcgggacgacatggtgttggtgccgggctgggacgtcttcttcagtctccccagatacaagaaaggctactctggtgtggctgtctatacccgctcctccaagtgctgtccgattcgcgcagaagagggcatcactggcgctctttcccccccaaactcctcgaccaagttccgagatcttcctgcagaccagcaaattggcggatacccgcttcctgagcaactctcgaattctattgacgaacaaacgctcgactcggaggggcgctgcattatcctagagttccctgccttcgtacttatcggcgtatacagccctgccacccgagatgagacaaggacagaatatcgcgaggcgtttatcgatgctatggatgccagggtccgaaatcttgttgccatgggcaagcaagtctttctctgcggtgacctaaatatcatacgtgatgagctagacgctgcaggcttgccagaacgcctgcggaaagaaggcgtgacgctggaagaattcttcgcaacgcactcacgacggtttttgaaccaactgctgtttggcggccgcgtcatcggagagagacaggaagggcgtgaacagcccgttctatgggatctctgcagggagttccatccaactcgtgcgggtatgtacacctgctgggaaacgaggaagaacgcgcggccagggaactttggaaaccggatagattatgtgctgtgcagctctggaattaaggactggttcatcgactccaatatccaggagggcctgctgggatccgatcactgtcccgtatatgctacgattgccgacactgtcgatgtcggtggctcccaggttcacattgaggatatcatgaaccctccgggcatgttcaaggacggcgtgcgccaacgagaatggtgccagaaggacctccttcctatatcagccaagctcatccctgagtttgaccgccgacagagcataaaggacatgttcttcaagaaagcctccgcgtcggcgaagacgacatccagtcccaacacgattagctcccaaagtacacccaccgacacggtaccgggcggagggagcgacgagacacaaaaagatagcaccgtctcaatgtcgcaggcgattgatcagccagcatctacaacgacgctccccaacacagcttcgaataacatcacttccgtgccaccacaaaagcccatcccccaaaagcggcaagccgcatcctcaacgtctccgaaccggcctcagaagaagggaaaacttgcgctcagcagggaaagctcctcgaagacgaccgcaggcttttcgcagagcagcttgaaagggtttttcaagcccaagacaccgaccgcaaacgccacagctgccattgaggccggtgacaccacaaatcctgccatcactcccgacccaaatccatcggagcctgaatcaaagcaagatacctccgccagtcaagggaatagcagccaaagtaccaagaatagctctggagactctgtcggtgagagcccgaggaccgagagctccttcacagataaggtcttcgaccccatccaagcgaaggattcctggtctaagttactcgggaagcgagtggttccaaaatgtgagcacggagaggattgccagatgctggtcactaagaaggccggtgtcaattgcggcagggcgtttttcatgtgcgcccgtcccttgggcccctcgggagagaaagagcaaggaaccgagtttcgttgccggactttcatttggagcagtgactggaatgggcgacaatga

SEQ ID NO: 462 - protein, 644 aa, Myceliophthora thermophilia
MPLRITTWNVNGIRNPFSYQPWRENRTFQAMFDTLEADIVVLQETKIQRKDLRDDMVLVPGWDVFFSLPRYKKGYSGVAVYTRSSKCCPIRAEEGITGALSPPNSSTKFRDLPADQQIGGYPLPEQLSNSIDEQTLDSEGRCIILEFPAFVLIGVYSPATRDETRTEYREAFIDAMDARVRNLVAMGKQVFLCGDLNIIRDELDAAGLPERLRKEGVTLEEFFATHSRRFLNQLLFGGRVIGERQEGREQPVLWDLCREFHPTRAGMYTCWETRKNARPGNFGNRIDYVLCSSGIKDWFIDSNIQEGLLGSDHCPVYATIADTVDVGGSQVHIEDIMNPPGMFKDGVRQREWCQKDLLPISAKLIPEFDRRQSIKDMFFKKASASAKTTSSPNTISSQSTPTDTVPGGGSDETQKDSTVSMSQAIDQPASTTTLPNTASNNITSVPPQKPIPQKRQAASSTSPNRPQKKGKLALSRESSSKTTAGFSQSSLKGFFKPKTPTANATAAIEAGDTTNPAITPDPNPSEPESKQDTSASQGNSSQSTKNSSGDSVGESPRTESSFTDKVFDPIQAKDSWSKLLGKRVVPKCEHGEDCQMLVTKKAGVNCGRAFFMCARPLGPSGEKEQGTEFRCRTFIWSSDWNGRQ

SEQ ID NO: 463 - DNA, 2601 bp, Myceliophthora thermophilia
atggcgcccctcgctagcgagccgcgccaggtgctcacggtcctcaatcccgcccggcgcaaggccctatacacgctgctggtcgagatcacggcctttatgcgctcgcagctcgactttaacgagccggcaggaggaggccaccagggagccgctccgctgctcgtcgacccgtccgccgataacagtatcatcattcccgctggcacagcgggagcaaacgatgccgctcctcccaacccggccctcgtgcgcctgcgcgccgccgcagtcgagcactttgacggttggcgcaaggatgtcctggccaagctgaaggagctgctctcgaccccggacgacgcctccattgtcgaggaacgccgcaagcggaccgaacgaatcgccgcgcagcagcggcagcagcggcagcaacaggagcagaaaaataataccggctcttccactgacacccgaagggtggacctgttaggttcttgggatgcgtggcccgaggatgaccggggggacggggccaagaccgagggcggaagagggcagacggaggaacaggaagagaacactggcgacgccgtggcccgcctgcagtcgcactggcaccccatcccgacccgcctggtgacgatcccggaagaggaccgcaaggaggcgctgagctgcgtcttgctggtgctgctgtcgacgggccattactcggcccactcgagggccctggccgtgtatctcacctcggcgctggagctgcccttggccgtcctgaacgccgaggaggtcgagatcgcggtgtctctggtcgagcgctcggccgaggcggagaggcagcagcggaccatgtctgccgaggccgaggccgagaagcggaagcaacagaaccaggcgagccggtactggaaggtcggcctggcctccgtggccggcgccgcgctgatcggtgtcaccggtggcctggccgctcccgtcgtcgctggggcgatcggcggaatcatggggtctgtaggactcggcggggttgcctccttcttgggcatcttttggatgaacggagcactggttggcacgctgttcagtgccttcggcgcgagaatgacgggcgagatggtggaccgatatgccagggaagtcgacgacttccgcttcattcccctgaaagacgagtggggcacccgcggcagtagccaaaacgacagacgcctccgggttaccatcggcatcaacggatggctgggtacggaagatgatgtggccaagccgtggcgcgctctcggtgacgactcgggggcgttcgctctacggtacgagatgaagagcctccttgggctgggcaagtctctgcgggaactcgtctcttcctacgcctggaacgcggtcaaggttgaggtcctcaagagaaccgtcttggccaccctatggtcggccctgtggcctgcctacatgctgtccatggcctccaccgtcgacaaccccttcagcctcgccaagaacaggtcggagaaggcgggcgaggttctggccgatgctctgatcaacaaggtccagggcgagcgcccagtcaccctgattggttactctctgggggcgcgcgtcatctactcatgcctccggtccttggccgcgcgccgcgcctttggcgtggtcgactcggtcgtcttcatcggtgcccccgtcccctcgaacagacaacactggcaaatgatgcgcaccgtagtgtcaggcaagttgttcaacgtctactcggagaatgactacctgctcgccttcctctatcgtgcaacatccattcagctcggcgttgccggactacaggagatcaaggacatcgagggggtcgaaaacctcaacctgactgaagaagtccaaagacacatgcggtacgccaagctcatcgccaagatcctcgccagatgcggtattcccgtcgtcaagggcgcatcggctcccattgaggaagacgaggatgctatcaaactcacctacccggacaaggagaacgcgaatctcatcgatctcgacggtttgaacatcacggcccctcccgaagaggttcagcccgctccaccacggtttcagaaccgcacgccaggctcccagccgcaattcgcccaacgcaacgagcagcggacggcagcaacaggggcgggaccgtccgccgtcgcggccggccgggacctcctagacctcgagtcgccgaacagttccggcgggcccgctcaacgcacggcggcaataccgtccccttccatgcccacacccacaccgcaacccgctgccgcccggcagagcccagacccgccagagtacgcgcctcgggaacttcccaacacaaagttgttcatgatgccccaggtgcccgaccggtctctgcaagcctacgtcccgcccggccctgcggcgtcctccgcttcttctgcccccgcggtgcccgcatcgcagatgtcggcgcatcaccttccaacatcgcacagccagagcgcggtagacggtattgaagacgacgacggcagtgacgaggaaggtgggatgggaatcaagatggtggataacgacgatggccttgaatattgtgatccgacccctctcgaggaagatccgaattggaggtga

SEQ ID NO: 464 - protein, 866 aa, Myceliophthora thermophilia
MAPLASEPRQVLTVLNPARRKALYTLLVEITAFMRSQLDFNEPAGGGHQGAAPLLVDPSADNSIIIPAGTAGANDAAPPNPALVRLRAAAVEHFDGWRKDVLAKLKELLSTPDDASIVEERRKRTERIAAQQRQQRQQQEQKNNTGSSTDTRRVDLLGSWDAWPEDDRGDGAKTEGGRGQTEEQEENTGDAVARLQSHWHPIPTRLVTIPEEDRKEALSCVLLVLLSTGHYSAHSRALAVYLTSALELPLAVLNAEEVEIAVSLVERSAEAERQQRTMSAEAEAEKRKQQNQASRYWKVGLASVAGAALIGVTGGLAAPVVAGAIGGIMGSVGLGGVASFLGIFWMNGALVGTLFSAFGARMTGEMVDRYAREVDDFRFIPLKDEWGTRGSSQNDRRLRVTIGINGWLGTEDDVAKPWRALGDDSGAFALRYEMKSLLGLGKSLRELVSSYAWNAVKVEVLKRTVLATLWSALWPAYMLSMASTVDNPFSLAKNRSEKAGEVLADALINKVQGERPVTLIGYSLGARVIYSCLRSLAARRAFGVVDSVVFIGAPVPSNRQHWQMMRTVVSGKLFNVYSENDYLLAFLYRATSIQLGVAGLQEIKDIEGVENLNLTEEVQRHMRYAKLIAKILARCGIPVVKGASAPIEEDEDAIKLTYPDKENANLIDLDGLNITAPPEEVQPAPPRFQNRTPGSQPQFAQRNEQRTAATGAGPSAVAAGRDLLDLESPNSSGGPAQRTAAIPSPSMPTPTPQPAAARQSPDPPEYAPRELPNTKLFMMPQVPDRSLQAYVPPGPAASSASSAPAVPASQMSAHHLPTSHSQSAVDGIEDDDGSDEEGGMGIKMVDNDDGLEYCDPTPLEEDPNWR

SEQ ID NO: 465 - DNA, 1749 bp, Myceliophthora thermophilia
atgaacctgctcgccaccgttcatgaccgagcaccgctaatagtctacggaatatccgcacgtttgctctcgtcgattctgaaaccctccttcacactacggcgacgacgagtatcaatacagcagcccgtccgacggcagcaacagcaacagcaacaacaacaaagtattcgcactacagctaataccaccagcgccaccaagagattgtcctcgctcttccgcaatcccatcatggcccctcctatcgagcgggacccggccgtgccgctactgcgcgcccatctcacgccgctcccgcccttgtcggagtcgacggcggcgctcaccgacttcgtgtcccacctcctccggaccagcggacgggaggagccgaggatcgtgctgatcggcgacgcgtcccacgggacgtccgagttctacgaggcgcgggcggtgctgacgcagcacctgatcgagcgccacggcttcgccgtcgtggccgtggaggcggactggcccgacgccgaggccgtcgaccggtacgtgcggtaccggcccgagcccgggcccgggtccgggcccgcacttggggcgagcgagggaaagggggcggagacggagggggagacgcgcaaggccgggcgcgagcccgccttcctgcggttcccgacctggatgtggcgcaaccaggaggtccagcggttcaccgagtggctgcgccggcacaacctcggccgggacccgcgggcgcccgacgcggtcggcttctacgggctggacctctactcgctccgcgcgtccatgagggccgtggtcgagtacctggaccgcgtcgacccggccatggccgacgccgcgcgcgagcgctacgcccgcatgagcctctgggccgaggacccgcacgagtacggcctcgaggccctggccgccggcttccagggctgcgagaaggacgtgatgcgcgtgctccgggaccttctggccaggcggctcgagtacgcggccgagggccctgacggcgacgaatttcacagcggggagcagaacgcccgcgtggtcaaggatgccgagcagtactacaaggccatgtattacggccgcgacgagtcctggaacctgcgggaccgccacatgttcgagacgctcgtgcgcgtgctcaagcataggagccgggacgggcggccggccaaggcggtggtgtgggcgcacaacagtcaccttggggacgcgcgggcgacgagcatggggtggtcgcgcgacgagctcaacgtgggccagctctgccgggaggcgttcggcagcgccggggggcagcagcgggaagggggagggggccggagcgggagcgggagcgggagcggcggggggttggtgctcagcatcggctgcagcgggaacacgggcaccgtcgccgccgcccggcggtgggacggcgacatggaggtgatgcaggtccgcccgggtcttccgggaagctacgaggagctcctgcacgcgaccgggatcgagcggttcgccctggacctgcgccgcggccactgcgacgacgagctgcgcgaggccctgatgcgcaagcgcctcgagcgcttcatcggcgtcatctactccccccgcaccgagcggcagtcgcactactcctccgccgtcctgcccgagcagttcgacgccctcctctggttcgacaagaccagacacgtcggcgccctcgaggtccaccagccacacgtgcccctcgagtacgacgagacctggccgtttggcttgtga

SEQ ID NO: 466 - protein, 582 aa, Myceliophthora thermophilia
MNLLATVHDRAPLIVYGISARLLSSILKPSFTLRRRRVSIQQPVRRQQQQQQQQQSIRTTANTTSATKRLSSLFRNPIMAPPIERDPAVPLLRAHLTPLPPLSESTAALTDFVSHLLRTSGREEPRIVLIGDASHGTSEFYEARAVLTQHLIERHGFAVVAVEADWPDAEAVDRYVRYRPEPGPGSGPALGASEGKGAETEGETRKAGREPAFLRFPTWMWRNQEVQRFTEWLRRHNLGRDPRAPDAVGFYGLDLYSLRASMRAVVEYLDRVDPAMADAARERYARMSLWAEDPHEYGLEALAAGFQGCEKDVMRVLRDLLARRLEYAAEGPDGDEFHSGEQNARVVKDAEQYYKAMYYGRDESWNLRDRHMFETLVRVLKHRSRDGRPAKAVVWAHNSHLGDARATSMGWSRDELNVGQLCREAFGSAGGQQREGGGGRSGSGSGSGGGLVLSIGCSGNTGTVAAARRWDGDMEVMQVRPGLPGSYEELLHATGIERFALDLRRGHCDDELREALMRKRLERFIGVIYSPRTERQSHYSSAVLPEQFDALLWFDKTRHVGALEVHQPHVPLEYDETWPFGL

SEQ ID NO: 467 - DNA, 798 bp, Myceliophthora thermophilia
atggccacattgcgcgccgaacagcaaatagagttcttccgcggcatcccctggtgcgccgcccacctctcgtccccctcgctcgtcatccaggaatccgtgtcgcaccgtcgcaagcctggcctcctcgacagcctcgtctcgcgcacactcaatcgcccggacgccctcccagcctacatcatattctaccacgtcccgccggcgtcatcatcggcacccacatccaccacctcatcaccatcgtcgccgtccataacagagtcaacaccctcatcacactcgcaacaacaacaacaacaacaacaacaacaaaagcagcagcaacaacaagagcgacccggtgcagcagcaacagcagcggcgacggaggatgagactgagcaaggggtagccgggccgctcatcaccgagatcaaggctctggtggcgctggggccgatgctgaacgggtggtgtcggaagctgtggagcttccaagcgtgggaaggggtgtgccacggcggaatggtggtgacgctgctggacgaggtcatgggccaggtgttcgcggccaaccggatgcacgggcggctgcccgccgacgcgcccgcgaccatgacgggctacctcaacacccgcttcgagcggcccgtccgcaccggccgcggcgccgacccggccgtcgtcctggtctcggcgcggctgcggcgccgcgagcggcgcaagttctggctcgacgccgacgtgagcggccccggcggcgaggtcatggcccgcgccgaggccctctttatcatgctgcggagcaagctataa

SEQ ID NO: 468 - protein, 265 aa, Myceliophthora thermophilia
MATLRAEQQIEFFRGIPWCAAHLSSPSLVIQESVSHRRKPGLLDSLVSRTLNRPDALPAYIIFYHVPPASSSAPTSTTSSPSSPSITESTPSSHSQQQQQQQQQQKQQQQQERPGAAATAAATEDETEQGVAGPLITEIKALVALGPMLNGWCRKLWSFQAWEGVCHGGMVVTLLDEVMGQVFAANRMHGRLPADAPATMTGYLNTRFERPVRTGRGADPAVVLVSARLRRRERRKFWLDADVSGPGGEVMARAEALFIMLRSKL

SEQ ID NO: 469 - DNA, 3387 bp, Myceliophthora thermophilia
atgaccgtctctgtcgacctgaaccgcccgttaccccataccatctcagccatggcgcccgagtcttttcagacgcggcgggcgcgtcccacccgggtcaagaccgacctggcaacccagacccagctggttgccatgccaccttcagccatcagcatatcctccgcatcgcccgcctcgcaacacggctcgcccgcccagtcggtcgagactatcgggacgggcatgactactggcagctctatacaagcttctcccgaggtagcagaggggtgcctcgacaaggagattgacgatctcgatcagctggtcacgcctttccaactccccgagtccatcagcgtcaagcagcagtccgagccagccactgcttacatgtccaggaggacaagcactgcctcgctcagccaacccagcttcaggagttccggcacgacggctatgggcgaagccgtgaagatgagcattgtccggcgagcctcgaatacggttcgcaaggctgctggcttgatgaacaggcggccatcgtcaactcacccgaggagccgggatgggagtgtcggacccagcgtgattcgccggagaggaagcatgagcaatccgacgacgccctacgagaacattagcacctttgatagcgactcggagaacgaggttgcgtttgcagccgaagatcgcgcgggggatgacgcgaccctcccggaaacgggttccatcctctcgtcgacttcgtccgatggcttcggcctgatcccgctgtccctccgtcaaggcatgaccctgaccaaggtctccaagaagaagagcacgaagaggatcaccttgtatctcgatcccgataccgctaagatctggtgggacaggaacaaatacatctacattgacgacatcaaagagatccgcacggccgaagacatccgccagtatcgcctcgatgcagcgctcccggaaagcgtagaatcccgattcttctcgctcatctacacgcttcccggaaaatctaacacgaagctcctgcacctcatcgccgatagcgacgaatcgttccagcagtgggtcgaggctctcgagaccatctctaagcatcggcaagactttgccacgagcttgatgtcgttcaacgacaaggccgtccgcgcgtactgggggatggagatggagagacagctgggaaaggtgcggtcggccgaggacgagcatatcgattttgccggagttgagcgcgtgtgccgcagcctgcacatccacgtctcaactgaggagctccgcagaaagtttgacatggccaaaggcaggcgggacagctctgatgatctgccgtcgagcgccaagcacagctcccgactcaactttgacgagttcctcgagtttgtacgcctcatgaagacgcgcagtgacatccgagccgtctaccaggcccacgcgagcgagcccgccggcgggatgacgagggacgagttcttccaatttctgcgcgaggtgcagcgcgaggatgttgacgaggacttggcccattgggagtccgtctttgcgcggttcgcccgcaagggcaggccgagggacgccgaaaagcaggggatcttgggcgaggaaggcctgaccatgtccgaaaccgcatttgctggcttccttacgtccacctcaaacgagccaattcccaaagaacctcaggactacgtgctagaccggcccatgaacgagtattacatttcgagctcgcacaacacgtacctgataggccgccaggtcgccagcatctccagccacgagggctacatctcggctctgatgcggggctgccgctgtgtcgaggtcgactgctgggacggcgaggggaaccagcccgtcgtgacgcacggtcacacgctgacgacgagcatctcgttcctcgaagtcatcaagactatcaacaagtacgcattcgtgaaatcgcgctttcccttgtggatttcgctcgaggtgcgctgcaatcccatcactcagatcaacatggccaagatcatgatcgacgtcttcggcgacaagcttgtgcgcgcgcccctagacccgacttcggaccgcctgccgtcaccgtcggagctgatggagcggattctgatcaaggtgaagaagccggacgagtccatgaggggcgccgaccgacccaccgggcgccgccgtggcaacagcatgccgtcgccgtatcagcgagcgcttgcgctggacagcatgcccgttccgactccctcgagtcccctcctcagcccgtctccaacctcgatgtccaacaggcagattaacaccattgccgagggcctggtccacgagccggtcagcagtagccctagcgagtgcgacagcgaaggtgaagcgggagcggccaagaaggccaacagcaaaattcatcccatcctcggggagctgggcgtgtactgcatggggatccattttgacggttttgacagccccgacgccaaaaagttcaaccacatcttctcgttcaaggagaagacgtttgctgagaagaaccagccgggcgaggcgaagagggcgttgtaccgccacaacatgcgctacctgatgcgggtctaccccaatggtggccgtatttcgtcgagcaactttgatcccctcatctattggaagcgcggagtccagatggccgccctcaactggcagacctttgacacgggcatgcagctgaaccaggccatgttcgacggcggcacggctcattcgggctacgtcctcaagccacttgaggggcggcagatccaggtgatgccaaacctggctcccgacgagtgcgtgggcaagcgcccgcggaagaaggttgccttcgagatcgaggtcatctccgcgcagcagctgatgcggccccataacctgggcgagaagcgcacgctagatccctatatcgaagtcgaggtgctaatggcggacgacaagcggaacaaggcggatgcggctgcctatgccgcggctcaacagacgcagctcaagcagcgcaccaatatcgtacgcgacaatggctttaaccccgagttcaaccagacgtgtactttcgacgtcaccaccaagtacccggacctgatcttcgtgcgattcagcgtcaagcttgctgacaggggcggatacaatgacaaggcgcccttcgccacctacaccgttaagctcagcaacctcaagcagggctaccgcacgatcccgctgtacaaccacaagggagagcgctttttgttttcgacgctcttctgcaggatcaagaaaggcccggtcacggatattatggtgtcgtaccaggaagatgcacccaggaatggcggcaacaaactgaaaaacatcggcaggaacgtcttcgccaacacgagccctaaatcgagcatggacagcagccggaccacatga

SEQ ID NO: 470 - protein, 1128 aa, Myceliophthora thermophilia
MTVSVDLNRPLPHTISAMAPESFQTRRARPTRVKTDLATQTQLVAMPPSAISISSASPASQHGSPAQSVETIGTGMTTGSSIQASPEVAEGCLDKEIDDLDQLVTPFQLPESISVKQQSEPATAYMSRRTSTASLSQPSFRSSGTTAMGEAVKMSIVRRASNTVRKAAGLMNRRPSSTHPRSRDGSVGPSVIRRRGSMSNPTTPYENISTFDSDSENEVAFAAEDRAGDDATLPETGSILSSTSSDGFGLIPLSLRQGMTLTKVSKKKSTKRITLYLDPDTAKIWWDRNKYIYIDDIKEIRTAEDIRQYRLDAALPESVESRFFSLIYTLPGKSNTKLLHLIADSDESFQQWVEALETISKHRQDFATSLMSFNDKAVRAYWGMEMERQLGKVRSAEDEHIDFAGVERVCRSLHIHVSTEELRRKFDMAKGRRDSSDDLPSSAKHSSRLNFDEFLEFVRLMKTRSDIRAVYQAHASEPAGGMTRDEFFQFLREVQREDVDEDLAHWESVFARFARKGRPRDAEKQGILGEEGLTMSETAFAGFLTSTSNEPIPKEPQDYVLDRPMNEYYISSSHNTYLIGRQVASISSHEGYISALMRGCRCVEVDCWDGEGNQPVVTHGHTLTTSISFLEVIKTINKYAFVKSRFPLWISLEVRCNPITQINMAKIMIDVFGDKLVRAPLDPTSDRLPSPSELMERILIKVKKPDESMRGADRPTGRRRGNSMPSPYQRALALDSMPVPTPSSPLLSPSPTSMSNRQINTIAEGLVHEPVSSSPSECDSEGEAGAAKKANSKIHPILGELGVYCMGIHFDGFDSPDAKKFNHIFSFKEKTFAEKNQPGEAKRALYRHNMRYLMRVYPNGGRISSSNFDPLIYWKRGVQMAALNWQTFDTGMQLNQAMFDGGTAHSGYVLKPLEGRQIQVMPNLAPDECVGKRPRKKVAFEIEVISAQQLMRPHNLGEKRTLDPYIEVEVLMADDKRNKADAAAYAAAQQTQLKQRTNIVRDNGFNPEFNQTCTFDVTTKYPDLIFVRFSVKLADRGGYNDKAPFATYTVKLSNLKQGYRTIPLYNHKGERFLFSTLFCRIKKGPVTDIMVSYQEDAPRNGGNKLKNIGRNVFANTSPKSSMDSSRTT

SEQ ID NO: 471 - DNA, 822 bp, Myceliophthora thermophilia
atgccgccaacacgcatccccaccaaggaggactttgcctccatcctcccgtcgcaccccacctaccaaggtcgacgacaacaacaacagcaacagcagcaacagcaacaacaacaaggaaaaggaggaggccaaccagacgacgaccccatctcgctggtctaccccaacccgcccgagtccaccacctcgatcctgctcctcttccacggcctgggcgacaccgaggccgcctttgccgccttcgcccgcaacctggccctcccgggggtgctggccatcgccgtctgcgggaccgccttgctcccgccctccctcctccatgcggacgaccacgacgacccgcgcccgggggaggtgcaggagcgcaggtgcgggtgggcggccggggacctgatgctgttagagttaggccagggcgcatcgttcgccctggggctggccagcgccctccgcgccggggaccgcgtcgtggaggtcgtcgccaccacgacgggtgccgcggccgccgccgggcagggcaacggatacggaaatggaatggcgttcaagggggtcgtcgccatcggcggggcgctgcccgtgtccatggtgccgaccgtcggcgggctgggcaagtccaagactcccgtgctggtctgccgcggccgcgagagcgaggcggtcgacgaggacgccgtggagctgctcgagagggagtttgaggacgtcaaggtcgtccggtggaagaggaccgacgacgggatgccgcgcaaccgcgacgaggccctgcccatgatgcgcttctttgccgagaggttgaggaacgtgtggcagcgttag

SEQ ID NO: 472 - protein, 273 aa, Myceliophthora thermophilia
MPPTRIPTKEDFASILPSHPTYQGRRQQQQQQQQQQQQQGKGGGQPDDDPISLVYPNPPESTTSILLLFHGLGDTEAAFAAFARNLALPGVLAIAVCGTALLPPSLLHADDHDDPRPGEVQERRCGWAAGDLMLLELGQGASFALGLASALRAGDRVVEVVATTTGAAAAAGQGNGYGNGMAFKGVVAIGGALPVSMVPTVGGLGKSKTPVLVCRGRESEAVDEDAVELLEREFEDVKVVRWKRTDDGMPRNRDEALPMMRFFAERLRNVWQR

SEQ ID NO: 473 - DNA, 1152 bp, Myceliophthora thermophilia
atgtcgcccgaagagacgccgcttctccagaaagacggggggccggccgagttcggcccctggccgccacggctgccccagaacatcgggcaccggggctacaaggcggcgtacccggagaacaccatggcatccttccgcggggccgtggaggcgggtgctcatgccatcgaaacggatctccacctatcccgggacggcgtggtcgtgctgtcacacgaccccacgctcaagcgctgcttcggggtcgacgcccgcatcgccgactgcgactggtcgtacctgagcacccttcggacgctccagcacccgcgcgagggcatgccccggctggccgacctgctcgagtggctggccaccgctgccgcctcgtccgacctgcccgccgccgcctccgtctggctgctgctcgacatcaagactaacgacgacccggagcgcctgctccccgccgtcgcgcgcaccatcgcttcggcccccccgccgcccgggggggacatgaaagggtggaagaaaaggatcgtaattggggcgtggaatgaacactacatccgccatgctcgcctgcacctgccgggccacccactcgcctacatcggcttctcgctgctctacgcccgccgcttcctctcagacgagtactcggacgtgcacttcaacctggcccagcccaccctcgtcgggcccctgggcgccgccttccgcggggccgtccgcgcgcgtggccggcgcctgttcatctggaccgtcaacgagccccgctggatggcctgggcggtcagcaaaggcgtcgacggcgtcgtcacggacgaggtcgtgcggctgcgggccgtcttagaccggccttcttcgtcttcgtctccttcttcttcttcttcttcttcttctccttcttccgcctcttctgcttccgatatcgaggcggaggcgaatgggaacgcggaggggcttgaggttgggattggagtcgggccaggcgacggcatgcggtggccgcgcaccatccgactgtacctcgtggccatgctctggcaggtcggcgccgcgctgctgaccatcctcctgtggtaccccttgaacacgaggggtcggccaaagaagggcaggggcgcggggcagctcggcggtgcgaccttgcctgtcaaggcgtag

SEQ ID NO: 474 - protein, 383 aa, Myceliophthora thermophilia
MSPEETPLLQKDGGPAEFGPWPPRLPQNIGHRGYKAAYPENTMASFRGAVEAGAHAIETDLHLSRDGVVVLSHDPTLKRCFGVDARIADCDWSYLSTLRTLQHPREGMPRLADLLEWLATAAASSDLPAAASVWLLLDIKTNDDPERLLPAVARTIASAPPPPGGDMKGWKKRIVIGAWNEHYIRHARLHLPGHPLAYIGFSLLYARRFLSDEYSDVHFNLAQPTLVGPLGAAFRGAVRARGRRLFIWTVNEPRWMAWAVSKGVDGVVTDEVVRLRAVLDRPSSSSSPSSSSSSSSPSSASSASDIEAEANGNAEGLEVGIGVGPGDGMRWPRTIRLYLVAMLWQVGAALLTILLWYPLNTRGRPKKGRGAGQLGGATLPVKA

SEQ ID NO: 475 - DNA, 1749 bp, Myceliophthora thermophilia
atggcagcaggttcagatccgtcttcttactcgggggggtccctggaggccgatcacctctgcgtgttggtgcatgggttatggggcaatccgaaccacatggcgtcggtcgccaaagccctccgggcgcagcacccggccgaccgggtctacatcctgctggccaagagcaacagcggctccttcacgtacgacggcatcgagctaggcggtgagcgcgtgtgccacgagatcgaggaggagctggacatgatccgggccaggggcggcagcatcaagaagctcagcatcgtcggctactcgctgggcggtctggtcgcccggtacgccatcggcctgctctttgcccggggcgtcctcgacaagctcgagtgcctcaacttcaccgccttcgcgagccccttcctcggggtgcgcacgccgctgcgcggctggcacaaccacatgtggaacgtgctgggcgcccggacgctctgcacctcgggccgccagctcttcggcatcgacaagttccgcgacacgggcaagccgctgctcgccgtcctggccgaccccagctccatcttcatgtcgggcctggccaggttcaagcgccacaccctctacaccaacatcgtcaacgaccgcagcgccgtcttctacaccaccggcatctccaagaccgacccctttgtcgacctgaccaaggtcaaggtccgctacctcaagggctacgaagacgtcatcctcgacccggccgacccggtctcccccatcatcgatgatgacactactactactactaccaccaccaccaccaccaccaccaacaccaacaacaacaacaacaacaacaacaacaacaacaacaacaacaacaacaacaacaacaacaacaacaacaacaacaacaacaacaacaacaacaacaacaacaacaacaacaacaacaacaacaacaacaacaacaacaacaacaacaacaacaacaacaacaacaacaacaacaacaacaacaacaacaacaacaacaacaacaacaacaacaacaacaacaacaacaacaacaacaacaacaacaacaacaacaacaacaacaacaacaacaacaacaacaacaacaacaacaacaacaacaacaacaacaacaacaacaacaacaacaacaacaacaacaacaacaacaacaacaacaacaacaacaacaacaacaacaacaacaacaacaacaacaacaacaacaacaacaacaacaacaacaacaacaacaacaacaacaacaacaacaacaacaacgcgcggtgcagacggcgcggtcggcgcggcgggtgcgcctgcacgagcgcgggctgggcggcgtgcccacgggcgccttccgcggcgtcgaccttttcatccgcgagaggagaagaggaggaggaagaagaaggaggaggaggaggaggaggaggagaagattccggaaagaagaagtgcgcggcgctcgagacggagcggtcgctcgcccaggacatcgcccgcggcgaaagcggcggcgaaagcggcagcggcagcggcagcggcagcagccccttccccacgctggcgctggccgcgtaccagttcgcggccattgacgcgctcgatcagctgggatggcgcaagtatcccgtgtggatccacaagcacaaccatagtcatgcggccatgattgtgcgcatggagaagcccgggttcgaggagggcaggctggtgttgaagcactgggtcacggaggagtttctggtctga

SEQ ID NO: 476 - protein, 582 aa, Myceliophthora thermophilia
MAAGSDPSSYSGGSLEADHLCVLVHGLWGNPNHMASVAKALRAQHPADRVYILLAKSNSGSFTYDGIELGGERVCHEIEEELDMIRARGGSIKKLSIVGYSLGGLVARYAIGLLFARGVLDKLECLNFTAFASPFLGVRTPLRGWHNHMWNVLGARTLCTSGRQLFGIDKFRDTGKPLLAVLADPSSIFMSGLARFKRHTLYTNIVNDRSAVFYTTGISKTDPFVDLTKVKVRYLKGYEDVILDPADPVSPIIDDDTTTTTTTTTTTTTNTNNNNNNNNNNNNNNNNNNNNNNNNNNNNNNNNNNNNNNNNNNNNNNNNNNNNNNNNNNNNNNNNNNNNNNNNNNNNNNNNNNNNNNNNNNNNNNNNNNNNNNNNNNNNNNNNNNNNNNNNNNNNNNNNNNNNNNNNNNNNNNNNNNNNNNNNNNARCRRRGRRGGCACTSAGWAACPRAPSAASTFSSARGEEEEEEEGGGGGGGGEDSGKKKCAALETERSLAQDIARGESGGESGSGSGSGSSPFPTLALAAYQFAAIDALDQLGWRKYPVWIHKHNHSHAAMIVRMEKPGFEEGRLVLKHWVTEEFLV

SEQ ID NO: 477 - DNA, 1590 bp, Myceliophthora thermophilia
atgactcggcccccgggcctaatccacgaattccttcgacagctcgagtccagacagtcgcttcactccgaatccaaccctgacctgccgcgttacgatgttcagaacccaactgaccgggggctgctcgtgacgagcagtcgtccccagcgcttcttcctgggcaccggcgcttcgatatttaccaattacctgatacccgccatcacctctgcccagcatgaggtcattctggtcacctgcttttgggcgccctccagaacgttgacggctctgtgcgaggccctaagcaagctcgccgcacaccgtcgccgtctggttcaggaggcacgagcgacgggatcgactcccatcccgccgttgcacgtccgcatctgtctgtcgtcgcgctccctgcttcagaagctccttcatccgcaatctcgcagcggctatacctacccgcctgcctcgtggcacaagaagcttggcttgcctgaacccgcgctgctcgaagccggagggatccgcctcgaggccaagagtctgtttttcctgcccttcagcgtgatgcatcccaaatttgtcatcattgacaggcagagagcattcgttcccagttgcaacgtcagctgggagtcctggctcgagggctgtgtagagattacgggagacgcggttcgcgccctgttcgccttctactcgcgcatttgggaggatccggccgatactgagccagctcgcgatgcgtggtccgacagagtccccggagactcggaggcagctggcacttcttgggacggggccgaagccggccttgtcatggtacgtagcaccgctcgtctctgcgtagacctcgagtcgcacgacacggttgcgacgctcgtccttccctcatcgtaccatcgtaacccgcgcttccgcccgttcccctggcagaggtcccctccgccgcccgacacccctctcaatattgcgtccatgcagctcttcgagcgagcgcaacgatcaatctatattcagacacctaacctcacctgcgagagcgtcattatcgccctcttggacgccctagcaaggggcgtagaagtcaacattgtgacgaaccgcaacatgatgctgcttgagcagcttgtcacggcagggaccaccacatcttggtgtatcaggtcgttgattcgccgcttctgtcggcccaaggccgcactcggtggcaagcaaaaggctcagagcggtggcggcgacgcctcccgcgacctcgaagctggactaccaaacacgggcactcgagttggccgcctcctgatatggtactttcatgccaagaatcccagttctcccggggtcttggaggggcagcccgcggtcgctactcggccacagggagaggaaccggtccactcgcacctgaagctggccctcgttgacgcagaatatgcgttgctgggctcaggtaatcttgaccgcgcgagttggttcaccagccaggagttgggtatcttgtttcaaagccgcgagttgtgttccaagatcaaagctgctgtggacggcgttctagaagggagactcgatttgatattcgactcggaccacggcacggggagtaattaa

SEQ ID NO: 478 - protein, 529 aa, Myceliophthora thermophilia
MTRPPGLIHEFLRQLESRQSLHSESNPDLPRYDVQNPTDRGLLVTSSRPQRFFLGTGASIFTNYLIPAITSAQHEVILVTCFWAPSRTLTALCEALSKLAAHRRRLVQEARATGSTPIPPLHVRICLSSRSLLQKLLHPQSRSGYTYPPASWHKKLGLPEPALLEAGGIRLEAKSLFFLPFSVMHPKFVIIDRQRAFVPSCNVSWESWLEGCVEITGDAVRALFAFYSRIWEDPADTEPARDAWSDRVPGDSEAAGTSWDGAEAGLVMVRSTARLCVDLESHDTVATLVLPSSYHRNPRFRPFPWQRSPPPPDTPLNIASMQLFERAQRSIYIQTPNLTCESVIIALLDALARGVEVNIVTNRNMMLLEQLVTAGTTTSWCIRSLIRRFCRPKAALGGKQKAQSGGGDASRDLEAGLPNTGTRVGRLLIWYFHAKNPSSPGVLEGQPAVATRPQGEEPVHSHLKLALVDAEYALLGSGNLDRASWFTSQELGILFQSRELCSKIKAAVDGVLEGRLDLIFDSDHGTGSN

SEQ ID NO: 479 - DNA, 393 bp, Myceliophthora thermophilia
atggccgcattcctcggccataaggttccgcctcaagcaagacgagacctctggtacccgtttttcgtcaactacaagaatatcgtctatgtttcgagccccagccatctgacaacaatcaccacatgcctgctcaactattactttagcaatgccccgtcggtctggtggcttgtctgcgtggcgttcgttgtcgggcatgcgcaccctctccaaaagggtattaaattgttgagcctcacggcagccgagtgggagagcaagacgatgcccgagacgagggcatggtttcaggactttgtggatatcaaccaaagaaggttgctcctggtcgacctgccgggatggctatgcgttgtcgccacggtggtgacggctctgcgcagcgtctga

SEQ ID NO: 480 - protein, 130 aa, Myceliophthora thermophilia
MAAFLGHKVPPQARRDLWYPFFVNYKNIVYVSSPSHLTTITTCLLNYYFSNAPSVWWLVCVAFVVGHAHPLQKGIKLLSLTAAEWESKTMPETRAWFQDFVDINQRRLLLVDLPGWLCVVATVVTALRSV

SEQ ID NO: 481 - DNA, 2736 bp, Myceliophthora thermophilia
atggcaaatgtccaatgccacgtcatatacgtcgaccggtccgtgtcgcgggaccggagcgtcagagcgaaccggtggaatagcgatggggatgccattcgaggggaatcggcgcacatggcggaaaatgtcaggcttctcctggacgcctttgacgaagttcatttgtgtagcaccggcgccgcttgcctggaccaatggctgagcctccaagagccctcaatggcagcgctcaaaccgacgctgttcatcctagataccccctaccaagatgagatggcccgacgagaccgctcgagatccccctcgccgtcgtctcggattgccgactccgggaatcaaggcggcgaggagctgtacggtctggcattactacgaaggatcgtatcggagtcctatgtgcggaacgtgtccaagctcgtggtcacggtacccataatcgcgcccccttactgtgaccgttctgacggccgcgatgggacgggcgagccgacggggcgagccgtggccgacagcagccaccagctttcggcagacgagcggagggcggccaacaggaggatgtggaagaagtgtctcgaggtgggcgccgcggatgtcatgacgagcccgatgaaccccaggtgtgtcagcaaccttgaagtccatgcctaccgcgcccaactggatgctgcccgtgaccaaaaggcgctggtggagctccgccggggccgcaagcgctcgtgggtcggcatctgcgaggagaagcccttctcgtacctgcgggaagccatggtgtccaagctcatgggccgcatttgtcgcataggaagcgaagccgacgaggtgacccatagcatcaagctgtccatcaccgccgagaagcaggcccaagtcacgtcggcggtgggccagtggcatttctgcgcccacgattttacagaggacgagctcctcgtggccgcctcggtcatgttcgagcacgccttgtccatgcccgagctggagccatggcggataccaacagatcagctgcaccacttcctgctcgcctgccgggccgcgtacaacaccttcgtcccctatcacaacttccgccacgtggtcgacgtcctgcaggcgacgttccactttctcgtcagcatcggctctctgccgtcttaccgctcgcccgacggttcgctgctttctcaggcctgccccaaatcgccggttgcacagctcctccggccgttcgaggctctgactctccttattaccgccattggccatgatgtcggacaccccggagtcaacaacggctttctggtcacgctgaatgcgccgctcgcccagttgtacaacgatcggtccgtcctcgaatcgtttcactgcgcggcctattcgcagattctgcggagatactggccctctgcctttggcgacagcaagatgcgccacctcatgatcagctcgatcctcgccaccgatatgggattgcactttgactacatgcagaagctgggtgatctccaggcgaaactacacgccaataacagcaccgaggactgggaagagagcgtgaagaacgagcaaagggcactaacatgcgcccttctcatcaaatgcgcggatatcagcaacgtgacgcgacgacacgatgcagccctccaatggatgcgcatcctatccgaggagttctcgcgccaggccagcatggagagcgagctagagatcaagacctcgctcatgtcggagcccaagcaagacacgttatccctgacgaccgcgcagctcaagtttatgaacttgttcgccctcccgctcttccaaggcgttgccgatatcctccctgccatgcagtactgcgtcgacgagcttcacgtgaacaaggagttgtttgacaagtgtttgcttgacgaacagaaacgccagtcgcccgcccggccggttctccgggatcacgacagtgagctctcgatcaggtcgatcaagttcacaagctcgcccgaaccagcgacggaagtgaaccccgctagaggggccatcggcagcgtgccaaaggttgtcgagcctcagacgccggatccggccgtttcccagcaagcggacttccacaggccgaactcgcaccctaagcggccgaccgacggccggatcgtgaacggcatcgtgaccagcttcccgtctgccaacgaacccagccacggcgaagatgcccgcatgaatggcgccgccagccctcgccatggccatacgcgacagaggtgcagcgaaacgacagattggggttcggcgcccaatagcggcgattgggcctcgcaagcgacgagcgcaacgacgggcaggatgccgctttcgccgagcaccaagggcaccagcattgtgagctgtgactccttcgagcggcctctcagctacagcaccagcgtgcctatccccagcgtggtggcgcccgacgagtcgacaagtacggttcctaactcggccaccaccacggggagccacacggacttcaagctggagaactaccagcctcctccgctcctgctggatgaggagaacgacgcgccccggaacggccaccagcaacataaccagtacttgaacggcggcagcgcaaaaaagaacgaccatggcggggctgagcctgcagatccgggcgccagacagctcaagaagaagccgagccgtttccggatcaacgggttgcaaaacctctttaggaaacacaagagttcgagcccgccaatgcaggcagccgataccgccggatag

SEQ ID NO: 482 - protein, 911 aa, Myceliophthora thermophilia
MANVQCHVIYVDRSVSRDRSVRANRWNSDGDAIRGESAHMAENVRLLLDAFDEVHLCSTGAACLDQWLSLQEPSMAALKPTLFILDTPYQDEMARRDRSRSPSPSSRIADSGNQGGEELYGLALLRRIVSESYVRNVSKLVVTVPIIAPPYCDRSDGRDGTGEPTGRAVADSSHQLSADERRAANRRMWKKCLEVGAADVMTSPMNPRCVSNLEVHAYRAQLDAARDQKALVELRRGRKRSWVGICEEKPFSYLREAMVSKLMGRICRIGSEADEVTHSIKLSITAEKQAQVTSAVGQWHFCAHDFTEDELLVAASVMFEHALSMPELEPWRIPTDQLHHFLLACRAAYNTFVPYHNFRHVVDVLQATFHFLVSIGSLPSYRSPDGSLLSQACPKSPVAQLLRPFEALTLLITAIGHDVGHPGVNNGFLVTLNAPLAQLYNDRSVLESFHCAAYSQILRRYWPSAFGDSKMRHLMISSILATDMGLHFDYMQKLGDLQAKLHANNSTEDWEESVKNEQRALTCALLIKCADISNVTRRHDAALQWMRILSEEFSRQASMESELEIKTSLMSEPKQDTLSLTTAQLKFMNLFALPLFQGVADILPAMQYCVDELHVNKELFDKCLLDEQKRQSPARPVLRDHDSELSIRSIKFTSSPEPATEVNPARGAIGSVPKVVEPQTPDPAVSQQADFHRPNSHPKRPTDGRIVNGIVTSFPSANEPSHGEDARMNGAASPRHGHTRQRCSETTDWGSAPNSGDWASQATSATTGRMPLSPSTKGTSIVSCDSFERPLSYSTSVPIPSVVAPDESTSTVPNSATTTGSHTDFKLENYQPPPLLLDEENDAPRNGHQQHNQYLNGGSAKKNDHGGAEPADPGARQLKKKPSRFRINGLQNLFRKHKSSSPPMQAADTAG

SEQ ID NO: 483 - DNA, 1989 bp, Myceliophthora thermophilia
atgactggcaatcgggccattgacatcaacggtggggaggacgaggatgaggcactgcggattgcgattgccctgtcgctggggaaggagccggagccaccttcgtcgcctcgcggtcggcccgggacggaccaggtgattgatctcacgcacgacgacgacggccacgctggcgattccggcaagggcagcgcaggggagggcgatgacgatgtcgtcatcttggccgcccacggcgatgtcggccgttctgggcctcggcagaaggacgagacggcgacggcgtcaaccgcgcagcagacgacttccgtgtccgtattctccgccctagggctggatcggaggaaaatggaggaggagcggctggcgaggctgagcaagaggaaggcatcttctcaggttggggatgacgggcagccggctgcgagaccagcgcaacggccgaggatagcggatgaagagaagggggaagtgacgtcgttggaggggaggacgtcgacagggcatggctcatcatcaccctcgtccagaccggatctaccgctgaacccgtcaaggtcatcgacatgtcccggcctccacttcccccgaggcgttgtcaaaaagacctgggcgtacggccagccccggcgaggcgacgacatcaagatcgaggaagttcttcagaagcagcacctccacctcgccgtcctgagctcttaccagtgggatgaggagtggatgctgtccaagatcgacatcgcgcggaccaagctgatccttgtggcatttgctgccgacgaagcgcagaaagaggagatgaggtccaacgtgccgcgcgacaggatccggttctgcttcccgcccatgcatggcattggctcgatgcactccaagttgatgctgctcaagtacgaaaactacctgcggattgtggtgcctacggggaacttaatgtcgtttgactggggggagaccgggactatggaaaacatggtgtttattctcgacctcccaaaatttgaaaccgcggagggacgggaggcgcagaagctcaaccggttcgccgatcagctcttctactttctccgcgctcaaggactcgatgagaagcttgtagacagcttacgcaactacgactttaccgaggccggtcgttacgaatttgtgcacacaatcccgggatctcataccggagacgatgccttgagaacaggatactgcggccttggccagtcagttaacgccctggtcggcactcgttcagagcccgtcgagctggaccttgtggtgagcccggacctgtcccagctctacgactcgcttctctgcttgacgtgcgcgtctctcggggcggtcaactacggcctgcttacgtcgctctactacgcttgcctgggcgatcctcttcgagagtacgaggagcgggcgtctgggagtcagagaaatcgtgacgcgtttacaagcagggcaatttccttggttaaggaacacatgcggatattctttccctcgcgtgagacggttctacggagcaagggaggaaaagacggcgcgggaacaatatgtctcctgtccaagtggtggcaagccccaacgtttccccgggaactcgtacgagactgcaagtcggtcaggcagggcgtgctcatgcacaccaaggccctctacgttaggccctgcagtcccacctcgcaacagtccggccgctgttttgcctacgtaggcagcgccaacctctccgagagcgcctggggccgactctccagggaccgcgcgtcgggcaagcccaagctcacatgccgcaactgggaatgcggtgtcctcctctgtactgatagaacggtggaaggaagcagcggtgcgggcagcgacaacctgggcgtatttgacgggtgcgtgccggtcccaatggagtggccaggacgggccatctctggggagggaggggaggggatggcggccaaggacaaggatgccaggacgccttggttctacgcggaagggtga

SEQ ID NO: 484 - protein, 662 aa, Myceliophthora thermophilia
MTGNRAIDINGGEDEDEALRIAIALSLGKEPEPPSSPRGRPGTDQVIDLTHDDDGHAGDSGKGSAGEGDDDVVILAAHGDVGRSGPRQKDETATASTAQQTTSVSVFSALGLDRRKMEEERLARLSKRKASSQVGDDGQPAARPAQRPRIADEEKGEVTSLEGRTSTGHGSSSPSSRPDLPLNPSRSSTCPGLHFPRGVVKKTWAYGQPRRGDDIKIEEVLQKQHLHLAVLSSYQWDEEWMLSKIDIARTKLILVAFAADEAQKEEMRSNVPRDRIRFCFPPMHGIGSMHSKLMLLKYENYLRIVVPTGNLMSFDWGETGTMENMVFILDLPKFETAEGREAQKLNRFADQLFYFLRAQGLDEKLVDSLRNYDFTEAGRYEFVHTIPGSHTGDDALRTGYCGLGQSVNALVGTRSEPVELDLVVSPDLSQLYDSLLCLTCASLGAVNYGLLTSLYYACLGDPLREYEERASGSQRNRDAFTSRAISLVKEHMRIFFPSRETVLRSKGGKDGAGTICLLSKWWQAPTFPRELVRDCKSVRQGVLMHTKALYVRPCSPTSQQSGRCFAYVGSANLSESAWGRLSRDRASGKPKLTCRNWECGVLLCTDRTVEGSSGAGSDNLGVFDGCVPVPMEWPGRAISGEGGEGMAAKDKDARTPWFYAEG

SEQ ID NO: 485 - DNA, 507 bp, Myceliophthora thermophilia
atggcagcaaacgcaggcactaagctgagtcctttgagattcgtccgaacggtcatgaactcgttcatggccgattccggacttgagcctcggcttcttgggaaacacttccgcgtcaccaatgccacggaaggtgtcgtggacttcgagctcaacattgccaaagagcacacgaaccggctgaagatcatccacggcggcaccatcgccagcttggtcgacctcgggggctcgctcgccgtggcctccaaggggtactacgccaccggtgtctcgaccgacctcaacgtcacatacatcagcggcggcggcaaggtggatgacaagctcaggggaacggccgttttcggaaaaacgctggcgtataccacggtaacattctgggataagaatcggaacatagttgccagaggaagccacacaaaattcgtcgcccaagctgttgccgccagcacacccttcgttcctcctgagggtgccccaattgccgatgatgctgagcattaa

SEQ ID NO: 486 - protein, 168 aa, Myceliophthora thermophilia
MAANAGTKLSPLRFVRTVMNSFMADSGLEPRLLGKHFRVTNATEGVVDFELNIAKEHTNRLKIIHGGTIASLVDLGGSLAVASKGYYATGVSTDLNVTYISGGGKVDDKLRGTAVFGKTLAYTTVTFWDKNRNIVARGSHTKFVAQAVAASTPFVPPEGAPIADDAEH

SEQ ID NO: 487 - DNA, 726 bp, Myceliophthora thermophilia
atgcctggctcatccctctggcttctgcctcccgagaatcaccccctcaatccggtcctgcggaccctcatcaccagcaccctcccgtccgccttcccccgcgaggccgcctcctcgccccgcgtcgtcccgcacttcttccccgcccacgtcacgctcacgagcggcatctccccggacgcctacggcgacgatccccagggctggctcgaccgcatcccctttccgaagaagggaagagggggagatgatgaagaagaagaaggaaacagtggaggtagtagtagccgggccaaggtccggttcgagagggtcgtcagccaggacgtgttctaccgccgctgtttcatcagggtcgcgtttgatggggtgaaggagatcgccggggtcgccagagcggccgcagtactaggggaaggggtggaggtggacgcagagggaaacgtcaaattcggcggggagacggagaagtggctgagctggtggagggaagagtttgggccgcacctcagtctgatctacggtaacgagccgatcctagatggcgcgctgcgagaaatcaccagggtggtgcagcaggcaggaatcaagttgtctgacgaaactgagaacggtgcgaaagagggcgacgctctggacggttgggacggcggcgtgatctggctggtcccgactgacaaacccatttcggagtgggggaagcccatagcgacaaggaagatttga

SEQ ID NO: 488 - protein, 241 aa, Myceliophthora thermophilia
MPGSSLWLLPPENHPLNPVLRTLITSTLPSAFPREAASSPRVVPHFFPAHVTLTSGISPDAYGDDPQGWLDRIPFPKKGRGGDDEEEEGNSGGSSSRAKVRFERVVSQDVFYRRCFIRVAFDGVKEIAGVARAAAVLGEGVEVDAEGNVKFGGETEKWLSWWREEFGPHLSLIYGNEPILDGALREITRVVQQAGIKLSDETENGAKEGDALDGWDGGVIWLVPTDKPISEWGKPIATRKI

SEQ ID NO: 489 - DNA, 1518 bp, Myceliophthora thermophilia
atgaaatacggagagcaatttgagagggagtccgtgcctcaatggagccttcataacatcgactacaattcgcttaaacatcacatcaaggcgcacactaccagggaccaggccacggcaataacaattccaggctgcccgaacacggcactgacaaaattcgaagacgatttttatgaagagctgtgccggcaacatgatcgggtggatttgttcgtctcgagcaaggccgacgagatttcacggcggctgcagcacctttcgacccagttacaccgactcatcctgcgatgcgcgacttcgggacgggaccagatgcccttgaagaggcggcaacgcttcgccaagtacgaacaaaacttactacaatgcggcgatgacatcagggcgcttcaacgcttcgtcagcgcccaggtagttgcgtttcggaaaataataaagaagtacaggaaatggacaggctccgtaacactgggagctcgcttcaatgaccacgtcctgtcgcaccccaagagctttacaaagcgtgactttaatcagctccaggctcggtatgaggacctgctacagacattacgcgctgcgtcacccgctggcggtgttagctttccgcgtccaaaaccccggtcctcccgttcgcccgctccacagttctcaccagccgagcggactgccgccttggagccacaaccgccaacaggctactggaatgagtacgagtgtggcagcgaggcaggggactttgaccgcaacggcgatgagtacgcaatctacattgatccgaaccaggacactagcttcccgggtttcaaggctctcggcgcgttcttcgcagagtccgcccagaaactaagcagctgggtctcgtctcgacgcaagcgcgattccgcagctgtcgatatagccggtacagagcgccggcccctcctccatgatcatcagcccagcgacgcgggctacggctccaccgcgatcccttcagaatcaagtggcccctccagcccgccaggcgggacgaacatctacagcaccggcacggcagcaggcaccgacacggacctcgaggtccagcggacttcgtcgtcgcgccgcggctccatcagcagggggtacgtgtcgtcgtcatcatcggacgagcctttcttccggccgggcgccagagaggagacgtactacgcgggactgccgagcatcgcggaccagcgcatggcgcggtaccgcgagcacgtgctgggctgggcgacgtggggttgctttggggccgccttcgcgctgatgggcctcgcagccgtgctgatcgccaccgggcgccacaagatgaggctcgaggtggatgccggggtcacacttgggatcgtgacgagcctgggcctggcgtgcggcggcttgagcatgttgagcgcgcggactggtacgcctgggttgctggatcgtttggcggtgtggcttgcatttgcagtggtctgtgtgggagatggcatattgttggtcttggtcatgggaaacgcgaggaggtga

SEQ ID NO: 490 - protein, 505 aa, Myceliophthora thermophilia
MKYGEQFERESVPQWSLHNIDYNSLKHHIKAHTTRDQATAITIPGCPNTALTKFEDDFYEELCRQHDRVDLFVSSKADEISRRLQHLSTQLHRLILRCATSGRDQMPLKRRQRFAKYEQNLLQCGDDIRALQRFVSAQVVAFRKIIKKYRKWTGSVTLGARFNDHVLSHPKSFTKRDFNQLQARYEDLLQTLRAASPAGGVSFPRPKPRSSRSPAPQFSPAERTAALEPQPPTGYWNEYECGSEAGDFDRNGDEYAIYIDPNQDTSFPGFKALGAFFAESAQKLSSWVSSRRKRDSAAVDIAGTERRPLLHDHQPSDAGYGSTAIPSESSGPSSPPGGTNIYSTGTAAGTDTDLEVQRTSSSRRGSISRGYVSSSSSDEPFFRPGAREETYYAGLPSIADQRMARYREHVLGWATWGCFGAAFALMGLAAVLIATGRHKMRLEVDAGVTLGIVTSLGLACGGLSMLSARTGTPGLLDRLAVWLAFAVVCVGDGILLVLVMGNARR

SEQ ID NO: 491 - DNA, 912 bp, Myceliophthora thermophilia
atgccggaaactcagttcaacgcagatgatcgtctccggaaccggaagccgattccagcgccggtgcccgcctatcttcccacagccggatcaccgctgacggtcgatacggagctctattcatccatccaacaggccccccgcgtcttggtcgaggaattcacgctcccaattcggtccggcaaggcctggaaagcggaagcaggaagcatcatccggatcagcactcccgtaggaccacaggtgggagatctgaatatctggaatgcccacaaccctcgcgagcgtttttgggcatcacgaacccggcagctccatgcaagccacgtgtcgacctacgacaggttgtggtcgtgcttgccctacatgcgaccgctggttacaatcatctcggacactctggcctggtacggcgaggacgagcacggcggccgcgtccacgacctgctcggcactcgttgcgacccctacatcaactcggtcttgagcggcgggcagtacgatttccactgccactccaacctgacccgtgcggtgcttccgtttgggctctcggaatcggatgtccacgacgtcataaacatctttcaagtgacgggcttggacgccaaggggagatacttcatgaacccttgtccagcagagagcggggaccacattgagtttctagcagagcaagacgtcttgatggctttgagtgcctgccctggaggagatttatcgttgtggggatttggcgacgctagtgagaaggaaatggtgaagtgttgtcgtccgctcaaggtcgaggtgttccgccttgcggatggcgacttcttgcaaaaggctggttggcggccagccgaaccttcaaaatatcatgggatgcatggcatggtcgttgtcgagggcgagcccgagcttacaaagtaa

SEQ ID NO: 492 - protein, 303 aa, Myceliophthora thermophilia
MPETQFNADDRLRNRKPIPAPVPAYLPTAGSPLTVDTELYSSIQQAPRVLVEEFTLPIRSGKAWKAEAGSIIRISTPVGPQVGDLNIWNAHNPRERFWASRTRQLHASHVSTYDRLWSCLPYMRPLVTIISDTLAWYGEDEHGGRVHDLLGTRCDPYINSVLSGGQYDFHCHSNLTRAVLPFGLSESDVHDVINIFQVTGLDAKGRYFMNPCPAESGDHIEFLAEQDVLMALSACPGGDLSLWGFGDASEKEMVKCCRPLKVEVFRLADGDFLQKAGWRPAEPSKYHGMHGMVVVEGEPELTK

SEQ ID NO: 493 - DNA, 201 bp, Myceliophthora thermophilia
atgaacaaggccccagccacttggcggggggatgggaaaccagcagacaactttggagatcatcatagcggcctcgcatgggatgatccgatgaagcgggtcgaaaaacagcggaggcaggctgttgtcgagtcgccctctgtactggatatcgtgcttctcgacacatccgccatgtccggctaccggaagcaagagtga

SEQ ID NO: 494 - protein, 66 aa, Myceliophthora thermophilia
MNKAPATWRGDGKPADNFGDHHSGLAWDDPMKRVEKQRRQAVVESPSVLDIVLLDTSAMSGYRKQE

SEQ ID NO: 495 - DNA, 3606 bp, Myceliophthora thermophilia
atgaagtttgggcggaatctcccacggaaccaggtccctgagtgggcgggttcctatatcaactacaagggactcaagaagcttatcaaggccgccgtcagggcagctcagaatggagaaccggtcgacctagcggagttctttttcgacttggatcggaacttggaggacgtcgactcgttttacaacaaaaaatatgccgacgcctgccggaggcttaaagtgctccaggatagatacgggacctcgcccgaagtggttgccaatctcgacgatgacgagattgaggaactgatgggcgccctgcttgagctgcgcagccagctgcggaagctgcagtggttcggcgagatcaaccgccgtggcttcgtcaagatcaccaagaagctcgacaagaagcttcccgacatggcgaaccaaacgacgacacagcatcgctacatctcaacaaaggttgacctccgcccgttcgccaagggtaccaccatcgccaggttgctctcagagatcaacaagtggatatcagtgcttggtgactcgcatcatgccgatgatgccaggtccgagagatcgactctctccctaggacgctcaacggcgaaagcgatgtcgagtgttcctccggaattgctcgaccaactagaccaggcaatccggaaagacgatgtggaggcccttagagaagggctgaccaccgggaatctattgagcacggagccagcctcacagagggtgctgcttaacattctccaacggtcaatctcagcacgttccaagggctcgattgccttcctcctcgagaacattacctctctggacgagccagacgatatcaatgagcggaactgcatccacagactggtcatccacatcggccggacaaagacagcctcagcaaagaatgaagacgacgctccaaagtcgtctgtgaattcctttcccggggcggttcagtacgcacagaactacctcactccagcgacatcgccttccccgacgccgagagtctgcggtctcaaggagtcaaaggatcttctgaccaaggatgacgaggcggtccagatgctgatttacctcttggaaagtctcaaaccaagccaaagagcggcgttgagctcgagggacaactttggccggatcccactgcactacgcggcacagtttgggtttgttgtggtctgtcaaatcctgatgaagaagatgcaggaatgggggcagttcaacgtcgagaacggcatcgacgccccagaatggcaagacaaggatggcaatgctccagtccatctcagcgtcctcggcggccaccgtctgacgaccaaggcgctgctccagggcgaggactggcagggcgtgagcgacaacaaggccgagatgaggcggatgatctccaagtcaagcgccgtccttgcgatcgccaccaaggccaacttcaaggccatagtagagatgctcgtgggggctggcgtggacatcaactggcaggacaagagcggcgagacagcgctgcatatcgccgctcggttcggccacgatgaatgcgccaaggtactgatcaagggaacggccgagcagaaagcgaacctggagctggctgagcattcgttcgcttggacgccgcttcatatcgccgccgtggatggccatctgtccgtcgcacagttgttagtggatgccggtgccgacgtggacaagacagattcgtcaggctggacagcgaaagagcacgctgcgctgaggggacatcttcccattgcccgtctccttgccgcgcacagccgaggcgaggatgactcgggtacgagcagctccgacgacgagaagggctccacagaacctgtggctcgcgaggtcgcctctcttgaggacaggagatctaacggtacccctcgcgcagccgaacccgtcaagtcgttcgggcatcgttatctccgagacgagagcctggtgcttgtcagtctcggctccatggatatgcgcaagaacgtggaggccgtcacgctggacaaagtgccgctcaacgaggcccacaacacgcagctcgatacggccctctctattgtcgtgtcggcgcagggcgcacagggggacccaactatcattgacatgccggtccacgagaacatctcaacggagccgatcgtcttcacaacgcccgatgccaccaaagtcaagctgttattcgacattgttccgacctactcgggcaacaaaaacaacaaggtcggccgcgccgtcgcgctgctgtctagcgtgcggccgacgattggacaaaagcggatgaatctacagggcgacgtctgcgttccgattgtgggtgccaatctcgacgtgatcggcacggtcaacttcaacttccttatcatcacgcccttctcgcacccgaatatggaagtgacggagcagcggacgtactggaagaagatgacgtcgaccatggtcatcggccaccgcggtctgggcaaaaacctcatgtccaaccggtccctccaactgggcgagaacacggtgccgtccttcatcgcggccgccaacctcggcgctcagtacgtcgagttcgacgtccaactcaccaaagaccacgtgcccgtcatttaccacgacttcctcgtcagcgagacgggctttgacgctcccgtccatactctgacgcttgagcaattcttgcacatcaacccggattcctctcgtcgccacgccaacggtggcagcggctccaacggcgattcccctaagctccagcacaagcagctgtccaagaccaagaggagcaacagccctggcccgcgccagcgttccatgtcgatggactggcccgcgcccggggcccagttcgccagcaagcaggatatggaagagcgcatgaagcacacgcgcgactttaaaaccaaggggttcaaggccaactcgcgcggcaactttatccaggcccccttcgccactctcgaggacctcttccgcaagctacccacgtcggtcggcttcaacattgagctgaagtatccgatgctgcacgagagtgaggagcacgagatggacacgtacgcggtcgagctgaactcgttctgcgacacggtgctagaaaaggtctacgaccatctcgacccgaaggcggccgccggcggcaatggcaggcacatcatattcagctcattcaacccggacatctgcctgtgcctgagcttcaagcagcccaacatcccaatcctgttcctgacggacgccgggacatgtcccgtaggtgacatccgtgcaagcagcctgcaggaggcgattcggttcgcatcgcggtggaacctgctcggcatcgtgagcaactcggagcctttcgtcaacagcccgcggttggtcagggtggtcaagcagaacggcctggtgtgcgtgagctatggggtcctcaacaacgaacccaagttggtgcagcgccaagtcaaggaaggcatcgacgccgttatcgtcgacagtgtcctggctatccgaaagggcctcacgggtggccaggaggctgcgaccacgacgagtgctgacaagttgcgggaaaaggtggagaaactggccgtcagtgatccagctgagaacggggtggccgccaacaatggggggcactga

SEQ ID NO: 496 - protein, 1201 aa, Myceliophthora thermophilia
MKFGRNLPRNQVPEWAGSYINYKGLKKLIKAAVRAAQNGEPVDLAEFFFDLDRNLEDVDSFYNKKYADACRRLKVLQDRYGTSPEVVANLDDDEIEELMGALLELRSQLRKLQWFGEINRRGFVKITKKLDKKLPDMANQTTTQHRYISTKVDLRPFAKGTTIARLLSEINKWISVLGDSHHADDARSERSTLSLGRSTAKAMSSVPPELLDQLDQAIRKDDVEALREGLTTGNLLSTEPASQRVLLNILQRSISARSKGSIAFLLENITSLDEPDDINERNCIHRLVIHIGRTKTASAKNEDDAPKSSVNSFPGAVQYAQNYLTPATSPSPTPRVCGLKESKDLLTKDDEAVQMLIYLLESLKPSQRAALSSRDNFGRIPLHYAAQFGFVVVCQILMKKMQEWGQFNVENGIDAPEWQDKDGNAPVHLSVLGGHRLTTKALLQGEDWQGVSDNKAEMRRMISKSSAVLAIATKANFKAIVEMLVGAGVDINWQDKSGETALHIAARFGHDECAKVLIKGTAEQKANLELAEHSFAWTPLHIAAVDGHLSVAQLLVDAGADVDKTDSSGWTAKEHAALRGHLPIARLLAAHSRGEDDSGTSSSDDEKGSTEPVAREVASLEDRRSNGTPRAAEPVKSFGHRYLRDESLVLVSLGSMDMRKNVEAVTLDKVPLNEAHNTQLDTALSIVVSAQGAQGDPTIIDMPVHENISTEPIVFTTPDATKVKLLFDIVPTYSGNKNNKVGRAVALLSSVRPTIGQKRMNLQGDVCVPIVGANLDVIGTVNFNFLIITPFSHPNMEVTEQRTYWKKMTSTMVIGHRGLGKNLMSNRSLQLGENTVPSFIAAANLGAQYVEFDVQLTKDHVPVIYHDFLVSETGFDAPVHTLTLEQFLHINPDSSRRHANGGSGSNGDSPKLQHKQLSKTKRSNSPGPRQRSMSMDWPAPGAQFASKQDMEERMKHTRDFKTKGFKANSRGNFIQAPFATLEDLFRKLPTSVGFNIELKYPMLHESEEHEMDTYAVELNSFCDTVLEKVYDHLDPKAAAGGNGRHIIFSSFNPDICLCLSFKQPNIPILFLTDAGTCPVGDIRASSLQEAIRFASRWNLLGIVSNSEPFVNSPRLVRVVKQNGLVCVSYGVLNNEPKLVQRQVKEGIDAVIVDSVLAIRKGLTGGQEAATTTSADKLREKVEKLAVSDPAENGVAANNGGH

SEQ ID NO: 497 - DNA, 1227 bp, Myceliophthora thermophilia
atgacaaccgaattcgaggcccgcctcaagaaggccgtcgacgagcgcctcattccgaatgccgtcgtcctcgcacgagacaagtctggaaagatcgactactccttctcgtacgggccgacgacgctcgatcccgatgccaccccagcccagatcagcccggactccatgttcagcatgttctcgatgacgaagctcatcacgtccatctgcgccctgaagctcgtcgaggaaggggtcgtcgggctcgacgaggacgtctcgaagcacctcgaggcgctggccgcgcaacccgtcctgacgggcttcgacgacgccaccgggcagccgacctacaaggaccgcacccggcccatcaccctgcgccgcctgctcacccactcggccggcaccggctacatcctgatggacgaccgcctgcgccgctgggccgaggctaccggccggcccgtgcccgtcccgctgcggcgcggcggcggcagcaccgtcgacacgcgcttcaactacccgctgctcttcgagcccggcgagagctgggcctacggcagcgggctcgactgggccggccgcctggtcgagaagctgtcgggcgtcccgctcgacgacttcgcgtaccagaacgtgctcgagccggtcggcgtccccaggggcgccatgaccttccacccgctccggttcgcgtcccggtcctccccgcccgacgaaacgctcgtcggcacggccagccgggacccgggctcgggcaaggtggtagcgttcctgccgacggaggagcagcactacggcgagcagcacgacgcgttcggcggcgagggcctgttcggcggcgccggccagtacctcaaggtcctgcactcgatcctggccgacgacggcaagatcctcaagccccagacggccaagtacctcttcgaacccctgctggagcccgcggccagggaggcgctgaacctggcgctccacgcgaccgactgggccgtcggcgtcatccccaagggcgtcgactacgactggagcgccggcggcctgctgtcgaccggcggcgacggcctcgggcacaggaacaaggggttcctccagtggagcggcatgctgaacatgtcatggtttattgaccgcgaggcgggcgtctgtggcgtgtttggcacccagctccttccggtgaatgacgccaaggtcaaggagttgaccaaggaatttgaggacgccatctactcgaggctttga

SEQ ID NO: 498 - protein, 408 aa, Myceliophthora thermophilia
MTTEFEARLKKAVDERLIPNAVVLARDKSGKIDYSFSYGPTTLDPDATPAQISPDSMFSMFSMTKLITSICALKLVEEGVVGLDEDVSKHLEALAAQPVLTGFDDATGQPTYKDRTRPITLRRLLTHSAGTGYILMDDRLRRWAEATGRPVPVPLRRGGGSTVDTRFNYPLLFEPGESWAYGSGLDWAGRLVEKLSGVPLDDFAYQNVLEPVGVPRGAMTFHPLRFASRSSPPDETLVGTASRDPGSGKVVAFLPTEEQHYGEQHDAFGGEGLFGGAGQYLKVLHSILADDGKILKPQTAKYLFEPLLEPAAREALNLALHATDWAVGVIPKGVDYDWSAGGLLSTGGDGLGHRNKGFLQWSGMLNMSWFIDREAGVCGVFGTQLLPVNDAKVKELTKEFEDAIYSRL

SEQ ID NO: 499 - DNA, 1575 bp, Myceliophthora thermophilia
atgtttaaaacctacaccgccgccacttttctgctgccgaagcgactgaagctcgcctcgttgctccctccgcagcccaccgccctctcgaccgacgcctccctctccccgcaacaggaccctcgccagcccatcctcctcgcctcacaccaggccatgtcacaaacccgcgccgacagcccgcctcggccccagcgcccgatggcctacttcccgctggggtacaaagaagctgttcagcaatggtgggcgagtgtatcttctcgacaggccgagcgcaacgtcctcgccttcgtcccttacctccgggaagccagcgccgaaacggtggtgggctcgcaattacaggatctcgccaattgcgacccgttcggcctcagagtgtggaggacatccatggtggagctgtccggcaaaaaccgggccctgaacgagctgtcgatcgagcgcgtcggggagcaggcggacgataccttggtcatgcttcacggctacggcgccggcctcggtttcttctacaagaactttgagccgctcagccgcgcacgagggtggaagttgtacgcgctcgacatgctcggcatgggcaattcctcgagaccgcccttcaagatccgcgccaaggaccccaaggagaagattgccgaggcggagggctggttcatcgacgcgctcgaggagtggcgcaagatccgcaagatcgaaaagttcaccctgctcggccactcgctgggcggctatctcgccgtgtcctacgccctgaaataccccggccggctcaacaagctcatcctcgcctcgcccgtcggcgtccccgaggacccctgggccatcgactcctccatgcccgagccgcaagagtcgacgctggccaacgagttcacccaggaccaggagagcatcgtcaagggcgagcccgcccgagtccgcgccccggcggccgacaacaagtccaccaccaccatcgccgcccctcccaagcggcccatcccgagctggctcgtctggctctgggacgccaacgtgtcccccttcagcatcgtccgcatggccggcccgctcggcccgcgcttcgtctcgggctggaccttccgccgcttcaaccacctcccgcccgccgagaaggacgcgctgcacatgtacagctactcgctcttccgccagcgcggcagcggcgagtacgccctcccctacctcctcgccccgggcgcctacgcccgcagccccctcatcaaccgcatccaggacgtcggccggcaggtcctccgcccggccaccgacacgacccccgccgtgcgcgagaccggcatccccgtcgtcttcatgtacggcgagaacgactggatggacgtcgcgggcgggtacgcggccgaggagaagctcaagcagcgccgcgtccaggccctgctgaacgccaccgacgacgagaagcgcagggagaacgggtccgccaaggtgatcgtcgtccgcaaggccggccacaacttgtacctggacaacccggacgagttcaacgaggtcgtgctgagagagatggaggagacaaggcagagacgcttgaggttggggaagtga

SEQ ID NO: 500 - protein, 524 aa, Myceliophthora thermophilia
MFKTYTAATFLLPKRLKLASLLPPQPTALSTDASLSPQQDPRQPILLASHQAMSQTRADSPPRPQRPMAYFPLGYKEAVQQWWASVSSRQAERNVLAFVPYLREASAETVVGSQLQDLANCDPFGLRVWRTSMVELSGKNRALNELSIERVGEQADDTLVMLHGYGAGLGFFYKNFEPLSRARGWKLYALDMLGMGNSSRPPFKIRAKDPKEKIAEAEGWFIDALEEWRKIRKIEKFTLLGHSLGGYLAVSYALKYPGRLNKLILASPVGVPEDPWAIDSSMPEPQESTLANEFTQDQESIVKGEPARVRAPAADNKSTTTIAAPPKRPIPSWLVWLWDANVSPFSIVRMAGPLGPRFVSGWTFRRFNHLPPAEKDALHMYSYSLFRQRGSGEYALPYLLAPGAYARSPLINRIQDVGRQVLRPATDTTPAVRETGIPVVFMYGENDWMDVAGGYAAEEKLKQRRVQALLNATDDEKRRENGSAKVIVVRKAGHNLYLDNPDEFNEVVLREMEETRQRRLRLGK

SEQ ID NO: 501 - DNA, 1014 bp, Myceliophthora thermophilia
atgtactactccaccttcacgacctcggacaactgccccctggcattccaatcgtccctgcccctcccgatcgccgccgccgaaggcgccagcgctcccaagacgtgcatcctcctgctgcacggcttctcgggctcctcggcctacttcacccgcaacgcggccgccctctcgtcctcgccggcggcccactgggtcgtctgcccggacatgcgcggacacggccggtccggccacaacccggcgcgcggcggctaccacgtggcgcgcctggccgccgacctgcgcgagctgctcgcccatctgcgacgacagctccccaccgccgaggccgaggccgccgccccgcccgcggtccggttcgtccccgtcgggtgctcgatcggcgcggccgtcgtgtggacgtacctggagctgtttggcgagcgggacggcggcggggaggacttatttgccgggttcgtcttcgtggaccaggcgccgctgcaggaccgggcggcgctgggactgggcggggcgtggggcgcggaggcggcgcaccgcgggtgcttcgacgaggccagcatgctggccgcgcagagggcgtgggtggaggagccggcgcggacgcaccgggcgctggtgcgggagtgcctcgggtatcggttcgcgcccacgcaggaggaggcggacgacgacgagggcgaggagcgggcgcgcagggacgaggacttcttcacgggcatcagcgccgtctgcgacggggtctggctggccaggctgctggccgatcacacgcggtacgaccaccgcgaggcatgcgaggccgtcaccaagccggtgctggtcatggccggccggcgcagcgggtgtttcccgctcgaggggatggaggagacggtgaggagggccagaaaggggggcaaccgggacgccgagatgatggtgtttgagtcggggcactggctgttctacgaggagcccgagagattcaaccgggagctgctcaagtttgtggagcggtgcacgagctga

SEQ ID NO: 502 - protein, 337 aa, Myceliophthora thermophilia
MYYSTFTTSDNCPLAFQSSLPLPIAAAEGASAPKTCILLLHGFSGSSAYFTRNAAALSSSPAAHWVVCPDMRGHGRSGHNPARGGYHVARLAADLRELLAHLRRQLPTAEAEAAAPPAVRFVPVGCSIGAAVVWTYLELFGERDGGGEDLFAGFVFVDQAPLQDRAALGLGGAWGAEAAHRGCFDEASMLAAQRAWVEEPARTHRALVRECLGYRFAPTQEEADDDEGEERARRDEDFFTGISAVCDGVWLARLLADHTRYDHREACEAVTKPVLVMAGRRSGCFPLEGMEETVRRARKGGNRDAEMMVFESGHWLFYEEPERFNRELLKFVERCTS

SEQ ID NO: 503 - DNA, 1131 bp, Myceliophthora thermophilia
atggctaatgcgagacctacggtcgacggcatcgccgtcgtcaacctcgcctcccccgaagagcagtcaggtgccgagagtgccgccgctgcccgcgcaaggcggctcaagaccgcccgggacgccgtcggccgcgctccgtcacgatggctgctgcgtgcctcggcggcgtggtggagatcgcttcagtatgtcgggatgacgctgcactttttggctcccgagcgaccgcccagcccttccttcagcaagaccatccggtcgacaatctccaagaccgaaggcgagttttccctgcagttctacacacccgaagggtatgagaccgcggccaagacgggaaccaagtttcctgccgtcgtcaattttcacggcggcggcttcaccattggcagtgccacggatgatgcccgcttcggccgtttcgtcctgaaagagtgcaacgccgtgtttgtcagcgtgaactaccggctcagtcccgagcacccgttccccgtggcggtggaggacgccgcagacgcgctgctgtacttgatccgctccggacccgaactgctcatcgacccatccaagctggccacctcgggcttctccgccggcgccaacctcgccatcacatcaaccctccgtctagcagaccacctcgagacgctcagacaggcgggcacccaagtgccggaccaccgcatccgcgccgtggccacgtggtaccccatcaccgactacaccgaaccacgggcgctcaagcgcgccgcctcggtccgaccagaccaaacccttcccgagacgcttacctccctcttcgacgcctgctacctgcaccccccagacctgccgctcgactcgtgctacctctcgccgagcatggccaccgacgagcacctcgcggccgccattccgcaaacggtcatcttcttcacctgcgagcacgatatgctaatgcaggaaggcgaggcgctggccaagcgcttgcgagagccccctatcagcaaggacgttcgatacaagatgatcaagggtgtggctcatgcctgggacaagtcgccggaccctacgaaaccagccgagtacagcgaagacctgtatcgagagtgctgcgggtacctgagcgaagcattcgagaagccgtga

SEQ ID NO: 504 - protein, 376 aa, Myceliophthora thermophilia
MANARPTVDGIAVVNLASPEEQSGAESAAAARARRLKTARDAVGRAPSRWLLRASAAWWRSLQYVGMTLHFLAPERPPSPSFSKTIRSTISKTEGEFSLQFYTPEGYETAAKTGTKFPAVVNFHGGGFTIGSATDDARFGRFVLKECNAVFVSVNYRLSPEHPFPVAVEDAADALLYLIRSGPELLIDPSKLATSGFSAGANLAITSTLRLADHLETLRQAGTQVPDHRIRAVATWYPITDYTEPRALKRAASVRPDQTLPETLTSLFDACYLHPPDLPLDSCYLSPSMATDEHLAAAIPQTVIFFTCEHDMLMQEGEALAKRLREPPISKDVRYKMIKGVAHAWDKSPDPTKPAEYSEDLYRECCGYLSEAFEKP

SEQ ID NO: 505 - DNA, 2082 bp, Myceliophthora thermophilia
atgagtggccgtggtgggagccgcgagagcggcgatggtgctgcagcaagtgatagcgatttggagaagaagggaagggacggggacggggacggccggtcgtctcacagccctcactattacgatgacgggctgttgtcccctgctaaccggcggctgccggactacaaagatgggcaatgggcagggccgctctcgcccgtgacggccgcgcgggaggagggtgtcggcgccgggccggcggtggtgctggtcctgtcgatcgtcttggtgctggtcgtccaggtcggtgtttggtgggtattgctgatgggcatgggctttggttccgaggatgggcgaaccgttgtcggtacagtgagagtcgacctcaactatacctcttatgaggggttgagactctcaaactgggtcaattccttccgaggcatgcgctatgctgccgcgccgataggggacttgagatggagggctccgcttgatcctattccgtctgacacggggacggtcgagaaggctgcagcgttccctcccaggtgtctcggtatcggctcagcctatcctacggatgatgagagcgaggattgtctgtttgtgaatgtctgggctccgacaaacgcgactgtgaagtctaagctgcccgtgtgggtgttcattcagggcggaggctacgtagccaacaccaacgcctactgggacggggctgaggccgtcgagaaatccggccacaacgtcgtcatggtcagcttcaactaccgtgttggcctctgggggtttctcgcgagcgagcgggtgagggacgacggggtcttgaacgtcggtttgttggaccagcggatgctgctgaaatgggtgaaaacgcacatcgcttcgtttggcggcgacccggaccacgtcgtcatccacggcgcctctgccggtgccggctccgtcgccatgcacctcatagcctacggcggccgtaacgacaacctctttatcggaggcatgaccgagtccctcttcttcccggcccagccctttgtccacgagctcgagtaccagtttgaccgagtggtgagccagacaggttgcgacggcgtagccccggaccggcagatggcctgtttacgctctaaggacgttgccgtactgcaggctgctaattacgcccagccgttccccggccgcccggacccgcccatgcccctgttctactggacgccctgtgtcgacggggatctcttgcgtgacctgccctaccgtctgttcgaaaagggacagttcatcagcgtgccggtggtgtttggcacatcaaacgacgagggctctgtcttcgtccccgacgccgacaccccctcggacgttgcccacttcctccgcaacaactaccccctcctcacggccaacgacaccaccgacatcctcacccactacccccaactgccgcccgtaccagcccataaaccctggttccccactgccagcaaagcctacggcgaagcaaccttcatctgcccaacaaacaatctcctctcttcataccctatccgccccccacaagtgaaaagcaacacaacagccgccaagacattcccttttccctcctcctcctcctcctccccttcctccccgtctccctcctctttcccctccaagaggacgaagaagaagaagagtaggacagaggcggaagccgcaggcgcggccgccgccctctacacctaccggtacaatgtccgcgacgaggctaccgtcgcccgcggcctcggcgtcccccacctctctgacgcacccgccatcttcggccccgggaacgtgcccgggcaggaagcggccagttacgagacgtacaacgccgctgttgtgccgctcgtcatgggctactggctcagcttcgtgcgcacgctcgaccccaacgtgttccgcgcgcccgggtcgccgagatgggagcccgtctggcaggagggaggcgatgccggagtgatgaggaggttgctgatcgagacggagggggcgaggatggaaacggtagacgcggccgagagggggaggtgcgggttctggaaagagttgggttcgggaaggatgaggcagaagtga

SEQ ID NO: 506 - protein, 693 aa, Myceliophthora thermophilia
MSGRGGSRESGDGAAASDSDLEKKGRDGDGDGRSSHSPHYYDDGLLSPANRRLPDYKDGQWAGPLSPVTAAREEGVGAGPAVVLVLSIVLVLVVQVGVWWVLLMGMGFGSEDGRTVVGTVRVDLNYTSYEGLRLSNWVNSFRGMRYAAAPIGDLRWRAPLDPIPSDTGTVEKAAAFPPRCLGIGSAYPTDDESEDCLFVNVWAPTNATVKSKLPVWVFIQGGGYVANTNAYWDGAEAVEKSGHNVVMVSFNYRVGLWGFLASERVRDDGVLNVGLLDQRMLLKWVKTHIASFGGDPDHVVIHGASAGAGSVAMHLIAYGGRNDNLFIGGMTESLFFPAQPFVHELEYQFDRVVSQTGCDGVAPDRQMACLRSKDVAVLQAANYAQPFPGRPDPPMPLFYWTPCVDGDLLRDLPYRLFEKGQFISVPVVFGTSNDEGSVFVPDADTPSDVAHFLRNNYPLLTANDTTDILTHYPQLPPVPAHKPWFPTASKAYGEATFICPTNNLLSSYPIRPPQVKSNTTAAKTFPFPSSSSSSPSSPSPSSFPSKRTKKKKSRTEAEAAGAAAALYTYRYNVRDEATVARGLGVPHLSDAPAIFGPGNVPGQEAASYETYNAAVVPLVMGYWLSFVRTLDPNVFRAPGSPRWEPVWQEGGDAGVMRRLLIETEGARMETVDAAERGRCGFWKELGSGRMRQK

SEQ ID NO: 507 - DNA, 1884 bp, Myceliophthora thermophilia
atgctgatccaggccaacccagccatctccacgacgatccggaacgcttctgattttgtcgacctctgcgctgcctttggatacacagctgaggaacacatcgtgcagaccaaggatgggtacttgctgggactccaccggctggcgtggaagaagggggaggagcatgtccgagcgaaccgcggccccaagagcgtcaagaaaagggtcgtctacctacatcatgggctcctgatgaacagcgaggtctgggtctgcctgaccgacgagcagcggaccttgccgttccgcctggtcgagaagggatttgatgtctggtttggaaacaaccgcggcaacaagtactccaagaagtccatccattcgtcgcctaactccgtcaaattctggaacttctccatcgatgagttcgccttccacgacattcccgacagcatcaactacatcctcgagaccactggccaggagtcgctatcctacatcgggttctcccaaggcactgctcaggcctttgcaagcctggcggtccacccgaggctcaacgatcaaatcaatgtcttcatcgctctcgctcccgccatgtccccggccggcctctccaacggggtggttgacgcgctcgtcaaagcctccccgcaggtccttttcctgctctttggccgccgctccatcctcagctccgccaccatgtgggagtctctgctctacccgccgctctttgccaagctcatcgatctgggtctgtccttcctcttcaactggcgcacccataacatcagcatgtcccagaagctcgccgcctaccctcacctctactccttcaccagcaccaagtcggtcgtccactggttccagatcatccgcaccaagtcattccagatgtacgacgacgacgtcccacccttatcccccttctcctcggccggcagcaggaagtacaccaaggtggctaggtacccgacccgcaacatccgcacgcccatcgtgctcgtctacggcggcagcgactcgctcgtcgacatcaaggccatgctgcgcgagctgccgccccagaccatcgccgccgagataccccactacgagcatctcgacttcctgtgggcacgcgacgtgcacgagcaggtcttcaggcacgtctttgacgcgctcgagagcttcacggggccggagcacacacgcgaggagtacgcgcggtatcagttagccaggcagaattcggatttggcggcacgcgcgggtgcgagtggcggcgggcacggtggtagtgccgtcgggaagaacacgcgggcgcatgtggcaagaggaagcgacgtggcggatagcgacgtcagcacggccgtgggcgggtgtagcacccatgaggaggaagaggaggaggaggaggaagaggaggaggatgacgaagagaacgagagcgaggtgggcggtggcactaccttagcaggcagagctgccggggccagggtcggagcgggtacggagacaggggacagctccggctcgcccctgcgatcgcctagccatgccggcgggcagagcccgttgagggccgtcgccccgcgactgggcgacgcgccgccggtggcggatgcgaacgtcgctgtggagcggccggaggatgccgcgcccccggccgcggcgagcttaccgcgcgtcacggtggcggcacccctcgtttcccagaaggggagcagtcagctgagtccggattcgatgagggacgggaagggcatcagtctgggggctagcaaagcggtgggcggcgtgactaccgggggggttgaggtcggcagattgaagggatcgtcaggaggtgcggccgcggccgcggccgtcaggagccctgccggcgcccggaggcattctgtccgtgccaagaagtag

SEQ ID NO: 508 - protein, 627 aa, Myceliophthora thermophilia
MLIQANPAISTTIRNASDFVDLCAAFGYTAEEHIVQTKDGYLLGLHRLAWKKGEEHVRANRGPKSVKKRVVYLHHGLLMNSEVWVCLTDEQRTLPFRLVEKGFDVWFGNNRGNKYSKKSIHSSPNSVKFWNFSIDEFAFHDIPDSINYILETTGQESLSYIGFSQGTAQAFASLAVHPRLNDQINVFIALAPAMSPAGLSNGVVDALVKASPQVLFLLFGRRSILSSATMWESLLYPPLFAKLIDLGLSFLFNWRTHNISMSQKLAAYPHLYSFTSTKSVVHWFQIIRTKSFQMYDDDVPPLSPFSSAGSRKYTKVARYPTRNIRTPIVLVYGGSDSLVDIKAMLRELPPQTIAAEIPHYEHLDFLWARDVHEQVFRHVFDALESFTGPEHTREEYARYQLARQNSDLAARAGASGGGHGGSAVGKNTRAHVARGSDVADSDVSTAVGGCSTHEEEEEEEEEEEEDDEENESEVGGGTTLAGRAAGARVGAGTETGDSSGSPLRSPSHAGGQSPLRAVAPRLGDAPPVADANVAVERPEDAAPPAAASLPRVTVAAPLVSQKGSSQLSPDSMRDGKGISLGASKAVGGVTTGGVEVGRLKGSSGGAAAAAAVRSPAGARRHSVRAKK

SEQ ID NO: 509 - DNA, 1038 bp, Myceliophthora thermophilia
atgattctcctccacggccgcgggttcagctcgagcacctttggccccgacctcatctccacctctttccccttgcccccgtccccatctctctcccctgaccctattctctcaccggcaccggcaccggcgccggcaaaggaagaggaggaggaagtgaagaaggaaggggaggaaggaggagaagaggaggaagaggaagagcgagccgccctcgggtcgctgcgcaccctgcgcacgctctacccgcacgccaagttcctcctccccacggcgccgcgccaccgggccaccatctacgcgcgcagcctcgtgcgccagtggttcgacggctggcacctatacgcccgtgacgacgacgacggcgacgaggaggaggaggaggaatggcggtgcatcccgggcctgcgagacaccgtcgcgcacgtgcacgagctcgtccgcgccgaggcggcgctggtcggcggcacgcggaacgtcgtcctgggcgggctcagccaggggtgcgcggccggcctcgcggcgctgctgctgtgggacggggaggagccgctggccgggttcctgggcatgtgcgggtggctcgtctttgagcgggccctccgccgggcgatgtcggaaggggagggagacggcggggaggaaggggaagatgacgggtttgatccgtttgagagggaggaggaggaggagaacgaggacgggggcgggatgggcgagaagcaggaagaggtgagcgtggaggctaaggtggtgagggcgctgcgggagacgctggagctggatgatggaaaggggccgacgtgccggccgagggcgttcgatacccccgtgtttctggggcacgggctggacgacgacaaggtcccaatttcccgtggaaggggttctgccaagttcttgaaggccgccgggatgcacgtcgagtggaaagagtaccacggcctcggccactggtactccccggccatgctctccgacatggtgtcgttcctagcacaccaaaccgactgggatcgtgacagaaaaccgtcgtga

SEQ ID NO: 510 - protein, 345 aa, Myceliophthora thermophilia
MILLHGRGFSSSTFGPDLISTSFPLPPSPSLSPDPILSPAPAPAPAKEEEEEVKKEGEEGGEEEEEEERAALGSLRTLRTLYPHAKFLLPTAPRHRATIYARSLVRQWFDGWHLYARDDDDGDEEEEEEWRCIPGLRDTVAHVHELVRAEAALVGGTRNVVLGGLSQGCAAGLAALLLWDGEEPLAGFLGMCGWLVFERALRRAMSEGEGDGGEEGEDDGFDPFEREEEEENEDGGGMGEKQEEVSVEAKVVRALRETLELDDGKGPTCRPRAFDTPVFLGHGLDDDKVPISRGRGSAKFLKAAGMHVEWKEYHGLGHWYSPAMLSDMVSFLAHQTDWDRDRKPS

SEQ ID NO: 511 - DNA, 816 bp, Myceliophthora thermophilia
atggcgaactcataccctcagatcgttctctttggagactcgctcttccagggtaccgccgatgtgtccggcggcttttctttccaggctgctcttcagacacaggtcctacgccggttcgacgttatcaaccgcggcttctcaggatacaacacatccaatgccctaagcatacttccgcaggtcttttcaccgccgacacccggtggaccagaactcaagtacttgttcatcctcttcggcgccaacgatgcagccgtcccgcttcccaccaactttcagcatgtgcccctggacaagtacaaggagaaccttgcccgcatcatcaaccatcccatcatcacggcgcacaagcccaaaatcttcctcgtcacaccaccacccttagatgagattcgcgtgaccgtactcgaccgggccaacggacatccctccgcggcaaggcggaccaaggttagcgcggcttactccgaagccgtccggcaggtcgctgcggagcaccccggtgtgacgctgatagatcttcacaaggcgctcatggacagggccattgagatgacgccgggcttcgaccccaagggcccggcgctgggcgatccggagggcggcgttcgcgggtacctcgagcatctgcttccggatgggctccacctaagcaccgagtcataccgcatcttctacgatctggtgcggccccatatcggctctgaatgggctggaaccaaggacgaggacagagttgggtatgtactgccggactggcgtaacgcgccgtggctcgaagaagaccagcacctccgaggcaagtctctataa

SEQ ID NO: 512 - protein, 271 aa, Myceliophthora thermophilia
MANSYPQIVLFGDSLFQGTADVSGGFSFQAALQTQVLRRFDVINRGFSGYNTSNALSILPQVFSPPTPGGPELKYLFILFGANDAAVPLPTNFQHVPLDKYKENLARIINHPIITAHKPKIFLVTPPPLDEIRVTVLDRANGHPSAARRTKVSAAYSEAVRQVAAEHPGVTLIDLHKALMDRAIEMTPGFDPKGPALGDPEGGVRGYLEHLLPDGLHLSTESYRIFYDLVRPHIGSEWAGTKDEDRVGYVLPDWRNAPWLEEDQHLRGKSL

SEQ ID NO: 513 - DNA, 1428 bp, Myceliophthora thermophilia
atggctgaaacgatagcagcaacgacatcggcagaggcggcagccgacggcgacccgacccggctcgtagtgccgcgctggccgctctcctcgcgtctcaagtacgccgtcatcgcattcctctggaagaggttgatcctcaagccattgctgtactacagcgagttcaagaaatactttatccctccaggcgagaacgagccggatcatgtcaaggcttacccggtgcgaaagtctctcaaggtccgaattttcttcccaccctcctacaacccctcgacctcctcgccggaaaccaccaccaagctgcccaccctcctcacctgccacggcggcggcttcctggtcggggagccgcacgacaacgacgcctggaaccgcgcgtcgccaagcgcccacggctttctggtcatcgccctcgactacagcaaggggccccggcaccgctttccggccgccgtgcacgacgtcgaggcgctcgtcggctgcatcctggccgaccggtccctgcccgtcgacgccgcccgcgtcgccgtggccggctggtccgccggcggcaacctcgtcctggccgcctccctcctgccctcgctgcgcggccgcatccgcgccgcccgccacggctttctggtcatcgccctcgactacagcaaggggccccggcaccgctttccggccgccgtgcacgacgtcgaggcgctcgtcggctgcatcctggccgaccggtccctgcccgtcgacgccgcccgcgtcgccgtggccggctggtccgccggcggcaacctcgtcctggccgcctccctcctgccctcgctgcgcggccgcatccgcgccgccgtgcccctctacccgctcctcgaccgtgccaccgccaccgccgtcaagacccgcacccgccggtacaagcccgccctgggcgggttccgcgcccgcgacggcgacttcgtcgcccccatgatgggcctcttcgactgggcctttctccgccccggccagcgctgcgacgaccccctggtgagtccgtgctacgccccgcgggagcacctgcccgcgggcgtgttcctgatcggctgcgagttggacatgctggcgcacgaggcctggcgcgtggcctgccggctcgcggggaggagggtcccctcgctggacgagcccgtcgggcgcgaggaggcggggggcaagggggagctggtcaccgggggcgacgagcggttcgcgtgggaggaggagacggcggaggaggacggggggttacgggtcaggtggctgctcgtgcccgacaccgtccacgggttcgaccagagcaacatcgaggggctggtcaaggatccggtcttcatggaggatgcgcgcatcaagacggtcaaggtgattgacttggtcggggagtggctgctcagcgggccattgcaggcaacgaagtcctga

SEQ ID NO: 514 - protein, 475 aa, Myceliophthora thermophilia
MAETIAATTSAEAAADGDPTRLVVPRWPLSSRLKYAVIAFLWKRLILKPLLYYSEFKKYFIPPGENEPDHVKAYPVRKSLKVRIFFPPSYNPSTSSPETTTKLPTLLTCHGGGFLVGEPHDNDAWNRASPSAHGFLVIALDYSKGPRHRFPAAVHDVEALVGCILADRSLPVDAARVAVAGWSAGGNLVLAASLLPSLRGRIRAARHGFLVIALDYSKGPRHRFPAAVHDVEALVGCILADRSLPVDAARVAVAGWSAGGNLVLAASLLPSLRGRIRAAVPLYPLLDRATATAVKTRTRRYKPALGGFRARDGDFVAPMMGLFDWAFLRPGQRCDDPLVSPCYAPREHLPAGVFLIGCELDMLAHEAWRVACRLAGRRVPSLDEPVGREEAGGKGELVTGGDERFAWEEETAEEDGGLRVRWLLVPDTVHGFDQSNIEGLVKDPVFMEDARIKTVKVIDLVGEWLLSGPLQATKS

SEQ ID NO: 515 - DNA, 2685 bp, Myceliophthora thermophilia
atgcacacggcgagcgtcggcttggcagtaacgccgaccatcatctctaccttcttgtcgcattacttacatcgaaaacccctggcccacaaaccagcagcccatctctcgtatgacgagggcctgcatctgatccgctcctttctggttcatgcctcgcgccacaccgtcgaggagctgcaagccttcaccagccagtgggtaccgcatccccggtgggtaagggtcgaccatgtcacgattcccgagcaggacctcgcgcgcgccgcgcaacttttggtagagcagctgggacccgagggcatccgtcaggtcggcggcagggagtggtggcagtggcgcaagcccaagagcccgctcaaggcagagtggatcgagatgaaggccgattaccagaagcgcaagaagaatgcggatccgggcaaccgtgtcatgctctacatccacggtggcgcctactactttggcagcgtcgacgagcatcgctaccagatccagcgccatgcgcggaagctcaaggcgcgagctctggccccgagataccggctcgctccccagttcccctttccctgtggcctccaggactgcctcgccacgtacctctacctcatctcgcagcagaggccaaacacaatcatccttgccggcgactcggcaggcgctggcatggtcttgagcctgatggtcattctcagagacaggggcatcccgcttccggcgggcgccgtgctcatcagtccctgggtagacttgacgcactcttttccgagcgtcgccggggactgcccgctggactacctcccaccgtcgggcttccatcacaagccgtcgctggcatggccgcctcccgacgaggaagaactggaagcgctcaagaaggcggcatcggtgcagaaaaagagcatcgtcgcgcaagaaggccggcatgctgaagagagcggcatgccaacggtccaggacgttgccaagaccacgcaccgcatgacatttgtcattgacggcgagcaagtcgaaatcaaggagcagattcagatgtacaccaccaacgagctgctagcccacccgttggttagccccgtcatgcaacccaccttgggcggtcttccacctctgctcatcatggtcggaggcggtgaattgctgcgcgatgagcagatataccttgcacacaagtgtgccaaccctgcgcaatacctgccgcccgaagccttgatgaacgaggaggccaaagcgttggtcgaccgatataaacccacggatgttcagctgcaggtgtgggacgacctgtgccatgttgctcctacgctcagctttacgaggcctgccaaatacatgtataggagtgttgcgcagttttcggcgtgggcattggcaagggcccagaacaccgaggttgatattctctgcgacgacgagatctcggtcatttcgagctcgagctcaagctcgagctcttcgagcgggagccaggagaagaaggtttctaagcgggcccctcaaaacagcagcaaagaaaaggccgattatcacgcttcaatcggcaaagcaggcgacccccttccggcctttgaaaaccacatgattcgccaacgggtcacccaccacggtgccattctgcccctcccggaacccgccgagctgccgggctgccgcatggcgcgcgacctcgtcggcgtcgtcaaggttggcaccgtgcgcaagtggctcgagcacaagaggcgctgggacgcccgcttccaacacactaaagcgcgcgtgcaccgccggcgcctgcgcgacgtggagcgcggcgggtacgaggtgtttggcgagggcgaggtgccgccgccgagcgcgctcgccgggcggcgcaaggtgggcgaggccctcaagcaagacagggaggccaagaggaagagggccaggaacttcggcatgtcgctctgggcgctgtgggggtccaagcacgacgaggcgaccatgcacagggaggcgcttgctgccaaggcgcccgaggtgggcgttgcggtccccgggcagggcgagggcgccagaacgttttccgacttggagaagcaagaggaggagttggccagggaggacggggaggcgccgccttcgcagaccgggagggtaccgtcctggagggaactggtcggagagaagcaggtggagagcgccggcggcgcccccgcgtcgtctgcagagggtggcctggacttgcgtcctgccgggccggtcggtgatggggacgctggggaagagggaggagcagcagcaggagcagcaccctcggagtctgccaggctgctctcacaggatgatgctgcacttcatacgggcgtcactggaaagcgggtcatgattggcgggttggcaacgcccttcagcctgcgcagagaacccgagactgcgagcatggttacgctggcgacaccgatggaccagagatcgacccgcttgtcaacggcagactcgagcagctttgtagcggctccgtctgtgaaaaccacggaaggccaggaggaaaatgcggaagactcgggtgttgctctgcacgagggatcgggggttgacccgggagagacacccgggtccgccacgccgtttgcgacaccgttcctgtcgcctaccacgccgggcgagagaccaggtttggagaggtttgtaactgccgaggaggatgttgcaaaggcgaattcttga

SEQ ID NO: 516 - protein, 894 aa, Myceliophthora thermophilia
MHTASVGLAVTPTIISTFLSHYLHRKPLAHKPAAHLSYDEGLHLIRSFLVHASRHTVEELQAFTSQWVPHPRWVRVDHVTIPEQDLARAAQLLVEQLGPEGIRQVGGREWWQWRKPKSPLKAEWIEMKADYQKRKKNADPGNRVMLYIHGGAYYFGSVDEHRYQIQRHARKLKARALAPRYRLAPQFPFPCGLQDCLATYLYLISQQRPNTIILAGDSAGAGMVLSLMVILRDRGIPLPAGAVLISPWVDLTHSFPSVAGDCPLDYLPPSGFHHKPSLAWPPPDEEELEALKKAASVQKKSIVAQEGRHAEESGMPTVQDVAKTTHRMTFVIDGEQVEIKEQIQMYTTNELLAHPLVSPVMQPTLGGLPPLLIMVGGGELLRDEQIYLAHKCANPAQYLPPEALMNEEAKALVDRYKPTDVQLQVWDDLCHVAPTLSFTRPAKYMYRSVAQFSAWALARAQNTEVDILCDDEISVISSSSSSSSSSSGSQEKKVSKRAPQNSSKEKADYHASIGKAGDPLPAFENHMIRQRVTHHGAILPLPEPAELPGCRMARDLVGVVKVGTVRKWLEHKRRWDARFQHTKARVHRRRLRDVERGGYEVFGEGEVPPPSALAGRRKVGEALKQDREAKRKRARNFGMSLWALWGSKHDEATMHREALAAKAPEVGVAVPGQGEGARTFSDLEKQEEELAREDGEAPPSQTGRVPSWRELVGEKQVESAGGAPASSAEGGLDLRPAGPVGDGDAGEEGGAAAGAAPSESARLLSQDDAALHTGVTGKRVMIGGLATPFSLRREPETASMVTLATPMDQRSTRLSTADSSSFVAAPSVKTTEGQEENAEDSGVALHEGSGVDPGETPGSATPFATPFLSPTTPGERPGLERFVTAEEDVAKANS

SEQ ID NO: 517 - DNA, 1299 bp, Myceliophthora thermophilia
atgcgttccgactcgcagtttgcgcctgaccgcggcgcacccgtagccaccacacgcaacggaacctacgttggccgctaccttgccgaattttcccaggaccttttcttggggatccccttccccaaagccgggcgactggaaaatccgtcaccttataacgagtcgtgggaagtcacacgatcagcagagtggcttggaaacatctgcccctgcccggcctcgccgcagagcatccgtaatgccaacgtgaccggaatatcggaagattgccgaaacctcaacaccatccggccgtcgcaagccacgctcaagaggaaggatgagaagctcccggtggctgtgtggttctacggcggagatattgccgatttctcctggatagtgcaggagagcctggcacaagacatggctatcatggccgtgacgctcaactacggagtcggcttcctcggctttccaggcggaacggaagttgcggctgcgggagtgacaaacctcggacttaaggaccagcgccaggcactacgctggatccaagagaacattgcggcctttgggggggatctggacaaggtgacagtatgggggcaatcggccggcgccaactccatcgcctaccagctgctggcttacggagctaagaccgacgagaagctgttccgaggcgccatcatgagcagcgggtcgatcggcattgggaacgccgtccaccccgatcgcgaagatgccgtgcaagggtaccgagccgttctcaacgcgacgaactgcctcgacgccgaggacgccctcggctgtctgcgcgccgtgcccctcgacgaggttttcgaagctggagaagcaacaggtacccatccgacgtggtggcccacagtcgacggtgacttcattccacagccgccgtccctccagctcgaggccggcgagttcctcgtgacgtgtccctcctctcagggaccaacgacgacgaagttgaagcgcttcgtcctggccgacatcgatccccatccagacgcagtaccaggcgcagccgggattcagtacagctacttctttcgcttcctccgagactacgatctgtacgggaacaacccgcctgtggcgacttcgagctcgcatctagtgctgttccatgctatctcggccatgctgatcgcgtatgtctacatgggcgattccaactcagtacatatctcgagcgtgccagtctggccaaagtatagcgtcaagaagccgtctaaccttgtcttcaatgctaccgagacccccgatgtcctgaacatacgcgttcgagcctga

SEQ ID NO: 518 - protein, 432 aa, Myceliophthora thermophilia
MRSDSQFAPDRGAPVATTRNGTYVGRYLAEFSQDLFLGIPFPKAGRLENPSPYNESWEVTRSAEWLGNICPCPASPQSIRNANVTGISEDCRNLNTIRPSQATLKRKDEKLPVAVWFYGGDIADFSWIVQESLAQDMAIMAVTLNYGVGFLGFPGGTEVAAAGVTNLGLKDQRQALRWIQENIAAFGGDLDKVTVWGQSAGANSIAYQLLAYGAKTDEKLFRGAIMSSGSIGIGNAVHPDREDAVQGYRAVLNATNCLDAEDALGCLRAVPLDEVFEAGEATGTHPTWWPTVDGDFIPQPPSLQLEAGEFLVTCPSSQGPTTTKLKRFVLADIDPHPDAVPGAAGIQYSYFFRFLRDYDLYGNNPPVATSSSHLVLFHAISAMLIAYVYMGDSNSVHISSVPVWPKYSVKKPSNLVFNATETPDVLNIRVRA

SEQ ID NO: 519 - DNA, 1548 bp, Myceliophthora thermophilia
atgagcgagctgcagaagaagtgggccaaagcaaggatcaccacagccatgcacacgatggcaccgccgccatctctcaccgacttgggcgagcccgacgaggaccgatacagctcgtacagtacgggctccgtgcccaacacaccccaggacgacgactcatcgtcagcttcgtcggtgtcgtccacgggaaccgtcatcccatcgccagggagagcactctttgcccggccacaaggattcccaaaccgctcgctcgacccgatcccctggacggcgtactttgagcgcgagctgttccttccatcccccgacggctccatcacttatcacgcctacctcacctctccagcgccggccgctggcccgggcaaggtaggcgggcccttgtttgtcacccaccacggcgccggcagctcgggcctgtcatttgcggtcctcggcgccgagatcaggaagcgcttacctaccgccgggatcctctctctcgatgcaagggggcatggctcgacgacgacgactgcgactgccggtactgctgctgcggcggcgacgcagagggagggcgcgatcgaagatctttcgctctccaccctcgcgtcggacctgctggccgtcatgatgctgacgaaagctgccatgcactggccgtccttgccgccggtcatattggtgggccactcgctgggcggcgcggtcgtgaccgagttcgcctccgtcctgctcccaagcatacgatccggccttgcccccgcccctcccggtaccgccgtcaccaccaccaccactgccaccaccaccaatgccactgctgccgccgccaggacgaacctggacctcgacgtcctgggctacgcggtcctagacgtggtcgaggggtccgccatggacgccctgcagagcatgcacgcctacctcgcgacgcgccccgccggcttcgagtcgctgcgcgacgccgtcgagtggcacgtccgctcgcgcaccgtgcggaatgccgtcagcgcgcgcgcgagcgtgcccggcctgctcgtgcagacccagcaccccggtcacggccccggcggcgccggttccgccgaaggcggccacgggaccgggttgggtcaggaaggaggaggagaaggaggaggaagggtgccaggcgtgcctgttgatgacggtagaggtggtggccgtcagggtcaaggtcagggcggcggcgggagcggaaaggccgacaagccctggcggtggcggaccgacctggcaaagacgcaacccttctgggagggctggtttacgggactgagcaagaagttcctgggcggcaggggcggcaagatgctgctgctcgccgggacggaccggttggataccgagctgacgattggccagatgcagggcaagtatgcgctgcaggtgtttcccgaggccgggcatttcatccacgaggacttgccagagaagacggccatggcgctggtggacttccacaggcggaatgacaggagcacgctggtactgccgcccaaggtatcggatctcctggctcaggggaagaaggtataa

SEQ ID NO: 520 - protein, 515 aa, Myceliophthora thermophilia
MSELQKKWAKARITTAMHTMAPPPSLTDLGEPDEDRYSSYSTGSVPNTPQDDDSSSASSVSSTGTVIPSPGRALFARPQGFPNRSLDPIPWTAYFERELFLPSPDGSITYHAYLTSPAPAAGPGKVGGPLFVTHHGAGSSGLSFAVLGAEIRKRLPTAGILSLDARGHGSTTTTATAGTAAAAATQREGAIEDLSLSTLASDLLAVMMLTKAAMHWPSLPPVILVGHSLGGAVVTEFASVLLPSIRSGLAPAPPGTAVTTTTTATTTNATAAAARTNLDLDVLGYAVLDVVEGSAMDALQSMHAYLATRPAGFESLRDAVEWHVRSRTVRNAVSARASVPGLLVQTQHPGHGPGGAGSAEGGHGTGLGQEGGGEGGGRVPGVPVDDGRGGGRQGQGQGGGGSGKADKPWRWRTDLAKTQPFWEGWFTGLSKKFLGGRGGKMLLLAGTDRLDTELTIGQMQGKYALQVFPEAGHFIHEDLPEKTAMALVDFHRRNDRSTLVLPPKVSDLLAQGKKV

SEQ ID NO: 521 - DNA, 1104 bp, Myceliophthora thermophilia
atggctgaccgtccaacattgctccggccgcctcctgaggaccccgacaaggcgcagatcgaaaatgccttggaggtgatcgagctggccgtcctgggtcctaacatcttcaccaacgcccgccagccctggcaccccccgggagcccgcggcatctatggcggcgccgtgatcgccatgtgcctggccgcggcgcagcgcaccgtcgcgccggatttcctcgtccactcctgccactgctacttcctcctggccggctcctccgagctgcccatcctcttccacgtcgagcaggtccgcgacggccgctccttcgccacccgcaccgtccaagcccgccagcgcggccgctgcatcttcaccaccaccatctcctttgtccgggacacccccacctccaccaccagcagcagcagcagcagcagcagcagcaacgacaacgggggcgtccgcaccgtcagccacgcgagcgagatgccgcgcgggccggacggccagccgctgcggcctcccccggacgactacgccgacgagccggaggtgatggcgcagggcccgttccaggggaccaagatcgagatcgtcagcgacggggcggacggcggcgacaaggccgggtccaagaagacgcggcagtgggtgcgggcgcgggggcggatccgcggcggggtggcggcgcagctggaggcgctcgcgtacgtgtccgacagctacttcatcggcaccatcacgcgcatccaccggctctggcggttccccttcccgcccgaggagtacgaccgcctgccggccgacctgcaggccaagatccgcaccgtgcaccagtgggagggcatgggcgacgacccccgcgagatggccggccgccccgtcatcggcatgatggtcagcctcgaccacaccatctacttccacgaaccccgccgcgtccgcgccgacgagtggatgctgaccgagatggagagcccctgggccggcgacgagagggccgtggtcatgcaaaagatcttcagcaaggacgggacgctgctcgcgacctgcgtccaagaggggctcgtccgtctccagcagcccgctgccaagggcaacgagtcgaaattgtaa

SEQ ID NO: 522 - protein, 367 aa, Myceliophthora thermophilia
MADRPTLLRPPPEDPDKAQIENALEVIELAVLGPNIFTNARQPWHPPGARGIYGGAVIAMCLAAAQRTVAPDFLVHSCHCYFLLAGSSELPILFHVEQVRDGRSFATRTVQARQRGRCIFTTTISFVRDTPTSTTSSSSSSSSSNDNGGVRTVSHASEMPRGPDGQPLRPPPDDYADEPEVMAQGPFQGTKIEIVSDGADGGDKAGSKKTRQWVRARGRIRGGVAAQLEALAYVSDSYFIGTITRIHRLWRFPFPPEEYDRLPADLQAKIRTVHQWEGMGDDPREMAGRPVIGMMVSLDHTIYFHEPRRVRADEWMLTEMESPWAGDERAVVMQKIFSKDGTLLATCVQEGLVRLQQPAAKGNESKL

SEQ ID NO: 523 - DNA, 879 bp, Myceliophthora thermophilia
atggccttcgaaaccaaagccaccatcgcctccttcgggggcaagctgttcaagctctcgcaccagtccgaagagacgacgaccccgatggccgtgaacctctacctgccgccgcagagcttcgcctcggacccgccgccgcgggtgcccgtgctcttctacctctcgggcctgacgtgcacgcccgagaactgctccgagaagggcttcttccagcaccgcgcctcgcagctcggcctcgccgtcgtgtacccggacacgtccccgcgcgggctcggccacccgggcgagacggactcgtgggacttcggcgccggcgccggcttctacgtcgacgccacccgcgacccctggcgccgcggctaccgcatggagagctacgtcgcccgcgagctgccccgcgccctcttcggcgacccgcagtacggccgcttcctggacccggaccgcgtctccatcacgggccactcgatgggcggccacggcgccctgacgctctacctcaagaacccgggcctctacaagagcgtcagcgccttcgcccccatcgccaacccctcccgctgcccctggggcgagaaggccttctcgggctacctcggcccggaccgcgacgagtggaagaagcacgacgccaccgagctcatccgcgcctggaagggcggcgacctcaaggccctcgtcgacgtcggcaccgcagacaacttttacaagcagggacagctgctgcccgagaacttggagaaggccgccaaggaggccggcgtggagggcttgacagtgcggtatcacgaggggtacgatcactcgtactacttcatggcaacctttagcgatgatcatgtcaaccacgcggcaaagcacctgggtttgctttga

SEQ ID NO: 524 - protein, 292 aa, Myceliophthora thermophilia
MAFETKATIASFGGKLFKLSHQSEETTTPMAVNLYLPPQSFASDPPPRVPVLFYLSGLTCTPENCSEKGFFQHRASQLGLAVVYPDTSPRGLGHPGETDSWDFGAGAGFYVDATRDPWRRGYRMESYVARELPRALFGDPQYGRFLDPDRVSITGHSMGGHGALTLYLKNPGLYKSVSAFAPIANPSRCPWGEKAFSGYLGPDRDEWKKHDATELIRAWKGGDLKALVDVGTADNFYKQGQLLPENLEKAAKEAGVEGLTVRYHEGYDHSYYFMATFSDDHVNHAAKHLGLL

SEQ ID NO: 525 - DNA, 567 bp, Myceliophthora thermophilia
atggccactcaagaccaagtcgcccctactcctgcgccggcagcagaagctcaagcaccggctgccgcggccgccgccgcggccacccgatccgactctgacccttccatcttggcgcacgtcgagcactaccatgcgacgcgctgcgcggcgtcgcccatctacgcctttctcctcggcacgccggccgacaagccgctggtgcgcttcacgcatgcacgcaaggggctcttcacggcccgcttgcggctcgacgcccagcatctcaactcggccggcggcatccacgggtccgtctccgccacgctggtcgactgggccggcgggctcgccattgcagcctgggacctacgcgccgccaccggcgtgagcgtcgacatcaacatctcgtacctgtcgtcggcccggctcggcgacgagatcgagatcgagggccgcgtggagcgcgtcggctccaacctggcctttaccgaggtccgcatcttcaaggtggacgctcgcggagagaggggcgccgtggtcgcttcggggaggcacaccaagtttgtgagagacactaagaaatga

SEQ ID NO: 526 - protein, 188 aa, Myceliophthora thermophilia
MATQDQVAPTPAPAAEAQAPAAAAAAAATRSDSDPSILAHVEHYHATRCAASPIYAFLLGTPADKPLVRFTHARKGLFTARLRLDAQHLNSAGGIHGSVSATLVDWAGGLAIAAWDLRAATGVSVDINISYLSSARLGDEIEIEGRVERVGSNLAFTEVRIFKVDARGERGAVVASGRHTKFVRDTKK

SEQ ID NO: 527 - DNA, 999 bp, Myceliophthora thermophilia
atggccccttcggcaatctctcccgctcagcagcatgctcagctcgccttcgcccccaagaaggtcaaagatgccgctgccgaggttgaggaccgcgccgccggcctgaccaagcctctggccgagatgatgggcaactgggacgactttagctttgccccgatccgcgagagcaccgtctcgcgcgccatgacccgccggtactttgccgacctggacaagtacgccgagtccgacatcgtcatcatcggcgcgggctcctgcggcctgtctgcggcgtacacgctcggcaagctgcggccggacctgcgcatcacggtgatcgaggcgggcgtcagccccggaggcggcgcctggctgggcgggcagctgttcagcgccatggtgatgcgcaagccggccgacgtcttcctgcgcgaggtgggcgtgccctacgaggacgagggcgactacgtggtcgtcaagcacgccgccctcttcaccagcaccgtgctgtccaaggtgctggccatggacaacgtcaagctgttcaacgccaccaccgtcgaggacctcatcacccgccccgacccggacagcgaggacatcggccccggcgtccgcatcgccggcgtcgtcaccaactggaccctcgtgtccatgcaccacgacgaccagagctgcatggaccccaacaccatcaacgcgcccgtggtgatctccactactgggcatgacggccccttcggtgccttctcggtcaagcgcctggtcagcatgaagcagctcgagcagctcgagggcatgcgcgggctcgacatgcagcgggccgaggacgccatcgtcaagaacacgcgcgagatcgtgccgggcctgatcgtcggcggcatggagctgtccgagatcgacggcgccaaccgcatgggccccacgttcggcgccatggccctgagcggcgtcaaggccgccgaggaggccatccgcgtctttgacctccgcaagaagcagaacgagatctga

SEQ ID NO: 528 - protein, 332 aa, Myceliophthora thermophilia
MAPSAISPAQQHAQLAFAPKKVKDAAAEVEDRAAGLTKPLAEMMGNWDDFSFAPIRESTVSRAMTRRYFADLDKYAESDIVIIGAGSCGLSAAYTLGKLRPDLRITVIEAGVSPGGGAWLGGQLFSAMVMRKPADVFLREVGVPYEDEGDYVVVKHAALFTSTVLSKVLAMDNVKLFNATTVEDLITRPDPDSEDIGPGVRIAGVVTNWTLVSMHHDDQSCMDPNTINAPVVISTTGHDGPFGAFSVKRLVSMKQLEQLEGMRGLDMQRAEDAIVKNTREIVPGLIVGGMELSEIDGANRMGPTFGAMALSGVKAAEEAIRVFDLRKKQNEI

SEQ ID NO: 529 - DNA, 1179 bp, Myceliophthora thermophilia
atgccaaccacgtacgccggcatcacctcgcaagaggtgcacgccaagatcgagctgctcatctcggccatggtcaacatccgggacaagacgggcgagttcctgctgacgctgccggacgggcgcgtcatcgacaccaaggggtggcaggactgggagtggacgcacggcatcgggctgtacggcatctggcagtactaccagctgaccaacgagccgcgctacctggccatcatcgaggactggttcgccgcccgcttcgccgccggcggcaccaccaagaacatcaacaccatggccgccatgctcaccctcgcctgcgtctacgagcggacgggcaacccggcctacctgccctggctcgacgcctgggccgagtgggcctaccacgacctggagcgcacccgccacggcggcatgcagcacatcacctacctcgaggagaaccgcgaccagctgtgggacgacaccctcatgatgaccgtcctgcccctcgccaagatcggcttcgtcctccgccgcccccactacgtcgacgaggcccgccgccagttcctcctccacgtccagtacctgttcgacgccaagaccggcctcttcttccacggctggcagttccacgaggacggccgcccgggcggccacaacttcgccgaggcccgctgggcccgcggcaacagctggctgaccatcgccattcccgagttcctcgaactgctgcgcgagggcgccgccagcagcagcagcagcaacggcggcagcagcaacgacgtggcgctcgaggcgtttctgcggagcacgctgcgggcgcagtgcgaggcgctgcggccgctgcaggatccgacgacgggcctgtggcggacgctgctggacgtgcccgagtcggaagggtcgtacgcggaggcgagcgcgacggccgggttcgccttcggcgtgctcaagggcctgcggcggcgggacctgcccgcgggggccggcgagttcgaggacatggccgtccgcgccgtccgcgccgtcctggccaacgtcagcgacgacggcgagctgctcaacacctccttcggcaccggcatgggccgcgacctgcagcactacaaggacatccccgtcaccagcatgccctacgggcaggccatggccatcatggcgctggtcgagttttcgaggagatttatctga

SEQ ID NO: 530 - protein, 392 aa, Myceliophthora thermophilia
MPTTYAGITSQEVHAKIELLISAMVNIRDKTGEFLLTLPDGRVIDTKGWQDWEWTHGIGLYGIWQYYQLTNEPRYLAIIEDWFAARFAAGGTTKNINTMAAMLTLACVYERTGNPAYLPWLDAWAEWAYHDLERTRHGGMQHITYLEENRDQLWDDTLMMTVLPLAKIGFVLRRPHYVDEARRQFLLHVQYLFDAKTGLFFHGWQFHEDGRPGGHNFAEARWARGNSWLTIAIPEFLELLREGAASSSSSNGGSSNDVALEAFLRSTLRAQCEALRPLQDPTTGLWRTLLDVPESEGSYAEASATAGFAFGVLKGLRRRDLPAGAGEFEDMAVRAVRAVLANVSDDGELLNTSFGTGMGRDLQHYKDIPVTSMPYGQAMAIMALVEFSRRFI

SEQ ID NO: 531 - DNA, 348 bp, Myceliophthora thermophilia
atgctgaacctatcccacaccgagcacactctctttcgccctctccccctttccctccctcatcaccaccaccaccaccacttcattgtcggccgccgcccgcccgaggcgctgcgcggcgccatcacgcgccacatccgcgccgtcgccggctactaccgcggccgctgctacgcctgggacgtggtcaacgaggcgctcgacgaggacggcacctaccgcaagagcctcttctacaacgtcctcggcgacgagtacatccgcatcgtcaagaccttcgagaagctgatccgcgagaagccaaagccgggcttcaagcgcaagaggaaaaccgtagcagcaaactaa

SEQ ID NO: 532 - protein, 115 aa, Myceliophthora thermophilia
MLNLSHTEHTLFRPLPLSLPHHHHHHHFIVGRRPPEALRGAITRHIRAVAGYYRGRCYAWDVVNEALDEDGTYRKSLFYNVLGDEYIRIVKTFEKLIREKPKPGFKRKRKTVAAN

SEQ ID NO: 533 - DNA, 2466 bp, Myceliophthora thermophilia
atggaggaggaagcgactccaagaccccaatcgagtatcgtgcagatgcagaggcacatgctcaactcgcgctggcatgccaggcgtttggccaacaaaccccacggcgtcttcccaagcttggatggacatctaaggacctacaccaaggatatccgaccagccccgacctggcgggtcggacaatggctcgtggccgagggcgtacaagtccaatacgccgaggaagtataccgaatcactcccacggcctcgggcaagggaatcagcctcttgtgcccgacgcgcaagatcttgaaccgtgggaacactctgaacctggcaacgctcagcatcgacatcgagccggcttttgatggcgtcctctctgtcgagaccacccactggcaaggcgccgtccgtcgcggacccgacttcgacctcttccccgccggccggcccgaggtggacgccaaggtgaccaagacggagagcggcaccaccctgtcgtccgggacgctctcggcgacagtcagcggcaagccgcacgagttcgagatcgccttccatccgaccgggggcaagaagcccctgaccaccctgctcaaccggtcagtcggcctggcctacacgcccgccccgagcacgcccatgcagctggccgacatgcgcaacttccgccactacatcttcacccagaccaccctcgccgtcggcgagtccatccacgggctcggcgagcgcttcgggcccttcaacaaggtcggccagagggtcgagctgtggaacgcggacgggggcacctcgtccgaccaggcgtacaagaacgtgggcttctggatgagctcgcgcggctacggtgtcttcgtcgacactcccgggcgcgtcgagctcgagatcgggagcgagcggtgctgccggctccagacgagcgtcgaggggcagcggctccgctggttcatcatctacgggccctccccgcgcgacatcctgcgccggtactcggtcctcaccggagcccccggcagcgtgcccagctggtccttcggcctgtggctcagcacgtccttcaccacctcgtacgacgaggagacggtcaacagcttcctggccggcatgagggcgcgcgacatacccgtcgaggtcttccacttcgactgcttctggctcaaggcgttccagtggtgcgacttcgagttcgaccgcgacatgttcccggacccgaggggccagatcgggcgcctcaaggccggcggcctcgtcaagaaggtctgcgtctggacgaacccgtacctgggccaggcgtcccccgtcttcgccgaggccgcggccaggggctacctgctccggcgcaggaacggcgacgtcttccagtgggacctgtggcagacgggcatgggcatcgtcgacttcaccaacccggacgcccgcgcctggttcgccgcctgtctcgaccgcctcttcgacacgggcgtcgactgcatcaagaccgactttggcgagcgcatcccctccgaggatgtgcagtggttcgacccttcggtcgacccggagcggatgcacaactactacgccttcatctacaacaagctcgtctacgaggccctgcagaggcgttacggcgccaacgaggccgtcctgttcgcccgcgccgccaccgccggctgccagcggttccccctcacctggggcggcgactgcgagtcgacccccgaggccatggccgagtcgctacgcggtggtttgtccctcggcctgtccgggttcgccttctggagcgtcgacattggcggcttcgaggggtcgccgcctccctggatctacaagcgctgggtcgccttcggcctcctctgctcccactcgcgcctgcacggctccaactcgtaccgggtcccctggacggtcgacggcgacgaccagtccgaggagggatgctccgccacgctgcgcaagtggacccatctcaaggctcgcctgatgccctacctcttctcccaggcgcaggagagcgtccggggcgggctcccgctcagcctgagggccatgtgcatcgagttccccgacgacccgaccgcctggaccctcgatcgccagttcatgctcggcgacggcctcctcgtcgcccccgtcttcgaggaggacggcaccgtcgagttctacctgcccaggggcaagtggaccaacttcttcaccggcgaggtcaaggagggccccggctggttcgccgagacccacgggttcggcaccctgccgctctacgtccggcccaacacgctcctggttctgggcaaggaaggagagacgaggaccgtgtacgactacacgagcgacgtcgaggtgagggcgtattttgccagtgacagcgccagcgccgtgctggtcgacgccgagggcaagactgtaggtaccctgcgtgtcaaggacggggagattatcggaaaggaactgctatctggcaactcggtcatcaatgtcgtgagctcctga

SEQ ID NO: 534 - protein, 821 aa, Myceliophthora thermophilia
MEEEATPRPQSSIVQMQRHMLNSRWHARRLANKPHGVFPSLDGHLRTYTKDIRPAPTWRVGQWLVAEGVQVQYAEEVYRITPTASGKGISLLCPTRKILNRGNTLNLATLSIDIEPAFDGVLSVETTHWQGAVRRGPDFDLFPAGRPEVDAKVTKTESGTTLSSGTLSATVSGKPHEFEIAFHPTGGKKPLTTLLNRSVGLAYTPAPSTPMQLADMRNFRHYIFTQTTLAVGESIHGLGERFGPFNKVGQRVELWNADGGTSSDQAYKNVGFWMSSRGYGVFVDTPGRVELEIGSERCCRLQTSVEGQRLRWFIIYGPSPRDILRRYSVLTGAPGSVPSWSFGLWLSTSFTTSYDEETVNSFLAGMRARDIPVEVFHFDCFWLKAFQWCDFEFDRDMFPDPRGQIGRLKAGGLVKKVCVWTNPYLGQASPVFAEAAARGYLLRRRNGDVFQWDLWQTGMGIVDFTNPDARAWFAACLDRLFDTGVDCIKTDFGERIPSEDVQWFDPSVDPERMHNYYAFIYNKLVYEALQRRYGANEAVLFARAATAGCQRFPLTWGGDCESTPEAMAESLRGGLSLGLSGFAFWSVDIGGFEGSPPPWIYKRWVAFGLLCSHSRLHGSNSYRVPWTVDGDDQSEEGCSATLRKWTHLKARLMPYLFSQAQESVRGGLPLSLRAMCIEFPDDPTAWTLDRQFMLGDGLLVAPVFEEDGTVEFYLPRGKWTNFFTGEVKEGPGWFAETHGFGTLPLYVRPNTLLVLGKEGETRTVYDYTSDVEVRAYFASDSASAVLVDAEGKTVGTLRVKDGEIIGKELLSGNSVINVVSS

SEQ ID NO: 535 - DNA, 2553 bp, Myceliophthora thermophilia
atggccagcagccggtaccggtacacgttcccgaggaatccgaaggccaatccgaaggccgtcgtgacaggcggcaagggatcctcttactatcgcttcaccctcctcaccgaacggttgatccgttacgagtggtccgaggacggaggcttcgaggatcgcgcgtccacgttcgcggtattcagatactttgatgccccgcagtaccgcgttgtcgagacaaacgacagtctcgagatcatcacggactactttcacctcacctatgacaagaagaagttctcatcggaaggactttccgtcagagtcggctccgacctctggaattacgacggcaagagttatggagacctgggcggcaccgcccggaccctagacggcgcctatggccgcgtggacctggaaccgggtgtgctctcgcgcaaagcttatgcggttctcgacgacagcaagtctatgctctttgacgacgacgggtggattgccattcgcgagccgggccgcattgacggttacgtgtttgcctacagcggcgagcacaaggccgccatcagggacttctaccgcctctccgggcgtcagccggtgctcccccgctgggtgctggggaactggtggtccaggtaccacgcatactcggccgacgaatacatcgagcttatggaccacttcaaacgcgaaggaatcccgctcacgacgagcatcgtggatatggactggcaccgggttgacgacgtcccgcccaagtacggctcaggatggacgggctacagctggaaccgcaagctgttcccggaccccgaggggttcctgcaggagctgcgtaatcggaacctgaaagtggccctcaacgaccacccggcggacggcatccgggcgtatgaggatctgtacccggcggtggccaaggccctgaatcacgacacgtcgcgagaggaaccgatcaagtttgactgcaccgatcgcaagttcatggacgcctacttcgacgttctgaagctcagccttgagaagcagggcgtcatgttctggtggatcgactggcagcaaggcaccggcagcaagctccccagcgtagacccgctgtgggtgctcaatcactaccactacctcaccagtaagcgcaacgcgaaagacatccaacgtcccatcacattctcccgctacgccggcgccggtgcccatcggtacccgatcggcttctcgggcgacacgcagacgacttgggaaggtctcgagttccagcccgagtttaccgcaacggcatccaacatcggctatggctggtggagccacgacatcggcgggcattggggcggcgtccgctccaaccagctgacggtccgctgggtccagctgggctgcttctccccgatcctgcggctgcactcgaacaagagcccgtggaactcgagagagccgtggaactacgaggacgaggcgcacaggatcatgaaggacttcctcatcctgcgccaccgcctcatccccttcctctacaccatgaacatccgggccagctacgagagcgagccgctcatccagcccatgtactggaatcacccgaaggacgaagaggcctacacggtgccgacgcagtactacttcgggccggacctcctcgtggcccccatcacgtctcccaacagcaccgtcaccctgatgggccgcgtgcgcgcctggctgccgccgggccggtacgtcgacctgttctacccgcacctggtctacgacggcggccggtacatgcacctgcaccgcgacctgtcgcagatccccgtgctcgcgcgggagggcaccatcgtgccgctggacacgacgcccaggacgggccacggcgccgcgcggccgaccgagatcaccctcctcctcgtcgtcggccgggacgcgcactttgagctggtcgaggagccggagcagcaggaccaccatcgccacggcggcggcgacgacggcgatgaccaacccccgctcagcgcgttcgcccggacccccatctcgtggtcgcaggcggacggcgtgctcaccatcgggccggagtggaacggcgccggggcccgccgctggcggcagtggaacgtcaagctggtcgggcacaccaacacggacgtgcaggcgcaggtgcccgggttccgggtcacgcgcgacgtcgagggcgggtgcacgacggtggcgctcggcaacgtgcaccggtggcagcagccgcaccagcgggacggcggcgggttcgagatctcgctggggcgcgacctgcagctggacgtggtggacgtgcgcgcgcgcgccttcgaggtcctgcaccgggccgagatggggtacgaggccaaggaccccgtctgggacgtcttcacgtccggcgacgcggtgcagacgcgggtgcagcggctggcggcgctcgacgtcgacgccgcgctcaagaacgccctcatggaggtctgggcggccgacgggcgggccgagggcagcgcggcgggctacgagacctgggtggacgtgaaggcgtgcgcgggagacgcggtcgaggaggcgctcaaggagtacgttatcgtgtga

SEQ ID NO: 536 - protein, 850 aa, Myceliophthora thermophilia
MASSRYRYTFPRNPKANPKAVVTGGKGSSYYRFTLLTERLIRYEWSEDGGFEDRASTFAVFRYFDAPQYRVVETNDSLEIITDYFHLTYDKKKFSSEGLSVRVGSDLWNYDGKSYGDLGGTARTLDGAYGRVDLEPGVLSRKAYAVLDDSKSMLFDDDGWIAIREPGRIDGYVFAYSGEHKAAIRDFYRLSGRQPVLPRWVLGNWWSRYHAYSADEYIELMDHFKREGIPLTTSIVDMDWHRVDDVPPKYGSGWTGYSWNRKLFPDPEGFLQELRNRNLKVALNDHPADGIRAYEDLYPAVAKALNHDTSREEPIKFDCTDRKFMDAYFDVLKLSLEKQGVMFWWIDWQQGTGSKLPSVDPLWVLNHYHYLTSKRNAKDIQRPITFSRYAGAGAHRYPIGFSGDTQTTWEGLEFQPEFTATASNIGYGWWSHDIGGHWGGVRSNQLTVRWVQLGCFSPILRLHSNKSPWNSREPWNYEDEAHRIMKDFLILRHRLIPFLYTMNIRASYESEPLIQPMYWNHPKDEEAYTVPTQYYFGPDLLVAPITSPNSTVTLMGRVRAWLPPGRYVDLFYPHLVYDGGRYMHLHRDLSQIPVLAREGTIVPLDTTPRTGHGAARPTEITLLLVVGRDAHFELVEEPEQQDHHRHGGGDDGDDQPPLSAFARTPISWSQADGVLTIGPEWNGAGARRWRQWNVKLVGHTNTDVQAQVPGFRVTRDVEGGCTTVALGNVHRWQQPHQRDGGGFEISLGRDLQLDVVDVRARAFEVLHRAEMGYEAKDPVWDVFTSGDAVQTRVQRLAALDVDAALKNALMEVWAADGRAEGSAAGYETWVDVKACAGDAVEEALKEYVIV

SEQ ID NO: 537 - DNA, 1614 bp, Myceliophthora thermophilia
atgccgcaggttcgaaaccccatcctccccggcttcaaccccgacccttccatcctccgggttggggatgactactacatcgccacttcaacctttgagtggtacccgggtgttcagatccaccactccatggacctcgcaaactgggaacttgtcacccgtcccctaaaccgcaagagccaactggatatgcgaggagatccggacagctgcggcatctgggctccctgcctgacgcatgacggcgacaggttctggctggtatacacggacgtcaaacgcaaggacggctcgttcaaggacgcacacaactacatcgtcagtgcgcccgccatcgagggtccctggtcggaccccttctatgtcaactcgtccgggttcgacccctcgctcttccatgacgacgacggccggaagtggttcgtcaacatgatgtgggaccaccgcagccgcccgcgaacctttgccggcatcgcgctgcaagagttcgaccccaaggccgggaagctggttgggccgcgcaagaacatttaccaaggcaccgacctgggcctcgtcgagggcccgcacttgtacaagcgcaacgggtggtactatctcctgacagcagagggcgggactggctatgagcatgcctgcaccctcgcccggtctcggaacatctggggcccgtacgaagatcacccgcagaagtacatcttgacgtctaaggaccacccgcacgcagccctgcagcgagccggccacggcgacatcgtcgacacccccgacgggcgtacctacgtcgttcacctgaccggccggcccatcacgcagttccgccgctgtgtcttggggcgcgagacggccatccaggaggcctactggggcgacgacgactggctctacgtcaagaacggccctgtgcccagcctgttcgtggacctcccggccgcccgcaacgacgacgactactgggccgagaagaggtacacgttcgaggcgggcctgcacaaggacttccagtggctgcgcacgcccgagacggaccgcatcttcaggacggacaacgggaagttgacgctcatcggccgcgagtccatcggctcctggttcgagcaggccctggtcgcccggcgccagacgcacttctcgtacgacgccgagaccgtcatcgacttcaagcctgccgacgagcgccagttcgccggcctgacggcctattactgccgctacaacttcttctacctgaccgtcacggcccactcggacggccggcgggagctgctcatcatggcctccgaggcctcctggcccctcggcgccctccggtccccttatccgggacccgtccagatccccaacgagggcaaggtccggctcgcgctcaagatcaggggcaaggagctgcagttctactacgctctcgagggcgaagagctaaaacagattgggcccgtattcgacgctagcatcgtttctgacgagtgcggcggccaccagaagcacggcagcttcacgggcgccttcgtcggcgtggctgcttccgacatcaacggtactgctgccgaggcgacctttgactactttgtgtacaagcccgtgcaccatgagagtgaccggtacgagatttaa

SEQ ID NO: 538 - protein, 537 aa, Myceliophthora thermophilia
MPQVRNPILPGFNPDPSILRVGDDYYIATSTFEWYPGVQIHHSMDLANWELVTRPLNRKSQLDMRGDPDSCGIWAPCLTHDGDRFWLVYTDVKRKDGSFKDAHNYIVSAPAIEGPWSDPFYVNSSGFDPSLFHDDDGRKWFVNMMWDHRSRPRTFAGIALQEFDPKAGKLVGPRKNIYQGTDLGLVEGPHLYKRNGWYYLLTAEGGTGYEHACTLARSRNIWGPYEDHPQKYILTSKDHPHAALQRAGHGDIVDTPDGRTYVVHLTGRPITQFRRCVLGRETAIQEAYWGDDDWLYVKNGPVPSLFVDLPAARNDDDYWAEKRYTFEAGLHKDFQWLRTPETDRIFRTDNGKLTLIGRESIGSWFEQALVARRQTHFSYDAETVIDFKPADERQFAGLTAYYCRYNFFYLTVTAHSDGRRELLIMASEASWPLGALRSPYPGPVQIPNEGKVRLALKIRGKELQFYYALEGEELKQIGPVFDASIVSDECGGHQKHGSFTGAFVGVAASDINGTAAEATFDYFVYKPVHHESDRYEI

SEQ ID NO: 539 - DNA, 984 bp, Myceliophthora thermophilia
atggcgcccctcatcaccaacatcttcacggccgacccgtcggcccacgtcttcgagggcaagctcttcatatacccgtcgcacgatcgcgagacggacatcaagttcaacgacgacggcgaccagtacgacatggtcgactaccacgtattcagcaccgagtcgctggacccggccgcccccgtgaccgaccacggcgtcgtgctccgggccgaagacgtcccctgggtgtccaagcagctctgggcccccgacgccgcctacaaggacggcaggtactacctctacttccccgcccgcgacaagcagggcgtcttccgcatcggcgtcgccgtcggcgaccgccccgagggccccttcacccccgacccggagcccatccgggacagctacagcatcgacccggccgtcttcgtcgacgacgacggccgggcctacatgtactttggcgggctctggggcggccagctgcagtgctaccagaagggcaacggcatcttcgaccccgagtggctggggcccagggagccctcgggcgagggcgtccgggcgctggggccgcgcgtcgcccggctggcggacgacatgcgccagttcgccagcgaggtgaaggagatttcgatcctggcgcccgagacgggcgagccgatcgcggccgacgaccacgaccgccgcttcttcgaggccgcctggatgcacaagtacgacggcaagtactacttcagctactccaccggcgacacccactacctcgtctacgccgtcggcgacagcccctacgggcccttcacctacgccggccgcatcctcgagcccgtcctcggctggaccacgcaccactccatcgtcgagttccacggccgctggtggctcttccaccacgactgcgagctcagcggcggagtcgaccacctgcgctccgtcaaggtcaaggagatcttctacgacaaggacggcaagattgtcactgaaaagcccgaatag

SEQ ID NO: 540 - protein, 327 aa, Myceliophthora thermophilia
MAPLITNIFTADPSAHVFEGKLFIYPSHDRETDIKFNDDGDQYDMVDYHVFSTESLDPAAPVTDHGVVLRAEDVPWVSKQLWAPDAAYKDGRYYLYFPARDKQGVFRIGVAVGDRPEGPFTPDPEPIRDSYSIDPAVFVDDDGRAYMYFGGLWGGQLQCYQKGNGIFDPEWLGPREPSGEGVRALGPRVARLADDMRQFASEVKEISILAPETGEPIAADDHDRRFFEAAWMHKYDGKYYFSYSTGDTHYLVYAVGDSPYGPFTYAGRILEPVLGWTTHHSIVEFHGRWWLFHHDCELSGGVDHLRSVKVKEIFYDKDGKIVTEKPE

SEQ ID NO: 541 - DNA, 1557 bp, Myceliophthora thermophilia
atggcgaccggcctcacgctccagacggccatcaagggcgctcccgagtctaccgccatcatcgtgcccgggaagccagccttgaccgtcacatataaggatctcgtgtcggagacggcctcgttccgggcgaagctcgcggccatcggcatcacacaaggatcgcccgtctccatcgcgattgtcaactcatatgagttcatcgtgtctttcctggccgcctcgtggcagcgggccatcgccgcccctctgaacccggcctacaagcaggacgagtttgagttctacatcgacgatgtcaagtcagccatcgtcctcgtcccaagaggcgcctaccagagcggcagcccggccgtcaaggccgcccagaagttcaacgccgccatcgccgaatgctactgggacgcggccaataaagaggtcgccctcgacgtcaaggagctcggccagctccagggcaagcccaaacagccagtcctcacgccccgaccggacgacgttgccctcgtcctccacaccagcggcaccacctcccgccccaaggtcgtgcccctctcccaccgcaacctcacccgcaccatgcacaacatccagcagacctaccagctcaccccttccgaccgcaccatgctcgtcatgcccctcttccacgtccacggccttctctgcggcctcctcgcccctctcctctcgggcggctccatgatcgtgcccacaaagttctccgcctccgacttctggcgcgacttcatcacccacaaggcaaactggtacacggccgtgcccaccatccaccagatcctcctcaagaacccggtcccctccccactcccgcccatccgcttcatccgctcctgctcctccccgctgtccccaaccgtcttccacgccctcgagaagacgttcaacgcccccgtcctcgaagcctacgccatgactgaggcagcccaccagatgacctccaacccgctcccctcggtcggccggcgcaagcccggcaccgtcgggttcggccagggcgtcgaggtcgtcatcctcgacgaggccggcaaccccgtgccccagggcaaggagggcgagatctgcatccgcggcgagaacgtcacgtccgggtacctcaacaacccgtccgccaacgcggctgccttcaccaaggacggctacttccgcaccggcgaccagggcaagaaggacgccgacggttacgtcatcatcaccggccgcatcaaggagctcatcaacaagggcggcgagaagatctcccccatcgagctcgacaacgtgctcacccgccacccgtccgtgagcgaggccgtcagctttgccattccggacgagatatacggccaggatattggcgtcgccgtcgtcttgaagcccggcgtgaggttgtctgagggggagctaaagagctgggtggccgagaagatggccaagtttaagattcccaagaaggtgtacttcaccgatgtcatgcctaaaacggccacgggcaagatccagcggcgcatcgtggccgagactatgcagaagcaggaggggcggtccaagctatga

SEQ ID NO: 542 - protein, 518 aa, Myceliophthora thermophilia
MATGLTLQTAIKGAPESTAIIVPGKPALTVTYKDLVSETASFRAKLAAIGITQGSPVSIAIVNSYEFIVSFLAASWQRAIAAPLNPAYKQDEFEFYIDDVKSAIVLVPRGAYQSGSPAVKAAQKFNAAIAECYWDAANKEVALDVKELGQLQGKPKQPVLTPRPDDVALVLHTSGTTSRPKVVPLSHRNLTRTMHNIQQTYQLTPSDRTMLVMPLFHVHGLLCGLLAPLLSGGSMIVPTKFSASDFWRDFITHKANWYTAVPTIHQILLKNPVPSPLPPIRFIRSCSSPLSPTVFHALEKTFNAPVLEAYAMTEAAHQMTSNPLPSVGRRKPGTVGFGQGVEVVILDEAGNPVPQGKEGEICIRGENVTSGYLNNPSANAAAFTKDGYFRTGDQGKKDADGYVIITGRIKELINKGGEKISPIELDNVLTRHPSVSEAVSFAIPDEIYGQDIGVAVVLKPGVRLSEGELKSWVAEKMAKFKIPKKVYFTDVMPKTATGKIQRRIVAETMQKQEGRSKL

SEQ ID NO: 543 - DNA, 2907 bp, Myceliophthora thermophilia
atggctcgcgacgggagccatcaagggctcctccgcgattctaagcggtcgccccaacgccccaaggacgacgccggccatgattccgactccgacattgaagcgatcgagtatcttgaccgcaacgcacctcgatcacccaagtccgactacggcccgtcgtttcccgcggcaaacaaagcacgtcaatcgtggatcctccgttgcctggggcggcggagccggtgttgcatcggttttttggctggcttcatcgggctgtggatcttgctaagcgcgggaggtgccttcgtctacaagaaatatcaggaagagcctccctatggccagtcgcccccgtggtacccggcccctaagggcggcattgccaagacgtgggccgagagttatgagaaggcggccaagatggtgagcaagatgacgctggcggaaaaggtcaatgtcacgaccgggacagggtggcagatgggccttgcggttggcaccaacggtccggccgtccacgtgggcttcccgcaactgcagttgcaggacgggccgttgggcatcaggttcgccgataacatcaccgcctttcccgcaagcatcacggtaggcgcaacctggaatcgccagttgatgtacgcgcgtggccgtgctcacggcatcgaagcgcgccaaaagggcattaacgtccttctgggcccctgcgtgggccccctcggccgtatgcccgccggcgggcgcaactgggaaggattcggggccgatccgtacctgcagggcgtggcgggtgccgagacggtcaagggcatccagagcgagggcgtcatggccacaattaagcacttcgtcggaaacgagcaggagcacttccgccagccgtgggagtggggcctgccccatgccctcagtgccaacatcgacgaccgtaccctgcacgagctgtatgtttggcccttcgccgacgcagtcaaagccggcgtcgcctccgtcatgtgctcctacaacatggtcaacaactcgtacgcctgcggcaacagcaagttgctcaatggcatcctcaaggacgagatgggcttccagggtttcgtcatgagcgactggcttgcccagcgctccggggtggcctcggccctggcgggtctggacatgaccatgcccggcgatggcgcgaagtgggccagcggagagtcgttttggggacccgagctgagcagggcggtcctgaacggcagcgtccccgtcgatcgcctgaacgacatggtcacccgaatcgttgcggcctggtaccagctggggcaggacgacgagaccaagttcccgcgccagccgcccaacttctcgtcctggaccgatgaccgcaccggcgtcctggcgcccgggagcccgagcccgcaggagaaggtcgtggtcaaccagttcgtggacgtgaaggcgaaccactccgtcatcgcccgcgaagtggccgtccagggcacggtgctgctcaagaatgagggattgctgcctattagccgcactggcctagacgaggcggaactcgaggcgagacgtggcgctgctgcgagagcgacaggaagaagacgcaccggaaagttcagcgttggcgtgtttggggacgacgctgggcccgggaaaggacccaactactgcaaggatcgtgcttgtaaccaaggcacgctggcttcgggctggggttccggggccgtcgagttcccttatttagtatcgcccattgatgcgctccgcaaggagttcgacagctccaaagtcgagctgcacgagcatctgacagataagccatccttcgccggcaaggacgcggcggtccttgaagacctggaactctgcatcgtcttcgtgaacgccgacgcgggcgagggattcgtccggtgggaggacgtcaagggagatcggccgaacctaaacctccagaaaggcggcgacgacctcattgtcaacgtagcatccaagtgcggttctggctccggcgacgtcattgttgtcgtccatgcggtagggccggtgctgatggagaagtggatcgagctgcccaacatcaaagctgttctcttcgccaacctccccggccaagaatctggaaatgcgcttgccgacgtcctcttcggcaaggccaatccgtcaggccatctgcccttcaccattggcaaatccccggaggattacggtcctggcggcaaggtcatgtacctgccaaacggcgtcgttccccagcaggatttctcggagggtctgtacgtggactaccgctactttgacaagaaggatatcgagccccggttcgagttcggcttcggcctcagttacaccaccttcaacctgagcaaccttcgcgtcacgtcgcacaagaacaagtcggccctgccggcagcccggccgagccccgccgcgcaaccaccaagctacccgaccgccatcccgcccaaggacgaagccatgttccccccggggttccgcgcgctggagaagtatatttacccgtatctcgagtcggtggatgacatcgaggtcggagactacccgtatcccgacggctacgacacggagcagcccctgagcggcgccgggggcgatgagggcggcaaccctgacttgtgggcgacctacgtgactgtctcggcggacgtcaagaacgatggccccgtggccggcgccgtggtgccgcagctatatctagagtatcccgccaaggagggggtggatttccccgtccgggtgctccggggattcgaaaagttctatctcgaaccgggcgagacgcacgccgctcgttttaacctgacgaggagggatctgagttactgggatgtcgtggagcagaattgggtcatggtcacggagggagagtacaagtttcgggtcggcttcagttcgagggatttgcctttgacgggcacctggtga

SEQ ID NO: 544 - protein, 968 aa, Myceliophthora thermophilia
MARDGSHQGLLRDSKRSPQRPKDDAGHDSDSDIEAIEYLDRNAPRSPKSDYGPSFPAANKARQSWILRCLGRRSRCCIGFLAGFIGLWILLSAGGAFVYKKYQEEPPYGQSPPWYPAPKGGIAKTWAESYEKAAKMVSKMTLAEKVNVTTGTGWQMGLAVGTNGPAVHVGFPQLQLQDGPLGIRFADNITAFPASITVGATWNRQLMYARGRAHGIEARQKGINVLLGPCVGPLGRMPAGGRNWEGFGADPYLQGVAGAETVKGIQSEGVMATIKHFVGNEQEHFRQPWEWGLPHALSANIDDRTLHELYVWPFADAVKAGVASVMCSYNMVNNSYACGNSKLLNGILKDEMGFQGFVMSDWLAQRSGVASALAGLDMTMPGDGAKWASGESFWGPELSRAVLNGSVPVDRLNDMVTRIVAAWYQLGQDDETKFPRQPPNFSSWTDDRTGVLAPGSPSPQEKVVVNQFVDVKANHSVIAREVAVQGTVLLKNEGLLPISRTGLDEAELEARRGAAARATGRRRTGKFSVGVFGDDAGPGKGPNYCKDRACNQGTLASGWGSGAVEFPYLVSPIDALRKEFDSSKVELHEHLTDKPSFAGKDAAVLEDLELCIVFVNADAGEGFVRWEDVKGDRPNLNLQKGGDDLIVNVASKCGSGSGDVIVVVHAVGPVLMEKWIELPNIKAVLFANLPGQESGNALADVLFGKANPSGHLPFTIGKSPEDYGPGGKVMYLPNGVVPQQDFSEGLYVDYRYFDKKDIEPRFEFGFGLSYTTFNLSNLRVTSHKNKSALPAARPSPAAQPPSYPTAIPPKDEAMFPPGFRALEKYIYPYLESVDDIEVGDYPYPDGYDTEQPLSGAGGDEGGNPDLWATYVTVSADVKNDGPVAGAVVPQLYLEYPAKEGVDFPVRVLRGFEKFYLEPGETHAARFNLTRRDLSYWDVVEQNWVMVTEGEYKFRVGFSSRDLPLTGTW

SEQ ID NO: 545 - DNA, 2253 bp, Myceliophthora thermophilia
atgggtgaatgtcctgttcgccactccgccaacgtcgccggcggcggcacgcgcaacaccgactggtggccgaaccagctccggctcaatatcctccggcagaatcaaccggcgtcgaacccgcagaaggacctggactatgccgccgccttcaagtcgctcgactacgagggcctgaagaaggacctccgcgcgctcatgacggactcgcaggactggtggccggccgactttggccactacggcggcctcttcatccgcatggcctggcacagcgccggcacctaccgcgtctttgacggccgcggcggcggcagccagggccagcagcgcttcgccccgctcaacagctggccggataacgtcagcctcgacaaggcccgccgcctgctgtggcccatcaagcaaaagtacggcgacaagatctcgtgggccgacctgctgctcctgacgggcaacgttgccctcgagtcgatgggcttcaagacgtttggcttcgccgccggccgccccgacgtcttcgaggcggacgagtcgatctactggggaggggagcagacgtggctcggcaacgacgtgcgctactcgcaaggccgcgagggcgtcgccggccagggcgccctgggcggcgacgagtccaagaaggaccacaaggacatccgcacgcgcgacctcgagacgcccctggcggcctcgcacatgggtctcatctacgtcaaccccgagggccccgacggcatccccgaccccctcgcggccgcccgggacatccgcatcacctttggccgcatggccatgaacgacgaggagacggtcgccctgatcgccggcgggcacacgttcggcaagacgcacggcgccgcccactcggacaatgtcggccccgagcccgaggcggccccgctggagcagcagggcctcggctggagcaacaagcacgggtccggcaagggtcccgataccatcacgagcgggctcgaggtcatctggaccaaggagccgaccaagtggaaccacaacttcttcgagtacctcttcaagttcgaatgggagctcaccaagagccccgccggcgccaaccagtgggtggccaaggacaccgacgccttcatccccgacccctacgacccgaacaagaagcacaagccgcgcatgctcaccaccgacctggcgctgcgcttcgacccggtctacgagaagatctcgcgccgcttcctcgagcacccagaccagttcgccgacgcctttgcgcgcgcctggttcaagctgctgcaccgcgacatgggcccgcgctcgcgctggctcggccccgagatcccggccgaggtgctcccctgggaggaccccatcccgcccgtcaaccacccactcgtcgacgacaaggacatcgccgccctcaagcacgacatcctggccaccggcgtcgccccgcacaagctcatctcgaccgcctgggcctcggcgtcgaccttccgcggcagcgacaagcgcggcggcgccaacggcgcccgcatccgcctggcgccccagaaggactgggaggtcaacaacccgccccagctggccgaggtgctcaaggcgctcgagggcgtccaggccgccttcaacgcctcggccccgggcggcaagaaggtgtcgctcgccgacctgattgtgctcggcggcgtcgccccctcgaagcaggccgccggcgtgcccgtccccttcagcccgggccgcactgacgcgtcccaggagcagacggacgtcgagtcgttccagcacctcaagcccttcgccgacggcttccgcaactacggccgcggtacctcgcgcgtcacgacggagcagctcctcgtcgaccgcgcccagctgctgaccctgaccccgcccgagctcacggtcctcgtcggcggtctgcgcgtgctcggcgccaactacgacggctcgtcccacggcgtcttcaccacccgcccgggcaagctgaccaacgacttcttcgtcaacctcctcgacacgggcgtcgcctggaagtcgatcgacggcgagctcttcgagggcaccgaccgcaagacgggcgagaagaagtggacgggcacccgggccgacctcatctttggcgcccacgccgagctgcgcgccatcgccgaggtgtacgccagcgccggcggccaggacaagtttgtcaaggacttcgtggcggcctgggccaaggttatggatctcgaccgcttcgacctcgcacagcaaggctcggccggtcctaagttgtaa

SEQ ID NO: 546 - protein, 750 aa, Myceliophthora thermophilia
MGECPVRHSANVAGGGTRNTDWWPNQLRLNILRQNQPASNPQKDLDYAAAFKSLDYEGLKKDLRALMTDSQDWWPADFGHYGGLFIRMAWHSAGTYRVFDGRGGGSQGQQRFAPLNSWPDNVSLDKARRLLWPIKQKYGDKISWADLLLLTGNVALESMGFKTFGFAAGRPDVFEADESIYWGGEQTWLGNDVRYSQGREGVAGQGALGGDESKKDHKDIRTRDLETPLAASHMGLIYVNPEGPDGIPDPLAAARDIRITFGRMAMNDEETVALIAGGHTFGKTHGAAHSDNVGPEPEAAPLEQQGLGWSNKHGSGKGPDTITSGLEVIWTKEPTKWNHNFFEYLFKFEWELTKSPAGANQWVAKDTDAFIPDPYDPNKKHKPRMLTTDLALRFDPVYEKISRRFLEHPDQFADAFARAWFKLLHRDMGPRSRWLGPEIPAEVLPWEDPIPPVNHPLVDDKDIAALKHDILATGVAPHKLISTAWASASTFRGSDKRGGANGARIRLAPQKDWEVNNPPQLAEVLKALEGVQAAFNASAPGGKKVSLADLIVLGGVAPSKQAAGVPVPFSPGRTDASQEQTDVESFQHLKPFADGFRNYGRGTSRVTTEQLLVDRAQLLTLTPPELTVLVGGLRVLGANYDGSSHGVFTTRPGKLTNDFFVNLLDTGVAWKSIDGELFEGTDRKTGEKKWTGTRADLIFGAHAELRAIAEVYASAGGQDKFVKDFVAAWAKVMDLDRFDLAQQGSAGPKL

SEQ ID NO: 547 - DNA, 2310 bp, Myceliophthora thermophilia
atggcgacgacaaccgagacggcgccgctgtcggcaccagtgcccgtcgagctccccgaagcatcgcgattcctcaacgatagccaatggaaggttctcatgagcctcatggacgccatcatccccgcggtccgcatccgggactcggcaggggacaccaaggccgcccaagatgcttctaccacccaccttccgggcgcagaatattccgagacggcagccaagctccggaaggccgttacgcctctcgacccttcgtcagaaatcctcgaagcgtaccttgccgagcggccctcggagagtccggcctttgcccagctcctcaccttgatcctctccaatattccaccaagcaagcagcgcgagtttcgcatcctcctctccgtcctcaatactcgccctggcagcctgctcctgacctcgcgcgccaccccgcttccgtctctccgcctgtccgagcgggtcaagatcctccagagctggtccaactcgcctctctggtccctccggtcgctcttcaagagcatgacgaccctcggcaagctggccttcattcgcagcagcgccaacttccccgcgctgacgggcttcccggcggtcccccgggattggacgtccgggtcgacctcgcacccgtacgagtttctccagttcgaggccgcgtccggaaccggaaaggccccggtcgagatctcgaccgacgtcgtcatcgtgggctccgggtgcggcgccggggtggtagcgaagcggctggcgtccgagttcggcccctcgctcggggtcctggtgctcgagaaggggcggcacctggacgcgcgccacttcccgctgtcgcaggcgaccgggctggccaccctgttcgaggccggcggcgtggtcgagacggacgacgggtcgatgacggtcacggcgggcagctgcttcggcggcggcggcaccgtcaactggagcgccgccctgcagacacaagactttgtgcgcgccgagtgggcccgcacccaccgcttgcccttcttcgagtcggccgacttccaggcctgcctcgaccgcgtctgggacgccatgggctgcaccggcgacaaggtcgcgcccaaccacgccaaccgcgtcctgctcgagggcgcccggaagctgggctaccaggccaaggtggtgccccagaactgcggcggaagcgagcaccactgcggctactgcaccctcggatgctggaagggcgagaagaagggccccgtcaacggctggttccccgatgcggccgagcagggcgtccagttcgtcgagcgcatgaccgtcaagagggtccttctggaccacaagaagggcaaaaaggtcgccaggggagttcagggcgtctggaagtcccgcgacggccgcgaggtcgaggttatcgtccgcgcaaagaaggtcgtcctcagctgcggcaccctctggagcccggtcgtgctgatgaacagcggcatcaagaacccccagatcggcaagaacctacacttgcatccgaccaactttgtgtccggcatctttgacgaggatgtccagccatgggagggcggatctctaacctcggtggtcagctcgtttgagaacctcgactccaagggccacggtgtcaagctcgaagccatgtccatgatgccatccttctgcctccccttcctcccctgggcctcgggcaccgactacaaggtgctcgcggcgcactaccggcgtctcaacaccttcatcgccatctgccgagaccgcgacatgggctccgtctaccgcgacccgaccaccggccgcccccggatcgtctacaccccgtccgacttcgaccgcgcccacaacctgcgcggcgtgctcgagctctgccggatcctgtacgcccacggcgccagggagatccacccctccatcgccggcttcccgcccttcatccgcaggacgaaggaggaagataacaagcccgagggcagggacaaagacaaagacaagcacaaagacaaggacgaggacgaggagaaggagaagcgcgagttcgaggagtggctggggcggctcaaggcgcacggcaacaagccgcccgcgacgccgttcgcgtcggcgcaccagatgggcacatgccgcatgagcgccaggcccaaggagggcgtcgtggacccgcgcggccgcgtctggggcgccgagggcctctacgtcgccgacgccagcgtctttcccagcgcgagcggcgtcaaccccatggtcacgaccatggccatcgccgactggatcggacagggcgtctgcgaggacctcaagaaggacgggatcccctcgaagctgtaa

SEQ ID NO: 548 - protein, 769 aa, Myceliophthora thermophilia
MATTTETAPLSAPVPVELPEASRFLNDSQWKVLMSLMDAIIPAVRIRDSAGDTKAAQDASTTHLPGAEYSETAAKLRKAVTPLDPSSEILEAYLAERPSESPAFAQLLTLILSNIPPSKQREFRILLSVLNTRPGSLLLTSRATPLPSLRLSERVKILQSWSNSPLWSLRSLFKSMTTLGKLAFIRSSANFPALTGFPAVPRDWTSGSTSHPYEFLQFEAASGTGKAPVEISTDVVIVGSGCGAGVVAKRLASEFGPSLGVLVLEKGRHLDARHFPLSQATGLATLFEAGGVVETDDGSMTVTAGSCFGGGGTVNWSAALQTQDFVRAEWARTHRLPFFESADFQACLDRVWDAMGCTGDKVAPNHANRVLLEGARKLGYQAKVVPQNCGGSEHHCGYCTLGCWKGEKKGPVNGWFPDAAEQGVQFVERMTVKRVLLDHKKGKKVARGVQGVWKSRDGREVEVIVRAKKVVLSCGTLWSPVVLMNSGIKNPQIGKNLHLHPTNFVSGIFDEDVQPWEGGSLTSVVSSFENLDSKGHGVKLEAMSMMPSFCLPFLPWASGTDYKVLAAHYRRLNTFIAICRDRDMGSVYRDPTTGRPRIVYTPSDFDRAHNLRGVLELCRILYAHGAREIHPSIAGFPPFIRRTKEEDNKPEGRDKDKDKHKDKDEDEEKEKREFEEWLGRLKAHGNKPPATPFASAHQMGTCRMSARPKEGVVDPRGRVWGAEGLYVADASVFPSASGVNPMVTTMAIADWIGQGVCEDLKKDGIPSKL

SEQ ID NO: 549 - DNA, 1917 bp, Myceliophthora thermophilia
atgtcgccgctgcccgaggagtttgacattatcgtctgcggaggtgggagttgtgggctggccaacctggaccataacctcacggttctcctgatcgaggccggagagtccaacctcaacaacccatgggtgtaccgcccggccatctacccgcgcaacatgaagctcgactccaagacggcgaccttttacgagtctcgtccgtcgaaatcgctcagcggccgaagtgccatagttcccgcagctcacgtccttggcggcggatcctctatcaacttcatgatgtacactcgcgcttccgcctcggactatgacgacttccaggcgaaagggtggacgaccaaggagctcttgcccctgatgaagaagcatgagacgtaccagcgtgcttcgcacaaccgagacatccacgggtttgacggccctatcaaggtctcgtttggcaactacgtgtacccgatcaaggacgacttcctcagggctgtcgagagccagggaatccctattgttgatgacctacaggatcttcgcaccggccatggtgctgaacaatggctgaagtggatcaaccgcgacaccggccgtcgcagcgacagcgctcatgcgtatgttcattccacccgcgccgtccattcgaacctgtacctggcctgcaataccaaggtcgacaaggtgatcatcgagaacggccgagccgttgctgtccagactgttccgaccaagcggtgtggtgaagatcctggaattcgcgtcttccgcgctcgcaagcagattgtcgtgtcggcggggacattgtcgtctcccctgattctgcagcggtccggaatcggcgacccgaacaagctccgccgcgtcggcgtcaagccaatcgtcgacctcccgggagtcggtctgaacttccaggaccactacctcacctttgccgtctaccgagccaagccgggaaccgagacgtttgacgactttgcccggggagatcccgaagtgcagaagcgcgtttttgacgagtggaatgtcaaggggaccggacccctcgccaccaacggcatcgaagccggcgtcaagatccggccgaccgaggccgagctgaagcagttccggtctggctggttcggcgaccacatgttgatgcccccgggcaacttcttcaccatgttccacttcctcgagtaccccttctcgcgcggggagacgcacatccggtcggcggacccgtacgcggcgcccgacttcgacgcgggcttcctgcgcgacgggcgcgacatggcgccgctggtgtgggggtacatcaagtcgcgcgagacggcccgccggatggacgcctacgcgggcgaggtccaggccatgcacccgcacttccccttcgactcgcccgcgcgcgcccacgacctcgacctcgacgacaccacccgctacgccctccccggcaacatcaccgcggggatccagcacggcagctggagcgcgcccctgcccccagccgacgtgcccgtgggcaccgccgcggccggcggcgccggtgcggtggtcagcagcaaccggaaggagaggcggaaggagctcgagtactcgagggaggacatcgcggccatcgaggaatgggtcaagcggcacgtcgagacgacctggcactgtctcgggacctgctccatggcgccccgggagggcaacagcatcgtcaagcacggcgtcgtggacgagcgcctgaacgtgcacggggtcaaggggctcaaggtggccgacctgagcatctgcccggacaacgtcggttgcaacacgtattcgaccgcgctcctgatcggcgagaaggccgccgtcctcgtcgccgaggaccttggctacgcgggcgaggcgctcgagatgcgcgtgcccgactatcacgcgccgggcgagaaccggctcgcatcgaggctgtga

SEQ ID NO: 550 - protein, 638 aa, Myceliophthora thermophilia
MSPLPEEFDIIVCGGGSCGLANLDHNLTVLLIEAGESNLNNPWVYRPAIYPRNMKLDSKTATFYESRPSKSLSGRSAIVPAAHVLGGGSSINFMMYTRASASDYDDFQAKGWTTKELLPLMKKHETYQRASHNRDIHGFDGPIKVSFGNYVYPIKDDFLRAVESQGIPIVDDLQDLRTGHGAEQWLKWINRDTGRRSDSAHAYVHSTRAVHSNLYLACNTKVDKVIIENGRAVAVQTVPTKRCGEDPGIRVFRARKQIVVSAGTLSSPLILQRSGIGDPNKLRRVGVKPIVDLPGVGLNFQDHYLTFAVYRAKPGTETFDDFARGDPEVQKRVFDEWNVKGTGPLATNGIEAGVKIRPTEAELKQFRSGWFGDHMLMPPGNFFTMFHFLEYPFSRGETHIRSADPYAAPDFDAGFLRDGRDMAPLVWGYIKSRETARRMDAYAGEVQAMHPHFPFDSPARAHDLDLDDTTRYALPGNITAGIQHGSWSAPLPPADVPVGTAAAGGAGAVVSSNRKERRKELEYSREDIAAIEEWVKRHVETTWHCLGTCSMAPREGNSIVKHGVVDERLNVHGVKGLKVADLSICPDNVGCNTYSTALLIGEKAAVLVAEDLGYAGEALEMRVPDYHAPGENRLASRL

SEQ ID NO: 551 - DNA, 1788 bp, Myceliophthora thermophilia
atgggctcgctgcgcggtctgctcgagggggtcgtcgacaccgccctcgactcgctttacacagcaacaggtagtttgacgcagagcaggacaaatggcctctcgctcctggggactctcttagcccctaccttacctctcttcctaaccaacaactctttgccagatgggtacccgtggggggagctgaccgacgagggtaccaacccgtacacggagtgccccaggaccggcgtgacaagacactacgacttcacggtgagccgggcttctatcgctcccgacgggtacctacgcgatgtgctcctcgtcaacggggccttccccgggccgctggtcgaggccaactggggcgacacgatcgtggtggatgtccataacgacattaccgggccggaggagggcacagcaatccattggcacgggtttttgcagcacgggacgccctgggaggacggcgttcctggcataacccaatgtccgatcccgcccaggagaagctacaggtatgagttcgtcgctagtctttacggcacaagctggtaccactcccactactcggcccaattcgccggcggtctcttcgggcccattgtgattcacggcccaacgcgcgagaattacgatatcgacctcggtcccatcctgctcaccgactggtaccacagagaatatttcgacatcatcgaggaaatgctcgctcctggcggcagcgccaaggtggtgtcggacaacaacttgatcgacggcaagatgcatttcgactgctcgactgtcgctccaggggataacactccgtgcttcgacaacgccggagtctccaagttcaggtttcagacgggcaagacgcataggctgcgcctgatcaacggcggtgctgacggcgttcagcgcttctcgatcgacgagcacacactcaccgtcatcgctgaggactttgtaccggtgaaaccctacaacacctcggtggtcaccctgggggtcggtcagcgcgccgacgtgctcgtcacggcaaatgtcggcgagcccacctcggccttctggatgcggtccaacctgtcgtcgtgcctgccggcgcggcaaccctatgccgtggcggccgtctactatgaccaagcggacacttcaaccacgccatcgagcagggcctgggacgtcctcgaccccggaacgtgcacaaatgacgacctcgacatcaccgagccgctgtttcccatcccactgcccgaaccgaccctgacccataccatggacatcgagctcttcaccaacgcctccaacgtgacgctgtggaagttcaacggcgtctcgatgcgtgccgactacaacagtcccgtcctcctgctggccaacgacggcaatttcacctacccaccccagtggaacgtggtcaaccagcacaaccacacggccatccgcatcatcgtgaacaacaggagccccagcgctcacccgatgcatctccacggtcacaatttctacgttctccacgagggcccgggagaatgggacggcaccatcgtccgtccgtcgaacccccgcaggagagacgtgtactcggtacggagcaagggccacttggtgattcagtttgacggcgcgcccggcgtctggcccttccactgccacatcgcttggcacgtgtccggcggcttcatggcgacgctgatcgtcaagcccgacgaggtggagcgcatggagatcccccgcgacgtggagaagaactgtcgggcgtgggcgatgtggtccaagtataacgtcgtagaccagatcgatagcgggacttga

SEQ ID NO: 552 - protein, 595 aa, Myceliophthora thermophilia
MGSLRGLLEGVVDTALDSLYTATGSLTQSRTNGLSLLGTLLAPTLPLFLTNNSLPDGYPWGELTDEGTNPYTECPRTGVTRHYDFTVSRASIAPDGYLRDVLLVNGAFPGPLVEANWGDTIVVDVHNDITGPEEGTAIHWHGFLQHGTPWEDGVPGITQCPIPPRRSYRYEFVASLYGTSWYHSHYSAQFAGGLFGPIVIHGPTRENYDIDLGPILLTDWYHREYFDIIEEMLAPGGSAKVVSDNNLIDGKMHFDCSTVAPGDNTPCFDNAGVSKFRFQTGKTHRLRLINGGADGVQRFSIDEHTLTVIAEDFVPVKPYNTSVVTLGVGQRADVLVTANVGEPTSAFWMRSNLSSCLPARQPYAVAAVYYDQADTSTTPSSRAWDVLDPGTCTNDDLDITEPLFPIPLPEPTLTHTMDIELFTNASNVTLWKFNGVSMRADYNSPVLLLANDGNFTYPPQWNVVNQHNHTAIRIIVNNRSPSAHPMHLHGHNFYVLHEGPGEWDGTIVRPSNPRRRDVYSVRSKGHLVIQFDGAPGVWPFHCHIAWHVSGGFMATLIVKPDEVERMEIPRDVEKNCRAWAMWSKYNVVDQIDSGT

SEQ ID NO: 553 - DNA, 1431 bp, Myceliophthora thermophilia
atgtctcttcccaaggacttcaagtggggcttcgccaccgcctcgtaccagattgagggctccgtcaacgaggatggccgtggcccctccatctgggacacattctgcgccatccccggcaagatcgccgacggcagctcgggtgccgtggcttgcgactcgtacaagcgcaccaaggaggacattgagctgctcaagtcgataggggccaaggcgtaccgcttctccatcgcgtggtcgcgcgtcatcccgctgggcggtcgcaacgaccccatcaaccagaagggtctggaccactacgtcaagttcgtcgacgacctcgtcgaggccggcatcgagcccttcatcaccctctcccactgggacctgccggacgcgctggagaagcgctacggcggctatctgaacaaggaggagttcgcggccgactttgagaactacgcgcgcgtcatgttcaaggccatccccaagtgcaagcactggatcaccttcaacgagccgtggtgcacgtccatcctgggctacaacacgggctacttcgcgcccggccgcacgtcggaccgcagcaagtcgcccgtcggcgacagcgcgcgcgagccgtggatcgtcggccacaacatcctcatcgcgcacgggagggccgtcaaggcgtaccgcgaggacttcaagcccacgcagggcggcgagatcggcatcacgctcaacggcgacgccacgctcccctgggacccggaggacccggccgacgtcgaggcgtgcgaccgcaagatcgagttcgccatctcgtggttcgccgaccccatctactttggcgagtacccggcgtcgatgcgcaagcagctgggcgaccgcctgcccaagttcacggccgaggaggtggcgctcgtcaagggctccaacgacttctacggcatgaaccactacacggccaactacatcaagcacaagaagggcgtgccgcccgaggacgacttcctgggcaacctcgagacgctcttctacaacaagaacgccgactgcatcgggcccgagacgcagtccttctggctgcgcccgcacccccagggcttccgcgacctgctcaactggctgagcaagcggtacggctaccccaagatctacgtgaccgagaacggcacgtcgctcaagggcgagaacgacatgccgctcgagcagatcctcgaggacgacttccgcgtcaagtactttcacgactacgtccacgccatggccaaggcctcggccgaggacggcgtcaacgtccagggctacctggcctggtcgctcatggataacttcgagtgggccgagggttacgagacccgcttcggcgtcacctacgtcgactacgccaacgaccagaagcgctaccccaagaagagcgcaaagagcctcaagccgctgtttgacagcctcatccggaaggagtaa

SEQ ID NO: 554 - protein, 476 aa, Myceliophthora thermophilia
MSLPKDFKWGFATASYQIEGSVNEDGRGPSIWDTFCAIPGKIADGSSGAVACDSYKRTKEDIELLKSIGAKAYRFSIAWSRVIPLGGRNDPINQKGLDHYVKFVDDLVEAGIEPFITLSHWDLPDALEKRYGGYLNKEEFAADFENYARVMFKAIPKCKHWITFNEPWCTSILGYNTGYFAPGRTSDRSKSPVGDSAREPWIVGHNILIAHGRAVKAYREDFKPTQGGEIGITLNGDATLPWDPEDPADVEACDRKIEFAISWFADPIYFGEYPASMRKQLGDRLPKFTAEEVALVKGSNDFYGMNHYTANYIKHKKGVPPEDDFLGNLETLFYNKNADCIGPETQSFWLRPHPQGFRDLLNWLSKRYGYPKIYVTENGTSLKGENDMPLEQILEDDFRVKYFHDYVHAMAKASAEDGVNVQGYLAWSLMDNFEWAEGYETRFGVTYVDYANDQKRYPKKSAKSLKPLFDSLIRKE

SEQ ID NO: 555 - DNA, 2295 bp, Myceliophthora thermophilia
atgacaaacctccgtctcacgatcgaagacggcaagttccgcgacggctacggcaggcaagtccttctcagaggcatcaacgtcgccggcgaagccaagtaccccagcaagcccaaccagccgtcgcacgtgccagaagacttcttcgatggagacaatgtcagcttcgtcggccggcccttttccaaggaggaggctcatctccatttttcgcggttaaagcgctgcgggtacaacaccatccgctatgtcttcacttgggaggctatcgaagccgccggtccgggcatctacgatgaggcatggatagacgaaacaatagaggtgctgagggcggcaaaaagttacggtttctatgtcttcatggacccgcatcaggatgtgtggtctcgtttctcgggaggctcgggcgctcccatgtggacgctctacgcagctgggcttaacccccagagttttgcggcgacagaggccgccatcgtccataacacctacccagaacccgacgcgtttcccaagatgatctggtcgacaaactactaccgcctggccgcggccaccatgttcaccttattctttgccgggagagactttgcaccacggtgtatcatcgacggggtcaacattcaagattacttacagggtcacttcctccgcgcctgtgctcatctagcgcagcgcatccacgaggccggcgacatcgagaacgacgtggtgtttggctgggagagcttaaacgagccgaataaaggcatgataggctaccaagacatcagtgtcataccgaaagagcaggccctcaaaaaaggaacttgcccgacaatatggcagaccatgcttacggggtctgggagagcagtcgaggtcgagacctgggacatggggggacttggcccttacagggtggggcgcacgcttgttgatccgcatggcgaggttgcctggctcccagaaggctatgatgagtcgcggtacggctacaagagagatccagggtggaagctgggcgagtgcatctgggcacagcatggcgtctgggacccgtcgacggacacgcttctcagaaaggactattttgcgaagcatccggcaacgggggaaaccattgactattcctacttcaccaacacctactttatggattttttccgaaaataccgcgacacggtccggtcagtacacaagaacgccatcattcttctgcaaggtcccaccatggaacttccaccactcatcaaagacaccccggacggcgatgatccatttctagtctattcccctcactggtacgatggcatcaccttgatgaccaagaaatggaaccggaattggaacgtggacgtgataggcgtgctccgcgggcggtattggcacccagcccttgccgtgaagctgggggagacggcaatccggaactgcttccgagaccaacacgcggccatgagaaaggagggtctcgatcgcatggggaaccacccatgtttgatgacggaattcggcattccgtacgatatggatgacaagtacgcatacaagacgggcgactactcgagtcaatcggctgctatggacgccaatcatttcggagtggaggccgccggcttggaaggttacaccctttggctatacatggcctcaaacgatcacgaaaagggagatcagtggaatggcgaagatctctccatcgtctcggtcgatgataagctgctaccactctcggctcacccccgcatcccaagcctcgaagactcgacttcgaacctacgaacaccggctgctaggaaagagttggacgacgacgagagtgttacacccgctaacctcagacgctccatcacaaatccttccatttctttagaggctacctcgcgtcagcccgaactcacggcttccccgggctaccgtgcagcagaggcgtacgtgcggccagcgccggtcgctacggccggagtcataacggattatgggttcgatctccgaaaatgcctcttcacgttgacgatccaagctcccagagtggcagatccggaggcgccgacagtagtgttcctcccggagtaccatttccccaaggacgagtgctcggtcgaggtgagctcgggtaagtgggagataagcagcgatgaggaggagacggtgctcatccagcggctgcgctggtggcatggtgatgggcagcagaccttgagggtttccggggtcatcaagaagcacaacatcggagagagcgccgaggatacgggttattacgagcaatgtaaccagggggcatggagcagttgcacggccatgtaa

SEQ ID NO: 556 - protein, 764 aa, Myceliophthora thermophilia
MTNLRLTIEDGKFRDGYGRQVLLRGINVAGEAKYPSKPNQPSHVPEDFFDGDNVSFVGRPFSKEEAHLHFSRLKRCGYNTIRYVFTWEAIEAAGPGIYDEAWIDETIEVLRAAKSYGFYVFMDPHQDVWSRFSGGSGAPMWTLYAAGLNPQSFAATEAAIVHNTYPEPDAFPKMIWSTNYYRLAAATMFTLFFAGRDFAPRCIIDGVNIQDYLQGHFLRACAHLAQRIHEAGDIENDVVFGWESLNEPNKGMIGYQDISVIPKEQALKKGTCPTIWQTMLTGSGRAVEVETWDMGGLGPYRVGRTLVDPHGEVAWLPEGYDESRYGYKRDPGWKLGECIWAQHGVWDPSTDTLLRKDYFAKHPATGETIDYSYFTNTYFMDFFRKYRDTVRSVHKNAIILLQGPTMELPPLIKDTPDGDDPFLVYSPHWYDGITLMTKKWNRNWNVDVIGVLRGRYWHPALAVKLGETAIRNCFRDQHAAMRKEGLDRMGNHPCLMTEFGIPYDMDDKYAYKTGDYSSQSAAMDANHFGVEAAGLEGYTLWLYMASNDHEKGDQWNGEDLSIVSVDDKLLPLSAHPRIPSLEDSTSNLRTPAARKELDDDESVTPANLRRSITNPSISLEATSRQPELTASPGYRAAEAYVRPAPVATAGVITDYGFDLRKCLFTLTIQAPRVADPEAPTVVFLPEYHFPKDECSVEVSSGKWEISSDEEETVLIQRLRWWHGDGQQTLRVSGVIKKHNIGESAEDTGYYEQCNQGAWSSCTAM

SEQ ID NO: 557 - DNA, 2694 bp, Myceliophthora thermophilia
atgacacaacacactgcccgtgtcctctcgtccggctgggagtttaagtcggacgcggatgagaaatggctcccggtctcggggtcccccagcaacgtccataccgatctgatgcggcatggtctgatacccgacccattccaagacactaacgaactggaagtccgctgggttgccgagcggacgtggcggtatcgaacctcgtttgcgacgccgagttgttatgggcgggcccggggagtcagggtcgatctcgtgttcgaggggctcgacaccttcgcgacggtgacgctcaatggccaggtcattctgcggtcggacaatatgttcctcgagcaccgagtcgacgtcggcgacgttctggtggacggcgccgaagaggagagcatcaacaccttggagatcgcgttcgagcctgcgggccggcggggcctggaactcgtccgggcccatcccgagcacgagttcattgttcaccagacggaggtcagcagggggccggtccggaaggcccaatatcattggggctgggattggggccccatcctcttgacgtgtggcccgtggaaaccggtaaggctggagacatatgtcggcaggatcgaagacgtcagggtagactacgagatttgcagcacgggccgggcggagggagatgggcgcccgatcgtcgaggcgaccgtgcacgctcacgtcttgggcccggcggcggagctcgaggccgagctgctcctatccggtgaacgagtggccagttggagggaccgcatgggcgacgatgccgccgctggtggtccgccgccgtcgtcgtcgtcgtcgtcgcggcgatactcgtccccccggctccggatcgagcgggcggagctgtggtggccgcgaggatacggtccgcagtccctatacgagttgaagctgcggatcctggccgcggacgggttgacggtcttggcggaggagcaccggaggatcgggtttcgcaaggtcgagctgatccgagaagaggatcggttcgggcaatccttctacttccgcgtcaacggcgtggacgtgttctcgggcggctcttgctgggtccccgcggacagcttcctgcccgagatctctccggagcgctaccgggactggatccggctggtcgccgagggcaaccagaacatggtccgcgtctggggcgggggcgtctacgagccggacgtcttctacgcggcatgcgacgagctcggcatcatggtctggcaggacttcatgttcgcctgcgcgtcgtacccgacctacccggccttcctcgactcggtcgcccgggaggcgcgccaggcggtccggcgcctccggcaccacccgtgcgtcgtgctctggtgcggcaacaacgaggactaccagctggtcgagcggtacgggctcgagtaccgcttcgaggaggacagggacccggcgtcctggctccggtcgaccttcccggcgcggtacatctacgagcacctgctcccgggcgtggtgcgagacgagaaccccgcgggggcaggggcgaccccttaccacccgggcagcccctggggcgacggcaggagtacgacgctccgggtcgacccgacggtcggcgacgtgcaccagtgggagctctggaacggcgaggcgcggccgtggcagttgcttccgcggatgggcgggcggtttgtgagcgagttcggcatgttgagccacccgcacgccgacacggtcgcgcgcttcgtctcggacccggcggagcggcgcgcggggagccggacgatggacttccacaccaaggcggtcgcgcacgagcgcaggctgctcgcgtacgtgggcgagaacttcggggtcgcccgggccgccgggggcgggggcgcgggagcgttcgcgcacctgacgcaggtggtgcaggcggacgcggtcgcggccgcgtaccggtcctggcggaggcactggggccggccgggggagcggcggtgcggaggcgtgctggtctggcagctcaacgactgctggcccgccgtctcgtgggccgtggtggactactacctggtcaggaagccggccttctacgcgatccggcgggccctggcgccgctcgccgtgggcgtggcgcgcaagttccacgactggacgacccggccggccgacgcgctctggcggcggaacacgggccacgtcgacccgcgcgggatgctgaccgacgtcgagttcgacgtctgggtctccagctcgaggtcggacgccgtgcgggcgagggcggtcgtgcgcttcgtctcggtccggtcgggccgcgaggtgggggaccggatcgagcgcgaggtgcaagtagggccgaacggctgcaccgagctgctggtgggttacaagttcgactggcgcacggcggcggtggccgaaccggagcactttgtcatccacgtggcgctgtgggtgggtggcgtccaggtcagcagcgatacctcgtggcccgatccgatcaagtacctcgacttcccggacaggggcgtctcggtgaggcacctcggccccggcctcgtcgaggtctcggcccagcggccggtaaaggggtttgtcttctccgagaagcgcggcgtcaagcttagcgacaacggcttcgatctggtgcccggagacgaacccaagagggtagaggtccaaggctgtgaggtcgatgaactctcatggactttcgtcggtcaatga

SEQ ID NO: 558 - protein, 897 aa, Myceliophthora thermophilia
MTQHTARVLSSGWEFKSDADEKWLPVSGSPSNVHTDLMRHGLIPDPFQDTNELEVRWVAERTWRYRTSFATPSCYGRARGVRVDLVFEGLDTFATVTLNGQVILRSDNMFLEHRVDVGDVLVDGAEEESINTLEIAFEPAGRRGLELVRAHPEHEFIVHQTEVSRGPVRKAQYHWGWDWGPILLTCGPWKPVRLETYVGRIEDVRVDYEICSTGRAEGDGRPIVEATVHAHVLGPAAELEAELLLSGERVASWRDRMGDDAAAGGPPPSSSSSSRRYSSPRLRIERAELWWPRGYGPQSLYELKLRILAADGLTVLAEEHRRIGFRKVELIREEDRFGQSFYFRVNGVDVFSGGSCWVPADSFLPEISPERYRDWIRLVAEGNQNMVRVWGGGVYEPDVFYAACDELGIMVWQDFMFACASYPTYPAFLDSVAREARQAVRRLRHHPCVVLWCGNNEDYQLVERYGLEYRFEEDRDPASWLRSTFPARYIYEHLLPGVVRDENPAGAGATPYHPGSPWGDGRSTTLRVDPTVGDVHQWELWNGEARPWQLLPRMGGRFVSEFGMLSHPHADTVARFVSDPAERRAGSRTMDFHTKAVAHERRLLAYVGENFGVARAAGGGGAGAFAHLTQVVQADAVAAAYRSWRRHWGRPGERRCGGVLVWQLNDCWPAVSWAVVDYYLVRKPAFYAIRRALAPLAVGVARKFHDWTTRPADALWRRNTGHVDPRGMLTDVEFDVWVSSSRSDAVRARAVVRFVSVRSGREVGDRIEREVQVGPNGCTELLVGYKFDWRTAAVAEPEHFVIHVALWVGGVQVSSDTSWPDPIKYLDFPDRGVSVRHLGPGLVEVSAQRPVKGFVFSEKRGVKLSDNGFDLVPGDEPKRVEVQGCEVDELSWTFVGQ

SEQ ID NO: 559 - DNA, 2637 bp, Myceliophthora thermophilia
atgaggatgcggagcttactggtgctcgcggccatcggcctggccgctgccgaggacggcctcaacggctggcttcgctatgcgcggatcaagggagcacgcgatttccacgacaggctgccgtctaccattgtcgcactcaacgccaccgaggggctccccgtctacacggccggccaggagctcgcccagggcatcgagggcatcttcggcaagaaggtcgacctcgacgtcgacctcgcaacggccggcgccggcaagagtaacggcaagggcaagggcaatggcaagggcaaaggaaagggcaacaacggccacggccacgaccgcgacaccaccgccacggttgggacggtcgcggcgtatgtcgacagcaaccccggcgctgctgccgccggcatccccgagctggccgacgacggcttctacctccgggtctcgcgcggtaacgtcctgatcctcggccagaacgagcgcggcgccctgtacggcgccttccactacctctcgctgctcgcgcagggcaacgcatccgactacacgctggcgtccaacccggacgcgccgatccggtgggtgaaccagtgggacaacatgcaggacggcggcacccacggcagcgtcgagcgcggctacgggggcgactccatcttcttctgggacggcaaggtccgcgacgacctgacccgggccggactctacgcccgcctgctcgcctccatcggcgtcaacgcggtcgtcgtcaacaacgtcaacgccgaccccaagacgctgacgcccgagaacatggacggcctggcccgcatcgccaacgccttccggccctacggcgtccagctgggcgtctcgctcaacttcgcctcgccccagaccctcggcggactcgacagcttcgaccccctggacgagcgagtggtggagtggtggcgggacatcaccgacgccctctacgagcggatccccgacatggccggctacctggtcaaggccagctcggagggccagcccggccccttgacgtacaaccggacgctcgccgacggcgccaacctgttcgcgcgcgccctcaagccgcacggcggccgcgtcctgttccgcgccttcgtctacgaccacaccagcctggacgaggacaaggactggaaggcggaccgggccaaggcggcggtcgagtacttcgacggcctcgacggcaagttcgaggacaacgtggtgatccagatcaagtacggccccatcgacttccaggtgcgcgagcccgcgtcccccctcttctcgcgcctggtccgcaccgcctccgccctcgagctgcagatcacgcaggaatacctcggccagcaggcccacctcgtctacctggcgcccatgtggaaggagatcctcgacttcgacttccgcgtcgacggccggccctcgcgcaccgccgacatcctcaacggcaagcgcttcggccgccgccgcgcgggcggctacgccggcgtcgccaacgtcggcaccaacacgacctggctgggcagccacctggccatgtccaacctgtacgccttcggccgcctcgcctgggacccgtcgtccgagcccgagagcgtcctccgcgactggatccggctgaccttcggcgacgacccgaaggtgctcgacgtcatcacgcgcatgtcgatggcctcgtggccggcctacgagaactacagcggcaacctgggcatccagacgctgaccgacatcctgctgggccactacggcccgaacccggcctcgcaggacggcaacccgtggggccagtggacgcgcgccgacgccgacagcatcggcatggaccgcaccgtctggaacggcaccggcttctcgggccagtacccgcccgaggtcgcggcccggttcgagaggatcgagacgacgccggacgagctgctgctctggttccaccacgtcccctacacgcacgtcctcaagtccggcaagacggtcatccagcacttctacgacgcccactacgagggcagcgccgtggcccagaccttcccgcgcctgtgggagacgctccggggccgggtggacgacgagcggttcgagcacgtcctgttccggctcgagtaccaggccggccacgcgctcgtctggcgcgacagcatcaacaacttctacttcaacaagtccggcatccccgacgcccgcggccgcgtcggccaccacccgtaccgcatcgaggccgagcacatgcggctggacggctacgtcccctacgacgtgagccccttcgaggccgccagcggcgcccgctgcgtcgtgacgcgcgacaactcgaccgccaccgccgccaccgccagcgtcgagctgcgccacgtgcccacgggcacctacgacgtcgccgtcaactactacgacatggccatcggcaactccacctgggagctctacatcggccgccgccgcgtcggccgctggaagggcgacctcgaatacaacctcggccgcgccccgtccccctacatcgacggccagaccgccgcccgcgtcaccttccgccgcgtccacatcgagaggggcagcaccctcaagatcgtcggcaggccggacggcctggagcccgcccccatcgactacgtctccatcctgccgctgggcattgtcgactaa

SEQ ID NO: 560 - protein, 878 aa, Myceliophthora thermophilia
MRMRSLLVLAAIGLAAAEDGLNGWLRYARIKGARDFHDRLPSTIVALNATEGLPVYTAGQELAQGIEGIFGKKVDLDVDLATAGAGKSNGKGKGNGKGKGKGNNGHGHDRDTTATVGTVAAYVDSNPGAAAAGIPELADDGFYLRVSRGNVLILGQNERGALYGAFHYLSLLAQGNASDYTLASNPDAPIRWVNQWDNMQDGGTHGSVERGYGGDSIFFWDGKVRDDLTRAGLYARLLASIGVNAVVVNNVNADPKTLTPENMDGLARIANAFRPYGVQLGVSLNFASPQTLGGLDSFDPLDERVVEWWRDITDALYERIPDMAGYLVKASSEGQPGPLTYNRTLADGANLFARALKPHGGRVLFRAFVYDHTSLDEDKDWKADRAKAAVEYFDGLDGKFEDNVVIQIKYGPIDFQVREPASPLFSRLVRTASALELQITQEYLGQQAHLVYLAPMWKEILDFDFRVDGRPSRTADILNGKRFGRRRAGGYAGVANVGTNTTWLGSHLAMSNLYAFGRLAWDPSSEPESVLRDWIRLTFGDDPKVLDVITRMSMASWPAYENYSGNLGIQTLTDILLGHYGPNPASQDGNPWGQWTRADADSIGMDRTVWNGTGFSGQYPPEVAARFERIETTPDELLLWFHHVPYTHVLKSGKTVIQHFYDAHYEGSAVAQTFPRLWETLRGRVDDERFEHVLFRLEYQAGHALVWRDSINNFYFNKSGIPDARGRVGHHPYRIEAEHMRLDGYVPYDVSPFEAASGARCVVTRDNSTATAATASVELRHVPTGTYDVAVNYYDMAIGNSTWELYIGRRRVGRWKGDLEYNLGRAPSPYIDGQTAARVTFRRVHIERGSTLKIVGRPDGLEPAPIDYVSILPLGIVD

SEQ ID NO: 561 - protein, 861 aa, Myceliophthora thermophilia
EDGLNGWLRYARIKGARDFHDRLPSTIVALNATEGLPVYTAGQELAQGIEGIFGKKVDLDVDLATAGAGKSNGKGKGNGKGKGKGNNGHGHDRDTTATVGTVAAYVDSNPGAAAAGIPELADDGFYLRVSRGNVLILGQNERGALYGAFHYLSLLAQGNASDYTLASNPDAPIRWVNQWDNMQDGGTHGSVERGYGGDSIFFWDGKVRDDLTRAGLYARLLASIGVNAVVVNNVNADPKTLTPENMDGLARIANAFRPYGVQLGVSLNFASPQTLGGLDSFDPLDERVVEWWRDITDALYERIPDMAGYLVKASSEGQPGPLTYNRTLADGANLFARALKPHGGRVLFRAFVYDHTSLDEDKDWKADRAKAAVEYFDGLDGKFEDNVVIQIKYGPIDFQVREPASPLFSRLVRTASALELQITQEYLGQQAHLVYLAPMWKEILDFDFRVDGRPSRTADILNGKRFGRRRAGGYAGVANVGTNTTWLGSHLAMSNLYAFGRLAWDPSSEPESVLRDWIRLTFGDDPKVLDVITRMSMASWPAYENYSGNLGIQTLTDILLGHYGPNPASQDGNPWGQWTRADADSIGMDRTVWNGTGFSGQYPPEVAARFERIETTPDELLLWFHHVPYTHVLKSGKTVIQHFYDAHYEGSAVAQTFPRLWETLRGRVDDERFEHVLFRLEYQAGHALVWRDSINNFYFNKSGIPDARGRVGHHPYRIEAEHMRLDGYVPYDVSPFEAASGARCVVTRDNSTATAATASVELRHVPTGTYDVAVNYYDMAIGNSTWELYIGRRRVGRWKGDLEYNLGRAPSPYIDGQTAARVTFRRVHIERGSTLKIVGRPDGLEPAPIDYVSILPLGIVD

SEQ ID NO: 562 - DNA, 2646 bp, Myceliophthora thermophilia
atgagagaggcaacaggaacggcacgcctgtttcacaggctcagtaccatactgctaacatttttgttggttccgcgtctcgttggagcgagaccctaccccgtccattgggcagatgataataacggccgccaacgcatcagtctcaacgagggctggaagttttcacgtttcacttcgaatccggactcgctctcgtacgactctctaaagtcgtggatcctgccatccgccaataacttcatcaagggtgacaagcaccagcccccgtccggaacaccccccggcagcaatgttcagtatgtgcaaccggattttgacgaccgcgactgggagtccgttgacctgccgcacgactgggccatcaaggggccgttcaacgctcccggcgtgagcggaggcatggggcgcctgccctcgaacggcgtgggatggtaccgtcggacgttgaccagatcccccgaggacgaagacaagtccatcttcctcgacattgacggtgccatgtcgtatgccgccgtctggctcaacggccgtttgatcggtgggtggccgtacgggtacgcctcattccgcctcgatctcacgccctacctggacggcggcgacaacctgcttgctatccggctggagaacgcgctagacaactcgcgatggtatcccggcgcgggcatctaccgcaacgtctggctggtcaaggtcaacccgacccatgtcggccatttttggacgtacatcaccacgtcggacgtgtcggaggagaaggccaccgtccacctcacggtcgatgtggagaacggcggtgcatccgacacgacggtagacgtggtaacggaaatccacctgcttgacccggctacggggactcccggagaagaggtcgtggcgcagttcgagaaagccacggtagccgtgccggccggggggaagatgtcggtcagcggctcgacagcggtgaggaacccgctgctctggggtcccccgcccgagcaagagccgaacctgtacgtcgcgacgaccaggttgacggtcaacggcaccgtcatagacacctacgagacccccttcggtatccgctccgtcaccttcgacgcgaaccagggcgtgtcggtcaacggcaagccggtcaagatctggggcacgtgcaaccacggcgacctcggctcgctcgggacggccttgaacacccgcgccctggagcggcagctggaggcgctccgagagatggggagcaacgcgctccgcacctcccacaaccccccggccccggagttcctcgacctggccgaccggatgggcttcctggtgctggacgagatcttcgacacgtgggcggaccggaagacgaccaacgacttccacgccatctttccggactggcacgagcccgacctgcgcgcctttgtccgccgcgaccgcaaccacccgtccatcatcgcgtggtcctacggcaacgagatccccaaccagtccggctcggccacgggcgcgaccgcccaggccctccacggcatcctcgtcgaggaggacccgacccggccgtccacctgcgccatgaactcggcggggcccggcagcccgctggccgacgcgctcgacatcatcggcctcaactaccagggcgaggggctcggcacgtcgaccgacggctccttcgaccgcttccacgccgcatacccgggcaaggtcgtctggagcagcgagagcgcgtcggcgctcagcacgcgcggcacctacctgttccccgtgacgtcggggaaccacgccgacgtgggcgacggcccgggccagggcggcgacgggcgggactaccgggtgagcgcgtacgagctgtacgcgaccagctgggggtcgtccccggacaaggtgttcgccgcgcacgacgcgcacccctacgtcgccggcgagttcgtctggaccggctgggactacctgggcgagccgaccccctacgacggcgacgacggcgcgcggagctcctacttcggcatcatcgacctcgccggcttcaggaaggaccgcttctacctctaccaggcccgctggcggcccgacctgcccatggcccacctgctgccgcactggacctggcccgaccgcgtcggccaggtcacgcccgtgcacgtcttctcgtccggcgacgaggccgagctgttcgtcaacggcaagtcggcggggcggcagaagcgcggccggggccagtaccggttccggtgggacgacgttgtgtaccagccgggcaacgtcagcgtggtcgtgtacaaggacggcgaggagtgggcgcgggacgccaggtggacggtcgggaaagccaaggggctgaccctgacggccgaccgggccgagatcaggggggacggccgcgacctgtcgttcgtcaccgtggccgtcgtcgacgagaacggcgacacggtgcccgaggccggcaacgccatcgcgttttccgtctccggtcccggccggatcgtcgcgaccgacaacggagacccggccgacatgaccgagttcccgtcccttacccggaaggccttcagcggtctcgcgctggcgatcgttcgggcggataagggcgcttccggagacatcaccgtcacggcttccgccgagggtctcgagacggcggaggtggtgatacgagctgcttaa

SEQ ID NO: 563 - protein, 881 aa, Myceliophthora thermophilia
MREATGTARLFHRLSTILLTFLLVPRLVGARPYPVHWADDNNGRQRISLNEGWKFSRFTSNPDSLSYDSLKSWILPSANNFIKGDKHQPPSGTPPGSNVQYVQPDFDDRDWESVDLPHDWAIKGPFNAPGVSGGMGRLPSNGVGWYRRTLTRSPEDEDKSIFLDIDGAMSYAAVWLNGRLIGGWPYGYASFRLDLTPYLDGGDNLLAIRLENALDNSRWYPGAGIYRNVWLVKVNPTHVGHFWTYITTSDVSEEKATVHLTVDVENGGASDTTVDVVTEIHLLDPATGTPGEEVVAQFEKATVAVPAGGKMSVSGSTAVRNPLLWGPPPEQEPNLYVATTRLTVNGTVIDTYETPFGIRSVTFDANQGVSVNGKPVKIWGTCNHGDLGSLGTALNTRALERQLEALREMGSNALRTSHNPPAPEFLDLADRMGFLVLDEIFDTWADRKTTNDFHAIFPDWHEPDLRAFVRRDRNHPSIIAWSYGNEIPNQSGSATGATAQALHGILVEEDPTRPSTCAMNSAGPGSPLADALDIIGLNYQGEGLGTSTDGSFDRFHAAYPGKVVWSSESASALSTRGTYLFPVTSGNHADVGDGPGQGGDGRDYRVSAYELYATSWGSSPDKVFAAHDAHPYVAGEFVWTGWDYLGEPTPYDGDDGARSSYFGIIDLAGFRKDRFYLYQARWRPDLPMAHLLPHWTWPDRVGQVTPVHVFSSGDEAELFVNGKSAGRQKRGRGQYRFRWDDVVYQPGNVSVVVYKDGEEWARDARWTVGKAKGLTLTADRAEIRGDGRDLSFVTVAVVDENGDTVPEAGNAIAFSVSGPGRIVATDNGDPADMTEFPSLTRKAFSGLALAIVRADKGASGDITVTASAEGLETAEVVIRAA

SEQ ID NO: 564 - protein, 851 aa, Myceliophthora thermophilia
RPYPVHWADDNNGRQRISLNEGWKFSRFTSNPDSLSYDSLKSWILPSANNFIKGDKHQPPSGTPPGSNVQYVQPDFDDRDWESVDLPHDWAIKGPFNAPGVSGGMGRLPSNGVGWYRRTLTRSPEDEDKSIFLDIDGAMSYAAVWLNGRLIGGWPYGYASFRLDLTPYLDGGDNLLAIRLENALDNSRWYPGAGIYRNVWLVKVNPTHVGHFWTYITTSDVSEEKATVHLTVDVENGGASDTTVDVVTEIHLLDPATGTPGEEVVAQFEKATVAVPAGGKMSVSGSTAVRNPLLWGPPPEQEPNLYVATTRLTVNGTVIDTYETPFGIRSVTFDANQGVSVNGKPVKIWGTCNHGDLGSLGTALNTRALERQLEALREMGSNALRTSHNPPAPEFLDLADRMGFLVLDEIFDTWADRKTTNDFHAIFPDWHEPDLRAFVRRDRNHPSIIAWSYGNEIPNQSGSATGATAQALHGILVEEDPTRPSTCAMNSAGPGSPLADALDIIGLNYQGEGLGTSTDGSFDRFHAAYPGKVVWSSESASALSTRGTYLFPVTSGNHADVGDGPGQGGDGRDYRVSAYELYATSWGSSPDKVFAAHDAHPYVAGEFVWTGWDYLGEPTPYDGDDGARSSYFGIIDLAGFRKDRFYLYQARWRPDLPMAHLLPHWTWPDRVGQVTPVHVFSSGDEAELFVNGKSAGRQKRGRGQYRFRWDDVVYQPGNVSVVVYKDGEEWARDARWTVGKAKGLTLTADRAEIRGDGRDLSFVTVAVVDENGDTVPEAGNAIAFSVSGPGRIVATDNGDPADMTEFPSLTRKAFSGLALAIVRADKGASGDITVTASAEGLETAEVVIRAA

SEQ ID NO: 565 - DNA, 1098 bp, Myceliophthora thermophilia
atgtatctccccctgcggcttgctcttgtgtcgctcggcctgctgttggcgtgcgccgaagcggccgaaccgtaccgccttcgcgctccccccctcgacacgccgtggaccaaagatgtgggcacgaacccttggccgcagcatcctcgcccccagctccgccgcgatgcttggaagacgctcaacggcatctggacataccagccaacccaaggcgctcccgacgccggcgccctcccgaagctgcctctggagaaggaagttctgattccctcgtgcatcgagagcggtatctccggcattatggatatgagttttcaggtcactaggatgtggttcgggaccaacttcaccgtgcccccgcgctggaccgagtcgggccgccgcgtcctgctcaactttgaggcggtcgactacgaggccaccgtctacgtcaatggcgcggaggtcgggttcaaccgcggcggttacgctcgcttcacctttgacattaccgatcaccttgctgagaacggtgccaatgagctcgggctaacagcagagtttagccacgtcttcgtcttcgacccgacggatgaccagagcatcccccagggcaagcagaccaagcgaccctcgcacatcttctacacgccatgcacgggcatctggggaaccgtgtggctcgagagcgtcccggacaacttcatctcgggcctcgacctggccggcgacatggacggcaagctgaccgtcaccgtccacagccggaccaagaaggagaccccggtcgagatctcggtcgtggctccgcacggcggtgtgggggccaagcacgagggcgtctcggaccgcgagttcacgctccgggtgcccgaccccgacctctggtcgcccgactcgcccaccctgtacaacgtcaccgtcaagttgggcgcggacgaggtcaccagctacacgggcttccggaccatctcctccggcgtggtcaacgggatcaagcgccccctgctcaacggcgagttcgtcttcctgttcggcccgctcgaccagggctactggccggacggcatctacaccccaccgacgttggaagccatggtctacgacctgagagtg

SEQ ID NO: 566 - protein, 365 aa, Myceliophthora thermophilia
MYLPLRLALVSLGLLLACAEAAEPYRLRAPPLDTPWTKDVGTNPWPQHPRPQLRRDAWKTLNGIWTYQPTQGAPDAGALPKLPLEKEVLIPSCIESGISGIMDMSFQVTRMWFGTNFTVPPRWTESGRRVLLNFEAVDYEATVYVNGAEVGFNRGGYARFTFDITDHLAENGANELGLTAEFSHVFVFDPTDDQSIPQGKQTKRPSHIFYTPCTGIWGTVWLESVPDNFISGLDLAGDMDGKLTVTVHSRTKKETPVEISVVAPHGGVGAKHEGVSDREFTLRVPDPDLWSPDSPTLYNVTVKLGADEVTSYTGFRTISSGVVNGIKRPLLNGEFVFLFGPLDQGYWPDGIYTPPTLEAMVYDLR

SEQ ID NO: 567 - protein, 344 aa, Myceliophthora thermophilia
AEPYRLRAPPLDTPWTKDVGTNPWPQHPRPQLRRDAWKTLNGIWTYQPTQGAPDAGALPKLPLEKEVLIPSCIESGISGIMDMSFQVTRMWFGTNFTVPPRWTESGRRVLLNFEAVDYEATVYVNGAEVGFNRGGYARFTFDITDHLAENGANELGLTAEFSHVFVFDPTDDQSIPQGKQTKRPSHIFYTPCTGIWGTVWLESVPDNFISGLDLAGDMDGKLTVTVHSRTKKETPVEISVVAPHGGVGAKHEGVSDREFTLRVPDPDLWSPDSPTLYNVTVKLGADEVTSYTGFRTISSGVVNGIKRPLLNGEFVFLFGPLDQGYWPDGIYTPPTLEAMVYDLR

SEQ ID NO: 568 - DNA, 387 bp, Myceliophthora thermophilia
atgctctcctacctcgcaacgctttgcctcattctgttcggcgctctcgccgcagcggtcaccaacaccggcaccggcacgggaacgccagggctggcccggcgcgaggtctcccccgacaacacgtgcggcggcgagacgggctacacgtgcccgggcgagctggcctgctgctcgcagcacggctactgcggctcgaccgacgagttctgcctgtcgactgccggctgccaggccgacttctccaactcgaccgacgcctgccacgagcccatccccggcgaaagcttctcgatcgacggcacctgcggcaccgagggcgccggcaccgagggctaccgctgtcccgccaacgccaccatcaccagttgctgcagcgccgcgtga

SEQ ID NO: 569 - protein, 128 aa, Myceliophthora thermophilia
MLSYLATLCLILFGALAAAVTNTGTGTGTPGLARREVSPDNTCGGETGYTCPGELACCSQHGYCGSTDEFCLSTAGCQADFSNSTDACHEPIPGESFSIDGTCGTEGAGTEGYRCPANATITSCCSAA

SEQ ID NO: 570 - protein, 111 aa, Myceliophthora thermophilia
AAVTNTGTGTGTPGLARREVSPDNTCGGETGYTCPGELACCSQHGYCGSTDEFCLSTAGCQADFSNSTDACHEPIPGESFSIDGTCGTEGAGTEGYRCPANATITSCCSAA

SEQ ID NO: 571 - DNA, 1116 bp, Myceliophthora thermophilia
atgcctcaaatcaagtctcggctcaaggctgaaagaatgcagctcagatacctgtccattgtcgcctctgggctcgtcccaggactggtttgtggccgtgccctgtctcgccgtgctattaactgcgagttttccatgactcccagcatcggtgacagctgccagagctttgcagatgcctgggcactctcggtcgaggatctcaaaagattgaatcccggaattacgtgcccagatctcgataccagcaagtcgtactgcttggtgggtaccgtcaccgacgatccgcctatgaccacctccacccagtccccggccacatcgtcctccaagccgaccagcacccggacctcgaccatcaccctagccccatctaccacttctcgctcgaccatttcctcctccccttcgaccaccaccactcgctccggcaatggtgtgactacgccactcccgatccaatccggcatggtcggaaactgcaacaagttccattttgtcgaaaaggatgagacctgtgacaccatcgcggctctctactccatctcggcgtctcagttcctccagtggaaccctgcagccaaagcagactgctctggcctctgggcctcaacgtatgcctgcgtgggtatcatcggaggcaccccgccggcaaccacgacgcgggctggaaacggcatcacgacgcctacgcccgtgcaccctggcatggtgagcaactgcaacaagtttgcctacgtcaaccccggcgatacatgtgatggcctcgcctccttgtaccacatctcgactagtgatctcgtctcgtggaatgctggcatcggcgggaaagactgccgtagcttgcaagccaacaccttcatatgcatcggtgtcaccggaggcacgcctacgagcactggaaatggcattccgacacccaccccgacacagtcgggtatggtcaagaactgcaacaagttcgtctacgtcaacccgggcgacacgtgtgctggcattgcctctaagaactccatctcggtcgataattttgttaaatggaatggcggcgttggcgggaaggattgccgtggcctgcaagcctacacttacgcctgtgttggcgtgaagggctaa

SEQ ID NO: 572 - protein, 371 aa, Myceliophthora thermophilia
MPQIKSRLKAERMQLRYLSIVASGLVPGLVCGRALSRRAINCEFSMTPSIGDSCQSFADAWALSVEDLKRLNPGITCPDLDTSKSYCLVGTVTDDPPMTTSTQSPATSSSKPTSTRTSTITLAPSTTSRSTISSSPSTTTTRSGNGVTTPLPIQSGMVGNCNKFHFVEKDETCDTIAALYSISASQFLQWNPAAKADCSGLWASTYACVGIIGGTPPATTTRAGNGITTPTPVHPGMVSNCNKFAYVNPGDTCDGLASLYHISTSDLVSWNAGIGGKDCRSLQANTFICIGVTGGTPTSTGNGIPTPTPTQSGMVKNCNKFVYVNPGDTCAGIASKNSISVDNFVKWNGGVGGKDCRGLQAYTYACVGVKG

SEQ ID NO: 573 - protein, 339 aa, Myceliophthora thermophilia
RALSRRAINCEFSMTPSIGDSCQSFADAWALSVEDLKRLNPGITCPDLDTSKSYCLVGTVTDDPPMTTSTQSPATSSSKPTSTRTSTITLAPSTTSRSTISSSPSTTTTRSGNGVTTPLPIQSGMVGNCNKFHFVEKDETCDTIAALYSISASQFLQWNPAAKADCSGLWASTYACVGIIGGTPPATTTRAGNGITTPTPVHPGMVSNCNKFAYVNPGDTCDGLASLYHISTSDLVSWNAGIGGKDCRSLQANTFICIGVTGGTPTSTGNGIPTPTPTQSGMVKNCNKFVYVNPGDTCAGIASKNSISVDNFVKWNGGVGGKDCRGLQAYTYACVGVKG

SEQ ID NO: 574 - DNA, 969 bp, Myceliophthora thermophilia
atgagatccatctatctcggactggcggcggcggccttgtgctgggccggcgccctcagcgatccagcggcggcgaaagacgaagccgagttggcggcggccttggtcgggcggcaccggctttcaaggtccaataataacgggcaccgcttcgcgagcagcaacctggctgaacttggtgtgcgccagtctaccggccaatgcggccccgaatacgggagatgccccggagatctctgctgctccgagtacggcttctgcggagactcgatcgaccattgccatccgctcttccgctgccagcccgattatggcacttgcggatggcccagggaccctccggccacgtcgacatcgtcatcgactccgcccgcaagctccagctccagtacgagcacgtctcagcaaccgccatctacaacctcgagcagcactattaccagcattccgtcctcgacgtcgacttcgtccggcccgaccccaaccggccctctcgaggtcaccaaggacggcaggtgcggcaacaacaccatctgcgtcggcaaccccaacttcggcccctgctgctcccagttcttctggtgcggctcctcggaggagtactgcggcgccggctgccagagccagttcggcgcctgcatgggcgtcccgggcattcccggcgaaccgccgaacaacatcaccaccagctccaccacgagcagctcgacgacggcgacggcgacctccaccacggtcacctccagcagcagcaccaccagcacctcgtcgtcccctcccgccttcacgctgccccccggccaggtgtccagcaccgacggcaggtgcggcaacaacgtgaactgcctcggctcccagttcgggcgctgctgcagccagtttggctggtgcggcgagggcgacacctactgtggctacatcgccggctgccaacccaacttcgggtactgtgatccccgcccgacgtga

SEQ ID NO: 575 - protein, 322 aa, Myceliophthora thermophilia
MRSIYLGLAAAALCWAGALSDPAAAKDEAELAAALVGRHRLSRSNNNGHRFASSNLAELGVRQSTGQCGPEYGRCPGDLCCSEYGFCGDSIDHCHPLFRCQPDYGTCGWPRDPPATSTSSSTPPASSSSSTSTSQQPPSTTSSSTITSIPSSTSTSSGPTPTGPLEVTKDGRCGNNTICVGNPNFGPCCSQFFWCGSSEEYCGAGCQSQFGACMGVPGIPGEPPNNITTSSTTSSSTTATATSTTVTSSSSTTSTSSSPPAFTLPPGQVSSTDGRCGNNVNCLGSQFGRCCSQFGWCGEGDTYCGYIAGCQPNFGYCDPRPT

SEQ ID NO: 576 - protein, 302 aa, Myceliophthora thermophilia
DPAAAKDEAELAAALVGRHRLSRSNNNGHRFASSNLAELGVRQSTGQCGPEYGRCPGDLCCSEYGFCGDSIDHCHPLFRCQPDYGTCGWPRDPPATSTSSSTPPASSSSSTSTSQQPPSTTSSSTITSIPSSTSTSSGPTPTGPLEVTKDGRCGNNTICVGNPNFGPCCSQFFWCGSSEEYCGAGCQSQFGACMGVPGIPGEPPNNITTSSTTSSSTTATATSTTVTSSSSTTSTSSSPPAFTLPPGQVSSTDGRCGNNVNCLGSQFGRCCSQFGWCGEGDTYCGYIAGCQPNFGYCDPRPT

SEQ ID NO: 577 - DNA, 765 bp, Myceliophthora thermophilia
atgaagtcgacgtacggagcagcgattcttgcgactgccacgctggttcaagggcatgggtacctgacgattccgtccagtcgaacacggcttggtgcagaggccggcctcgattcttgtcccgagtgctcgattctcgagccggtgcagtcgtggcccgatctcgatgccgcgctggtcggacggagcggcccttgcggctacaatgcccgggttagcatcgactataaccagccgggtgagcactggggcaacgagccggtagcgacctactctcctggccaggttgtcgaggtgcagtggtgcgtcgatcacaatggagaccacggcggcatgttcagctaccgcatctgccagaaccagacgctggtcgacaagttcctcaccccgggttacctgcccaccgcagacgagaagcaggcggccgaagactgcttccaggctggcacgctctcgtgcaaagacgtgacgggacaggactgcgggtacaacccagactgctcggagggtcagccgtgctggcggaatgactggttcacctgcaacgcattccaggcagacagcaagcgcgcatgccagggagtcgacaacgcgcctcagggctcttgctacacgagcatctcgggcggcttcccggtcaccaagaagatcaagatccccgactaccagtcttctcacactctgctgtcattcaagtggaactcgttccagaccggtcagatctacctttcgtgcgccgacatcgccatcacagccagcaactag

SEQ ID NO: 578 - protein, 254 aa, Myceliophthora thermophilia
MKSTYGAAILATATLVQGHGYLTIPSSRTRLGAEAGLDSCPECSILEPVQSWPDLDAALVGRSGPCGYNARVSIDYNQPGEHWGNEPVATYSPGQVVEVQWCVDHNGDHGGMFSYRICQNQTLVDKFLTPGYLPTADEKQAAEDCFQAGTLSCKDVTGQDCGYNPDCSEGQPCWRNDWFTCNAFQADSKRACQGVDNAPQGSCYTSISGGFPVTKKIKIPDYQSSHTLLSFKWNSFQTGQIYLSCADIAITASN

SEQ ID NO: 579 - protein, 236 aa, Myceliophthora thermophilia
HGYLTIPSSRTRLGAEAGLDSCPECSILEPVQSWPDLDAALVGRSGPCGYNARVSIDYNQPGEHWGNEPVATYSPGQVVEVQWCVDHNGDHGGMFSYRICQNQTLVDKFLTPGYLPTADEKQAAEDCFQAGTLSCKDVTGQDCGYNPDCSEGQPCWRNDWFTCNAFQADSKRACQGVDNAPQGSCYTSISGGFPVTKKIKIPDYQSSHTLLSFKWNSFQTGQIYLSCADIAITASN

SEQ ID NO: 580 - DNA, 1257 bp, Myceliophthora thermophilia
atggttcacgtaggattgatcctcgcgctcgtcgcctccttgccccggaccgtcgccgaaggccctcgccagcagctccaggccagcctgaaccgaacacacccggaactccctcgtctcatgctctatcaccagacgacccatgacgccactggtcggcccatctcgctcctcccgctggtcaccaagcaacacattggcctcacccacctcatcgttggcgccttccacgtccacgccaacggcacgatccatctcaacgaccatcctccttggcacccacgctactcgaccctatgggccgagacccgcatcctgcagtcgccatccaccgctggcggcagaagcggaggggtcaaggtcctgggcatggtgggcggcgcggcggcggggacctttgcggcggacacgctggacggggacggagccgccgcggccgcgttcgaggcgtcgtacgcgctcctccacgaggcggtgcgggcgcacaccctcgacggcgtcgacctcgacgtggaggagcccatgacgctgcggggcgccgcacggctggtccgccgtctgcgggcggactttggcccgcgcttcgttatctcattcgcgcccgtggccacggccttgttggggacaggggcaggggcgggagcgggaacgggaacgggaacgggccggcggggacgtggacgggggcgcggaggagcggggaacctgagcgggttcgactaccgcgcgctggagcgggcggtggggagggagattgcgttctacaacgcccagttctacaacgggttcggcgggatggcggacacgcgcctcttcgacgccatcgtcggcgaggggtgggagccggacaggatcgtcatcgggcagctgacgagccccgagaacgggggcgggttcgtggggcacgagcgatttgcgaggacaatcgagcggctgaggaggaggcacggcgagatcggcggcgtcgccgggtgggaatatttcaacgccgtcccgggcgggtcgagccggccgtgggaatgggcagagagcatgacgaggatcctccggcctcccgggacagagccggtgttgagaatcacgagggagatggcggagagcctgagccgtgcgtggatggtgagcgcagcggagggaggaggaggaggagcaggaggaggagcagggggaattagcagtgccagcgggttgggtacagcggagaaacgagttgggctggcgccgaacgtcgattacatggccatggtgaatgcatga

SEQ ID NO: 581 - protein, 418 aa, Myceliophthora thermophilia
MVHVGLILALVASLPRTVAEGPRQQLQASLNRTHPELPRLMLYHQTTHDATGRPISLLPLVTKQHIGLTHLIVGAFHVHANGTIHLNDHPPWHPRYSTLWAETRILQSPSTAGGRSGGVKVLGMVGGAAAGTFAADTLDGDGAAAAAFEASYALLHEAVRAHTLDGVDLDVEEPMTLRGAARLVRRLRADFGPRFVISFAPVATALLGTGAGAGAGTGTGTGRRGRGRGRGGAGNLSGFDYRALERAVGREIAFYNAQFYNGFGGMADTRLFDAIVGEGWEPDRIVIGQLTSPENGGGFVGHERFARTIERLRRRHGEIGGVAGWEYFNAVPGGSSRPWEWAESMTRILRPPGTEPVLRITREMAESLSRAWMVSAAEGGGGGAGGGAGGISSASGLGTAEKRVGLAPNVDYMAMVNA

SEQ ID NO: 582 - protein, 399 aa, Myceliophthora thermophilia
EGPRQQLQASLNRTHPELPRLMLYHQTTHDATGRPISLLPLVTKQHIGLTHLIVGAFHVHANGTIHLNDHPPWHPRYSTLWAETRILQSPSTAGGRSGGVKVLGMVGGAAAGTFAADTLDGDGAAAAAFEASYALLHEAVRAHTLDGVDLDVEEPMTLRGAARLVRRLRADFGPRFVISFAPVATALLGTGAGAGAGTGTGTGRRGRGRGRGGAGNLSGFDYRALERAVGREIAFYNAQFYNGFGGMADTRLFDAIVGEGWEPDRIVIGQLTSPENGGGFVGHERFARTIERLRRRHGEIGGVAGWEYFNAVPGGSSRPWEWAESMTRILRPPGTEPVLRITREMAESLSRAWMVSAAEGGGGGAGGGAGGISSASGLGTAEKRVGLAPNVDYMAMVNA

SEQ ID NO: 583 - DNA, 780 bp, Myceliophthora thermophilia
atgatcgtcccaagggtgtccgcgctgatcacgattggcctcttcctctcacaagggcgcagcgcgcctacgtcttctgccaaccttaccgcccgtgccgagactgccgtccccctcggcgtcatcatcgaacactgcactgttcctggtgttgtggcactcacctttgacgacggtccgtttatctacaccagccatgttctcgaccttctagacgagtacggcgccaaagccacgtttttcatcaacggcgagaactggtctcgtggcattgatgatttctcgacgccatggcccgaaattctgaggcggatagacagttcaggccatcagatcggctctcacacgtggtcgcacgccgatctgtcgtctgtcgactcggccactcgggaactccagatcgtcaagctcgaaaaagcgctcttccacgtcctcggcaaggctcccacctatcttcggccgccctatgcttcttgttcgcaagattgtctgtccgaaacggagcggttggggctgcacgtggtcaactttgatgtcgatcccaaagactatcttcacaaccaggagggcgacaccggagcagcggaaaatttctcacgggccctagacgagcactggtggggggattcgttcctagtcctcagccacgactcgctacagtacacggctgagtacttggtcccatacatgctcggggagattcagcgacgcgggtatagggctgttaccgttggcgagtgtcttggtgatcccgccgagaactggtactggactgcatga

SEQ ID NO: 584 - protein, 259 aa, Myceliophthora thermophilia
MIVPRVSALITIGLFLSQGRSAPTSSANLTARAETAVPLGVIIEHCTVPGVVALTFDDGPFIYTSHVLDLLDEYGAKATFFINGENWSRGIDDFSTPWPEILRRIDSSGHQIGSHTWSHADLSSVDSATRELQIVKLEKALFHVLGKAPTYLRPPYASCSQDCLSETERLGLHVVNFDVDPKDYLHNQEGDTGAAENFSRALDEHWWGDSFLVLSHDSLQYTAEYLVPYMLGEIQRRGYRAVTVGECLGDPAENWYWTA

SEQ ID NO: 585 - protein, 238 aa, Myceliophthora thermophilia
APTSSANLTARAETAVPLGVIIEHCTVPGVVALTFDDGPFIYTSHVLDLLDEYGAKATFFINGENWSRGIDDFSTPWPEILRRIDSSGHQIGSHTWSHADLSSVDSATRELQIVKLEKALFHVLGKAPTYLRPPYASCSQDCLSETERLGLHVVNFDVDPKDYLHNQEGDTGAAENFSRALDEHWWGDSFLVLSHDSLQYTAEYLVPYMLGEIQRRGYRAVTVGECLGDPAENWYWTA

SEQ ID NO: 586 - DNA, 4407 bp, Myceliophthora thermophilia
atggtggcttcttcatggttcaccgcgccgcttgtggctgttgccctcctgctctctctcgatggagctgtggcgaagaagccaacattcaggcctccctccctcccaacgtacgacgatgatgcggcttgcccagagcgatgcagcgtttccgggcccagtacggggaactggtccgtttatcccaacttcgagcccataaggaagtgcacgcagaccatgttttacgacttctctctctacgactcggtcgacgacccgactgtcaaccaccggattcatgcttgttcatctttcggtcctgatttctccatcatccccggctccattaccaaaactgcttacgcctcgcctgcgcccgccaagatccggttcgagcttggatggtggaaccggggctacggcctggctgcccccggtctccggtccttggtaaagcaactccgcgcctacatcgatcacggacacggcgacggcgccgcggacaggcctttcatcatatacggccagtctggtcaagccaccatcggtctctatattggccagggtctgctgagccagggccttagcaagtctgcactcaagattctccaagacaatctcgcgaactcggacgtctcagcaccgagcctggccatacagctctgtggccagggctacggtagtagccatatctttggggctatggtcaccagcaatggaaccttcgctcccatccaagaggctatcaggacatgggccaatgccacgtgcctgtccttcgccggatccaaggagttccccggcgaggtcatgtttactacgccgctcttgctcgccaatggcaccgccaactcgaccgtccgggctcggtccctccgcccctatgcggctgagtgtcggacagtgcaggtcgaggccggtgacagctgtgggacactggccaagaaatgtggcatctctggtgccgacttcaccaactacaaccctggagcgagcttctgctccacgttgaagccgaaacagcacgtgtgctgctcgagcggaacgcttccagactttcgccctgtcaccaacccggacggctcatgctactcatacaaggtcaagagcaatgacaactgcgctgacctcgccgccgagtacggtcttacggtcgacgaaattgagagcttcaacaagaacacctggggctggggcggctgtaaggtcctattccttgacaccatcatgtgccttagcaaaggggctccgccattcccagctccgatctccaacgctatctgcggtccgcagaagctcggcaccatcccgccaacggacggctccaatatcgcagaccttaacccctgtccgatcaatgcctgttgcaacatctggggccagtgtggcatctccaaggacttctgcatcgacacgaacactgggcccccggggacggctgcccccggtacctacggctgtatctccaactgcggcctcgatatcgtcaagggaaaggggaccggctccatcaaaatcgcctactttgaaggcttcggcctggaacgagagtgtcttttccgggacgcctcccagatcgatacgtccaaatacacacacgtccacttcgccttcggcacgttgaccccgacctatgaggttaacgttggcgatatactgtcctcgtaccaattcacccaattcaagcttatctctgggcctaagaagatcctatcgtttgggggctgggacttttcgacctcaaaggcgacttattccatcttccgtaacggcgttaaggccgagaaccgtctcaccatggctaaaagcatcgccaatttcatcaaggaacacgacctcgacggcgtcgacattgactgggaatatccaggagcgcctgatatccccgatatccctgcgggcgaagaggacgagggaaccaactacctggcctttcttgtcgtcctaaagaacctgcttcctggaaagagcatctccattgccgcaccgtcgtcgtattggtacttgaagcagttccccatcaaggccatcagtcggattgtggactatatcgtcttcatgtcctacgacatccacggccagtgggatgcccacaacatgtggtcccaggacggatgcgttacaggcaactgtctacggagccatgtcaacctgacggagactaggctggcgttggttatgattactaaggcaggtgtccctggcgagaaggtcattgttggtgtgactagctacggccggtcctttgacatggctcaacccggctgctggagccccgactgtcagtttacgggggaccgtctgaactcgaacgcaaaaccggggaggtgtaccggtacggccggatacatttccaacgccgagattgacgagatcttggccggcgggggatcgagcgggggatcgagccaggcgcgtgcgggacgagtcgtcgcgagctttgttgataccagtagtaatacggatgtgctggtctacgacaacaaccaatgggtcggctatatgagcgaaaagaccaagaaaacccgtacgaccctctatacgggttggggcttgggaggtacgaccgactgggccagcgatttacagcaataccacgacgtccccgggccggcaaaggactggacagagtttaagcaactcatccgcgccggagaggacccgaagtccgaccactcacgcgaaggcgactggactaagttcgactgtacgaacccgtacttggtcgataaaacattctacacgcctactcagcgctggaagaacttggatacggatgctgcgtggcgcgacgttgttaggatctggaaagagaccgataaaccccgcaatatcatgtttacggcctcagtctcgactacgcttcacatctcggccgacgtcgactgcagaaacctagaggattgcaacacgaccgaagagtgctcagcgggcctcaacgggccgtactctggtcctgccgcgcagttcatctggaactcgatggtaaagatccatgccatgtaccacaactacgttctgatgctcgaaagggccacctctctcgttagcatggcactcgacgacatgcaaaaaacattcgcgccggttccggtggaggaagataaggcgtggctctacctcctcatcgacctcatcacccttggcacccttactgttgcggggcccttgtacaacaggcaactggggatgtatgtctatttctccgacaagtctgtcgacgacatcaaggacaccaccatgaccctgattggacaaagcacgaccatcgccaaggatgtgttgtcgaccaagcaagaagcatggactgagaacttgcaggctagcttcaacaatatgttgagccgggtcattgaaggttggcagaatgccacatctctcgccgtcaatgagatattcagcggcagtgaaacgtccctcaacattctttgggacgtcatgtcggatggaaaactcatcgagggcatgccgccaccgggaagcgggcccccccccgaccccggaaacatccataacgagctccaagccaacgtgaaaaagtcgatttatgctttcgccatccccaacctctggcgcgtatcgcagacgtttgccttcatcctcgactcgggtttcgggtgcgacgtcgagaagccgctgcaggactacctcgaggacgagaccatggaggccacaggcgcctgcgtcgacggaaagcggtactacctggttgccccgatcggcgagtccaggacatgcgactgggtgaacggaatgtgggattgcacactttccaacaagttctcggcgcctccgggactggacaggctcggcgccgacttcggctatctcaccaaggaggacttcatcaagggttccatccgcacgtggctcaagaacggcaaacggaatgccggcggcggcatgccggacgtgaccgacatcgataccatcaacagccttatcgacctcgatttcaccacgccgggcttcatccacctccccgtctgcagccccgagcgggcgtaccagacgtgggacacgagctcctcgggctatggcgccaactacccgtgcgaccccccgccgggtatcaacaactgcggcgattcgacctttgaggatcagaccagcgccgcgtcgcctaaggtcgaggattgcctgcagatcatcaagaacatccaggacgacggtaagaccgagtggaccatccaggttctgggcaagaaccagcgcgagattgccaagtttggggagtgccgcttcggcgtcgaggcgaccgagcagaccggcaacgccgacttcaaggtcggcggccaggacgtcatcgacatcatcaacgacgccgtcgagaagttcggcgggagcggtagggtcggcgccaagggagacatgtcgtgcaacggcaacatcaaggggcaggctgtcaaatggggtatctactaa

SEQ ID NO: 587 - protein, 1468 aa, Myceliophthora thermophilia
MVASSWFTAPLVAVALLLSLDGAVAKKPTFRPPSLPTYDDDAACPERCSVSGPSTGNWSVYPNFEPIRKCTQTMFYDFSLYDSVDDPTVNHRIHACSSFGPDFSIIPGSITKTAYASPAPAKIRFELGWWNRGYGLAAPGLRSLVKQLRAYIDHGHGDGAADRPFIIYGQSGQATIGLYIGQGLLSQGLSKSALKILQDNLANSDVSAPSLAIQLCGQGYGSSHIFGAMVTSNGTFAPIQEAIRTWANATCLSFAGSKEFPGEVMFTTPLLLANGTANSTVRARSLRPYAAECRTVQVEAGDSCGTLAKKCGISGADFTNYNPGASFCSTLKPKQHVCCSSGTLPDFRPVTNPDGSCYSYKVKSNDNCADLAAEYGLTVDEIESFNKNTWGWGGCKVLFLDTIMCLSKGAPPFPAPISNAICGPQKLGTIPPTDGSNIADLNPCPINACCNIWGQCGISKDFCIDTNTGPPGTAAPGTYGCISNCGLDIVKGKGTGSIKIAYFEGFGLERECLFRDASQIDTSKYTHVHFAFGTLTPTYEVNVGDILSSYQFTQFKLISGPKKILSFGGWDFSTSKATYSIFRNGVKAENRLTMAKSIANFIKEHDLDGVDIDWEYPGAPDIPDIPAGEEDEGTNYLAFLVVLKNLLPGKSISIAAPSSYWYLKQFPIKAISRIVDYIVFMSYDIHGQWDAHNMWSQDGCVTGNCLRSHVNLTETRLALVMITKAGVPGEKVIVGVTSYGRSFDMAQPGCWSPDCQFTGDRLNSNAKPGRCTGTAGYISNAEIDEILAGGGSSGGSSQARAGRVVASFVDTSSNTDVLVYDNNQWVGYMSEKTKKTRTTLYTGWGLGGTTDWASDLQQYHDVPGPAKDWTEFKQLIRAGEDPKSDHSREGDWTKFDCTNPYLVDKTFYTPTQRWKNLDTDAAWRDVVRIWKETDKPRNIMFTASVSTTLHISADVDCRNLEDCNTTEECSAGLNGPYSGPAAQFIWNSMVKIHAMYHNYVLMLERATSLVSMALDDMQKTFAPVPVEEDKAWLYLLIDLITLGTLTVAGPLYNRQLGMYVYFSDKSVDDIKDTTMTLIGQSTTIAKDVLSTKQEAWTENLQASFNNMLSRVIEGWQNATSLAVNEIFSGSETSLNILWDVMSDGKLIEGMPPPGSGPPPDPGNIHNELQANVKKSIYAFAIPNLWRVSQTFAFILDSGFGCDVEKPLQDYLEDETMEATGACVDGKRYYLVAPIGESRTCDWVNGMWDCTLSNKFSAPPGLDRLGADFGYLTKEDFIKGSIRTWLKNGKRNAGGGMPDVTDIDTINSLIDLDFTTPGFIHLPVCSPERAYQTWDTSSSGYGANYPCDPPPGINNCGDSTFEDQTSAASPKVEDCLQIIKNIQDDGKTEWTIQVLGKNQREIAKFGECRFGVEATEQTGNADFKVGGQDVIDIINDAVEKFGGSGRVGAKGDMSCNGNIKGQAVKWGIY

SEQ ID NO: 588 - protein, 1443 aa, Myceliophthora thermophilia
KKPTFRPPSLPTYDDDAACPERCSVSGPSTGNWSVYPNFEPIRKCTQTMFYDFSLYDSVDDPTVNHRIHACSSFGPDFSIIPGSITKTAYASPAPAKIRFELGWWNRGYGLAAPGLRSLVKQLRAYIDHGHGDGAADRPFIIYGQSGQATIGLYIGQGLLSQGLSKSALKILQDNLANSDVSAPSLAIQLCGQGYGSSHIFGAMVTSNGTFAPIQEAIRTWANATCLSFAGSKEFPGEVMFTTPLLLANGTANSTVRARSLRPYAAECRTVQVEAGDSCGTLAKKCGISGADFTNYNPGASFCSTLKPKQHVCCSSGTLPDFRPVTNPDGSCYSYKVKSNDNCADLAAEYGLTVDEIESFNKNTWGWGGCKVLFLDTIMCLSKGAPPFPAPISNAICGPQKLGTIPPTDGSNIADLNPCPINACCNIWGQCGISKDFCIDTNTGPPGTAAPGTYGCISNCGLDIVKGKGTGSIKIAYFEGFGLERECLFRDASQIDTSKYTHVHFAFGTLTPTYEVNVGDILSSYQFTQFKLISGPKKILSFGGWDFSTSKATYSIFRNGVKAENRLTMAKSIANFIKEHDLDGVDIDWEYPGAPDIPDIPAGEEDEGTNYLAFLVVLKNLLPGKSISIAAPSSYWYLKQFPIKAISRIVDYIVFMSYDIHGQWDAHNMWSQDGCVTGNCLRSHVNLTETRLALVMITKAGVPGEKVIVGVTSYGRSFDMAQPGCWSPDCQFTGDRLNSNAKPGRCTGTAGYISNAEIDEILAGGGSSGGSSQARAGRVVASFVDTSSNTDVLVYDNNQWVGYMSEKTKKTRTTLYTGWGLGGTTDWASDLQQYHDVPGPAKDWTEFKQLIRAGEDPKSDHSREGDWTKFDCTNPYLVDKTFYTPTQRWKNLDTDAAWRDVVRIWKETDKPRNIMFTASVSTTLHISADVDCRNLEDCNTTEECSAGLNGPYSGPAAQFIWNSMVKIHAMYHNYVLMLERATSLVSMALDDMQKTFAPVPVEEDKAWLYLLIDLITLGTLTVAGPLYNRQLGMYVYFSDKSVDDIKDTTMTLIGQSTTIAKDVLSTKQEAWTENLQASFNNMLSRVIEGWQNATSLAVNEIFSGSETSLNILWDVMSDGKLIEGMPPPGSGPPPDPGNIHNELQANVKKSIYAFAIPNLWRVSQTFAFILDSGFGCDVEKPLQDYLEDETMEATGACVDGKRYYLVAPIGESRTCDWVNGMWDCTLSNKFSAPPGLDRLGADFGYLTKEDFIKGSIRTWLKNGKRNAGGGMPDVTDIDTINSLIDLDFTTPGFIHLPVCSPERAYQTWDTSSSGYGANYPCDPPPGINNCGDSTFEDQTSAASPKVEDCLQIIKNIQDDGKTEWTIQVLGKNQREIAKFGECRFGVEATEQTGNADFKVGGQDVIDIINDAVEKFGGSGRVGAKGDMSCNGNIKGQAVKWGIY

SEQ ID NO: 589 - DNA, 543 bp, Myceliophthora thermophilia
atggccagatactacagggcaggagatcctcttacacaattgctgctgctcttcgcaaccgtccgggaggaccatggcttgccacggactggtccgaatcaagagacagtcacggtgaagactgcaccggcaaagcgccttgataacgaatcccgggtgctccgactgttccaggggtgcgactcgatccgccagctggtcgatgaggtcgaggatcctcgatccttggtgctcgaatatatggacgacaatgtagtcaacttgttgaagacaaaacgtctccctagggttgaggccaagcgtgccctcaaggccgctgttcaagggctcattgcgctacatgataagaatatttcctggggcacggccgagaagggcagcagccccgactacccctgcgacatcccgcccggcaaggaccggtgcggcgactcgaccttcgagggccagacaggcgacccctcctccccgctggtgtcggactgcctgcagatcatccggaacatcgagggcgacgcgtccaccccatcatattgttattga

SEQ ID NO: 590 - protein, 180 aa, Myceliophthora thermophilia
MARYYRAGDPLTQLLLLFATVREDHGLPRTGPNQETVTVKTAPAKRLDNESRVLRLFQGCDSIRQLVDEVEDPRSLVLEYMDDNVVNLLKTKRLPRVEAKRALKAAVQGLIALHDKNISWGTAEKGSSPDYPCDIPPGKDRCGDSTFEGQTGDPSSPLVSDCLQIIRNIEGDASTPSYCY

SEQ ID NO: 591 - protein, 154 aa, Myceliophthora thermophilia
LPRTGPNQETVTVKTAPAKRLDNESRVLRLFQGCDSIRQLVDEVEDPRSLVLEYMDDNVVNLLKTKRLPRVEAKRALKAAVQGLIALHDKNISWGTAEKGSSPDYPCDIPPGKDRCGDSTFEGQTGDPSSPLVSDCLQIIRNIEGDASTPSYCY

SEQ ID NO: 592 - DNA, 2562 bp, Myceliophthora thermophilia
atgtcggcgccgttgcacttccggggcttaccgcggaggggccgcatcctcgcgcttgccctgttctgcgtctgcctcatccttatgttcccagagtttaacctggctgttggggagatcaggctgccgtttctccggtccaggcccaactacgacgtcttggacttcgtcaaccccctaatcggcaccgccaacggaggccatgtcttccccggcgccacgctaccttatggaatggccaaacccgtagccgacaccttctcgccggccgagaacgccgccggctacgtctccgacgccaacccgatcatgggcttctcccacatgcacgactccggcaccggtggcctaccctcgttgggcaacttcccgctctttgtccacccgggctgccccgacgacgacttccgccgctgcgcctactcggtcatcacccggcccacgagccgcgtgcccggctccgcgatggccgcgccgggctacttcgccgtcaacctgaccaactcggtgcgggccgagatgacggccacccagcacgccgcgctgtaccggtttgggttctccggcaaggaccgggtcgacgtggtgcgtgatcccgaggggaggccggaggcggtggaaaggggcgtgccgtactcgcccctggtgctggtggacctggtcgacctgatgaacagccggagcctgggagccatccaggtgtttcccgaaagcgggaggatcatgggagaggggaggtacgtgccctcgtttgggacgggcaagtacgatgcgttcttctgtgccgacttcaggggcgccgccatacgcaggacgggcacgttcacgtcgaacaacgcgactgaggagcccaagttcctggacggggtccgcgccgggttccatatccccagcgggtcggcgggcgcctggctgcagtttgagcggccggcgaataactcgctgctggcgagggtcggcgtgtcgttcatatccatggaccaggcgtgccagaacgccgagagcgagatgggcgactggcatttcgagagagtggagagcgatgcgaggaagcagtggcgagagaagttgggcgccatcgagatcgacgccaccggggtgagcgaggagctgcagacgaccttctggtcagggctgtatcgcaccctgctgtcgccgcagaactacaccggggagaacccgttgtggaactcgacggagccgtatttcgactcgttctactgcatctgggactccttccgcgctcagcatcccttgctgaccatcatcgacccggtcgcgcagacggatatggtagtgttgcccctggatgacgacaaccaagccgattgtccaaatttgacacttctcgcaggaaaactgcccgactgtcggatgagtttctgcaagggttacacccagggaggctccaatgccgacgtggtcattgtagacgcattcgtaaagaacttgacagaaggaatagactgggacaccgcttacgaagccgtcgtctctgatgccgaagtcgaaccgcccaactggggactggagggacgcggcaaccttgtgagctggcacaagcttggctacatcccctgggacgacaccgaccggaacggcacaggcccaatgagccgcaccatcagccggggcgtcgagtacgcctacgaggacttctgcatcgccacgctagctcaaggccttggccacgcggccgacgccgccaaataccgccgccgcggcggcaactggcgcaactactggaacccacaccagcgcgacatcttcaaggacccccacggcgccacggtccagaccgacttcgtgggcttcatgcagccgcgcctcgttaacggctccttccgctaccagaacacgcgcgcctgctcgcccgtgcaggacatgcacggctgctactacgacacgcgcctcgacacgtacgaggggagcccctggctgtacagcttcttcgtgccgcaggacatggcgacgctcatccggctcatgggcgggcccgacgccttcgtcgagcgcctgcgctacttccacaccagcggtatcgcctacctgggtaacgagcccggcttcctgcccgtcttccagttccactacgccggccggcccgccctgagcactcactttgcgcgcgagtccatccccgccctgttcaacgcctccgtcaacgggatcccgggcaacgacgactgcgccatgggcgccttcagcgcctttgccatgatgggcttcttccccgtcgccggccaggacgtctacctgctgacgacgcccttcttccccgaggtgagaatccgcgccagggcggaggggaagtgggcggtcatcaaggtcaggcgcttcgaccccgcgggcaagagaaagttcatccaacgagcgaggctcaacggcaaggcgtacacgaagagttggatcacgcacgacttcttcctgaggggcggaaccttggagttctgggtcggcgaggaggaagggacttgggggaccaaggaagcagatctaccgccgagttggcctgttgagtgggatgaaaaggatggggttggattaggcgacggatattaa

SEQ ID NO: 593 - protein, 853 aa, Myceliophthora thermophilia
MSAPLHFRGLPRRGRILALALFCVCLILMFPEFNLAVGEIRLPFLRSRPNYDVLDFVNPLIGTANGGHVFPGATLPYGMAKPVADTFSPAENAAGYVSDANPIMGFSHMHDSGTGGLPSLGNFPLFVHPGCPDDDFRRCAYSVITRPTSRVPGSAMAAPGYFAVNLTNSVRAEMTATQHAALYRFGFSGKDRVDVVRDPEGRPEAVERGVPYSPLVLVDLVDLMNSRSLGAIQVFPESGRIMGEGRYVPSFGTGKYDAFFCADFRGAAIRRTGTFTSNNATEEPKFLDGVRAGFHIPSGSAGAWLQFERPANNSLLARVGVSFISMDQACQNAESEMGDWHFERVESDARKQWREKLGAIEIDATGVSEELQTTFWSGLYRTLLSPQNYTGENPLWNSTEPYFDSFYCIWDSFRAQHPLLTIIDPVAQTDMVVLPLDDDNQADCPNLTLLAGKLPDCRMSFCKGYTQGGSNADVVIVDAFVKNLTEGIDWDTAYEAVVSDAEVEPPNWGLEGRGNLVSWHKLGYIPWDDTDRNGTGPMSRTISRGVEYAYEDFCIATLAQGLGHAADAAKYRRRGGNWRNYWNPHQRDIFKDPHGATVQTDFVGFMQPRLVNGSFRYQNTRACSPVQDMHGCYYDTRLDTYEGSPWLYSFFVPQDMATLIRLMGGPDAFVERLRYFHTSGIAYLGNEPGFLPVFQFHYAGRPALSTHFARESIPALFNASVNGIPGNDDCAMGAFSAFAMMGFFPVAGQDVYLLTTPFFPEVRIRARAEGKWAVIKVRRFDPAGKRKFIQRARLNGKAYTKSWITHDFFLRGGTLEFWVGEEEGTWGTKEADLPPSWPVEWDEKDGVGLGDGY

SEQ ID NO: 594 - protein, 817 aa, Myceliophthora thermophilia
VGEIRLPFLRSRPNYDVLDFVNPLIGTANGGHVFPGATLPYGMAKPVADTFSPAENAAGYVSDANPIMGFSHMHDSGTGGLPSLGNFPLFVHPGCPDDDFRRCAYSVITRPTSRVPGSAMAAPGYFAVNLTNSVRAEMTATQHAALYRFGFSGKDRVDVVRDPEGRPEAVERGVPYSPLVLVDLVDLMNSRSLGAIQVFPESGRIMGEGRYVPSFGTGKYDAFFCADFRGAAIRRTGTFTSNNATEEPKFLDGVRAGFHIPSGSAGAWLQFERPANNSLLARVGVSFISMDQACQNAESEMGDWHFERVESDARKQWREKLGAIEIDATGVSEELQTTFWSGLYRTLLSPQNYTGENPLWNSTEPYFDSFYCIWDSFRAQHPLLTIIDPVAQTDMVVLPLDDDNQADCPNLTLLAGKLPDCRMSFCKGYTQGGSNADVVIVDAFVKNLTEGIDWDTAYEAVVSDAEVEPPNWGLEGRGNLVSWHKLGYIPWDDTDRNGTGPMSRTISRGVEYAYEDFCIATLAQGLGHAADAAKYRRRGGNWRNYWNPHQRDIFKDPHGATVQTDFVGFMQPRLVNGSFRYQNTRACSPVQDMHGCYYDTRLDTYEGSPWLYSFFVPQDMATLIRLMGGPDAFVERLRYFHTSGIAYLGNEPGFLPVFQFHYAGRPALSTHFARESIPALFNASVNGIPGNDDCAMGAFSAFAMMGFFPVAGQDVYLLTTPFFPEVRIRARAEGKWAVIKVRRFDPAGKRKFIQRARLNGKAYTKSWITHDFFLRGGTLEFWVGEEEGTWGTKEADLPPSWPVEWDEKDGVGLGDGY

SEQ ID NO: 595 - DNA, 1221 bp, Myceliophthora thermophilia
atgcgcttcctcaggtccctcaagcccgcacttgcgaccacggccgctattgcggccatcgctcccaaggatctagatatcaacgacccatcctcgatcaagggcgtggcaaaaaccatcgcctccggcgccatgtcctactactctggcaccgccgagaagtttgtcgacctccctgagccgtattactggtggcaggccggtgcgctcatggggagcatgctggactactcgcactatacgggcgacaagagctacgaccgcatcattgcgacggctctcctgggccaggtcggtccgaacttcgacttcatgcttccgtcacattttggccaggaagggaacgacgaccaggccttctggggatttgccgtcatggcggcggccgagaggaacttcccgcagccggacgagaatgtgaacacgacggcgtgcaacggcggcttctgggtgcagatcttcgcctcgaacccgaacggcctcgactacaagaacagcgtcagcaacggcggcctgttccagatctcggcccgcctcgcacgggcgacgggcaacaacacctacctggaatgggccgagaaggtctgggactggaccgagggcgtcggcatgatcgacaaagacttcaacgtgcacgacggcgcgagcgccagccacaactgcaccgacatcaacccagtcaccttctcgtacacggccgccatctacatgtacggcgcggccgtcatggccgatgtcacgggcgacaagaagtgggtgcagcgtaccgagcgcatcttggacgccgcccgttccttcttcagcccgttccccaacgccaccaacatcatgtacgagcacgcctgcgagcaggtcggcacgtgcaacgccgacatgcgcagcttcaagggctacctgtcgcgcttcgcgtacgcggcgagcgtgttcgtgccctcgatcaagccggtcatcgaggagctctggcatcccaccgcgaaggcggccgccaagtcctgctcgggcggcccggacggcacccagtgcgggcagaggtggtactacggcggcttcgacggcaccacgggcctgggagaggagatgtgcgcgctcgagacgatccagggactgctcgtcggcgaggcggagccgccgctcaagggcgaccagatcaagacggtccgcacttttgaaggctcgtcgaacaccaagcggggggggaggtacgatgctcgtcttgcgtag

SEQ ID NO: 596 - protein, 406 aa, Myceliophthora thermophilia
MRFLRSLKPALATTAAIAAIAPKDLDINDPSSIKGVAKTIASGAMSYYSGTAEKFVDLPEPYYWWQAGALMGSMLDYSHYTGDKSYDRIIATALLGQVGPNFDFMLPSHFGQEGNDDQAFWGFAVMAAAERNFPQPDENVNTTACNGGFWVQIFASNPNGLDYKNSVSNGGLFQISARLARATGNNTYLEWAEKVWDWTEGVGMIDKDFNVHDGASASHNCTDINPVTFSYTAAIYMYGAAVMADVTGDKKWVQRTERILDAARSFFSPFPNATNIMYEHACEQVGTCNADMRSFKGYLSRFAYAASVFVPSIKPVIEELWHPTAKAAAKSCSGGPDGTQCGQRWYYGGFDGTTGLGEEMCALETIQGLLVGEAEPPLKGDQIKTVRTFEGSSNTKRGGRYDARLA

SEQ ID NO: 597 - protein, 388 aa, Myceliophthora thermophilia
AIAPKDLDINDPSSIKGVAKTIASGAMSYYSGTAEKFVDLPEPYYWWQAGALMGSMLDYSHYTGDKSYDRIIATALLGQVGPNFDFMLPSHFGQEGNDDQAFWGFAVMAAAERNFPQPDENVNTTACNGGFWVQIFASNPNGLDYKNSVSNGGLFQISARLARATGNNTYLEWAEKVWDWTEGVGMIDKDFNVHDGASASHNCTDINPVTFSYTAAIYMYGAAVMADVTGDKKWVQRTERILDAARSFFSPFPNATNIMYEHACEQVGTCNADMRSFKGYLSRFAYAASVFVPSIKPVIEELWHPTAKAAAKSCSGGPDGTQCGQRWYYGGFDGTTGLGEEMCALETIQGLLVGEAEPPLKGDQIKTVRTFEGSSNTKRGGRYDARLA

SEQ ID NO: 598 - DNA, 1200 bp, Myceliophthora thermophilia
atggtggccatacgatggggcagcctcgtagttcgggctacttgtttcacatcatcacttagaggcccatgccgcgagaaagcaattgcagccgagcactcactggaagcagccaaggcgctccaaggctggtacgatgccccgtcggggctgtggagcacaacgggctggtggaacagcgcaaactgccttactgtcctcgccgactgggcgctgagcgccggagccgccgctaaaagcttggatgtccctaaaatcatcgccaacacgttcaataacgcccagcgagtgtctgtgacagcgcagaagagggtagctgcgactggcttggccacatccacctaccattttgaccaccaggcaaagcggggattctcccagttcatcaacaactactacgatgatgagggctggtgggcgctcgccctgatcaggtcgtgggacgtaacccacgaccaggcctacctcgacatggccgagcgcatctttgaggacatgcaagctggcacggacgataggtgtggcggcggtatttggtggagcaaggagaagcagtacaagaacgccatcgcaaatgagttgtacctcagcgtggctgccagcctcgccaaccgcatccccgacaagaaacagaggtacgagcaactcgccaaggacgagtgggtgtggttcaaggacagcgggatgatcaacaagaacaacctcatcaacgacgggctcgccatcgacgtcaacggcagatgcaccaacaacggcctgaccacgtggtcgtacaatcagggcgtcgtgctgggcggcctggtcgagctcgccaacgccacgggcgacccgtcgtacctgggtgaggcgacggccatcgcgaaagcagctgtcgagcttctcagcgacgaaaatggcatcattcgcgaggcggaccggtgcgagcccgactgtggtgcagacggcagccagttcaagggcatcttcgtgcgcaacttgcattacctgcagcgagcggctccacaggatgcattccggacggcgatccagaagaatgccgactcaatctgggcgaataaccggaacggcaagaaccaattcggcatccagtgggccgggccggcagacgtgggtaacggaccgaacgctgcgacgcatagctcggcgatggacgtgatcgttgcggcgttggcgattggccggcagggtcggtttagataa

SEQ ID NO: 599 - protein, 399 aa, Myceliophthora thermophilia
MVAIRWGSLVVRATCFTSSLRGPCREKAIAAEHSLEAAKALQGWYDAPSGLWSTTGWWNSANCLTVLADWALSAGAAAKSLDVPKIIANTFNNAQRVSVTAQKRVAATGLATSTYHFDHQAKRGFSQFINNYYDDEGWWALALIRSWDVTHDQAYLDMAERIFEDMQAGTDDRCGGGIWWSKEKQYKNAIANELYLSVAASLANRIPDKKQRYEQLAKDEWVWFKDSGMINKNNLINDGLAIDVNGRCTNNGLTTWSYNQGVVLGGLVELANATGDPSYLGEATAIAKAAVELLSDENGIIREADRCEPDCGADGSQFKGIFVRNLHYLQRAAPQDAFRTAIQKNADSIWANNRNGKNQFGIQWAGPADVGNGPNAATHSSAMDVIVAALAIGRQGRFR

SEQ ID NO: 600 - protein, 384 aa, Myceliophthora thermophilia
FTSSLRGPCREKAIAAEHSLEAAKALQGWYDAPSGLWSTTGWWNSANCLTVLADWALSAGAAAKSLDVPKIIANTFNNAQRVSVTAQKRVAATGLATSTYHFDHQAKRGFSQFINNYYDDEGWWALALIRSWDVTHDQAYLDMAERIFEDMQAGTDDRCGGGIWWSKEKQYKNAIANELYLSVAASLANRIPDKKQRYEQLAKDEWVWFKDSGMINKNNLINDGLAIDVNGRCTNNGLTTWSYNQGVVLGGLVELANATGDPSYLGEATAIAKAAVELLSDENGIIREADRCEPDCGADGSQFKGIFVRNLHYLQRAAPQDAFRTAIQKNADSIWANNRNGKNQFGIQWAGPADVGNGPNAATHSSAMDVIVAALAIGRQGRFR

SEQ ID NO: 601 - DNA, 1395 bp, Myceliophthora thermophilia
atgaggatatctgggatcttggcctcgctctgtgtgctggcccggtgcgggacggcaatcgacttggtacttggggatgaggactcggttaaatccgcagccagcacaatagcctttgggctggtcaagtattacacgggcaataacacgggcgacactccgggaaacctgccggacccatacttctggtgggaagcgggcgccatgttcgggactctggtcgactactgggcgctcaccggagacgactcgtacaacgccatcaccacccaggcgatcctgcaccaagcgaccgagaagggcgacttcatgccgcccaaccagacgcgcacgctcggcaacgacgaccaggggttctggggcatggcagccatgtcagcggccgagaacaacttccccaacccgcccgaggaccagccgcagtggctggccctggcccagtccctcttcaaccagtacgcctcccgctgggaggaggccacgtgcggcggcgggctccgctggcagatcttcacctttaacaacggcttcaactacaagaactccatctccaacgggtgcttcttcaacatcgccgcccgcctggcccgctacacgggcaacgagacctacgccgagtgggccgaaaagatctttgcctgggaggagtcggtgggactcatcgacgccaacctgacggtgcgggacggcgtgcacgtcagcctcgaggacggcagctgcaacagcagggacgagaaccagtggacctacaacgcgggcatcttcctgcacggcgcggccgtcatgtacaaccacaccaacgcctcggccatctggcgggagcgcgtcgacggcctgctggcctccaccacggccaccttcgtcgacccggccacgggcgtgctggtcgagcagctgtgcgagcccagcggcttctgcaacacggaccagcgctccttcaagggctacctgacccgctggctggccgggaccgcgcagatggcgccgcacaccctcgacgccgtccgcccgctgctcgaggccgacgccgccgccgccgcccgtgcctgcaccggcgaccccgcgcctcccgtgttccgcggccacccgggcaccgcgtgcgggttccgctggaccaccggcgccttcgacggctccgccggcgtcggcgagcagatgaacgccctctcggccgtcatgtaccccctcgtcgtccggggagccgccgccccgcccctgaccgccgacacgggcggtacctcgaagggcaaccccggcggcggcgccgcgcccgcgcacgaggaggtcggcatcgggtgcgcggagatcacgctccaggaccgggtcgccgccgggttcgtcacatcggccctcgcgctcggcgtcgtcgccgggtccgcgtttgtcatcctctaa

SEQ ID NO: 602 - protein, 464 aa, Myceliophthora thermophilia
MRISGILASLCVLARCGTAIDLVLGDEDSVKSAASTIAFGLVKYYTGNNTGDTPGNLPDPYFWWEAGAMFGTLVDYWALTGDDSYNAITTQAILHQATEKGDFMPPNQTRTLGNDDQGFWGMAAMSAAENNFPNPPEDQPQWLALAQSLFNQYASRWEEATCGGGLRWQIFTFNNGFNYKNSISNGCFFNIAARLARYTGNETYAEWAEKIFAWEESVGLIDANLTVRDGVHVSLEDGSCNSRDENQWTYNAGIFLHGAAVMYNHTNASAIWRERVDGLLASTTATFVDPATGVLVEQLCEPSGFCNTDQRSFKGYLTRWLAGTAQMAPHTLDAVRPLLEADAAAAARACTGDPAPPVFRGHPGTACGFRWTTGAFDGSAGVGEQMNALSAVMYPLVVRGAAAPPLTADTGGTSKGNPGGGAAPAHEEVGIGCAEITLQDRVAAGFVTSALALGVVAGSAFVIL

SEQ ID NO: 603 - protein, 445 aa, Myceliophthora thermophilia
IDLVLGDEDSVKSAASTIAFGLVKYYTGNNTGDTPGNLPDPYFWWEAGAMFGTLVDYWALTGDDSYNAITTQAILHQATEKGDFMPPNQTRTLGNDDQGFWGMAAMSAAENNFPNPPEDQPQWLALAQSLFNQYASRWEEATCGGGLRWQIFTFNNGFNYKNSISNGCFFNIAARLARYTGNETYAEWAEKIFAWEESVGLIDANLTVRDGVHVSLEDGSCNSRDENQWTYNAGIFLHGAAVMYNHTNASAIWRERVDGLLASTTATFVDPATGVLVEQLCEPSGFCNTDQRSFKGYLTRWLAGTAQMAPHTLDAVRPLLEADAAAAARACTGDPAPPVFRGHPGTACGFRWTTGAFDGSAGVGEQMNALSAVMYPLVVRGAAAPPLTADTGGTSKGNPGGGAAPAHEEVGIGCAEITLQDRVAAGFVTSALALGVVAGSAFVIL

SEQ ID NO: 604 - DNA, 1413 bp, Myceliophthora thermophilia
atggcgccgacaacaactgtgctgctaggcgcgcttctgcttgcatcaagcagcgtgaatgcacagcaggccaagctgcaggtcaaccttaattctgctgagtcgatcaagtcggccgcgaagattgtcgcaaagaacctgtattcctactaccacgggaatgagcccggccagactcccggtatcctacccgggccgcccccgggcggtccctactactggtggcaggccggcgccatgtgggggacctacatcgactactggttctacacgggcgatgacacctacaacgccgagacgacgcggtctttgttgttccaagccgaaccgcctgctaacgcctacatgccaaagaactggaccgcctcgctgggaaacgacgaccaaggtttctggggtatggccgcgatgctagccgccgaagtgaacttcccgaacccacccaaggatcaaccgcaatggctcgctctggcccaggccgtgttcaacacccaggcacctcgttgggagacggagtattgcgctggcgggctgcggtggcaggttgtgtccacaaatggcggctacgactacaaaaacaccattgccaacgccgtcttcatgaacatcgccgcgcgcctggcccgctacaccaacaacgatacctacgcgctctgggccaccaaggcgtgggactggatcgaggcgatgggctacgtcacagacaagtatgacgtcctcgacggcgcccacattgggcacaactgcaccgatctcaaccccgtccagttctcggctaatgccgccatgctcatccacgcaaccgccgtcatgtacaactataccactggcgaaactcgtgccaaatggcgacgccacgtcgccgggcttctcaaccacaccatcgaccacttcttccccgagggcatcatggtcgagcgggcctgcgagctcgaagaccgggtccagtgcaacacggaccagcactccttcaagggctacatgcaccgggcgctggcgaccgtggccgtgctggctcccttcacgtacgagaccatcaccaagacgctccgcagctccaccgagggctgcgtctcgtcctgcctggccgacggcacctgcggcttccgctggaacacgggcgagtacgacggcgacacggccgccggccccgccggccaggagatgagcgccctcgccgccctgtccaccatgcttctcgaacaggagaaggtgctcaagggccccctgaccaacaccacgggcggcaccagccagggcgacccgaacgcggggcagaagttcgagggcgtgtcgccgccgagggagatcacggcgggcgaccgggccggcgccggtatcctcacggccgtggtgctggcgtcttttttggggagcctcgtgtggatgggcatgggttggtcggagaagtga

SEQ ID NO: 605 - protein, 470 aa, Myceliophthora thermophilia
MAPTTTVLLGALLLASSSVNAQQAKLQVNLNSAESIKSAAKIVAKNLYSYYHGNEPGQTPGILPGPPPGGPYYWWQAGAMWGTYIDYWFYTGDDTYNAETTRSLLFQAEPPANAYMPKNWTASLGNDDQGFWGMAAMLAAEVNFPNPPKDQPQWLALAQAVFNTQAPRWETEYCAGGLRWQVVSTNGGYDYKNTIANAVFMNIAARLARYTNNDTYALWATKAWDWIEAMGYVTDKYDVLDGAHIGHNCTDLNPVQFSANAAMLIHATAVMYNYTTGETRAKWRRHVAGLLNHTIDHFFPEGIMVERACELEDRVQCNTDQHSFKGYMHRALATVAVLAPFTYETITKTLRSSTEGCVSSCLADGTCGFRWNTGEYDGDTAAGPAGQEMSALAALSTMLLEQEKVLKGPLTNTTGGTSQGDPNAGQKFEGVSPPREITAGDRAGAGILTAVVLASFLGSLVWMGMGWSEK

SEQ ID NO: 606 - protein, 449 aa, Myceliophthora thermophilia
QQAKLQVNLNSAESIKSAAKIVAKNLYSYYHGNEPGQTPGILPGPPPGGPYYWWQAGAMWGTYIDYWFYTGDDTYNAETTRSLLFQAEPPANAYMPKNWTASLGNDDQGFWGMAAMLAAEVNFPNPPKDQPQWLALAQAVFNTQAPRWETEYCAGGLRWQVVSTNGGYDYKNTIANAVFMNIAARLARYTNNDTYALWATKAWDWIEAMGYVTDKYDVLDGAHIGHNCTDLNPVQFSANAAMLIHATAVMYNYTTGETRAKWRRHVAGLLNHTIDHFFPEGIMVERACELEDRVQCNTDQHSFKGYMHRALATVAVLAPFTYETITKTLRSSTEGCVSSCLADGTCGFRWNTGEYDGDTAAGPAGQEMSALAALSTMLLEQEKVLKGPLTNTTGGTSQGDPNAGQKFEGVSPPREITAGDRAGAGILTAVVLASFLGSLVWMGMGWSEK

SEQ ID NO: 607 - DNA, 1275 bp, Myceliophthora thermophilia
atgcgcttcctcaggtccctcaagcccgcacttgcgaccacggccgctattgcggccatcgctcccaaggatctagatatcaacgacccatcctcgatcaagggcgtggcaaaaaccatcgcctccggcgccatgtcctactactctggcaccgccgagaagtttgtcgacctccctgagccgtattactggtggcaggccggtgcgctcatggggagcatgctggactactcgcactatacgggcgacaagagctacgaccgcatcattgcgacggctctcctgggccaggtcggtccgaacttcgacttcatgcttccgtcacattttggccaggaagggaacgacgaccaggccttctggggatttgccgtcatggcggcggccgagaggaacttcccgcagccggacgagaatgtcccctcgtggctgcagctgggcgcgaacctctggaactcgctcgcctcgaggtggaacacgacggcgtgcaacggcggcctcctgtggcagatcttcgcctcgaacccgaacggcctcgactacaagaacagcgtcagcaacggcggcctgttccagatctcggcccgcctcgcacgggcgacgggcaacaacacctacctggaatgggccgagaaggtctgggactggaccgagggcgtcggcatgatcgacaaagacttcaacgtgcacgacggcgcgagcgccagccacaactgcaccgacatcaacccagtcaccttctcgtacacggccgccatctacatgtacggcgcggccgtcatggccgatgtcacgggcgacaagaagtgggtgcagcgtaccgagcgcatcttggacgccgcccgttccttcttcagcccgttccccaacgccaccaacatcatgtacgagcacgcctgcgagcaggtcggcacgtgcaacgccgacatgcgcagcttcaagggctacctgtcgcgcttcgcgtacgcggcgagcgtgttcgtgccctcgatcaagccggtcatcgaggagctctggcatcccaccgcgaaggcggccgccaagtcctgctcgggcggcccggacggcacccagtgcgggcagaggtggtactacggcggcttcgacggcaccacgggcctgggagaggagatgtgcgcgctcgagacgatccagggactgctcgtcggcgaggcggagccgccgctcaagggcgaccagatcaagacggtccgcacttttgaaggctcgtcgaacaccaagcggggggggaggtacgatgctcgtcttgcgtag

SEQ ID NO: 608 - protein, 424 aa, Myceliophthora thermophilia
MRFLRSLKPALATTAAIAAIAPKDLDINDPSSIKGVAKTIASGAMSYYSGTAEKFVDLPEPYYWWQAGALMGSMLDYSHYTGDKSYDRIIATALLGQVGPNFDFMLPSHFGQEGNDDQAFWGFAVMAAAERNFPQPDENVPSWLQLGANLWNSLASRWNTTACNGGLLWQIFASNPNGLDYKNSVSNGGLFQISARLARATGNNTYLEWAEKVWDWTEGVGMIDKDFNVHDGASASHNCTDINPVTFSYTAAIYMYGAAVMADVTGDKKWVQRTERILDAARSFFSPFPNATNIMYEHACEQVGTCNADMRSFKGYLSRFAYAASVFVPSIKPVIEELWHPTAKAAAKSCSGGPDGTQCGQRWYYGGFDGTTGLGEEMCALETIQGLLVGEAEPPLKGDQIKTVRTFEGSSNTKRGGRYDARLA

SEQ ID NO: 609 - protein, 406 aa, Myceliophthora thermophilia
AIAPKDLDINDPSSIKGVAKTIASGAMSYYSGTAEKFVDLPEPYYWWQAGALMGSMLDYSHYTGDKSYDRIIATALLGQVGPNFDFMLPSHFGQEGNDDQAFWGFAVMAAAERNFPQPDENVPSWLQLGANLWNSLASRWNTTACNGGLLWQIFASNPNGLDYKNSVSNGGLFQISARLARATGNNTYLEWAEKVWDWTEGVGMIDKDFNVHDGASASHNCTDINPVTFSYTAAIYMYGAAVMADVTGDKKWVQRTERILDAARSFFSPFPNATNIMYEHACEQVGTCNADMRSFKGYLSRFAYAASVFVPSIKPVIEELWHPTAKAAAKSCSGGPDGTQCGQRWYYGGFDGTTGLGEEMCALETIQGLLVGEAEPPLKGDQIKTVRTFEGSSNTKRGGRYDARLA

SEQ ID NO: 610 - DNA, 1275 bp, Myceliophthora thermophilia; identical to SEQ ID NO: 607

SEQ ID NO: 611 - protein, 424 aa, Myceliophthora thermophilia; identical to SEQ ID NO: 608

SEQ ID NO: 612 - protein, 406 aa, Myceliophthora thermophilia; identical to SEQ ID NO: 609

SEQ ID NO: 613 - DNA, 2985 bp, Myceliophthora thermophilia
atggctttgcttgcctcgacatctctccttctcgctgggctctatctgcgcacgacttcgagtgttcaaatctctgaaacacctagccaagccgctggtcatcctcccgtgttcacactccccccttcggctgaccggggcaaaaacatcctccccaacatcaaggaccccaaggccatcgaccctcagacagtatgtccgggctacaaggcatccaacctgcaagacaccaaggacggcttcaccgcggatcttgaccttgccggcccggcatgcaatgtttatggaactgacgtcgagcatttggccttgtctgtcgagttccagggcgatgatcgggttcacgtcgaaatccggccgcgttacattacccctgggaatgaaacttggtttcttcttccggaggagctggtcccaaggccgtcggcgaggcaggcgtatactcctggcccaaacgacctgaccgtttcatggtctaacgatccaagcttctcctttaccgtaaagcgtggggcaatcggcgacaccctcttttccaccgaaggaaagagactcgtatacgaggaccagttcattgagttcatctctacactccccgaagactacaacctttatggtctcggcgaggtcattcacggattccgcctgggaaacaatctcactaggactcttttcgccgccgacgttgctgacacaattgatgccaacatctacggtagccacccggtctaccttgacacgagatacttcacagttgacgagtcaggcaagcttacttatgtcgccaatgcaaaggacatggctgcgaagtatgtctcgtatacgcatggcgtattcctccggaacgcccatgcccaggagattcttttgcaatcgtccggcatcacatggaggacgacgggggggagcatcgacctgtacttctatagtggcccaaaggcagaggacgtgataaggtcgtaccagcagtcgacaaccggactgccagctatgcagcggtactggacgcttggtttccatcagtgtcgctggggttatgacagctgggcggtgctacaggaggtggtcgacaactttgccaagtttgagattcccgtggaaaccgtctggtccgacatcgactatatgaagcaataccgcgactttgagaacgaccccgtgcggttcggctacgaggaaggggctcggttcctggcccagcttcacgcaaatcaccaacactacgttcccatagtggactccgccatatacgcccctaatcccgagaatcccggagatgcgtatcctccatatgatcgcggagttgaagcgaacgcattcatgatgaatcccgatgggtccatctactacggcgccgtgtggcccggctatactgtattccctgactgggtgggcgctgttctgaacggcagtggcgctattgactggtggatcgacgagctttcccggtggtctgagaaggttgcttttgatggattatggatcgacatgtcggaagttgcctccttttgtgttggcagctgcggcaccggtaacttgacgctgaacccggtccacccaccattcggacttccgggagaggctggaaatcttgtcttgcaataccctgaaggcttcgagctcaccaattcatcggaagctgtttcggcgtcgtctgctctcagtacgcaagaggctgcttccccgacgacggcgagcccgacgtcttccttttaccgcaccacgcctactccgggagtgcgcaacgtggattggccgccctatgccatcaacaacatccacggcgacttggcggtccatgctgtcagcccaaacgctacacatcatggcggttacctcgagtacgactttcacaacatgttcggacaccagattctcaacgccacctatcgtgccctgctcaaaatacacgagggaaagcggccctttatcatagggcgcagcaccttcgccgggtctggcaaatgggccgggcactggggaggcgacaacgcggcgctgtgggcatacatgtactttagcatcccacaggcgctgtccttctcgctctttggcgtgcccatgtttggtgtcgacacgtgcgggttcggcggcaacagcaattacgaactgtgctcccgctggatgcagctcagcgccttcttccccttctaccgcaaccataacatcctgggcgctatcccgcaggaaccctatgtctgggccagcgtcatcgacgccacaaaaaccgccatgcgcatccgttacgccttgctgccgtacctgtacacgctcatggctcgcgccagcctcgaggggagcaccgtcatgcgcgcgctggcgtgggagttccccgacgagccgtggctggccgacgccgatcggcagttcatgctcggcagagccatcatggtgactccctgcctggaacagggcgccagcaccgtgaggggcgtatttcccggcgtcggagacggcggcaagaagaccgtctggtacgactggtacacggggaaggcggtaacggacgagatcaaaccgggacagaacgtcaccatcgaggcgccacttggtcacatccctgtctacttgcgcggtggcagtgtggttcctgttcagggacccgggatgacgacgacggagagccggagaaacccgtggggtctgattgtggcgcttgatcgggagggtttcgcggagggagagctttatcttgacgatggtgagagcttagagccggcggctgtgacttgggtacaattcactgccacaaatacatccatcacagccgttcctcaaggcgactacgtcgacaacaacacgtttggcaacgccaccgtcatgggcttggctaagggccccgtgcggatgtggctgaacaggcgcgtgctcgaccatgcgaactggcagtatgaccaggatagggcagtgctgttgctgtatgggttgaatcatctgttcccccagggtgcgtggacggataaatgggagattaactgggagtaa

SEQ ID NO: 614 - protein, 994 aa, Myceliophthora thermophilia
MALLASTSLLLAGLYLRTTSSVQISETPSQAAGHPPVFTLPPSADRGKNILPNIKDPKAIDPQTVCPGYKASNLQDTKDGFTADLDLAGPACNVYGTDVEHLALSVEFQGDDRVHVEIRPRYITPGNETWFLLPEELVPRPSARQAYTPGPNDLTVSWSNDPSFSFTVKRGAIGDTLFSTEGKRLVYEDQFIEFISTLPEDYNLYGLGEVIHGFRLGNNLTRTLFAADVADTIDANIYGSHPVYLDTRYFTVDESGKLTYVANAKDMAAKYVSYTHGVFLRNAHAQEILLQSSGITWRTTGGSIDLYFYSGPKAEDVIRSYQQSTTGLPAMQRYWTLGFHQCRWGYDSWAVLQEVVDNFAKFEIPVETVWSDIDYMKQYRDFENDPVRFGYEEGARFLAQLHANHQHYVPIVDSAIYAPNPENPGDAYPPYDRGVEANAFMMNPDGSIYYGAVWPGYTVFPDWVGAVLNGSGAIDWWIDELSRWSEKVAFDGLWIDMSEVASFCVGSCGTGNLTLNPVHPPFGLPGEAGNLVLQYPEGFELTNSSEAVSASSALSTQEAASPTTASPTSSFYRTTPTPGVRNVDWPPYAINNIHGDLAVHAVSPNATHHGGYLEYDFHNMFGHQILNATYRALLKIHEGKRPFIIGRSTFAGSGKWAGHWGGDNAALWAYMYFSIPQALSFSLFGVPMFGVDTCGFGGNSNYELCSRWMQLSAFFPFYRNHNILGAIPQEPYVWASVIDATKTAMRIRYALLPYLYTLMARASLEGSTVMRALAWEFPDEPWLADADRQFMLGRAIMVTPCLEQGASTVRGVFPGVGDGGKKTVWYDWYTGKAVTDEIKPGQNVTIEAPLGHIPVYLRGGSVVPVQGPGMTTTESRRNPWGLIVALDREGFAEGELYLDDGESLEPAAVTWVQFTATNTSITAVPQGDYVDNNTFGNATVMGLAKGPVRMWLNRRVLDHANWQYDQDRAVLLLYGLNHLFPQGAWTDKWEINWE

SEQ ID NO: 615 - protein, 973 aa, Myceliophthora thermophilia
VQISETPSQAAGHPPVFTLPPSADRGKNILPNIKDPKAIDPQTVCPGYKASNLQDTKDGFTADLDLAGPACNVYGTDVEHLALSVEFQGDDRVHVEIRPRYITPGNETWFLLPEELVPRPSARQAYTPGPNDLTVSWSNDPSFSFTVKRGAIGDTLFSTEGKRLVYEDQFIEFISTLPEDYNLYGLGEVIHGFRLGNNLTRTLFAADVADTIDANIYGSHPVYLDTRYFTVDESGKLTYVANAKDMAAKYVSYTHGVFLRNAHAQEILLQSSGITWRTTGGSIDLYFYSGPKAEDVIRSYQQSTTGLPAMQRYWTLGFHQCRWGYDSWAVLQEVVDNFAKFEIPVETVWSDIDYMKQYRDFENDPVRFGYEEGARFLAQLHANHQHYVPIVDSAIYAPNPENPGDAYPPYDRGVEANAFMMNPDGSIYYGAVWPGYTVFPDWVGAVLNGSGAIDWWIDELSRWSEKVAFDGLWIDMSEVASFCVGSCGTGNLTLNPVHPPFGLPGEAGNLVLQYPEGFELTNSSEAVSASSALSTQEAASPTTASPTSSFYRTTPTPGVRNVDWPPYAINNIHGDLAVHAVSPNATHHGGYLEYDFHNMFGHQILNATYRALLKIHEGKRPFIIGRSTFAGSGKWAGHWGGDNAALWAYMYFSIPQALSFSLFGVPMFGVDTCGFGGNSNYELCSRWMQLSAFFPFYRNHNILGAIPQEPYVWASVIDATKTAMRIRYALLPYLYTLMARASLEGSTVMRALAWEFPDEPWLADADRQFMLGRAIMVTPCLEQGASTVRGVFPGVGDGGKKTVWYDWYTGKAVTDEIKPGQNVTIEAPLGHIPVYLRGGSVVPVQGPGMTTTESRRNPWGLIVALDREGFAEGELYLDDGESLEPAAVTWVQFTATNTSITAVPQGDYVDNNTFGNATVMGLAKGPVRMWLNRRVLDHANWQYDQDRAVLLLYGLNHLFPQGAWTDKWEINWE

SEQ ID NO: 616 - DNA, 1308 bp, Myceliophthora thermophilia
atggccgcctctttggcattcctgcagatccgggcggctagggaggtctttgctcacgtaattgtgggcaacgtgcccgagttcacgctggccgactgggaggaggacatgcggctggcgcaggaggccaagatcgacgggttcgcgctcaacattgcggccgaagacccgtccatcgaggcgtcgctggagctggcgttcgaggcggccggcgagcgcgacggcttctcgctcttcttctcgttcgactacctggcgcagggcccgtggccggccgagcgcgtgacggagctggtgaaaaagtacggcgcgagcgagtcctacttcaagccggacggccggcgcccgttcgtgtccacttttgagggcccctcgaacgcggacgactggcggaacatcaaggcggcggtcgacgtcttcttcgtgccggattggtcctccattccggcaaaggaggcggtcgcggcggcggggggcgtggcggacgggctgttcagcttcgacgcttggcccgatggggcggccaacatgacgaccgagggcgacgatgcattccgggcggcgctcggcgacgacaaggcgtacatgatgccggtggcgccctggttctacaccaacctgcccgggtttgggggcaagaactggctgtggcgcggtgacggcctgtgggacgcgcggtggcggcaggtggccgaggtgcggccagatttcgtcgagatcctgacgtggaacgactttggcgagtcacactacgtcggccccgtgcgcgacaaggagctgggcctgtttgagagcgccgacgcgcccctcaattacgcccgcggcatgacccacgacggctggcgccggttcctgcccttctacatcgacgtctacaagacgggcaaggtgcccgaccgggtcggcgaggaaggggttatggcctactaccgcaccgcaccggcgctggcctgccccgccggcggcacgacgggcaacaacaaggcgcagggccaggccgagctgccgccggaggagctggtcgagaacagcgtcttctacgcggccctgctcgactcggacgacggcgtcgcggtcgaggtgtccatcggcggcaagaagctgcccgggcggttcggcaccgtgcccgccgccgggccggggacgccgggcgtgtacacgggcagcgcgccgttcggcggcaacacgggcgaggtcgtcgtcacggtgtcgagggacggtaagacgatcgccacggtcgagggcggcaaggacatctccaacgagtgcgagaacaatgtgcagaactggaacgctgtcgctgtgtag

SEQ ID NO: 617 - protein, 435 aa, Myceliophthora thermophilia
MAASLAFLQIRAAREVFAHVIVGNVPEFTLADWEEDMRLAQEAKIDGFALNIAAEDPSIEASLELAFEAAGERDGFSLFFSFDYLAQGPWPAERVTELVKKYGASESYFKPDGRRPFVSTFEGPSNADDWRNIKAAVDVFFVPDWSSIPAKEAVAAAGGVADGLFSFDAWPDGAANMTTEGDDAFRAALGDDKAYMMPVAPWFYTNLPGFGGKNWLWRGDGLWDARWRQVAEVRPDFVEILTWNDFGESHYVGPVRDKELGLFESADAPLNYARGMTHDGWRRFLPFYIDVYKTGKVPDRVGEEGVMAYYRTAPALACPAGGTTGNNKAQGQAELPPEELVENSVFYAALLDSDDGVAVEVSIGGKKLPGRFGTVPAAGPGTPGVYTGSAPFGGNTGEVVVTVSRDGKTIATVEGGKDISNECENNVQNWNAVAV

SEQ ID NO: 618 - protein, 417 aa, Myceliophthora thermophilia
HVIVGNVPEFTLADWEEDMRLAQEAKIDGFALNIAAEDPSIEASLELAFEAAGERDGFSLFFSFDYLAQGPWPAERVTELVKKYGASESYFKPDGRRPFVSTFEGPSNADDWRNIKAAVDVFFVPDWSSIPAKEAVAAAGGVADGLFSFDAWPDGAANMTTEGDDAFRAALGDDKAYMMPVAPWFYTNLPGFGGKNWLWRGDGLWDARWRQVAEVRPDFVEILTWNDFGESHYVGPVRDKELGLFESADAPLNYARGMTHDGWRRFLPFYIDVYKTGKVPDRVGEEGVMAYYRTAPALACPAGGTTGNNKAQGQAELPPEELVENSVFYAALLDSDDGVAVEVSIGGKKLPGRFGTVPAAGPGTPGVYTGSAPFGGNTGEVVVTVSRDGKTIATVEGGKDISNECENNVQNWNAVAV

SEQ ID NO: 619 - DNA, 1893 bp, Myceliophthora thermophilia
atgctgttctcgtcggtcctactcagctttgtgtccacggtagggctagccgccgtggtcactccccggggcccagcaccctcctcgttggaagcacgggctgccgcgggggaccggcttgtgttctgccacttcatgatcggcatagtcggcgaccgcaccagcgcggccgactacgacgatgatatgcgccgggccaaggaggcagggatcgacgcctttgccctcaacatcggcgtagatgggtataccgaccagcagctcaactacgcgtacgagtcggccgccagaaacgacatgaaagtcttcatctcgtttgacttcaactggtatagcccgggaaatgcggcggctgtgggcagcaagattgcccagtacgccagcaagcccgcacagctcctcgtcaacgaccgcgtcttcgcctcgtcctttgccggagacggcctggacgtcgatgccgtgagggccgccgccgggaccgacgtcttctttgttcccaacttccatcccggccaaggttcgctggctgccgtcgatggagccttcaattggatggcatggccgaacgacggaaacaacaaggcgcccaagcccggaaagtcgctgagcgtggccgacggagacaacgcctacctcgactggctaggcgacaaaacatacatggctcgtacgagtaatctgcccgagataatatacggaaatcatgaggtttcgttcagcaagaactgggtgtttcctggcggctcgctcattttcgaccgctggaacgaagtgctccagaaagggttcccaatggttgagctcatcacctggaacgattatggcgagtctcactatatcggtccattgagctctcctcactacgacgacggcaattccaagtggacaaatgacatgccgcacaatgggtggctcgacctctccaagccgtttatcgccgcctacaagaacaaggacacgtcggtggacaagtacattaccgacgaccagatcatctactggtaccgacggacgctggggtcgctcgactgcgacgccaccgacactacggcggggcggcccgccaacaacgacagcggcaactacttccagggccgcccggatggatggcagacgctggaggatgccgtctacgtggtcacgctgctcacggagcccggcacgctcacgattgcttcgggcgaccaggtggtcgagcaggaggtgcccgccggcgcgaacctcgtgaaggtccccgccgccgtcggaaagcagcgcttcagtctctcgcgtggcggcacggtcgtgctccaggacacgtcgctcatggacatctccaacgtctgcccgtgcggactgtacaacttcaacgcgtacgtgggcaccgtccccgccggcttcaacgacccgctcggggagcacggcctggcgtctctgactatcggccttcatgtcaccacctgctctgccaccccttcgctcggcacgaaccctcccaccaccgccaccaccaccgccaccgcctccacgacgacggccggtcctatcaccaccagcaccaccagcaccaccagcaccagcagcggcacgacaagcgccccttctccgagcaagacgacctcggagcccactcagccgaccagcacatccgagcccgacctgccctgcaacggcggcaccaacgcggacggcgagacgggcaactacgcgggcctgtgcagcttcgcatgcagctacggctactgcccgccgggcccctgcaagtgcacctcgcgggggacccccggcacgccgccgccgcccagcggccgcgacgggtgcccgctgccgggcgagggcgacggctacaagggcctgtgcagcttcgcatgcagccacgggtactgtcccgagaccgcgtgccagtattgctag

SEQ ID NO: 620 - protein, 630 aa, Myceliophthora thermophilia
MLFSSVLLSFVSTVGLAAVVTPRGPAPSSLEARAAAGDRLVFCHFMIGIVGDRTSAADYDDDMRRAKEAGIDAFALNIGVDGYTDQQLNYAYESAARNDMKVFISFDFNWYSPGNAAAVGSKIAQYASKPAQLLVNDRVFASSFAGDGLDVDAVRAAAGTDVFFVPNFHPGQGSLAAVDGAFNWMAWPNDGNNKAPKPGKSLSVADGDNAYLDWLGDKTYMARTSNLPEIIYGNHEVSFSKNWVFPGGSLIFDRWNEVLQKGFPMVELITWNDYGESHYIGPLSSPHYDDGNSKWTNDMPHNGWLDLSKPFIAAYKNKDTSVDKYITDDQIIYWYRRTLGSLDCDATDTTAGRPANNDSGNYFQGRPDGWQTLEDAVYVVTLLTEPGTLTIASGDQVVEQEVPAGANLVKVPAAVGKQRFSLSRGGTVVLQDTSLMDISNVCPCGLYNFNAYVGTVPAGFNDPLGEHGLASLTIGLHVTTCSATPSLGTNPPTTATTTATASTTTAGPITTSTTSTTSTSSGTTSAPSPSKTTSEPTQPTSTSEPDLPCNGGTNADGETGNYAGLCSFACSYGYCPPGPCKCTSRGTPGTPPPPSGRDGCPLPGEGDGYKGLCSFACSHGYCPETACQYC

SEQ ID NO: 621 - protein, 613 aa, Myceliophthora thermophilia
AVVTPRGPAPSSLEARAAAGDRLVFCHFMIGIVGDRTSAADYDDDMRRAKEAGIDAFALNIGVDGYTDQQLNYAYESAARNDMKVFISFDFNWYSPGNAAAVGSKIAQYASKPAQLLVNDRVFASSFAGDGLDVDAVRAAAGTDVFFVPNFHPGQGSLAAVDGAFNWMAWPNDGNNKAPKPGKSLSVADGDNAYLDWLGDKTYMARTSNLPEIIYGNHEVSFSKNWVFPGGSLIFDRWNEVLQKGFPMVELITWNDYGESHYIGPLSSPHYDDGNSKWTNDMPHNGWLDLSKPFIAAYKNKDTSVDKYITDDQIIYWYRRTLGSLDCDATDTTAGRPANNDSGNYFQGRPDGWQTLEDAVYVVTLLTEPGTLTIASGDQVVEQEVPAGANLVKVPAAVGKQRFSLSRGGTVVLQDTSLMDISNVCPCGLYNFNAYVGTVPAGFNDPLGEHGLASLTIGLHVTTCSATPSLGTNPPTTATTTATASTTTAGPITTSTTSTTSTSSGTTSAPSPSKTTSEPTQPTSTSEPDLPCNGGTNADGETGNYAGLCSFACSYGYCPPGPCKCTSRGTPGTPPPPSGRDGCPLPGEGDGYKGLCSFACSHGYCPETACQYC

SEQ ID NO: 622 - DNA, 792 bp, Myceliophthora thermophilia
atggtcactgtcagcagccttgttgccgccgcgggcgtggtcctcctggctggccaggaggtctttgctgtgcagctcaccagggtcgattaccctaacaatgccacgtccagggcggagatgtacatctatgttcccgacaacgttgtcgagtcgccgccgctggtagtggttgtccacatgaaacacctcccccatccggccttggctccccacgttcagactcatcgaacccgggggacgtgctgggacgtgtcgtcgccgcggtcgctggagcgcgggggcgggggcgggggcgactcgcaggccatcgccgacatgatcctgcacgcggtggccgagtacggggcggacgcggcgcgcgtctacctgacgggcggcagctccggcgccatgatgggcaacgttcatggccgcgacgtacccggacctgctgcgggccgtcagcgtctactcgggcgtgccggccggctgcttcgtcagctcggccggccaggtggccgcgtggaacaacacgtgcagcggcggccggagcagggccagcccggagcagtgatctggcacgggagtgccgacagcacgctcgcgccggccaactacgaggagacgatcaagcagtggacgaacgtgtttggggtgagccaggagccgacaaactcggtcgagaactatccggcgcccaactaccggacggatgactacggggagaacgttcagggcatctttgcgaacggcgtcgggcatagcgtgccggcgaacctgacggccagcgaggcctggttcgggctgtga

SEQ ID NO: 623 - protein, 263 aa, Myceliophthora thermophilia
MVTVSSLVAAAGVVLLAGQEVFAVQLTRVDYPNNATSRAEMYIYVPDNVVESPPLVVVVHMKHLPHPALAPHVQTHRTRGTCWDVSSPRSLERGGGGGGDSQAIADMILHAVAEYGADAARVYLTGGSSGAMMGNVHGRDVPGPAAGRQRLLGRAGRLLRQLGRPGGRVEQHVQRRPEQGQPGAVIWHGSADSTLAPANYEETIKQWTNVFGVSQEPTNSVENYPAPNYRTDDYGENVQGIFANGVGHSVPANLTASEAWFGL

SEQ ID NO: 624 - protein, 240 aa, Myceliophthora thermophilia
VQLTRVDYPNNATSRAEMYIYVPDNVVESPPLVVVVHMKHLPHPALAPHVQTHRTRGTCWDVSSPRSLERGGGGGGDSQAIADMILHAVAEYGADAARVYLTGGSSGAMMGNVHGRDVPGPAAGRQRLLGRAGRLLRQLGRPGGRVEQHVQRRPEQGQPGAVIWHGSADSTLAPANYEETIKQWTNVFGVSQEPTNSVENYPAPNYRTDDYGENVQGIFANGVGHSVPANLTASEAWFGL

SEQ ID NO: 625 - DNA, 711 bp, Myceliophthora thermophilia
atgttccgcaagaccgctcttctgctcctcgccgccctccccttctccttcgcgcagatctcggaggactttgaaggcggttgggacgagtcggcgtggccgatctacgccaacgactgcaaccagggcggcaaggtgtcgctggacaccaccactgcccacagcggctctaactcggtccgggttgacggcgccggtggttactgcgggcacattttctttggcacgacgtccgtccctagcggtgatctctatgtcaggacatggctgaaagcgcaaaacgccctcaccgacgcccacgttagcttcatcaccatgccggactcggcccagggggcgaacaagcacctccggatcggcgggcagagcaagatcctcatgtacaaccgcgagtcggacgacgcgacgctcccggacctgtcgccgcagggcatcgccgcgtcgaaggccctgcccacgggcgactggcagtgcctcgagtaccacgtcggcgccgacggcaccatcgagacgtggctcaacggcgaggccatcgaggggctgactgtcaagtccggcgtcgacaaccccaacgccggccagtggcagaggagcaacgtcgtccccaaacccaccgccgtctacttcggctgggagtcgtacggcggcgacaccaacaccttctggtacgacgacatcgtcatcagcgacacccgcgtcgggtgcgagtaa

SEQ ID NO: 626 - protein, 236 aa, Myceliophthora thermophilia
MFRKTALLLLAALPFSFAQISEDFEGGWDESAWPIYANDCNQGGKVSLDTTTAHSGSNSVRVDGAGGYCGHIFFGTTSVPSGDLYVRTWLKAQNALTDAHVSFITMPDSAQGANKHLRIGGQSKILMYNRESDDATLPDLSPQGIAASKALPTGDWQCLEYHVGADGTIETWLNGEAIEGLTVKSGVDNPNAGQWQRSNVVPKPTAVYFGWESYGGDTNTFWYDDIVISDTRVGCE

SEQ ID NO: 627 - protein, 218 aa, Myceliophthora thermophilia
QISEDFEGGWDESAWPIYANDCNQGGKVSLDTTTAHSGSNSVRVDGAGGYCGHIFFGTTSVPSGDLYVRTWLKAQNALTDAHVSFITMPDSAQGANKHLRIGGQSKILMYNRESDDATLPDLSPQGIAASKALPTGDWQCLEYHVGADGTIETWLNGEAIEGLTVKSGVDNPNAGQWQRSNVVPKPTAVYFGWESYGGDTNTFWYDDIVISDTRVGCE

SEQ ID NO: 628 - DNA, 1113 bp, Myceliophthora thermophilia
atggttcgactgggatcgagcctcgccgggtttgcgctggcagcaagcacggcccgagcaggctcctacactctggtcgacacgtttgacgcaagcaacttcttcgacgagttcgacttcttcaccgagcccgacccgacccacggcttcgtccagtacgtcgacggcgacacggcaaaccgcgaggggctcgccgggtttgcctcgggcggcgtctacctcggcgtcgactacagcagcacgacgacgacgacgacgaccggccgagcgtcggtccggctgacgtcccgaaaggcctacacgaggggcctcttcgtcgccgacatcgcgcacatgccggcgggcgcggccggttctagctcatcgacgtcgtcgagggcgtcaacagccagacgtccaactccggtctcgctccacacgggcgccggctgcaccgtctccaacccgggcgcctcgcccggcaccaagctcgtctcggcagactgccagggcggcgagggctgcacccaggacacgagcgcgcccgacaactacggcgccggcttcaacgctgtcggcggcgggatctacgccgtcgagtggacagacgccgccatcaaggtctggttcctgccgcgggacagccccatcgccagccagctctcttcttctttttcttcttcttcttcttcttctttcccctcgggaggaaacaacaacaacaccaacatcaaggataataaaagcctggacccgtccgccttcggcacgcccctggccgtcttcgccggcggggccgagtgcccgatcggcgaccacttcgccaaccaccacctcgtcttcgacaccaccttctgcggcgactgggccggccgggtctgggccgccgacggcgcgtgcgccgcgctggccgacacgtgcgaggactacgtcgccgcccacccggaggccttctccgaggcgtactggctgctcgggtccatccgcgtctaccagctcgaggcagacgccggcgcgggtacgggtacgggtggggcgagcgcgggcggcggcgacgacggtcagggtgaaggggggggacaagggcagcggcggggtttgaggccaaagatggcgaggaggtggcaggcttga

SEQ ID NO: 629 - protein, 370 aa, Myceliophthora thermophilia
MVRLGSSLAGFALAASTARAGSYTLVDTFDASNFFDEFDFFTEPDPTHGFVQYVDGDTANREGLAGFASGGVYLGVDYSSTTTTTTTGRASVRLTSRKAYTRGLFVADIAHMPAGAAGSSSSTSSRASTARRPTPVSLHTGAGCTVSNPGASPGTKLVSADCQGGEGCTQDTSAPDNYGAGFNAVGGGIYAVEWTDAAIKVWFLPRDSPIASQLSSSFSSSSSSSFPSGGNNNNTNIKDNKSLDPSAFGTPLAVFAGGAECPIGDHFANHHLVFDTTFCGDWAGRVWAADGACAALADTCEDYVAAHPEAFSEAYWLLGSIRVYQLEADAGAGTGTGGASAGGGDDGQGEGGGQGQRRGLRPKMARRWQA

SEQ ID NO: 630 - protein, 350 aa, Myceliophthora thermophilia
GSYTLVDTFDASNFFDEFDFFTEPDPTHGFVQYVDGDTANREGLAGFASGGVYLGVDYSSTTTTTTTGRASVRLTSRKAYTRGLFVADIAHMPAGAAGSSSSTSSRASTARRPTPVSLHTGAGCTVSNPGASPGTKLVSADCQGGEGCTQDTSAPDNYGAGFNAVGGGIYAVEWTDAAIKVWFLPRDSPIASQLSSSFSSSSSSSFPSGGNNNNTNIKDNKSLDPSAFGTPLAVFAGGAECPIGDHFANHHLVFDTTFCGDWAGRVWAADGACAALADTCEDYVAAHPEAFSEAYWLLGSIRVYQLEADAGAGTGTGGASAGGGDDGQGEGGGQGQRRGLRPKMARRWQA

SEQ ID NO: 631 - DNA, 1323 bp, Myceliophthora thermophilia
atgacggcgacaacaataaaatcactaatggcccttgggctcctgctctatgcaatgggcaccgcagctctaaatgatggagtaggaaagctccccgcccttgggttcaacacttggaacctgtaccagtgtaattacactgccgacgtcttgctggagcaggcccaggcaatagttgatcgcggccttttgaaggccggatacaattactttatgcttgatgactgctactccttgaaggagagggacgagaatggcaggattgtcgaagacccggaaaagttcccgaatggcatgaagaacttcaccgagtcgctggccaagctgggcttccgggcgggcatctacagcgacgcgggctaccgcacttgcggaggctatccgggctcgtacggcaatgaggccaaggacctcgagacgtttgccgagtgggggttcgagtatctcaagtacgacaattgctacatccccttcgacaacgtgacgcaggagaacgtgtacgggcggtacgagcggatggcggaggcgatccgggcgcgggccgaggagacggactcggcgccgttgcagctggccctctgcgaatgggggtggcagcagccgtggcggtgggcggggcggctgggccagtcgtggcggatcgggggcgacatccggccgtggtggtcggcgctgtcgagcatcatcaaccaggcgagcttcatcgcgggcgcgacgggcttctacgcgcgcaacgacctcgacatgctcgaggtgggcaacacgggcatcgggacgccgccgggcaacctcagctacgacgaggcaaagtcgcacttcaccgcctgggcgctcctaaagtcgcccctgctgatcggctccgatatggcctctgcctcccgcgagacgatggagatcctcggcaacgaggacatcctccgcatcaaccaggacccgcacgtcggcgaggccgtcgccccgttccgctggggccacaacgccgactacacctgggacccggaccacccggccgaatactggacggggaactcgtcgtacggcgtcgtcttcatggtcctcaacactttcgacgagccccgccacatgtccttcaacctgaccgagagctgggccatccgggccgggcggctctactcggtctatgacctgtggacgcacaccgataacgggacggcctaccgcaacatctcgctcaccctgcccccgcacggcgtggccgcgctgctgctgaacgacgccggcccggaacccgaggctgccgagccgtactgcgccgtgtggtggcagtgctcgtatccgaatggcacgtactacagtaactag

SEQ ID NO: 632 - protein, 440 aa, Myceliophthora thermophilia
MTATTIKSLMALGLLLYAMGTAALNDGVGKLPALGFNTWNLYQCNYTADVLLEQAQAIVDRGLLKAGYNYFMLDDCYSLKERDENGRIVEDPEKFPNGMKNFTESLAKLGFRAGIYSDAGYRTCGGYPGSYGNEAKDLETFAEWGFEYLKYDNCYIPFDNVTQENVYGRYERMAEAIRARAEETDSAPLQLALCEWGWQQPWRWAGRLGQSWRIGGDIRPWWSALSSIINQASFIAGATGFYARNDLDMLEVGNTGIGTPPGNLSYDEAKSHFTAWALLKSPLLIGSDMASASRETMEILGNEDILRINQDPHVGEAVAPFRWGHNADYTWDPDHPAEYWTGNSSYGVVFMVLNTFDEPRHMSFNLTESWAIRAGRLYSVYDLWTHTDNGTAYRNISLTLPPHGVAALLLNDAGPEPEAAEPYCAVWWQCSYPNGTYYSN

SEQ ID NO: 633 - protein, 417 aa, Myceliophthora thermophilia
LNDGVGKLPALGFNTWNLYQCNYTADVLLEQAQAIVDRGLLKAGYNYFMLDDCYSLKERDENGRIVEDPEKFPNGMKNFTESLAKLGFRAGIYSDAGYRTCGGYPGSYGNEAKDLETFAEWGFEYLKYDNCYIPFDNVTQENVYGRYERMAEAIRARAEETDSAPLQLALCEWGWQQPWRWAGRLGQSWRIGGDIRPWWSALSSIINQASFIAGATGFYARNDLDMLEVGNTGIGTPPGNLSYDEAKSHFTAWALLKSPLLIGSDMASASRETMEILGNEDILRINQDPHVGEAVAPFRWGHNADYTWDPDHPAEYWTGNSSYGVVFMVLNTFDEPRHMSFNLTESWAIRAGRLYSVYDLWTHTDNGTAYRNISLTLPPHGVAALLLNDAGPEPEAAEPYCAVWWQCSYPNGTYYSN

SEQ ID NO: 634 - DNA, 1128 bp, Myceliophthora thermophilia
atggctgcgacgacccacgtgctgccgccgcctttgtccattcttctggcccttcttcgagcctcaatagcagaccagctacgatcaaagatcattgtggaacaccccattaggaacagccttaacgcctttcgcggttcgtatcggtcgatttacaatcgcaagagcattgccttctcgattaacgcgtttgaccagcttgaccacgaaggatatagaaccttgctgccgcccgcctgctgcctacgagggcgggtcgtggcaccctacggagcgaccttctacgacttgagctctgacgacttcgacctcgaccgtatcaagcccctccgaaaagtagatctcgccgacgattccgatgattcgtgccgtgacgactgtctatacagagtccgacgaatctcaagtggcgtgaatcgggtcgtatacgtcaccatcacgaacctaaacatcatccctgaagagaaacgcacatacggtccctcagttatcaaagagctcagcaaactgtcagaatggagtggcgactggacaacactacgcgtctatatggatggtgaccgcatccggtgcgaaactgacgcattccaaccacatgccctcccagaggaacacgtcctcgagagataccccaagtacgacatatttagcttcgacgttcggcgctcagtcaaccaccgagtttccgaggtggtctatggcggacggactgcgttcctcaagattgcccggtttccattcgaactgcctctcttgatccgagaagtcgaagcctaccaccgcctagcagaatctgacgtggcaccaaaacttatcggatacgttttcgaagagagtccagatcgcgtcgttgggttcctagtcgagtcggtggaaggtcgcgttgcaaatgtcgcagactttgaggagtgtagtaaagctcttgagaagctacataacctcgtcgtccatggcgatctttgcagatataacattattatcactactaatgggcctaagtttatcgacttcgagcactcgacccctattacggaagccgaaaatggtttggtagacgatgaaaagcagagtctagcagaaaaattggttgacgagtctggagctggacgcccttgggacatgaattag

SEQ ID NO: 635 - protein, 375 aa, Myceliophthora thermophilia
MAATTHVLPPPLSILLALLRASIADQLRSKIIVEHPIRNSLNAFRGSYRSIYNRKSIAFSINAFDQLDHEGYRTLLPPACCLRGRVVAPYGATFYDLSSDDFDLDRIKPLRKVDLADDSDDSCRDDCLYRVRRISSGVNRVVYVTITNLNIIPEEKRTYGPSVIKELSKLSEWSGDWTTLRVYMDGDRIRCETDAFQPHALPEEHVLERYPKYDIFSFDVRRSVNHRVSEVVYGGRTAFLKIARFPFELPLLIREVEAYHRLAESDVAPKLIGYVFEESPDRVVGFLVESVEGRVANVADFEECSKALEKLHNLVVHGDLCRYNIIITTNGPKFIDFEHSTPITEAENGLVDDEKQSLAEKLVDESGAGRPWDMN

SEQ ID NO: 636 - protein, 351 aa, Myceliophthora thermophilia
DQLRSKIIVEHPIRNSLNAFRGSYRSIYNRKSIAFSINAFDQLDHEGYRTLLPPACCLRGRVVAPYGATFYDLSSDDFDLDRIKPLRKVDLADDSDDSCRDDCLYRVRRISSGVNRVVYVTITNLNIIPEEKRTYGPSVIKELSKLSEWSGDWTTLRVYMDGDRIRCETDAFQPHALPEEHVLERYPKYDIFSFDVRRSVNHRVSEVVYGGRTAFLKIARFPFELPLLIREVEAYHRLAESDVAPKLIGYVFEESPDRVVGFLVESVEGRVANVADFEECSKALEKLHNLVVHGDLCRYNIIITTNGPKFIDFEHSTPITEAENGLVDDEKQSLAEKLVDESGAGRPWDMN

SEQ ID NO: 637 - DNA, 1305 bp, Myceliophthora thermophilia
atgaagtacgcgcgcaacagtttcctcgtggccctgtattggccgcgagtcgccaaggccttggataatggggtcggcttgacgcctcacatgggatggagcagctggaatgtcgcccagtgcgatgctgcctcggccaagtatgccctcgacacggccgagaagtttatttcgctcgggctcaaggacctcgggtacgaatccgccccccagccggattctccgagccgtgtgtgcatgacgcgtgctgacggcggcccccccccccccccggcagacatcaacattgacgactgctggtcgctcaagtctcgcgacgagaacgggaagcttgtgcccgatccgggcaaatggcccgacggcatcaaacccgtcgccgatcggatccacgacctggggctcaagtttggtctgtacggctgtgccggccagaagacctgcgccggttaccccgggagcgacggggataagtacgcggcctcggatgtctctcagctggtcgagtggggagtcgatttttggaagtatgacaactgctacaccccctgcttggacaacccaccgccgcaaacctgccagagaccggcgggaaacagccaagagtggtacgccccgatgcgggatgccatcctgggcgtccaggagacgcgcaagatccacttcaacctctgcaactggggacgtgacgacgtctgggagtggggcgatgactacggacactcgtggcggatgagcgtcgacaactggggagactgggagagcgtcgagcggatcggcagcgcggcggccgacattgccgagtacagcgggccgggcgggttcaacgacctcgacatgctgtacctcgggtcgccgaagcttaacgccaacgaggagcgcctccacttcggcctctgggccatcgccaagtcgcccctcgtgctggggctcgacctcgccaccatctcgaacgcgacgctcgacatcatccgcaacaagggcatcatcgacatcaaccaggacaggctgggcaaggccgctaccaccttcaccccgcccggccggcccggcccggagagcgagagcggcaggatctaccccgacggcgtcgtcatcggcctctgcgccggctcctcggcggggacctacgccgtcgacttcagggacgtcccgggcctcggggacggcagctactcgtgggaggagatgtacacgggccagaccggcaccggcaccggcgtctcgttcgacattgacctccacgacatgcgggtcatcaaggtgaagacggcgggcacgaaaggaggacgggcggcagaactttga

SEQ ID NO: 638 - protein, 434 aa, Myceliophthora thermophilia
MKYARNSFLVALYWPRVAKALDNGVGLTPHMGWSSWNVAQCDAASAKYALDTAEKFISLGLKDLGYESAPQPDSPSRVCMTRADGGPPPPPADINIDDCWSLKSRDENGKLVPDPGKWPDGIKPVADRIHDLGLKFGLYGCAGQKTCAGYPGSDGDKYAASDVSQLVEWGVDFWKYDNCYTPCLDNPPPQTCQRPAGNSQEWYAPMRDAILGVQETRKIHFNLCNWGRDDVWEWGDDYGHSWRMSVDNWGDWESVERIGSAAADIAEYSGPGGFNDLDMLYLGSPKLNANEERLHFGLWAIAKSPLVLGLDLATISNATLDIIRNKGIIDINQDRLGKAATTFTPPGRPGPESESGRIYPDGVVIGLCAGSSAGTYAVDFRDVPGLGDGSYSWEEMYTGQTGTGTGVSFDIDLHDMRVIKVKTAGTKGGRAAEL

SEQ ID NO: 639 - protein, 414 aa, Myceliophthora thermophilia
LDNGVGLTPHMGWSSWNVAQCDAASAKYALDTAEKFISLGLKDLGYESAPQPDSPSRVCMTRADGGPPPPPADINIDDCWSLKSRDENGKLVPDPGKWPDGIKPVADRIHDLGLKFGLYGCAGQKTCAGYPGSDGDKYAASDVSQLVEWGVDFWKYDNCYTPCLDNPPPQTCQRPAGNSQEWYAPMRDAILGVQETRKIHFNLCNWGRDDVWEWGDDYGHSWRMSVDNWGDWESVERIGSAAADIAEYSGPGGFNDLDMLYLGSPKLNANEERLHFGLWAIAKSPLVLGLDLATISNATLDIIRNKGIIDINQDRLGKAATTFTPPGRPGPESESGRIYPDGVVIGLCAGSSAGTYAVDFRDVPGLGDGSYSWEEMYTGQTGTGTGVSFDIDLHDMRVIKVKTAGTKGGRAAEL

SEQ ID NO: 640 - DNA, 1392 bp, Myceliophthora thermophilia
atggcgagaacgcttcgatacctgctgtgcggcatcctcgcgttagcggcgggcagcaatgcggttcccgcagcccgtggttcgacccgagcggccccggcggcagagcccagcactagtgcgacgacatacgaggccgaagatgccatcctgagcggaaccacggtcgataccgctcaggagggatataccggatccggttacgtgaccggtttcgatgaggcgagcgacaagatcacgtttgaggtcgagagcgaggccactaagctctatgacctcagcatccgcatcgcggccatctacggcgacaaacacacgacggtggtgctgaacggcggggcgagcagcgacgtgtccttcccggccggcgacacgtgggtcgatgtcccggccggacaggtcctcctgaacgagggcgccaacacgatcgagattgtcagcaactgggggtggtacctcgtcgactccatcacgctcacgccctcggcgccgcggcccgagcaccagatcaaccggtccctcaacaacccgtcggccgacgcgagcgccagggccctgtacgactacctgcgctccatctacggcaagaagatcctcgcgggccagcaggacctgacctgggccgactacgtgacccagcagacgggcaagacgcccgcgctcgtgtcggtcgacctgatggactactcgccctcgcgggtcgagcgggggaccaagggcacgtcggtcgaggaggccatcacgcacgccgagcgcggcggcatcgtctcggccctctggcactggaacgcgcccgcgggcctgtacgacaccgacgagcacccctggtggagcggcttctacacggacgcgaccgacttcgacgtcgccgccgcgctgagctccaccgacaacgcaaactacaccctcctgctgcgcgacatcgacgccatcgccgtccagctcaagcgcctccgggacgcccgcgtgcccggcccggacccggccaagcagctctacgccctgctctacgaccgcctcgtcaaccaccacggcatcaacaacctcatctgggtctggaactcgctctcgcccgactggtatcccggcgacgacacggtcgacatcctgagcgcggacgtctacgctcaggggaacggcccaatgtctacccagtacaaccagctcatcgacctcggcaaggataagaagatgatcgccgcggccgaggtgggcgccgcgccgcttccggatctgctgcaggcctacgaagcccattggttgtggttcgccgtctggggcgacacgttcataaacaacgccgagtggaactcgcccgaggtcctgaagacggtctacaccagcgactacgtcctcaccctggacgagattcagggctggcaggattcgtga

SEQ ID NO: 641 - protein, 463 aa, Myceliophthora thermophilia
MARTLRYLLCGILALAAGSNAVPAARGSTRAAPAAEPSTSATTYEAEDAILSGTTVDTAQEGYTGSGYVTGFDEASDKITFEVESEATKLYDLSIRIAAIYGDKHTTVVLNGGASSDVSFPAGDTWVDVPAGQVLLNEGANTIEIVSNWGWYLVDSITLTPSAPRPEHQINRSLNNPSADASARALYDYLRSIYGKKILAGQQDLTWADYVTQQTGKTPALVSVDLMDYSPSRVERGTKGTSVEEAITHAERGGIVSALWHWNAPAGLYDTDEHPWWSGFYTDATDFDVAAALSSTDNANYTLLLRDIDAIAVQLKRLRDARVPGPDPAKQLYALLYDRLVNHHGINNLIWVWNSLSPDWYPGDDTVDILSADVYAQGNGPMSTQYNQLIDLGKDKKMIAAAEVGAAPLPDLLQAYEAHWLWFAVWGDTFINNAEWNSPEVLKTVYTSDYVLTLDEIQGWQDS

SEQ ID NO: 642 - protein, 442 aa, Myceliophthora thermophilia
VPAARGSTRAAPAAEPSTSATTYEAEDAILSGTTVDTAQEGYTGSGYVTGFDEASDKITFEVESEATKLYDLSIRIAAIYGDKHTTVVLNGGASSDVSFPAGDTWVDVPAGQVLLNEGANTIEIVSNWGWYLVDSITLTPSAPRPEHQINRSLNNPSADASARALYDYLRSIYGKKILAGQQDLTWADYVTQQTGKTPALVSVDLMDYSPSRVERGTKGTSVEEAITHAERGGIVSALWHWNAPAGLYDTDEHPWWSGFYTDATDFDVAAALSSTDNANYTLLLRDIDAIAVQLKRLRDARVPGPDPAKQLYALLYDRLVNHHGINNLIWVWNSLSPDWYPGDDTVDILSADVYAQGNGPMSTQYNQLIDLGKDKKMIAAAEVGAAPLPDLLQAYEAHWLWFAVWGDTFINNAEWNSPEVLKTVYTSDYVLTLDEIQGWQDS

SEQ ID NO: 643 - DNA, 1605 bp, Myceliophthora thermophilia
atgagaggcctcgtcgcattctcgctcgcagcctgcgtttcggcagcgccgagcttcaagaccgagaccatcaacggcgagcatgcccccattctctcctcgtcgaatgccgaggtcgtccccaactcgtatatcatcaagttcaagaagcatgtggatgagagctcggcctccgcccaccatgcctggatccaagacatccatacctcgcgcgagaaagttcgtcaagacttgaagaagcgcggccaggtgccgctgcttgacgacgtcttccatggcctcaagcacacctacaagattggccaagagttccttggctactctggccattttgatgacgaaaccatcgagcaagtccggaggcaccccgatgtggagtacattgagcgcgacagcattgtccacacgatgcgtgtcaccgaggaaacatgcgatggcgagcttgagaaggccgctccttggggcttggcccgtatctcgcaccgagatacgctcggcttctcgacgttcaacaagtatctgtatgccgccgagggcggtgagggcgttgacgcgtacgtcatcgacaccggtaccaacattgagcacgtcgacttcgagggtcgcgccaaatggggcaagaccatccccgcaggcgatgctgatgttgacggcaacggccacggaacccactgctccggcaccatcgctggcaagaagtacggcgtcgccaagaaggcgaatgtctatgccgtcaaggttctgcgctccaacggctccggcaccatggctgatgtcgttgccggtgtcgaatgggctgccaagtcccatctggagcaggtgcaggctgccaaggatggcaagcgcaagggcttcaagggttccgtcgccaacatgtcgcttggaggcggcaagaccagggccctcgatgacactgtgaacgctgctgtctctgtcggtatccacttcgccgtcgccgccggcaacgacaacgccgatgcctgcaactactcgcctgctgcggccgagaaggctgtcacggttggtgcctcggctattgacgacagccgtgcctacttctccaactacggcaagtgcaccgacatcttcgcccccggcctgagcatcctctccacctggatcggcagcaagtatgccaccaacaccatctctggcacctcgatggcctccccccatattgctggtctgctggcctactatctctcgctccagcccgccaccgattcggagtactcggtcgctcccatcacccctgagaagatgaagtcgaacttgctcaagatcgccacccaggatgcccttactgacatccccgacgagacgcccaatctgctcgcctggaacggcggtggctgcaacaactataccgccatcgtcgaggctggcggctacaaggccaagaagaagaccacgactgacaaggttgacattggcgcctcggtctctgagcttgagaagcttatcgagcacgattttgaggtcatctctggcaaggttgtcaagggcgtctcgtcgtttgcggacaaggccgagaagttctctgagaagattcacgagctggtcgatgaggaactcaaggagtttcttgaggacatcgctgcctaa

SEQ ID NO: 644 - protein, 534 aa, Myceliophthora thermophilia
MRGLVAFSLAACVSAAPSFKTETINGEHAPILSSSNAEVVPNSYIIKFKKHVDESSASAHHAWIQDIHTSREKVRQDLKKRGQVPLLDDVFHGLKHTYKIGQEFLGYSGHFDDETIEQVRRHPDVEYIERDSIVHTMRVTEETCDGELEKAAPWGLARISHRDTLGFSTFNKYLYAAEGGEGVDAYVIDTGTNIEHVDFEGRAKWGKTIPAGDADVDGNGHGTHCSGTIAGKKYGVAKKANVYAVKVLRSNGSGTMADVVAGVEWAAKSHLEQVQAAKDGKRKGFKGSVANMSLGGGKTRALDDTVNAAVSVGIHFAVAAGNDNADACNYSPAAAEKAVTVGASAIDDSRAYFSNYGKCTDIFAPGLSILSTWIGSKYATNTISGTSMASPHIAGLLAYYLSLQPATDSEYSVAPITPEKMKSNLLKIATQDALTDIPDETPNLLAWNGGGCNNYTAIVEAGGYKAKKKTTTDKVDIGASVSELEKLIEHDFEVISGKVVKGVSSFADKAEKFSEKIHELVDEELKEFLEDIAA

SEQ ID NO: 645 - protein, 519 aa, Myceliophthora thermophilia
APSFKTETINGEHAPILSSSNAEVVPNSYIIKFKKHVDESSASAHHAWIQDIHTSREKVRQDLKKRGQVPLLDDVFHGLKHTYKIGQEFLGYSGHFDDETIEQVRRHPDVEYIERDSIVHTMRVTEETCDGELEKAAPWGLARISHRDTLGFSTFNKYLYAAEGGEGVDAYVIDTGTNIEHVDFEGRAKWGKTIPAGDADVDGNGHGTHCSGTIAGKKYGVAKKANVYAVKVLRSNGSGTMADVVAGVEWAAKSHLEQVQAAKDGKRKGFKGSVANMSLGGGKTRALDDTVNAAVSVGIHFAVAAGNDNADACNYSPAAAEKAVTVGASAIDDSRAYFSNYGKCTDIFAPGLSILSTWIGSKYATNTISGTSMASPHIAGLLAYYLSLQPATDSEYSVAPITPEKMKSNLLKIATQDALTDIPDETPNLLAWNGGGCNNYTAIVEAGGYKAKKKTTTDKVDIGASVSELEKLIEHDFEVISGKVVKGVSSFADKAEKFSEKIHELVDEELKEFLEDIAA

SEQ ID NO: 646 - DNA, 1179 bp, Myceliophthora thermophilia
atgcacttctccaccgctctcctggccttcctgcccgccgccctcgcggcccctactgccgagaccctcgacaagcgcgccccgatcctgactgctcgcgctggccaggtcgtcccgggcaagtacatcatcaagctccgcgacggagccagcgacgatgtccttgaggccgccatcggcaagctccgctccaaggccgaccacgtctaccgcggcaagttcaggggctttgccggcaagctcgaggatgacgtccttgacgccatccgtcttctccccgaagtcgagtacgtcgaggaggaggccatcttcaccatcaacgcgtacacctcgcagtccaacgccccctggggccttgcgcgcctctcgtccaagaccgcgggctccaccacctacacctacgacaccagcgccggcgagggcacctgtgcctatgtgatcgacacgggcatctacactagccactccgacttcggcggccgtgccactttcgccgccaacttcgtcgacagctctaacaccgatggcaacggccacggcacccacgtcgccggcaccatcggcggcaccacgtacggtgttgccaagaagaccaagctctacgccgtcaaggttctcggctccgacggctctggcaccacttctggtgtcattgctggcatcaacttcgtcgctgacgacgcgcccaagcgcagctgccccaagggcgtcgtcgccaacatgtcgctcggcggtagctactcggcctccatcaacaacgccgccgccgccctcgtcaggtcgggcgtcttcctggccgtcgccgccggcaacgagaaccagaacgccgccaactcgtcgcccgcctccgaggcgtccgcctgcaccgtcggcgccaccgacaggaacgacgccaaggccagctactccaactacggcagcgtcgtcgatatccaggcccccggctccaacatcctgagcacctggatcggcagcacctctgctaccaacaccatctcgggtacctcgatggcctccccccacattgccggcctcggtgcctacctcctggccctcgagggctccaagacccctgccgagctctgcaactacatcaagtcgaccggcaacgccgccatcactggcgttcccagcggcaccaccaaccgcatcgccttcaacggcaacccctctgcctga

SEQ ID NO: 647 - protein, 392 aa, Myceliophthora thermophilia
MHFSTALLAFLPAALAAPTAETLDKRAPILTARAGQVVPGKYIIKLRDGASDDVLEAAIGKLRSKADHVYRGKFRGFAGKLEDDVLDAIRLLPEVEYVEEEAIFTINAYTSQSNAPWGLARLSSKTAGSTTYTYDTSAGEGTCAYVIDTGIYTSHSDFGGRATFAANFVDSSNTDGNGHGTHVAGTIGGTTYGVAKKTKLYAVKVLGSDGSGTTSGVIAGINFVADDAPKRSCPKGVVANMSLGGSYSASINNAAAALVRSGVFLAVAAGNENQNAANSSPASEASACTVGATDRNDAKASYSNYGSVVDIQAPGSNILSTWIGSTSATNTISGTSMASPHIAGLGAYLLALEGSKTPAELCNYIKSTGNAAITGVPSGTTNRIAFNGNPSA

SEQ ID NO: 648 - protein, 376 aa, Myceliophthora thermophilia
APTAETLDKRAPILTARAGQVVPGKYIIKLRDGASDDVLEAAIGKLRSKADHVYRGKFRGFAGKLEDDVLDAIRLLPEVEYVEEEAIFTINAYTSQSNAPWGLARLSSKTAGSTTYTYDTSAGEGTCAYVIDTGIYTSHSDFGGRATFAANFVDSSNTDGNGHGTHVAGTIGGTTYGVAKKTKLYAVKVLGSDGSGTTSGVIAGINFVADDAPKRSCPKGVVANMSLGGSYSASINNAAAALVRSGVFLAVAAGNENQNAANSSPASEASACTVGATDRNDAKASYSNYGSVVDIQAPGSNILSTWIGSTSATNTISGTSMASPHIAGLGAYLLALEGSKTPAELCNYIKSTGNAAITGVPSGTTNRIAFNGNPSA

SEQ ID NO: 649 - DNA, 1164 bp, Myceliophthora thermophilia
atgcagctccttagtctcgccgctctcctcccccttgcccttgcggcaccggtgatcaagcctcaggggctccagctgattccgggcgactacatcgtgaagctgaaggacggtgcgtccgagagcactctccaggacaccatccggcacctccaggcaggcgaggccaagcatgtctaccgcgcacgccggttcaagggcttcgcggccaagctgagcccgcaggtggtcgataccctgagcaagctgcccgaggtcgaatacattgagcaggacgccgtcgtcaccatccaggcgctggtcacccaggaggacgtgccctggggtctggcccgcatctcgcaccacgaactgggtcccacgtcgtacgtatacgacgacagcgccggcgagggtacctgcgcctatgtcatcgacacgggcatctatgtggcccactctcagttcgaaggccgcgcgacgtggctggccaactttatcgacagcagcgatagcgacggcgcgggccacggcacgcacgtgtcgggcacgatcggcggcgtgacgtacggcgtggccaagaagaccaagctgttcgcggtcaaggtgctcaacgcgagcgggtcggggacggtgtcgtcggtgctggcggggctcgagttcgtcgcgtcggacgcgccggcgcgcgtcgcctcgggcgagtgcgccaacggcgcggtcgccaacctgagcctcggcggcggccggtccaccgccatcaacgccgccgccgccgccgccgtcgacgcgggcgtcttcgtcgccgtcgcggccggcaacagcaacaccgacgcccagtccacctcccccgccagcgagcccagcgtctgcaccgtcggcgccaccgacgacagcgacgcccgcgcctacttctccaactacggcagcgtcgtcgacgtctttgctcccggcgtcgacgtcctcagcagctggatcggcggtgtcgatgccactaacaccatctcgggcacctcgatggcgaccccgcatatcgccggcctcggggcctatctcctcgctctgctgggccccaggtcgcccgaggaactgtgcgagtacatcaagcagacggccaccatcggcaccatcaccagcctccccagcggcaccatcaacgccattgcctacaacggtgctacagcctaa

SEQ ID NO: 650 - protein, 387 aa, Myceliophthora thermophilia
MQLLSLAALLPLALAAPVIKPQGLQLIPGDYIVKLKDGASESTLQDTIRHLQAGEAKHVYRARRFKGFAAKLSPQVVDTLSKLPEVEYIEQDAVVTIQALVTQEDVPWGLARISHHELGPTSYVYDDSAGEGTCAYVIDTGIYVAHSQFEGRATWLANFIDSSDSDGAGHGTHVSGTIGGVTYGVAKKTKLFAVKVLNASGSGTVSSVLAGLEFVASDAPARVASGECANGAVANLSLGGGRSTAINAAAAAAVDAGVFVAVAAGNSNTDAQSTSPASEPSVCTVGATDDSDARAYFSNYGSVVDVFAPGVDVLSSWIGGVDATNTISGTSMATPHIAGLGAYLLALLGPRSPEELCEYIKQTATIGTITSLPSGTINAIAYNGATA

SEQ ID NO: 651 - protein, 372 aa, Myceliophthora thermophilia
APVIKPQGLQLIPGDYIVKLKDGASESTLQDTIRHLQAGEAKHVYRARRFKGFAAKLSPQVVDTLSKLPEVEYIEQDAVVTIQALVTQEDVPWGLARISHHELGPTSYVYDDSAGEGTCAYVIDTGIYVAHSQFEGRATWLANFIDSSDSDGAGHGTHVSGTIGGVTYGVAKKTKLFAVKVLNASGSGTVSSVLAGLEFVASDAPARVASGECANGAVANLSLGGGRSTAINAAAAAAVDAGVFVAVAAGNSNTDAQSTSPASEPSVCTVGATDDSDARAYFSNYGSVVDVFAPGVDVLSSWIGGVDATNTISGTSMATPHIAGLGAYLLALLGPRSPEELCEYIKQTATIGTITSLPSGTINAIAYNGATA

SEQ ID NO: 652 - DNA, 1221 bp, Myceliophthora thermophilia
atgaagatatccggcgcctctcttcttgcgctgctgctgccggcagtaagcggccgcttcgttgagcctggcgagccggatcgcgtattgctttatcccgacggcgttcctcagccctccgaaagcagcgagaagtaccacatagagctggccccgggagagacaagatgggtgaccgaagaggagaagtgggaattgcgtcggcaaggcaggcggttcttcgatatcaccgaccatcccgggctcggaaccctccgcgcgcgagacacattcaagaagaggagcgtcttccccaaggctcccaaactacaagacgaggtaaaccctctcttggcgaacctgtccaagaccgagatgaaggaccacttgaccaccttcacttcgttccatacccgctactacaagtccgactacggccggcaatcaagcgagtggctcctcggccaggtgcgccagaccatcaaagaggccggcgcggaggactacgttcacgccgagcatttcaagcacccatggggccagcacagcatcatcgccaccattcccggcaagaccaactccaccgtcgtcatcggcgcgcaccaggactcgatcaatctctggctgccgagcattctggccgcgcccggtgccgacgacgacggcagcggcaccgtcaccatcctcgaagccttccgcgtcctcttgcagtccgaggacgttgtcaagggcaaccaccagaacaccctcgagttccactggtacagcgccgaggagggcggcctgctcggtagccaggccatcttctccgcgtacgagaaggagggccgcgacgtcaaggccatgctgcagcaggacatgaccggcttcgtcgcccgcaccctggacgccggcaagcccgaaagcgtgggcgtcattgtcgactacgtggacccggacctgacgcagttcatcaaggtcattattgatgagtactgtgacatcccttacgtcgagaccgagtgcggatacgcatgctccgaccacgcctcggcgtccaaggccgggtatccctcggcctttgtcatcgagtcggcgttcgagtactcggacaaccacatccactctactgaagacctgatcaagtacctgtcgttcgaccatatgttgcagcacgcacgcatgacgctggcgttcgcctacgaactggcattcaccgactttgactccctagaagggccggaccactcggatgcgctgtaa

SEQ ID NO: 653 - protein, 406 aa, Myceliophthora thermophilia
MKISGASLLALLLPAVSGRFVEPGEPDRVLLYPDGVPQPSESSEKYHIELAPGETRWVTEEEKWELRRQGRRFFDITDHPGLGTLRARDTFKKRSVFPKAPKLQDEVNPLLANLSKTEMKDHLTTFTSFHTRYYKSDYGRQSSEWLLGQVRQTIKEAGAEDYVHAEHFKHPWGQHSIIATIPGKTNSTVVIGAHQDSINLWLPSILAAPGADDDGSGTVTILEAFRVLLQSEDVVKGNHQNTLEFHWYSAEEGGLLGSQAIFSAYEKEGRDVKAMLQQDMTGFVARTLDAGKPESVGVIVDYVDPDLTQFIKVIIDEYCDIPYVETECGYACSDHASASKAGYPSAFVIESAFEYSDNHIHSTEDLIKYLSFDHMLQHARMTLAFAYELAFTDFDSLEGPDHSDAL

SEQ ID NO: 654 - protein, 388 aa, Myceliophthora thermophilia
RFVEPGEPDRVLLYPDGVPQPSESSEKYHIELAPGETRWVTEEEKWELRRQGRRFFDITDHPGLGTLRARDTFKKRSVFPKAPKLQDEVNPLLANLSKTEMKDHLTTFTSFHTRYYKSDYGRQSSEWLLGQVRQTIKEAGAEDYVHAEHFKHPWGQHSIIATIPGKTNSTVVIGAHQDSINLWLPSILAAPGADDDGSGTVTILEAFRVLLQSEDVVKGNHQNTLEFHWYSAEEGGLLGSQAIFSAYEKEGRDVKAMLQQDMTGFVARTLDAGKPESVGVIVDYVDPDLTQFIKVIIDEYCDIPYVETECGYACSDHASASKAGYPSAFVIESAFEYSDNHIHSTEDLIKYLSFDHMLQHARMTLAFAYELAFTDFDSLEGPDHSDAL

SEQ ID NO: 655 - DNA, 885 bp, Myceliophthora thermophilia
atgcgtttcaccccccttgcccttgccgcggctgcggtccacggcgtcgtcgccgccccgccgcgcgagactcggccagcaccagtccagcagcgcgagtttgcctgcggcgctcccgagccggacgccgagcacatcaagatctcgcagcagttcgctgcccaggaggccgagttcctcgcctcgggcaacctgacagcccaagccaccatcacggtcgacgtctacttccacgtcgtggccacgtcgacctccctgagcggcggctacatccctgacagccagctggacgcgcagctacaggtgctcaacacggcgtacgcgccgtacgggttccagttcgtgcacaaggggacgacgcggacggtcaacgccaactgggcggacgacaccaaggggtacgagatgacgatgaagcggtcgctgcggcagggcagctactcggcgctcaacctctacttcctgtacgagatgggagacaacctcgggtactgctacttccccgaggcgggcggggccacggccgggtcgacggcgcgcatccgcgacggctgcaccatcctctacagcaccgtccccggcggcagcgccaccaactacaacctcggccacaccgccacccacgagaccggccactggttcggcctctaccacaccttccagggcggctgctccggcaacggcgactacgtcgacgacaccccggcccaggccagccccagcagcggctgccctgtcggccgcgactcgtgcccgaacaaccccggcctcgaccccatccacaactacatggactactcgatcgactcgtgctacgaggagttcactgccgggcagcaggcccgcatgctcagcttctggaacacctaccgcgccggcaagtaa

SEQ ID NO: 656 - protein, 294 aa, Myceliophthora thermophilia
MRFTPLALAAAAVHGVVAAPPRETRPAPVQQREFACGAPEPDAEHIKISQQFAAQEAEFLASGNLTAQATITVDVYFHVVATSTSLSGGYIPDSQLDAQLQVLNTAYAPYGFQFVHKGTTRTVNANWADDTKGYEMTMKRSLRQGSYSALNLYFLYEMGDNLGYCYFPEAGGATAGSTARIRDGCTILYSTVPGGSATNYNLGHTATHETGHWFGLYHTFQGGCSGNGDYVDDTPAQASPSSGCPVGRDSCPNNPGLDPIHNYMDYSIDSCYEEFTAGQQARMLSFWNTYRAGK

SEQ ID NO: 657 - protein, 276 aa, Myceliophthora thermophilia
APPRETRPAPVQQREFACGAPEPDAEHIKISQQFAAQEAEFLASGNLTAQATITVDVYFHVVATSTSLSGGYIPDSQLDAQLQVLNTAYAPYGFQFVHKGTTRTVNANWADDTKGYEMTMKRSLRQGSYSALNLYFLYEMGDNLGYCYFPEAGGATAGSTARIRDGCTILYSTVPGGSATNYNLGHTATHETGHWFGLYHTFQGGCSGNGDYVDDTPAQASPSSGCPVGRDSCPNNPGLDPIHNYMDYSIDSCYEEFTAGQQARMLSFWNTYRAGK

SEQ ID NO: 658 - DNA, 954 bp, Myceliophthora thermophilia
atgttgaatttaaagtcgacactgtcggccttgtggctggccacgctggcctggggtacggcccgggcggaggaggacaatgtgaagagcataccgttgcgaacacacagtctctcccagccatacctagactcggacatgcaaagtcgctggtacgattttggcggcgacacaatcatccgtactgaccaatatatccgccttacttcggactacccatcacaatccgggtggctcttctcgagagtcccgctgactgcgacaaactgggaggttgaggtggagttcaagattcacgggaagaaccagctctatggagacggcttcgccatgtggatcacgaaagagcgcgggaagattggccccgtgtttggtagcgcggaccggttcgagggcctcggcatcttcttcgacacgtacaagaacaaccggcccggcgttgtcttcccttacgtcatggctatggtcggcgacggccagaagtcgtacgacaaggacacggacggcaagaactccgagttcgccggctgctcggccaggggcatccggcacgcctcagtgccgaccaagttccgcttgacctacttccaggacaagtacctcaagctggagctgcagtacaagtccgagggcgagtggacgctctgcttcgagaccaaccagccgcccgccatcccgcaggttgcctacctcggtttcagcgccgagacgggcgagttgagtgacaaccacgacatcatctccatcgaggcgaaaaacctgtatcacgcgcaacctacgggaggcaagtcgacgcccggcagcggtaggggtaagaaggtggcttcccccaaggagggcggcagctggacctggttcttcaccaagatcttcctcttcttcctggttattggcggcggctacgtcgggtacacagcttggagggcgaacaacaagcggagccaccgcttttga

SEQ ID NO: 659 - protein, 317 aa, Myceliophthora thermophilia
MLNLKSTLSALWLATLAWGTARAEEDNVKSIPLRTHSLSQPYLDSDMQSRWYDFGGDTIIRTDQYIRLTSDYPSQSGWLFSRVPLTATNWEVEVEFKIHGKNQLYGDGFAMWITKERGKIGPVFGSADRFEGLGIFFDTYKNNRPGVVFPYVMAMVGDGQKSYDKDTDGKNSEFAGCSARGIRHASVPTKFRLTYFQDKYLKLELQYKSEGEWTLCFETNQPPAIPQVAYLGFSAETGELSDNHDIISIEAKNLYHAQPTGGKSTPGSGRGKKVASPKEGGSWTWFFTKIFLFFLVIGGGYVGYTAWRANNKRSHRF

SEQ ID NO: 660 - protein, 294 aa, Myceliophthora thermophilia
EEDNVKSIPLRTHSLSQPYLDSDMQSRWYDFGGDTIIRTDQYIRLTSDYPSQSGWLFSRVPLTATNWEVEVEFKIHGKNQLYGDGFAMWITKERGKIGPVFGSADRFEGLGIFFDTYKNNRPGVVFPYVMAMVGDGQKSYDKDTDGKNSEFAGCSARGIRHASVPTKFRLTYFQDKYLKLELQYKSEGEWTLCFETNQPPAIPQVAYLGFSAETGELSDNHDIISIEAKNLYHAQPTGGKSTPGSGRGKKVASPKEGGSWTWFFTKIFLFFLVIGGGYVGYTAWRANNKRSHRF

SEQ ID NO: 661 - DNA, 2238 bp, Myceliophthora thermophilia
atgtcattcgctctctacgccgcggccctccttccggtcgccgtgctgggtgctggcctctccgtcccggaagacaaccggatggttcagcaggatgggctcctccgataccccctcatgccccggctaggcaatcttctctttgggaaacacgccaacatcaccaggagacagatcgataccggcatttttgacccgctctctggcaccttgtacaccatcgaactgaccctcggcaccccgggccagacggtccccgtccagttcgacacgggctcggacatgctctgggtaaaccccgtctgctccaaggcggccgagcccgagttctgcgctgcccagcccaggttcaccgactcctccaccctcgtagacttcggcgagcagggcaatattacctacggcactggttatgcctactatgagtatgtggctgactacgtcgccattggctcggccaggatcacgcagcaggtcttcggtgttgccttggacagtgcccatgcagacgtgggcatcttcggcgccggcccgaacttggacggatgggactccgcatacccgctcgttgtggattctctcgcccagcaggggtacaccagcagcagggccttcagcatggacctcaaggggttcgaaagcgcacggggacggccccgggaggcaggatccgtcatctttggaggtatcgacaccaaaaagtacaggggaagcctcatcaagcgcctaatcatccccgccgccgagtctccggacggatacacaaggttctggatctatctcgatggcatctcggtcaaccagccggatggcgacgtcgtcaccgtcttcagcacccccgacggaggcaagggccagcctgtcctgctcgacagcggttacactctcagtgccttgccgagacccatcttccagaagcttgtcgctgccttcccctctgctcagtacgttagcagcgccgatgtatacgttgtcgactgtgtcgaccatggcgaagggggctcgctcgatttcatcttcggtggcaagaccatcaacgtgccctaccacgagtttgtctgggcccagcctgagtctaacacctgcgtcttaggcacatttgaggacgataactacggttctaatctcgtggctattagtaatagctccaacgccgttccgtctattgtcggcaagtatggcaagccgaagccgacatctacgtcgaccttctccaagactagctcaaagacgtcgaccgcttctaagacttcatctacgtcggactcgacttcttcttcttcttcctacgtgataacctcgtcgtctagtaccatcgctaccacccttagcatgtataagcctccattcctaactgctagtagtaactttaccactacctggtcccctactattaccttgttaactgtattaactatgatatatttaaggataccattagtaatagccctaatgccgttctgtctattgttagcaagtatggcaagccgaagccgatatctacatcgaccttctccaagactagctcaaagacatcgaccgcttccaaagacttcatctacgtcggactcgacttcttcttcttcccacgtgacaacctcgtcgtctagcaccaccgccaccaccctcagcacgcacaagcctccgttcctgaccgccagcggcaacttcaccaccacccggtcccctaccaccaccacggcctcgtccaccatcagcaagagcaccttgaccatcacgagcgcgaccacctacactatcacctcgtgcccgcccaccgtgacccgctgtcccgcccacgaggtcaccaccgagatcatcaccaagacgacggccgtctgcccggagacgacggccacctacaccatcccccggaccatcacctgccccggcagcggcggcggcgacgactgcccgcccggcgccacccggaccaccaccctgaccgtcacgctctccccagtgggcccgaccgaccgcaccacccacgtcgtgcccggcgtcaccaccaccacccccaccaccatcacggccccccccaccggccagacaaccaccaccctggtgccggcactgccgccgacgacaacgacgatgagcggacaccggggcatcaacggcaccgtgacggcgacgtccaaacctcccgccgtcaccgccggcagcgccaaggtcgggctggtgtccggcgccacggcgatcgtggcgggagtgatggcggtcctgatggcgctgtga

SEQ ID NO: 662 - protein, 745 aa, Myceliophthora thermophilia
MSFALYAAALLPVAVLGAGLSVPEDNRMVQQDGLLRYPLMPRLGNLLFGKHANITRRQIDTGIFDPLSGTLYTIELTLGTPGQTVPVQFDTGSDMLWVNPVCSKAAEPEFCAAQPRFTDSSTLVDFGEQGNITYGTGYAYYEYVADYVAIGSARITQQVFGVALDSAHADVGIFGAGPNLDGWDSAYPLVVDSLAQQGYTSSRAFSMDLKGFESARGRPREAGSVIFGGIDTKKYRGSLIKRLIIPAAESPDGYTRFWIYLDGISVNQPDGDVVTVFSTPDGGKGQPVLLDSGYTLSALPRPIFQKLVAAFPSAQYVSSADVYVVDCVDHGEGGSLDFIFGGKTINVPYHEFVWAQPESNTCVLGTFEDDNYGSNLVAISNSSNAVPSIVGKYGKPKPTSTSTFSKTSSKTSTASKTSSTSDSTSSSSSYVITSSSSTIATTLSMYKPPFLTASSNFTTTWSPTITLLTVLTMIYLRIPLVIALMPFCLLLASMASRSRYLHRPSPRLAQRHRPLPKTSSTSDSTSSSSHVTTSSSSTTATTLSTHKPPFLTASGNFTTTRSPTTTTASSTISKSTLTITSATTYTITSCPPTVTRCPAHEVTTEIITKTTAVCPETTATYTIPRTITCPGSGGGDDCPPGATRTTTLTVTLSPVGPTDRTTHVVPGVTTTTPTTITAPPTGQTTTTLVPALPPTTTTMSGHRGINGTVTATSKPPAVTAGSAKVGLVSGATAIVAGVMAVLMAL

SEQ ID NO: 663 - protein, 728 aa, Myceliophthora thermophilia
AGLSVPEDNRMVQQDGLLRYPLMPRLGNLLFGKHANITRRQIDTGIFDPLSGTLYTIELTLGTPGQTVPVQFDTGSDMLWVNPVCSKAAEPEFCAAQPRFTDSSTLVDFGEQGNITYGTGYAYYEYVADYVAIGSARITQQVFGVALDSAHADVGIFGAGPNLDGWDSAYPLVVDSLAQQGYTSSRAFSMDLKGFESARGRPREAGSVIFGGIDTKKYRGSLIKRLIIPAAESPDGYTRFWIYLDGISVNQPDGDVVTVFSTPDGGKGQPVLLDSGYTLSALPRPIFQKLVAAFPSAQYVSSADVYVVDCVDHGEGGSLDFIFGGKTINVPYHEFVWAQPESNTCVLGTFEDDNYGSNLVAISNSSNAVPSIVGKYGKPKPTSTSTFSKTSSKTSTASKTSSTSDSTSSSSSYVITSSSSTIATTLSMYKPPFLTASSNFTTTWSPTITLLTVLTMIYLRIPLVIALMPFCLLLASMASRSRYLHRPSPRLAQRHRPLPKTSSTSDSTSSSSHVTTSSSSTTATTLSTHKPPFLTASGNFTTTRSPTTTTASSTISKSTLTITSATTYTITSCPPTVTRCPAHEVTTEIITKTTAVCPETTATYTIPRTITCPGSGGGDDCPPGATRTTTLTVTLSPVGPTDRTTHVVPGVTTTTPTTITAPPTGQTTTTLVPALPPTTTTMSGHRGINGTVTATSKPPAVTAGSAKVGLVSGATAIVAGVMAVLMAL

SEQ ID NO: 664 - DNA, 1833 bp, Myceliophthora thermophilia
atgtcggtcctctcgcgggctcgagcgccgacgagcgcagctactaccctctggttctcccggctacggcgtcccgcgtactcgacatcgaacatactcctctgggcgccgcgccggtccaattactctgcttcgggctataccagcagctacgaccccaatcaggacacagggcgcgggcccatcttcaacaagcacacctttggcgtgccgcagttctacccgcgggacctgaaggcgcgggtcgacgactacgttgtgggccaggagcgcgcaaagaagacgatatgcttcgtcatattcaaccactaccaggggctgcgacggcggcaacaccacgagctccaggaccagcgattgagggagaagctccagaggcagaagtacgcccaggaacaggaggacttcgagcgcgccggctacaacagcactcgaacgcatcccgtcgaaggtgggcggtggccctcgcatcgttctgctgaagaatttccttcggcgccccggcggcaggctgatgatagtgacgtcgcttatcaagatgaataccccggccaccacgaggccgtccgaggtacccaccaaatgccagacagtccgtacgagccgtctgcggatgacttctacatcccagaagacttgtccccgccggatcgcgtaaagatcgacaagagcaatctgctcctgatcggaccgaccggcgtcgggaagacgtacatcctcgagaccctgagcaagaagctcaacgtgcccttcaccatcagcgactgcaactcatttacgcaagccggatacattgggcaggacgtcgagtcgtgcatcgagcgattgcttatcgaggccaattacgacgtcaaggctgccgagcacgggatcgtcgtgctagacgagtttgacaagattgcccggcgcgagacggtcaacgggagagacgtggggggtgaaggggtgcagcaagctctcctgaagcttgtcgaaggcaccaaggtcaccatcaacatcaaggagcagcgatcctcccgagcgacgaaccacccgcccggcggctacggtccgcccaacccgccgtcgacccctccgaccggtaaggccgagcagtataccgtcgacactacgaacgtcctgtttgtgttttgcggcgcctttgtcgggctggacaagacggtgctccggagagtggccaagccgtcgatcggcttcggctccgatatccgcggacgcggcacctcgctgtcgggcagcaaggacatactcccgcccgagatgtaccagcacctcccccaccagccgccgtcgcgcggcagcggcgggcgggaggcgggcgggttcaccccgctggacctgaccacgcccgcggacctgcaggcgtacggtttcatccccgagctcatcgggcgcctccacaacatctgcgccctctcgccgctgtcgctcgacgagctgtaccgcatcctcacggagccgcgcaacagcctggtggcgcagtacacggccctgttcgagacgtaccccagcaagctcgccttcacgcggcgcgcgctgtacgccatcgccgagcgcgccgccaagaacgagacgggcgcgcgcggcctcaagatggagatggagcgcgtgctggccgagcccatgttcgacgccccggcaccctacgtcctgatcacggaagggtgcgtcaaggggtacgagaaggccggctactggggcaaggacgggcggctggagatggagcggcgcatgagggaggaggacgagggcctggacgccgccggcactgccagtcccggccaccacgcgggcttcgagcagttccgacaggctggcttgagcgggggctga

SEQ ID NO: 665 - protein, 610 aa, Myceliophthora thermophilia
MSVLSRARAPTSAATTLWFSRLRRPAYSTSNILLWAPRRSNYSASGYTSSYDPNQDTGRGPIFNKHTFGVPQFYPRDLKARVDDYVVGQERAKKTICFVIFNHYQGLRRRQHHELQDQRLREKLQRQKYAQEQEDFERAGYNSTRTHPVEGGRWPSHRSAEEFPSAPRRQADDSDVAYQDEYPGHHEAVRGTHQMPDSPYEPSADDFYIPEDLSPPDRVKIDKSNLLLIGPTGVGKTYILETLSKKLNVPFTISDCNSFTQAGYIGQDVESCIERLLIEANYDVKAAEHGIVVLDEFDKIARRETVNGRDVGGEGVQQALLKLVEGTKVTINIKEQRSSRATNHPPGGYGPPNPPSTPPTGKAEQYTVDTTNVLFVFCGAFVGLDKTVLRRVAKPSIGFGSDIRGRGTSLSGSKDILPPEMYQHLPHQPPSRGSGGREAGGFTPLDLTTPADLQAYGFIPELIGRLHNICALSPLSLDELYRILTEPRNSLVAQYTALFETYPSKLAFTRRALYAIAERAAKNETGARGLKMEMERVLAEPMFDAPAPYVLITEGCVKGYEKAGYWGKDGRLEMERRMREEDEGLDAAGTASPGHHAGFEQFRQAGLSGG

SEQ ID NO: 666 - protein, 582 aa, Myceliophthora thermophilia
TSNILLWAPRRSNYSASGYTSSYDPNQDTGRGPIFNKHTFGVPQFYPRDLKARVDDYVVGQERAKKTICFVIFNHYQGLRRRQHHELQDQRLREKLQRQKYAQEQEDFERAGYNSTRTHPVEGGRWPSHRSAEEFPSAPRRQADDSDVAYQDEYPGHHEAVRGTHQMPDSPYEPSADDFYIPEDLSPPDRVKIDKSNLLLIGPTGVGKTYILETLSKKLNVPFTISDCNSFTQAGYIGQDVESCIERLLIEANYDVKAAEHGIVVLDEFDKIARRETVNGRDVGGEGVQQALLKLVEGTKVTINIKEQRSSRATNHPPGGYGPPNPPSTPPTGKAEQYTVDTTNVLFVFCGAFVGLDKTVLRRVAKPSIGFGSDIRGRGTSLSGSKDILPPEMYQHLPHQPPSRGSGGREAGGFTPLDLTTPADLQAYGFIPELIGRLHNICALSPLSLDELYRILTEPRNSLVAQYTALFETYPSKLAFTRRALYAIAERAAKNETGARGLKMEMERVLAEPMFDAPAPYVLITEGCVKGYEKAGYWGKDGRLEMERRMREEDEGLDAAGTASPGHHAGFEQFRQAGLSGG

SEQ ID NO: 667 - DNA, 1785 bp, Myceliophthora thermophilia
atgctgtggacgacccttctctcggccctcctcctgacggggacggccgaagccgccgggcgcagcatagcgcatgctggaaaacgccatgtcgagcacgccgcgaagagggcgaagcccatcatgccggcgggcccttatcaccccgtgatcgagcgggaagagaaggcgcccaagttcctgaccccgaagacagagaaatttgccgtcgacgggaagggcatcccggacgtcgacttcgacgtcggcgagtcctatgccggcctgctgcccctcagcagcgaccccaacgacgacaagaacctgtttttctggttcttcccctcgaccaacccagcggccgagaaggagatcctcatctggctcaatggcggtcccggctgctcgtcctttgagggattgctgcaggagaacgggccgttcctgtggcagtatggcacctacaagccggttcagaacccgtggagctggcacaccctgaccaacatcgtctacgtcgagcagcccgtcggcactggcttcaccacgggcacgcccaccatcactaacgaggaggagctcgcggccgaattcatgggcttctggaagaactttgtcgacacctttggcctgcacggctacaaggtgtacattgccggagagtcttacgcgtacgcttgctctccacccttttcctctctcgctgctcgtttccggaactcaacgctgactctgtccagcggctactactgcccctacatcgccgccgccttcctcgacgaggaggacaagacgtactacgacatgtctggcatgaccatctacaacccctctctcgcacccgacgagatccaagagcccatcccggtcgtggccttcaccgaatactggagcggcctcttccccttcaacgacaccttccgcgccgacatcaagcgccgcgagaaggagtgcggctacgccgacttcctggccgagtatctcgtctacccgcccaaggggcccctgccgtcccgcctgccgggcacccaccgggacggcaccacgcgtgaggagtgctggaacatctactgggacatcttcgacgccatctccgtcctcaatccctgcttcgacatctaccaggtcgccacgacttgccccctcctctgggacgtcctcggcttcccaggatcgatgccgtacctgcccgagggcaccaaggtctacttcgaccgcgaggacgtcaagcgcgccattcacgcccccgtcaacgccacctgggaagagtgctcgtcccgcgacgtcttcgtcaacggcacggaccactcggtgccctcgaccgttcgggcgctcccgcgcgtcatcgacggcaccaagaacgtcattatcggccacagcgccctcgacatgatcctgctcgccaacggcaccctgctggccctgcagaacatgacctggggcggcaagcgcggattccagagccggcccgaccaacccttctacgtgcccctcaacaacatcaccaccctgtccaccctggccgccgccggcgttttcggcagcctcgtgtcggagcgcggcctgacgtacgtgggcgtcgacctggccgggcacatggtgccccagtacgccccctcggccgcctacaggcacgtcgagtacatgctgggccgcgtggactgcatgaactgcaccaagccgttcaccacggatcccttcacgccgcagagtaaagggaaactgggcaagggcacagcgccgcagggatggagcaatgcgagtgggcacgggaagggtaatggtccaagaaggattagagcctag

SEQ ID NO: 668 - protein, 594 aa, Myceliophthora thermophilia
MLWTTLLSALLLTGTAEAAGRSIAHAGKRHVEHAAKRAKPIMPAGPYHPVIEREEKAPKFLTPKTEKFAVDGKGIPDVDFDVGESYAGLLPLSSDPNDDKNLFFWFFPSTNPAAEKEILIWLNGGPGCSSFEGLLQENGPFLWQYGTYKPVQNPWSWHTLTNIVYVEQPVGTGFTTGTPTITNEEELAAEFMGFWKNFVDTFGLHGYKVYIAGESYAYACSPPFSSLAARFRNSTLTLSSGYYCPYIAAAFLDEEDKTYYDMSGMTIYNPSLAPDEIQEPIPVVAFTEYWSGLFPFNDTFRADIKRREKECGYADFLAEYLVYPPKGPLPSRLPGTHRDGTTREECWNIYWDIFDAISVLNPCFDIYQVATTCPLLWDVLGFPGSMPYLPEGTKVYFDREDVKRAIHAPVNATWEECSSRDVFVNGTDHSVPSTVRALPRVIDGTKNVIIGHSALDMILLANGTLLALQNMTWGGKRGFQSRPDQPFYVPLNNITTLSTLAAAGVFGSLVSERGLTYVGVDLAGHMVPQYAPSAAYRHVEYMLGRVDCMNCTKPFTTDPFTPQSKGKLGKGTAPQGWSNASGHGKGNGPRRIRA

SEQ ID NO: 669 - protein, 576 aa, Myceliophthora thermophilia
AGRSIAHAGKRHVEHAAKRAKPIMPAGPYHPVIEREEKAPKFLTPKTEKFAVDGKGIPDVDFDVGESYAGLLPLSSDPNDDKNLFFWFFPSTNPAAEKEILIWLNGGPGCSSFEGLLQENGPFLWQYGTYKPVQNPWSWHTLTNIVYVEQPVGTGFTTGTPTITNEEELAAEFMGFWKNFVDTFGLHGYKVYIAGESYAYACSPPFSSLAARFRNSTLTLSSGYYCPYIAAAFLDEEDKTYYDMSGMTIYNPSLAPDEIQEPIPVVAFTEYWSGLFPFNDTFRADIKRREKECGYADFLAEYLVYPPKGPLPSRLPGTHRDGTTREECWNIYWDIFDAISVLNPCFDIYQVATTCPLLWDVLGFPGSMPYLPEGTKVYFDREDVKRAIHAPVNATWEECSSRDVFVNGTDHSVPSTVRALPRVIDGTKNVIIGHSALDMILLANGTLLALQNMTWGGKRGFQSRPDQPFYVPLNNITTLSTLAAAGVFGSLVSERGLTYVGVDLAGHMVPQYAPSAAYRHVEYMLGRVDCMNCTKPFTTDPFTPQSKGKLGKGTAPQGWSNASGHGKGNGPRRIRA

SEQ ID NO: 670 - DNA, 1239 bp, Myceliophthora thermophilia
atggagctgatcaccattttcctttgcctcgcaaccttattaatcgcgttccccgggacgtctgctgtcgcgccgatcaggaacgatagagtcctggatgagctggtagtcccggacacgtacatcgtcaagtacaagaacggcatcgatactctaggcagaaacgagcacgagaaggatgtcaacagtagggccaggaagggcagcaggaggggaatcttgggcaggttcgacgtcgcgggcctacggggctacgtcgccgagctctcaaccctagacctggacactctcgccagcttcgacttgattgactacatcgagaaagacacggtcgtgaaggccgcagccgtagccgcctacccgcagcctgccagacgcgccacggtcgagcaggtgaacgccccctggggactggcccgcatctcgcaccgctcgcggggccagacagacgacgactcctactactacagcaacacggccggcagcgagacctacgtctacgttattgacagcgggatccgggtcagccacgaggactttggcggccgcgcggtctggggggccaactttgtcgccgcgtcgagggacacggacgaggccggccacgggacgcacgtcgcgggcatcatcgccggtcagacgtacggggtggccaagaaggcgaccgtcattgccgtcaaggtgctcgacaggttgggcagcggatcctcgtcaggactggtgcagggactcgactgggccgttcgggacgcccgggagcgcgggacggccaaccggtccgtcatcaacctctcggtatcggggcccttctcccaggcgatcaacgacgccatccaggcggccactgacgccggcctcaccgtcgtggccgcggctggcaaccagggcaaggacgcctgggaccaatcgccggcctcggccccgtccgccatcacggtcggcgccattgaccgccatgacaaccgggccgtgttctccaactggggcgagtcggtcgatatctttgctccgggcgtcgaaatcgagagtgccttcaacaacagcgattccgaccatagcttgatgaacggcaccagcatggcctgcccccacgtggctgggctggcggcctactttatggctcgcgatgggatatccgggaaagaagtggcgcagaaggtcttggaaactgccatcacgggcgtcggtgatagaagaatgggcgcagaccgcatcgcgtacaacggggaggctgaatga

SEQ ID NO: 671 - protein, 412 aa, Myceliophthora thermophilia
MELITIFLCLATLLIAFPGTSAVAPIRNDRVLDELVVPDTYIVKYKNGIDTLGRNEHEKDVNSRARKGSRRGILGRFDVAGLRGYVAELSTLDLDTLASFDLIDYIEKDTVVKAAAVAAYPQPARRATVEQVNAPWGLARISHRSRGQTDDDSYYYSNTAGSETYVYVIDSGIRVSHEDFGGRAVWGANFVAASRDTDEAGHGTHVAGIIAGQTYGVAKKATVIAVKVLDRLGSGSSSGLVQGLDWAVRDARERGTANRSVINLSVSGPFSQAINDAIQAATDAGLTVVAAAGNQGKDAWDQSPASAPSAITVGAIDRHDNRAVFSNWGESVDIFAPGVEIESAFNNSDSDHSLMNGTSMACPHVAGLAAYFMARDGISGKEVAQKVLETAITGVGDRRMGADRIAYNGEAE

SEQ ID NO: 672 - protein, 390 aa, Myceliophthora thermophilia
VAPIRNDRVLDELVVPDTYIVKYKNGIDTLGRNEHEKDVNSRARKGSRRGILGRFDVAGLRGYVAELSTLDLDTLASFDLIDYIEKDTVVKAAAVAAYPQPARRATVEQVNAPWGLARISHRSRGQTDDDSYYYSNTAGSETYVYVIDSGIRVSHEDFGGRAVWGANFVAASRDTDEAGHGTHVAGIIAGQTYGVAKKATVIAVKVLDRLGSGSSSGLVQGLDWAVRDARERGTANRSVINLSVSGPFSQAINDAIQAATDAGLTVVAAAGNQGKDAWDQSPASAPSAITVGAIDRHDNRAVFSNWGESVDIFAPGVEIESAFNNSDSDHSLMNGTSMACPHVAGLAAYFMARDGISGKEVAQKVLETAITGVGDRRMGADRIAYNGEAE

SEQ ID NO: 673 - DNA, 1866 bp, Myceliophthora thermophilia
atgcttcgaaacatcttcctcacggcagccctcgccgctttcggccaatgcggttccaccgttttcgagtcggtcccggcgaagccccgcggttggacgcgcctcggcgatgcatccgccgaccagccgctccgcttacgcatcgctctgcagcagcccaacgaggacctgtttgagcgcaccctatatgaggtttcggacccgtcccacgccaggtacggccagcacctgtcgcgcgacgagctctcggcgctgctcgccccgcgcgccgagtcgacggcggccgtgctcaactggctgcgcgacgccggcatcccctccgataagatcgaggaggacggcgagtggatcaacctccgcgtgactgtgcgcgaggcgtccgagctgctcgacgccgactttggcgtctgggcccacgagggcaccaacgtcaagcgagtgcgcgcgctgcagtactccgtgcccgaagagatcgccccacacatccgcatggtcgcgcccgtcgtccggttcgggcagatccgaccggagcgcagccaggtgttcgaggtggtggagacggccccatcgcaggtcaaggtggcggcggccatcccgccgcaggatctcgacgtcaaggcctgcaataccagcatcacgcccgagtgcctgcgcgctctgtacaaggtcggctcgtaccaggccgagccgagcaagaagagcctgtttggtgtcgccggttacctggagcagtgggccaagtacgaccagctcgagttgttcgccagcacgtacgccccgtacgctgccgacgccaacttcacttcggtcggcgtcaatggtggagagaataatcagggcccatccgaccagggcgacatcgaggcgaatctggatatccagtacgccgtcgctctctcgtacaagacccctatcacctactacatcaccggggggcgtgggccgctcgttccggaccttgaccagccggacccgaatgatgtttccaacgagccgtacctggagttcttctcgtaccttctgaagctgcccgactccgagctcccgcagaccttgaccacctcctacggcgaggacgaacagtccgtccctcgcccctacgccgagaaggtctgccagatgatcggccagctgggcgcccgtggtgtgtctgtcatcttctcgtcgggagacaccggcgtcggatccgcgtgccaaaccaacgacggcaagaacacgacccgcttcctgcctattttccctggagcatgcccatacgtgacctctatcggcgccacccgttacgtcgaacccgaacaggccgcagccttctcctcgggcggcttctccgacatcttcaagcgccccgcctaccaagaggccgccgtcagcacctatctacacaagcacctcgggagccgctggaagggtctgtacaaccctcagggccgtgggttcccggacgtctcggcccagggcgtcgcctaccacgtcttctcgcaggacaaggacatcaaggtctcgggtaccagcgcgtcggcgcccctgttcgcggctctcgtcagcttgctgaacaacgcgcgccttgcgcagggccggccgccgctcggcttcctgaacccatggctgtactcggagaaggtgcagaaggcgggcgccctgaccgatatcgtccacggcgggtcgagcgggtgcaccggcaaggatatgtactcgggcctgccgaccccctacgtgccgtacgccagctggaacgccacccctggctgggatcccgtcaccggcctgggcacgcccgtctttgacaagctgctcgagctcagctcgcccggcaagaagctgccgcacattggcggcgggcacgggcatggggccggcgggcactga

SEQ ID NO: 674 - protein, 621 aa, Myceliophthora thermophilia
MLRNIFLTAALAAFGQCGSTVFESVPAKPRGWTRLGDASADQPLRLRIALQQPNEDLFERTLYEVSDPSHARYGQHLSRDELSALLAPRAESTAAVLNWLRDAGIPSDKIEEDGEWINLRVTVREASELLDADFGVWAHEGTNVKRVRALQYSVPEEIAPHIRMVAPVVRFGQIRPERSQVFEVVETAPSQVKVAAAIPPQDLDVKACNTSITPECLRALYKVGSYQAEPSKKSLFGVAGYLEQWAKYDQLELFASTYAPYAADANFTSVGVNGGENNQGPSDQGDIEANLDIQYAVALSYKTPITYYITGGRGPLVPDLDQPDPNDVSNEPYLEFFSYLLKLPDSELPQTLTTSYGEDEQSVPRPYAEKVCQMIGQLGARGVSVIFSSGDTGVGSACQTNDGKNTTRFLPIFPGACPYVTSIGATRYVEPEQAAAFSSGGFSDIFKRPAYQEAAVSTYLHKHLGSRWKGLYNPQGRGFPDVSAQGVAYHVFSQDKDIKVSGTSASAPLFAALVSLLNNARLAQGRPPLGFLNPWLYSEKVQKAGALTDIVHGGSSGCTGKDMYSGLPTPYVPYASWNATPGWDPVTGLGTPVFDKLLELSSPGKKLPHIGGGHGHGAGGH

SEQ ID NO: 675 - protein, 602 aa, Myceliophthora thermophilia
TVFESVPAKPRGWTRLGDASADQPLRLRIALQQPNEDLFERTLYEVSDPSHARYGQHLSRDELSALLAPRAESTAAVLNWLRDAGIPSDKIEEDGEWINLRVTVREASELLDADFGVWAHEGTNVKRVRALQYSVPEEIAPHIRMVAPVVRFGQIRPERSQVFEVVETAPSQVKVAAAIPPQDLDVKACNTSITPECLRALYKVGSYQAEPSKKSLFGVAGYLEQWAKYDQLELFASTYAPYAADANFTSVGVNGGENNQGPSDQGDIEANLDIQYAVALSYKTPITYYITGGRGPLVPDLDQPDPNDVSNEPYLEFFSYLLKLPDSELPQTLTTSYGEDEQSVPRPYAEKVCQMIGQLGARGVSVIFSSGDTGVGSACQTNDGKNTTRFLPIFPGACPYVTSIGATRYVEPEQAAAFSSGGFSDIFKRPAYQEAAVSTYLHKHLGSRWKGLYNPQGRGFPDVSAQGVAYHVFSQDKDIKVSGTSASAPLFAALVSLLNNARLAQGRPPLGFLNPWLYSEKVQKAGALTDIVHGGSSGCTGKDMYSGLPTPYVPYASWNATPGWDPVTGLGTPVFDKLLELSSPGKKLPHIGGGHGHGAGGH

SEQ ID NO: 676 - DNA, 1635 bp, Myceliophthora thermophilia
atgaggctctccatcaccgccctcgcggcgggcctcgccttcgccccactggccgccgccttcggccgcggcttgattatggatatcggccccgacgacgacaccgtctcggaaaccgagctgcagaagcgcgccgagaccgtcaacggctggggcaccttcgatcagctcatcgaccacgccaacccgtcgctcggcaccttcaagcagcgctactggtacggcactgagtactggaagggccccggctcgcccatttacctggtctcgcccggcgagcagagcggcgagggcttcaaccgtacgtggctcaccactgcccgcctgtcgggcgtcatggccaaccagacgggcggtgctgtcatcgtcctcgagcatcgctactggggacagtcgtcgccctatgacgagctcacggtggagaatcttcggtacctcaccctcgacaactcgctcaaggacctcgtctactttgccaagaattttgctccgcccttcgatcccagcggcagcagctccgccgacaaggcgccgtggatctttgccggcggctcgtattccggcgccctcgccggctggctggcggccagggagcccggcaccttctgggcctactacagctccagcggtgtcgtcgaggcgatcggcgatttctggcagtactttgtgcccgtgcaggaggcgacgcccaagaactgcagcgccgacgtcggggccgtcatcaactacgtggatctggtgctgagcttcgggtccaagaagagcaagcaggctctgaaggacaagttcgggctcggggaattggaggatgccgactttgctgccgcgctggagtggggtccctgggagtggcagtcgggccagttctactcgttcaacactacgggctataacccgttctaccgcttctgcgactacgtcgagaacgtgtggcccaactcgaccaacaaggtgcccggcccacgcggtgtcggtctgaccaaagcgctggaaggttacgccaaatacgtcaaggagcaggtcatccctggattctgtgagtcggctggataccccgaatgggagggtgagaacaacattgcctgcttcaagaacctcgaccccaacaacgcggcctacaaggacctcagtcttgacaactggatcaaccgtcagtggaactggatgctctgcaacgagccttttgaatggtggcaagacggcgccccgctcacccggccgactctcgtctcgcgcctggtgaacgcagactactggcgcaagcagtgcccgctgcacttccccgaaggcggatacggcatcgcggcaggcaagcgcgccaaggacgtcaaccggtggaccggcggctggagcgtcaccaacacgacgcgggccatgcacaccaacggccagtacgacccgtggcgcgacgccaccctgtcgagcaaattccgccccggcgggcccgtccagagcaccgagcggctgccggtgcgcctggtcaagggcggcacgcactgctcggatctgtacggccagaactgggcggtgaacgaggacgtcaagaagctggcccaggacgcggccgacgagatgaccgggtgggtcggggaatggtacgaggagaaggggttgccgaagccttgggcggcttga

SEQ ID NO: 677 - protein, 544 aa, Myceliophthora thermophilia
MRLSITALAAGLAFAPLAAAFGRGLIMDIGPDDDTVSETELQKRAETVNGWGTFDQLIDHANPSLGTFKQRYWYGTEYWKGPGSPIYLVSPGEQSGEGFNRTWLTTARLSGVMANQTGGAVIVLEHRYWGQSSPYDELTVENLRYLTLDNSLKDLVYFAKNFAPPFDPSGSSSADKAPWIFAGGSYSGALAGWLAAREPGTFWAYYSSSGVVEAIGDFWQYFVPVQEATPKNCSADVGAVINYVDLVLSFGSKKSKQALKDKFGLGELEDADFAAALEWGPWEWQSGQFYSFNTTGYNPFYRFCDYVENVWPNSTNKVPGPRGVGLTKALEGYAKYVKEQVIPGFCESAGYPEWEGENNIACFKNLDPNNAAYKDLSLDNWINRQWNWMLCNEPFEWWQDGAPLTRPTLVSRLVNADYWRKQCPLHFPEGGYGIAAGKRAKDVNRWTGGWSVTNTTRAMHTNGQYDPWRDATLSSKFRPGGPVQSTERLPVRLVKGGTHCSDLYGQNWAVNEDVKKLAQDAADEMTGWVGEWYEEKGLPKPWAA

SEQ ID NO: 678 - protein, 524 aa, Myceliophthora thermophilia
FGRGLIMDIGPDDDTVSETELQKRAETVNGWGTFDQLIDHANPSLGTFKQRYWYGTEYWKGPGSPIYLVSPGEQSGEGFNRTWLTTARLSGVMANQTGGAVIVLEHRYWGQSSPYDELTVENLRYLTLDNSLKDLVYFAKNFAPPFDPSGSSSADKAPWIFAGGSYSGALAGWLAAREPGTFWAYYSSSGVVEAIGDFWQYFVPVQEATPKNCSADVGAVINYVDLVLSFGSKKSKQALKDKFGLGELEDADFAAALEWGPWEWQSGQFYSFNTTGYNPFYRFCDYVENVWPNSTNKVPGPRGVGLTKALEGYAKYVKEQVIPGFCESAGYPEWEGENNIACFKNLDPNNAAYKDLSLDNWINRQWNWMLCNEPFEWWQDGAPLTRPTLVSRLVNADYWRKQCPLHFPEGGYGIAAGKRAKDVNRWTGGWSVTNTTRAMHTNGQYDPWRDATLSSKFRPGGPVQSTERLPVRLVKGGTHCSDLYGQNWAVNEDVKKLAQDAADEMTGWVGEWYEEKGLPKPWAA

SEQ ID NO: 679 - DNA, 1536 bp, Myceliophthora thermophilia
atgaggacccccgccgcttctctcctcgccttcgccctcccggcgttggccactgccggcggccacggcggctcgtcaggactcggctgtgactcgcagcggcccctggtgtcgtcggagaagctgcagtccctgatcaagaaggaggacctgctcgctggctcccaggagctccaggacattgctacggcccacgggggccaccgcgccttcggcagcagcggccacaatgccaccgtcgacttcctctactacacgctcaaggccctcgactactacaatgtgaccaagcagcccttcaaggagatcttctcgtccggcaccggctcgctcaccgtcgacggcgaggacattgaggccgagacgctgacctacaccccgagcggctcggcgaccgacaagccggtcgtcgtcgtggccaacgtgggctgcgacgccgccgactacccggccgaggtggccggcaacatcgccttgatcaagcgcggcacctgcaccttcagccagaagtcggtcaacgccaaggccgccggcgccgtcgccgccatcatctacaacaacgccgagggcaagctctcgggcaccctgggccagcccttcctggactacgccccggtcctgggcatcaccctcgaggccggcgaggccctgctggccaagctcgccgggggccccgtcaccgccaccctccagatcgacgccctcgtcgaggagcgcgtcacctacaacgtcattgccgagaccaaggagggcgaccacagcaacgtgctcgtcctcggcggccacaccgactcggtccctgccggcccgggcatcaatgatgacggctccggcaccatcggcatgctcaccgttgccaaggccctgaccaagttccgtgtcaagaacgcagtccggttcgccttctggagcgcggaggagtacggcctgctcggctcgtacgcctacatcaagtcaatcaacagctcggcggccgaactgtccaagatccgcgcctacctcaacttcgacatgattgccagccccaactacatctacggcatctacgacggcgacggcaacgccttcaacctgacgggcccggccggctccgacgtgatcgagcgcaacttcgagaacttcttcaagcgcaagcacacgccctcggtgccgaccgagttctcgggccggtccgactacgcggccttcatcgagaacggcatcccgtcgggcggcctgttcacgggcgccgaggtgctcaagacggagagggaggcggagctgttcggcggccgggccggcgtcgcctacgacgtcaactaccaccaggccggcgacaccgtcgacaacctcgccctcgacgccttcctgctcaacaccaaggccatcgccgactcggtcgccacctacgccctcagcttcgacggcctgccccgcgtcgacggcaagaagaggcgctgggacgcccaccgcgcccgcatgctcaagcgcagcgccggctcccacggccacgcccacctccactcggggccctgcggcggcggcgcgagcatctaa

SEQ ID NO: 680 - protein, 511 aa, Myceliophthora thermophilia
MRTPAASLLAFALPALATAGGHGGSSGLGCDSQRPLVSSEKLQSLIKKEDLLAGSQELQDIATAHGGHRAFGSSGHNATVDFLYYTLKALDYYNVTKQPFKEIFSSGTGSLTVDGEDIEAETLTYTPSGSATDKPVVVVANVGCDAADYPAEVAGNIALIKRGTCTFSQKSVNAKAAGAVAAIIYNNAEGKLSGTLGQPFLDYAPVLGITLEAGEALLAKLAGGPVTATLQIDALVEERVTYNVIAETKEGDHSNVLVLGGHTDSVPAGPGINDDGSGTIGMLTVAKALTKFRVKNAVRFAFWSAEEYGLLGSYAYIKSINSSAAELSKIRAYLNFDMIASPNYIYGIYDGDGNAFNLTGPAGSDVIERNFENFFKRKHTPSVPTEFSGRSDYAAFIENGIPSGGLFTGAEVLKTEREAELFGGRAGVAYDVNYHQAGDTVDNLALDAFLLNTKAIADSVATYALSFDGLPRVDGKKRRWDAHRARMLKRSAGSHGHAHLHSGPCGGGASI

SEQ ID NO: 681 - protein, 492 aa, Myceliophthora thermophilia
GGHGGSSGLGCDSQRPLVSSEKLQSLIKKEDLLAGSQELQDIATAHGGHRAFGSSGHNATVDFLYYTLKALDYYNVTKQPFKEIFSSGTGSLTVDGEDIEAETLTYTPSGSATDKPVVVVANVGCDAADYPAEVAGNIALIKRGTCTFSQKSVNAKAAGAVAAIIYNNAEGKLSGTLGQPFLDYAPVLGITLEAGEALLAKLAGGPVTATLQIDALVEERVTYNVIAETKEGDHSNVLVLGGHTDSVPAGPGINDDGSGTIGMLTVAKALTKFRVKNAVRFAFWSAEEYGLLGSYAYIKSINSSAAELSKIRAYLNFDMIASPNYIYGIYDGDGNAFNLTGPAGSDVIERNFENFFKRKHTPSVPTEFSGRSDYAAFIENGIPSGGLFTGAEVLKTEREAELFGGRAGVAYDVNYHQAGDTVDNLALDAFLLNTKAIADSVATYALSFDGLPRVDGKKRRWDAHRARMLKRSAGSHGHAHLHSGPCGGGASI

SEQ ID NO: 682 - DNA, 1482 bp, Myceliophthora thermophilia
atgaggttactccgcaccgcgggagcggcaactctcttcctgtcgcccgccacttttgcgaccaacaaccctctgaccccaggcaaacttgaggcggacattagaaccgaagagttgcaaaatgtcctctggaacctcaatcacattgcggtcacccacggcggcaaccgagcctttggcgagcctgggtacaaagcctcgctcgactttattctcgagcgcgcccagacacgcttccacaatgagtttgacactgtcgttcagcccttcaaccacacctacggcaagacgaaccagatcaaggtgactggaccagagggcgaggatgtctttgtcatcagcccattgtacaatcccgccacgccgctgcctgatggtatcaccgctcccttggtagatacaccggtcgatgacgagcgcggatcggcgtgctttccggaccagtgggagggggtcgatgtgaaggggaagctggtactagtaaagagaggcatttgtgctgtggcagataagtcggcccttgctaaggagcgcggggcactgggggtgatcttgtataacgaacagccgggtacgaacatcgtcgtcccgactctgggtgcagagagcatcggcaagactgttcctatcggaattattcccttggaagtaggacagagctggaagtcccggttggcagatggcgaggaggtgactgtgcacctgctggtcgattccatatccgatacgcgcgagacgtggaacattattgccgagaccaaacagggcgaccccgacaaagttatcatgctcggtgcacatctcgacagcgtgcaggcgggagcaggcatcaatgacgacggcagcggcacggcagctctcctggagatcttgaccgcggtccggcgctacgatggattcccacataagattcggttcgcctggtgggcagcagaagagagtggtctggtcggatccctctactacacctcccacttgaccgaggaggaagccgaccgcatcaagtattacttcaactacgacatgattggctctccccatcccgactttgaaattgcaagcgatggcaacagcggagtcgggccgcagcttctggaggaatacctcgtcgagcaggggaaggagattgtccacggcggcttcggttctggctccgattttgtgggcttcctcgagcttggcatcccgagtaccgcgctacataccggtgcaggagctccattcgacgaatgctaccaccaggcgtgtgatgacctcgacaatatcaactgggaggcgctgaccgtcaatgccaaagcggccgctcgggcggctgcccggctggccaactcgctcgagggcgtgccgccccgcaagaaaactagcctgaatcttcacacgcgccgtggagtggtgcaaaacttccgaaagtgggcttcattggccgaggaagcgagccacgggcacacgtgctcgcacacgggaaagagggtcgtagtgtaa

SEQ ID NO: 683 - protein, 493 aa, Myceliophthora thermophilia
MRLLRTAGAATLFLSPATFATNNPLTPGKLEADIRTEELQNVLWNLNHIAVTHGGNRAFGEPGYKASLDFILERAQTRFHNEFDTVVQPFNHTYGKTNQIKVTGPEGEDVFVISPLYNPATPLPDGITAPLVDTPVDDERGSACFPDQWEGVDVKGKLVLVKRGICAVADKSALAKERGALGVILYNEQPGTNIVVPTLGAESIGKTVPIGIIPLEVGQSWKSRLADGEEVTVHLLVDSISDTRETWNIIAETKQGDPDKVIMLGAHLDSVQAGAGINDDGSGTAALLEILTAVRRYDGFPHKIRFAWWAAEESGLVGSLYYTSHLTEEEADRIKYYFNYDMIGSPHPDFEIASDGNSGVGPQLLEEYLVEQGKEIVHGGFGSGSDFVGFLELGIPSTALHTGAGAPFDECYHQACDDLDNINWEALTVNAKAAARAAARLANSLEGVPPRKKTSLNLHTRRGVVQNFRKWASLAEEASHGHTCSHTGKRVVV

SEQ ID NO: 684 - protein, 473 aa, Myceliophthora thermophilia
TNNPLTPGKLEADIRTEELQNVLWNLNHIAVTHGGNRAFGEPGYKASLDFILERAQTRFHNEFDTVVQPFNHTYGKTNQIKVTGPEGEDVFVISPLYNPATPLPDGITAPLVDTPVDDERGSACFPDQWEGVDVKGKLVLVKRGICAVADKSALAKERGALGVILYNEQPGTNIVVPTLGAESIGKTVPIGIIPLEVGQSWKSRLADGEEVTVHLLVDSISDTRETWNIIAETKQGDPDKVIMLGAHLDSVQAGAGINDDGSGTAALLEILTAVRRYDGFPHKIRFAWWAAEESGLVGSLYYTSHLTEEEADRIKYYFNYDMIGSPHPDFEIASDGNSGVGPQLLEEYLVEQGKEIVHGGFGSGSDFVGFLELGIPSTALHTGAGAPFDECYHQACDDLDNINWEALTVNAKAAARAAARLANSLEGVPPRKKTSLNLHTRRGVVQNFRKWASLAEEASHGHTCSHTGKRVVV

SEQ ID NO: 685 - DNA, 1266 bp, Myceliophthora thermophilia
atgaagttgaacttgctcgtttcgtccgcccttctggcacttgcttcggccgcggccgtgcaatcgccccagcagcggaagtcctacgacgggtacaaggtcgtccgtctcactgtcgggaaagatgcggccaaggtcaacagtatcatcgaccgcctcggcctttcgacgtggaaggggaaggtccgggccggtgccgtggccgacattgtgatcccgccctcccaggtcgacgcattcgccgccgagacggccggcatggaggccatcacgatgcacgaggacctgggcgcgtccatcgcggccgagtcgacattccaagcctatgccgccgggtccgccaacgccacttggttccagtcataccacagcttcaacgaccatctccagtttctgaacgacctccagcagcagttctcgacgcaggccgagatcgtctcgtccggtaagtctctgaacggaagggacatcaccggcatccacttctggggcaagtcgggcaaggggaagcccgccgtcgtcttccacgggaccgtccacgcacgcgagtggatctcgaccatggtcgttgaataccttgcctactacctgctcaacaaccaagactctgccgaggtcgccggcttcctcgacaagtacgactttttcttctttccctttgtcaaccctgacggcttcgtctacacccagaccaacgaccggctgtggcgcaagaaccggcagagcacctccggtagcagctgcatcggccacgacatcaaccgcaactggccctacaagtgggacgtcagcggcggcgcctcgaccaacccctgcgccgaggactttaagggaaccaaggaggccgacgcccccgagacccaggccctctccgcctggctgaagcagaccaaggagagccagggaatcaagctgtttatcgattggcactcgtactcgcagcttttcatgactccctacggatactcgtgcacggccgtggcgcccaacaactccgagctgcagtccctggcccagggcgccgcggcggccatcaaggcggtgcacggcaccagcttcaagacgggccccatctgctccaccatctacaaggccaccggcagcagcgtcgactacgccaacgacgtcgtcggcgccgactacgtcttcaccgccgagctgcgcgacaccggcaactacggcttcgtcctccccgccagccagatcctgcccagcggcgaggagacctacgccggtgtgcgctacctgctccagaacatgaagtaa

SEQ ID NO: 686 - protein, 421 aa, Myceliophthora thermophilia
MKLNLLVSSALLALASAAAVQSPQQRKSYDGYKVVRLTVGKDAAKVNSIIDRLGLSTWKGKVRAGAVADIVIPPSQVDAFAAETAGMEAITMHEDLGASIAAESTFQAYAAGSANATWFQSYHSFNDHLQFLNDLQQQFSTQAEIVSSGKSLNGRDITGIHFWGKSGKGKPAVVFHGTVHAREWISTMVVEYLAYYLLNNQDSAEVAGFLDKYDFFFFPFVNPDGFVYTQTNDRLWRKNRQSTSGSSCIGHDINRNWPYKWDVSGGASTNPCAEDFKGTKEADAPETQALSAWLKQTKESQGIKLFIDWHSYSQLFMTPYGYSCTAVAPNNSELQSLAQGAAAAIKAVHGTSFKTGPICSTIYKATGSSVDYANDVVGADYVFTAELRDTGNYGFVLPASQILPSGEETYAGVRYLLQNMK

SEQ ID NO: 687 - protein, 402 aa, Myceliophthora thermophilia
VQSPQQRKSYDGYKVVRLTVGKDAAKVNSIIDRLGLSTWKGKVRAGAVADIVIPPSQVDAFAAETAGMEAITMHEDLGASIAAESTFQAYAAGSANATWFQSYHSFNDHLQFLNDLQQQFSTQAEIVSSGKSLNGRDITGIHFWGKSGKGKPAVVFHGTVHAREWISTMVVEYLAYYLLNNQDSAEVAGFLDKYDFFFFPFVNPDGFVYTQTNDRLWRKNRQSTSGSSCIGHDINRNWPYKWDVSGGASTNPCAEDFKGTKEADAPETQALSAWLKQTKESQGIKLFIDWHSYSQLFMTPYGYSCTAVAPNNSELQSLAQGAAAAIKAVHGTSFKTGPICSTIYKATGSSVDYANDVVGADYVFTAELRDTGNYGFVLPASQILPSGEETYAGVRYLLQNMK

SEQ ID NO: 688 - DNA, 1194 bp, Myceliophthora thermophilia
atgaaggatgcttttttgctgaccgcagctgtgctgctcggctccgcccagggagcagttcacaaaatgaagctgcagaagatccctctctctgagcagcttgaggcggttcccatcaacacccagctcgagcatctcggccaaaaatacatggggttgcgcccacgtgaatctcaagccgatgccatctttaagggcatggttgccgacgtcaagggcaaccatcctattcccatctccaacttcatgaacgcacagtacttctccgagatcacgattggaacaccccctcagtcattcaaggtggtcctcgataccggtagctccaacctgtgggttccatcagtcgagtgcggctcgattgcttgttacctgcactcgaagtatgactcatctgcctcgtccacctacaagaagaacggaacctcgttcgagatccgctacgggtcaggcagcctgagcgggtttgtctctcaggacacagtgtccatcggcgatatcactatccagggccaggactttgccgaggcgaccagcgagcccggtcttgcctttgcctttggccgtttcgacggtatccttggccttggctacgaccggatctcagtcaacggcatcgtcccgcctttttacaagatggtcgagcagaagctcatcgatgagcccgtcttcgccttctacctggccgataccaatggccagtctgaggttgtctttggcggtgttgaccacgacaagtacaagggcaagatcaccaccattccgttgaggcgcaaggcctactgggaggttgacttcgatgccatttcttacggcgacgacactgccgagcttgagaacactggcatcatcctggacaccggtacttctctgatcgctctgcccagccagctcgccgagatgctcaacgctcagatcggcgctaagaagagctacactggccagtacaccatcgactgcaacaagcgcgactccctcaaggatgtcacgttcaacctggctggctacaatttcacgctcggcccctacgactacgttctcgaggtccagggcagctgcatttctacctttatgggcatggatttcccggctcctactgggccacttgcgatcctgggcgatgccttcctccggaggtattactccatttatgaccttggcgccgacaccgtcggtctggctgaggccaagtga

SEQ ID NO: 689 - protein, 397 aa, Myceliophthora thermophilia
MKDAFLLTAAVLLGSAQGAVHKMKLQKIPLSEQLEAVPINTQLEHLGQKYMGLRPRESQADAIFKGMVADVKGNHPIPISNFMNAQYFSEITIGTPPQSFKVVLDTGSSNLWVPSVECGSIACYLHSKYDSSASSTYKKNGTSFEIRYGSGSLSGFVSQDTVSIGDITIQGQDFAEATSEPGLAFAFGRFDGILGLGYDRISVNGIVPPFYKMVEQKLIDEPVFAFYLADTNGQSEVVFGGVDHDKYKGKITTIPLRRKAYWEVDFDAISYGDDTAELENTGIILDTGTSLIALPSQLAEMLNAQIGAKKSYTGQYTIDCNKRDSLKDVTFNLAGYNFTLGPYDYVLEVQGSCISTFMGMDFPAPTGPLAILGDAFLRRYYSIYDLGADTVGLAEAK

SEQ ID NO: 690 - protein, 379 aa, Myceliophthora thermophilia
AVHKMKLQKIPLSEQLEAVPINTQLEHLGQKYMGLRPRESQADAIFKGMVADVKGNHPIPISNFMNAQYFSEITIGTPPQSFKVVLDTGSSNLWVPSVECGSIACYLHSKYDSSASSTYKKNGTSFEIRYGSGSLSGFVSQDTVSIGDITIQGQDFAEATSEPGLAFAFGRFDGILGLGYDRISVNGIVPPFYKMVEQKLIDEPVFAFYLADTNGQSEVVFGGVDHDKYKGKITTIPLRRKAYWEVDFDAISYGDDTAELENTGIILDTGTSLIALPSQLAEMLNAQIGAKKSYTGQYTIDCNKRDSLKDVTFNLAGYNFTLGPYDYVLEVQGSCISTFMGMDFPAPTGPLAILGDAFLRRYYSIYDLGADTVGLAEAK

SEQ ID NO: 691 - DNA, 2694 bp, Myceliophthora thermophilia
atggtacgtctcgactgggctgccgtgcttctggccgccacggccgttgcgaaggccgtcacccctcacacgccgtcattcgttcctggagcgtacattgtcgagtatgaggaggatcaggactcccatgcattcgtcaacaagctgggaggcaaggcgtcgctccggaaggacctgcgcttcaagctcttcaagggcgcgtctatccagttcaaggacaccgagactgccgaccagatggttgccaaggtggcagaaatgccaaaggtcaaagccgtctatccggtccggcgctatcccgtcccgaaccatgttgttcactccacgggcaacgtggcggacgaagttctggtcaagcggcaggcggccggcaacgacacgttctcgactcacttgatgacgcaggtgaacaagttcagggacgcgggcatcactggaaagggcatcaagattgccgtcattgacactggtatcgactatctccatgaggcgctcggcggctgcttcgggcccgactgtttggtctcgtacggcacggacttggtcggagacgacttcaacggctccaacacccccaagcccgaccccgaccctattgacaactgccagggccacggcacgcacgtcgccggcatcattgcggcgcagaccaacaacccgtttggcatcattggcgccgctaccgatgtcaccctgggcgcgtaccgcgtctttggctgcaacggcgacacccccaacgacgtcctgattgccgcctacaacatggcctacgaagccggcagtgacatcatcacggcctccatcggtgggccctcgggatggagcgaggacccgtgggctgccgtcgtcacgcgaatcgtcgagaacggtgtcccttgcgtggtctccgccggcaacgacggcgacgcgggcatcttctacgcgtccactgccgccaacggcaagaaggttaccgccattgcgtccgtcgacaacatcgtcacgcccgcgctgctcagcaacgcgtcgtacacgctcaacggcacggatgatttctttggcttcacggccggagacccgggttcctgggacgatgtgaacctgcctctctgggccgtcagcttcgacacgaccgaccctgccaacggatgcaatccctatcccgactcgactccggacctgtctggctacatcgtcctgatccgccgcggtacttgcacgttcgtggagaaggcttcatatgcggcggccaagggagccaagtacgtcatgttctataacaacgtgcaacaagggaccgtcaccgtgtcggcagctgaggcaaagggtatcgagggcgtggctatggtgacggctcagcagggcgaggcgtgggttcgtgctctggaggcggggtcggaggtggttctgcacatgaaggaccccctgaaggcgggtaagttcctcactacgacgcccaacaccgctacgggaggtttcatgagcgactacaccagctggggaccgacctgggaggtcgaggtgaagccccagttcggaacccccggaggctcgatcctgtcgacgtacccccgcgctcttggttcctacgccgtgctctcgggaacctccatggcgtgccccttggccgcggccatctacgcgctcctgatcaacaccagggggaccaaggaccccaagacgctcgagaacctcatctcgtcgaccgcgcgcccgaacctcttccgtctgaacggagagtccctcccgctcctcgcgccggtgccgcaacagggaggcggcatagtccaggcgtgggatgcggcccaggcgaccacgctcctcagcgtgtcgagcctctcgttcaacgacacggaccacttcaagcccgtgcagaccttcaccatcaccaacacgggcaagaaggccgtcacctactcgctgagcaacgtcggtgccgcgacggcctacacctttgcggacgcgaagtcgattgagccggcgccgttcccgaacgagctgacggccgacttcgcctccctgacgttcgtccccaagcgcctcaccatccccgccggcaagcgccagaccgtcaccgtgatcgcgaagccttcggagggcgtggacgccaagcggctccccgtctactcgggctacatcgccatcaacgggtcggacagctcagccctgtctctgccgtacctgggcgtggtgggcagcctgcactcggccgtcgtgctcgactcgaacggcgcccggatcagcctcgccagcgacgacaccaataagcccctgccggccaacaccagcttcgtgctgccgcccgccggcttccccaacgacacgtcgtacgccaacagcaccgacctgcccaagctggtcgtcgacctcgccatgggttcggccctgctgcgggccgacgtcgtgccgctctccgggggcgcggcgacggcgacggcgcgcctcacgcggaccgtcttcggcacgcgcacgatcgggcagccgtacggcctccccgcgcgctacaacccgcggggcacgttcgagtacgcctgggacggcaggctcgacgacggctcgtacgcgccggcggggcggtaccggttcgcggtcaaggcgctgcgcatctttggcgacgcgaagcgcgcgcgcgagtacgacgcggccgagacggtcgagttcaacatcgagtacctgccgggtccgtcggccaagttcaggaggaggctgttttag

SEQ ID NO: 692 - protein, 897 aa, Myceliophthora thermophilia
MVRLDWAAVLLAATAVAKAVTPHTPSFVPGAYIVEYEEDQDSHAFVNKLGGKASLRKDLRFKLFKGASIQFKDTETADQMVAKVAEMPKVKAVYPVRRYPVPNHVVHSTGNVADEVLVKRQAAGNDTFSTHLMTQVNKFRDAGITGKGIKIAVIDTGIDYLHEALGGCFGPDCLVSYGTDLVGDDFNGSNTPKPDPDPIDNCQGHGTHVAGIIAAQTNNPFGIIGAATDVTLGAYRVFGCNGDTPNDVLIAAYNMAYEAGSDIITASIGGPSGWSEDPWAAVVTRIVENGVPCVVSAGNDGDAGIFYASTAANGKKVTAIASVDNIVTPALLSNASYTLNGTDDFFGFTAGDPGSWDDVNLPLWAVSFDTTDPANGCNPYPDSTPDLSGYIVLIRRGTCTFVEKASYAAAKGAKYVMFYNNVQQGTVTVSAAEAKGIEGVAMVTAQQGEAWVRALEAGSEVVLHMKDPLKAGKFLTTTPNTATGGFMSDYTSWGPTWEVEVKPQFGTPGGSILSTYPRALGSYAVLSGTSMACPLAAAIYALLINTRGTKDPKTLENLISSTARPNLFRLNGESLPLLAPVPQQGGGIVQAWDAAQATTLLSVSSLSFNDTDHFKPVQTFTITNTGKKAVTYSLSNVGAATAYTFADAKSIEPAPFPNELTADFASLTFVPKRLTIPAGKRQTVTVIAKPSEGVDAKRLPVYSGYIAINGSDSSALSLPYLGVVGSLHSAVVLDSNGARISLASDDTNKPLPANTSFVLPPAGFPNDTSYANSTDLPKLVVDLAMGSALLRADVVPLSGGAATATARLTRTVFGTRTIGQPYGLPARYNPRGTFEYAWDGRLDDGSYAPAGRYRFAVKALRIFGDAKRAREYDAAETVEFNIEYLPGPSAKFRRRLF

SEQ ID NO: 693 - protein, 878 aa, Myceliophthora thermophilia
VTPHTPSFVPGAYIVEYEEDQDSHAFVNKLGGKASLRKDLRFKLFKGASIQFKDTETADQMVAKVAEMPKVKAVYPVRRYPVPNHVVHSTGNVADEVLVKRQAAGNDTFSTHLMTQVNKFRDAGITGKGIKIAVIDTGIDYLHEALGGCFGPDCLVSYGTDLVGDDFNGSNTPKPDPDPIDNCQGHGTHVAGIIAAQTNNPFGIIGAATDVTLGAYRVFGCNGDTPNDVLIAAYNMAYEAGSDIITASIGGPSGWSEDPWAAVVTRIVENGVPCVVSAGNDGDAGIFYASTAANGKKVTAIASVDNIVTPALLSNASYTLNGTDDFFGFTAGDPGSWDDVNLPLWAVSFDTTDPANGCNPYPDSTPDLSGYIVLIRRGTCTFVEKASYAAAKGAKYVMFYNNVQQGTVTVSAAEAKGIEGVAMVTAQQGEAWVRALEAGSEVVLHMKDPLKAGKFLTTTPNTATGGFMSDYTSWGPTWEVEVKPQFGTPGGSILSTYPRALGSYAVLSGTSMACPLAAAIYALLINTRGTKDPKTLENLISSTARPNLFRLNGESLPLLAPVPQQGGGIVQAWDAAQATTLLSVSSLSFNDTDHFKPVQTFTITNTGKKAVTYSLSNVGAATAYTFADAKSIEPAPFPNELTADFASLTFVPKRLTIPAGKRQTVTVIAKPSEGVDAKRLPVYSGYIAINGSDSSALSLPYLGVVGSLHSAVVLDSNGARISLASDDTNKPLPANTSFVLPPAGFPNDTSYANSTDLPKLVVDLAMGSALLRADVVPLSGGAATATARLTRTVFGTRTIGQPYGLPARYNPRGTFEYAWDGRLDDGSYAPAGRYRFAVKALRIFGDAKRAREYDAAETVEFNIEYLPGPSAKFRRRLF

SEQ ID NO: 694 - DNA, 861 bp, Myceliophthora thermophilia
atgtggtccattgtccgctccctatcgctcgcctcgctgatatcgtcggcttgcacggtcacggcgcaactgagcttcgtggcgagcgtcaagcagcacggcaaggacgtcgacgcgtccagcctgagctttgtccggatcccgcccctggaacaccgctggcacgcgtctcgaccccgtcgaggacagaacaacaacaggacggtcgagagggatgccgtcagctacagcgccaattggtgcggtgcgtcgcagcacgcgaccgactcggacggcatcaagagcgtgctcggctacttcaccgccccggacctgacgctgcgaccagacacgccggcgccgcagttcgccgctgcatgggttgggattgatggggccgcgtgcaacacgaccctactgcaggcgggcgtgacgaccattgtcaactcggacgggggccagagcgcttcggcatggtgggagtggtacccagaagcttcctacaccatcagcggcctcaaggtcaaggcgggcgagtggatgtcggtcaatatcacgaccaaggatgcttcaagcgccattctggtcatcgagaacgcggatactggcacgtcggtcaccctggagctaaacaacgggccgcagctgtgccgtcgggatgccgagtggatcttggaggatttctacgaatcgggcaagcaggttgcgttggccaattttgcggatctgtggttcgtcgactccggagcgacaacggtcggcggaaagaacgtgggcttcgacggggcgaccatggtgcacctgcgggacgaaaacggcaacgtgctgtgctcgccagagccctacgacaactccaactttgtagtcgtctcaaaaccctag

SEQ ID NO: 695 - protein, 286 aa, Myceliophthora thermophilia
MWSIVRSLSLASLISSACTVTAQLSFVASVKQHGKDVDASSLSFVRIPPLEHRWHASRPRRGQNNNRTVERDAVSYSANWCGASQHATDSDGIKSVLGYFTAPDLTLRPDTPAPQFAAAWVGIDGAACNTTLLQAGVTTIVNSDGGQSASAWWEWYPEASYTISGLKVKAGEWMSVNITTKDASSAILVIENADTGTSVTLELNNGPQLCRRDAEWILEDFYESGKQVALANFADLWFVDSGATTVGGKNVGFDGATMVHLRDENGNVLCSPEPYDNSNFVVVSKP

SEQ ID NO: 696 - protein, 264 aa, Myceliophthora thermophilia
QLSFVASVKQHGKDVDASSLSFVRIPPLEHRWHASRPRRGQNNNRTVERDAVSYSANWCGASQHATDSDGIKSVLGYFTAPDLTLRPDTPAPQFAAAWVGIDGAACNTTLLQAGVTTIVNSDGGQSASAWWEWYPEASYTISGLKVKAGEWMSVNITTKDASSAILVIENADTGTSVTLELNNGPQLCRRDAEWILEDFYESGKQVALANFADLWFVDSGATTVGGKNVGFDGATMVHLRDENGNVLCSPEPYDNSNFVVVSKP

SEQ ID NO: 697 - DNA, 1917 bp, Myceliophthora thermophilia
atgacgtcctccttctccctccggtccgcagctctcgcgaccgtctcagcactctttgccgagcggaccatcgccggggccccggcagacaagtgcccgacacggttcgcgtgggaggacgctcaactgactgacgaggtgatctccagcaccgaccccttgctctttggtttcggttaccctgtcgacaccgcggcctccgcctccgaaaatggcgggccggagcttccaaactgcaaagccatgcccggcgacgcctcgtggccgtcgccagagacctgggccctcttcaactcgaccctcggcggcgccctgatcgagacggttcccatcgccgcgccgtgctacaacaattggccccagcgcgacgccgcggcgtgcgagtacgtgacggagcactggggcgatccgcgcatgcacgtcgaggacccgacctcggccatgttccccctctaccagggccgcacctgtctgccgaccgacgacccggacggcagcaactgcaccctgggcggctacgcggcctactcggtcgccgccaccaacgtctcgcagatccaactcgccctcaactttgcccgcaacaccaaccttcgcctggtcgtgcggaatacgggccacgacttcaacgaccggtccatcggcgccggcgctctgtccgtctggacacacaagctccgcgacatccagttcttgcctgattataactgccggggttacagcgggccagccttcaagctcggcagcggcatcatgacggaagagctgtatgctgcggccgaggaaaataatgtcacggtggtcggcggcgagtgtaggaccgtgggcattgcgggtggctacattgcaggtggcggccattcgcccatgtccgcccttctgggcatgggagctgatcaagtgctgtctctcgaggttgtgctccccaacgggcggttcgtcactgccaacgaggatacgaacccggacctgtactgggctctccgcggcgctggtggcagcacgtatggtgtggtaacctcggtgaccatccgggcctatccgaagattcccaatacgctgatgacttattcctacaccacgagtcccaacgtcacaaccgataccttctttgcgtcgctcggcgtttatatgagctactttgacaggatcaccgcggccggcgcttacggctacttcatcgtcgtcagtatcggccccgaccagtacctcttcagcatgatgcccctgtggggagcaaacatgacaaagccgcagctcaccgagctcgcgacgcccctcctcaacgacctggctggcctgggcatcgctatcactcccaacgtcaccgagtatccgtctatgttcagtgcgttcaacggcgccttcccggcggccgagcaggtcggcgcctacgacaaccacgcggcctcgcgcatcttccccaaggagagcttcgagccggaccggctcaacgacaccctcgcggcagtgcgccacgcggtcgagggcggcggcgtgctagtcggctacaacatccgggccgcgcctaacccggccgtcaaccagaccaacagcgtccatccggcgtggcgcaggacgaccggcttctttatcctgggggcgtcgtggccagccaacgcgaccgacgcgcagatccagcaggccagcgagacgctgaccaacgactggatggcccgctggcgcgccgtctcgcccggcggcggctcctacgcgtccgagggcgacatcaacgagcccgacttccagcagtccttctacggcgaccactaccccaggctgctggaactcaagaaaaagtacgaccccaccggtctgttctatgcgcctaccgccgtcggctccgagtactggtacattacggaccaattgccgtggatcccgacgcagaatgggcggttgtgcaggaagaaatga

SEQ ID NO: 698 - protein, 638 aa, Myceliophthora thermophilia
MTSSFSLRSAALATVSALFAERTIAGAPADKCPTRFAWEDAQLTDEVISSTDPLLFGFGYPVDTAASASENGGPELPNCKAMPGDASWPSPETWALFNSTLGGALIETVPIAAPCYNNWPQRDAAACEYVTEHWGDPRMHVEDPTSAMFPLYQGRTCLPTDDPDGSNCTLGGYAAYSVAATNVSQIQLALNFARNTNLRLVVRNTGHDFNDRSIGAGALSVWTHKLRDIQFLPDYNCRGYSGPAFKLGSGIMTEELYAAAEENNVTVVGGECRTVGIAGGYIAGGGHSPMSALLGMGADQVLSLEVVLPNGRFVTANEDTNPDLYWALRGAGGSTYGVVTSVTIRAYPKIPNTLMTYSYTTSPNVTTDTFFASLGVYMSYFDRITAAGAYGYFIVVSIGPDQYLFSMMPLWGANMTKPQLTELATPLLNDLAGLGIAITPNVTEYPSMFSAFNGAFPAAEQVGAYDNHAASRIFPKESFEPDRLNDTLAAVRHAVEGGGVLVGYNIRAAPNPAVNQTNSVHPAWRRTTGFFILGASWPANATDAQIQQASETLTNDWMARWRAVSPGGGSYASEGDINEPDFQQSFYGDHYPRLLELKKKYDPTGLFYAPTAVGSEYWYITDQLPWIPTQNGRLCRKK

SEQ ID NO: 699 - protein, 613 aa, Myceliophthora thermophilia
GAPADKCPTRFAWEDAQLTDEVISSTDPLLFGFGYPVDTAASASENGGPELPNCKAMPGDASWPSPETWALFNSTLGGALIETVPIAAPCYNNWPQRDAAACEYVTEHWGDPRMHVEDPTSAMFPLYQGRTCLPTDDPDGSNCTLGGYAAYSVAATNVSQIQLALNFARNTNLRLVVRNTGHDFNDRSIGAGALSVWTHKLRDIQFLPDYNCRGYSGPAFKLGSGIMTEELYAAAEENNVTVVGGECRTVGIAGGYIAGGGHSPMSALLGMGADQVLSLEVVLPNGRFVTANEDTNPDLYWALRGAGGSTYGVVTSVTIRAYPKIPNTLMTYSYTTSPNVTTDTFFASLGVYMSYFDRITAAGAYGYFIVVSIGPDQYLFSMMPLWGANMTKPQLTELATPLLNDLAGLGIAITPNVTEYPSMFSAFNGAFPAAEQVGAYDNHAASRIFPKESFEPDRLNDTLAAVRHAVEGGGVLVGYNIRAAPNPAVNQTNSVHPAWRRTTGFFILGASWPANATDAQIQQASETLTNDWMARWRAVSPGGGSYASEGDINEPDFQQSFYGDHYPRLLELKKKYDPTGLFYAPTAVGSEYWYITDQLPWIPTQNGRLCRKK

SEQ ID NO: 700 - DNA, 1776 bp, Myceliophthora thermophilia
atggcccgcgtcctcagcactggagcactgcttgcattgctcaattttgccacgcccggcctcggagccgcccacgtgtcgaactgcagatacatcccgggggataagggatggccgagccagagcgactgggccaagctcaaccggaccgtcggcggccggctgatcgccacggttccccaggcccacgtatgccacgccggcggcccgggggtcaaccaggctgcctgcgacgccctgaaggatccccttgttttcgagaagacggccccggcctatgtgacgcgcctcaacctcactctcacggacgtcaacaaaccggccgagatcatcaacgcctactggcagaaccggtcctgcgacccattctccaaaacatcgcggccctgcgtcctcggcaactacccggtttactcgatcaacgtgtccggagcccacgacgcgattgccggtttggattttgcacgtaggcaaaacatcaggctgtccattcagaacaccggtcatgactacaatggccgctcggccggattcggatcgctctcgctgtggatgcacaacctgcagggcattgaggtcatcccgcgataccggagccgggcgtactcgggcccggcggtcaagctcggcgccggagtgcacgcgggcgtggcgctgcagtacctgggccagcgcgggtaccggctggtgacgggcgagtgcggcaccgtgggcgtggcgggcggctactcgatgggcggcggccacggcccgctcaacggcgcgtatggcatggcttcggacaacgtgctcgagtgggaggtggtcacgggggacggccggcacatcgtggccaccccggagaagaactcggacatctactgggccatgtcgggcggcggcggcggcagctacggagtggccctgagcatgacggcccgcatctaccgcgacgggcccgtcctcggccccgtcctgacatttaccgccccggacgtcggcaacgagacgtactggggcgccgtcgacgccttcctcaagcgcctgcccggcatgctgaggggcaccagcagctcgatccagttcagcttctggaacaaccagtttggcgccctcttcgtcatgcccgacgagcgaaactcgtcggccgccgacgccaagctggccccgctgctgcgcgacctcgacgccatcgggatcccctacgacctgacggtcagccagtccgaaactttcttggattactacagctcctggtacggcccgctgcccttcggttacgagccgccgtcgaccacgctcaacagccggctcgtccccgtgcgcgtggcccaggacgaccaggcccgccgccagctaatcgacgccatgcggctcaccacacagacgggcgagttcaccgtcggctgctcggccgccgacgtcgggagcgtccggcacccggacaacgcggtgctgccggcctggcgcaagtcggtcgccatctgcaacgtcaacgccttctggaactggaccgcgcctctcgagcagaacctcgaggtcaagcggaggatggtcgacgtctacagcccggcctgggacgccgccaccccgggctccggcgtctacctcaacgagatcgacccctggtaccgcagcgacttcaaggtcaacatgtttggctccaactaccggcgcctgctcagcatcaagcacaagtacgacccgtaccacctcttctacggccacaacttggtcggctccgacgacttctccatcgacggggccggcaggctgtgctactcctccggtcgttga

SEQ ID NO: 701 - protein, 591 aa, Myceliophthora thermophilia
MARVLSTGALLALLNFATPGLGAAHVSNCRYIPGDKGWPSQSDWAKLNRTVGGRLIATVPQAHVCHAGGPGVNQAACDALKDPLVFEKTAPAYVTRLNLTLTDVNKPAEIINAYWQNRSCDPFSKTSRPCVLGNYPVYSINVSGAHDAIAGLDFARRQNIRLSIQNTGHDYNGRSAGFGSLSLWMHNLQGIEVIPRYRSRAYSGPAVKLGAGVHAGVALQYLGQRGYRLVTGECGTVGVAGGYSMGGGHGPLNGAYGMASDNVLEWEVVTGDGRHIVATPEKNSDIYWAMSGGGGGSYGVALSMTARIYRDGPVLGPVLTFTAPDVGNETYWGAVDAFLKRLPGMLRGTSSSIQFSFWNNQFGALFVMPDERNSSAADAKLAPLLRDLDAIGIPYDLTVSQSETFLDYYSSWYGPLPFGYEPPSTTLNSRLVPVRVAQDDQARRQLIDAMRLTTQTGEFTVGCSAADVGSVRHPDNAVLPAWRKSVAICNVNAFWNWTAPLEQNLEVKRRMVDVYSPAWDAATPGSGVYLNEIDPWYRSDFKVNMFGSNYRRLLSIKHKYDPYHLFYGHNLVGSDDFSIDGAGRLCYSSGR

SEQ ID NO: 702 - protein, 567 aa, Myceliophthora thermophilia
HVSNCRYIPGDKGWPSQSDWAKLNRTVGGRLIATVPQAHVCHAGGPGVNQAACDALKDPLVFEKTAPAYVTRLNLTLTDVNKPAEIINAYWQNRSCDPFSKTSRPCVLGNYPVYSINVSGAHDAIAGLDFARRQNIRLSIQNTGHDYNGRSAGFGSLSLWMHNLQGIEVIPRYRSRAYSGPAVKLGAGVHAGVALQYLGQRGYRLVTGECGTVGVAGGYSMGGGHGPLNGAYGMASDNVLEWEVVTGDGRHIVATPEKNSDIYWAMSGGGGGSYGVALSMTARIYRDGPVLGPVLTFTAPDVGNETYWGAVDAFLKRLPGMLRGTSSSIQFSFWNNQFGALFVMPDERNSSAADAKLAPLLRDLDAIGIPYDLTVSQSETFLDYYSSWYGPLPFGYEPPSTTLNSRLVPVRVAQDDQARRQLIDAMRLTTQTGEFTVGCSAADVGSVRHPDNAVLPAWRKSVAICNVNAFWNWTAPLEQNLEVKRRMVDVYSPAWDAATPGSGVYLNEIDPWYRSDFKVNMFGSNYRRLLSIKHKYDPYHLFYGHNLVGSDDFSIDGAGRLCYSSGR

SEQ ID NO: 703 - DNA, 1533 bp, Myceliophthora thermophilia
atgttggtcctcgtcgccgagttgtttctccttgcagccttgcttattatctgcctcgcttacttcgttttcctcatgccgccaagatacccaaccaacatcccagctgttcctttttgggtggctctcatacccttcttcaaagacgtcgaccaatcagatatcttccgcaagtacatcgagagaccgctcaggactcatggtgccgtaaagctgttcttcggagcccagtggaacatcttagtgcacaagccatcatacctcgccgccatcttcagagacgaggacatttaccaaaagagcggcaatcagaaaaagattcctcacagtgtcctcgcgcacctccttggtgacaacataatatccagccacggagagaggtggagaaactaccggtccgtggtgaagcccgggctgcagagagacttcgaggccagagcaattgcccgcaacgccgagcacctttgcggcttattgagagatgcccaagtccgcgcaggaaacgggggtgtgcccgtccaggagctactgcagcggtactcggtggccaactgttccgaggtggtactgcaaatcaagctcgatgccctgacttctgccaacgcgcccatcaactttctgcagaccgaggtgaagcgggagattttcaagcccgtcttcatgaacttccctgttcttgaccggtttccgttcccaagccgcacaagagcccgccgaaccgttgacaggttcaagcacgagctcagacgcgcgattgtcgagagccacgcgaaagacgccattttcgcttcggcagcgtcttctgacggcctaggccggcggatgttggacgccagagagtccggactgtgggacgaaaagcagctgttggataacctaacagttgcgttcgtggcaggtcaagaaaacccacagctctgcatgatatccacactatacctcatggctaagcaccccgaatcccaagctaagctctatgccgaggctcagagtaaggggttgatggagcgcacaaacccggacccggacccggacccggaaatcctgcaggacatgccgtacctgacttcgctgatatacgagagcctgcggctctttccaccgattggtcagctagtcaatcggaaggcaagcaaggatatcctactgggcgatgacattgtcatacccaaggggacctatctaggttacaactgctactcgaccaaccgggaccctgctgtctggggcccgagagctgacgagttcgacccggctcggtggggagactcgccattggccatccggaagcagtatcggctgcggaaagccagagcagagttcatcagtttccacggcggacgccgcgcctgcctgggggagaagtttgccatgctggagatgagggtcactctagtcactctcgtgcgggagtttcgctggaggctggacccagcttgggtggatagaaagacgcccacatgctggttgtcaaagcttacttgtacagaaaagtttgaactgcttctgggtggctttgacaatgatgcctga

SEQ ID NO: 704 - protein, 510 aa, Myceliophthora thermophilia
MLVLVAELFLLAALLIICLAYFVFLMPPRYPTNIPAVPFWVALIPFFKDVDQSDIFRKYIERPLRTHGAVKLFFGAQWNILVHKPSYLAAIFRDEDIYQKSGNQKKIPHSVLAHLLGDNIISSHGERWRNYRSVVKPGLQRDFEARAIARNAEHLCGLLRDAQVRAGNGGVPVQELLQRYSVANCSEVVLQIKLDALTSANAPINFLQTEVKREIFKPVFMNFPVLDRFPFPSRTRARRTVDRFKHELRRAIVESHAKDAIFASAASSDGLGRRMLDARESGLWDEKQLLDNLTVAFVAGQENPQLCMISTLYLMAKHPESQAKLYAEAQSKGLMERTNPDPDPDPEILQDMPYLTSLIYESLRLFPPIGQLVNRKASKDILLGDDIVIPKGTYLGYNCYSTNRDPAVWGPRADEFDPARWGDSPLAIRKQYRLRKARAEFISFHGGRRACLGEKFAMLEMRVTLVTLVREFRWRLDPAWVDRKTPTCWLSKLTCTEKFELLLGGFDNDA

SEQ ID NO: 705 - protein, 485 aa, Myceliophthora thermophilia
MPPRYPTNIPAVPFWVALIPFFKDVDQSDIFRKYIERPLRTHGAVKLFFGAQWNILVHKPSYLAAIFRDEDIYQKSGNQKKIPHSVLAHLLGDNIISSHGERWRNYRSVVKPGLQRDFEARAIARNAEHLCGLLRDAQVRAGNGGVPVQELLQRYSVANCSEVVLQIKLDALTSANAPINFLQTEVKREIFKPVFMNFPVLDRFPFPSRTRARRTVDRFKHELRRAIVESHAKDAIFASAASSDGLGRRMLDARESGLWDEKQLLDNLTVAFVAGQENPQLCMISTLYLMAKHPESQAKLYAEAQSKGLMERTNPDPDPDPEILQDMPYLTSLIYESLRLFPPIGQLVNRKASKDILLGDDIVIPKGTYLGYNCYSTNRDPAVWGPRADEFDPARWGDSPLAIRKQYRLRKARAEFISFHGGRRACLGEKFAMLEMRVTLVTLVREFRWRLDPAWVDRKTPTCWLSKLTCTEKFELLLGGFDNDA

SEQ ID NO: 706 - DNA, 1971 bp, Myceliophthora thermophilia
atggcagcgcgcgccgcgcttgcggcctgcagccgacagtccattctcgccagctctgccgactatcgatatcctgcttcgtttagcttgcacgtccgtccagctgttattgccatgtttcgaccgacccttctctcgctggcgaggttgctaatgtgcctggtaaaaatatccagggcagagactgtgaactatgactggaatgtgacttgggtgtgggcaaccccggacggctttgggaggcccgtcatcggaatcaacaaccagtggccatgccctcccatccaggccaccgcaggcgacgtcgtcgtcgtaaacttgagcaaccagctgggaaatcagacgacaggcctacactttcacggcataaaccagatacaaacagccgacatggacggccccagcggcgtcactcagtgcgcaataccaccggactcgacaatcaagtatcaattcacggtcgacgccccagggaccttttggtgtacgctcattgcgcctccgtgcttccataaccccttagtagacgctgacacacagagatcagatcattcccacaacatgggccagtatcccgacgggttgcgcggccccttggttgtgcaggatccgaacgatccttacaagggagactatgacgaggagcacatcttgactgtctcggattggtaccacaacgacagtatcacctcggtccgcaacatgctcaccccgtccaacaccctcttccagcccccgataccggacaacctcaccgtgaacgaagggcagggattgcatatcaatttcaccaagggcaaacgatatcgaatccgcatgataagctttgcggccttcggcgccgccatggttcacttcgactcgcacacaatgaacgtgatcatgaacgacggagcatacatcaagaaacaggacgcttatcagttgaggcttgcccctgctcagcgctacgacgtcttgctctcgcctaatgatagtgacgagggaaactaccccttcctggtctctctcgacattaaccgggactggaccaactcgtccgagaggtttgtgtggccacacaattacacgggttacctcgtcatggacgagtccaaaccgctcgacaggctcgacgtggtggacaaatggcagccggtggacgatgcccaattccaaccctatgatggggccgcggcctacagcacgtaccaaaagttgatgaagctcgactttgccttctgcttcgaccagaacggctaccctcgctcctgcttcaacaacctgacctacatcagccaacgggtcccgacgctctacagtgccgccacgacaggcgactccaacacgaatcccgttatctacggccaggtcaatcccttcatcgtcgactacgacgacacggtccagatcgtcgttaacaacattgacaccgcctcccatcccttccatctgcacggccaccacttccaggtgctgtaccgcgccgcgagcggggcgggcaactggacggggcgcgacgagaactacgcggccaacccgcccatgcgcgacacgatcaccgtcatgcccagatcgtacgtcgtcctgcgcttccgcgcgaccaacccgggcgtctggctgttccactgccacatcgagtggcacgtcgagatgggcctgacggcgaccgtcatcgaggcccccgaccgcctgcgcaacatggccttccctgacgaccacattgacgcctgtaagaagactggcacgccgtaccagggaaacgctgccgggaatatagggaacgcgaccgacaccacgggctttatcacggtgccgccgactacctattacggttttactgacaacctccattccgataagctcgacatacccgcccccgaacaccacgtctcaacggaagcgtcatacgccgacacagccaatgctcagaaaaagagtggtaccatttgccaagctcggctggctatggcatcattagggaacaattag

SEQ ID NO: 707 - protein, 656 aa, Myceliophthora thermophilia
MAARAALAACSRQSILASSADYRYPASFSLHVRPAVIAMFRPTLLSLARLLMCLVKISRAETVNYDWNVTWVWATPDGFGRPVIGINNQWPCPPIQATAGDVVVVNLSNQLGNQTTGLHFHGINQIQTADMDGPSGVTQCAIPPDSTIKYQFTVDAPGTFWCTLIAPPCFHNPLVDADTQRSDHSHNMGQYPDGLRGPLVVQDPNDPYKGDYDEEHILTVSDWYHNDSITSVRNMLTPSNTLFQPPIPDNLTVNEGQGLHINFTKGKRYRIRMISFAAFGAAMVHFDSHTMNVIMNDGAYIKKQDAYQLRLAPAQRYDVLLSPNDSDEGNYPFLVSLDINRDWTNSSERFVWPHNYTGYLVMDESKPLDRLDVVDKWQPVDDAQFQPYDGAAAYSTYQKLMKLDFAFCFDQNGYPRSCFNNLTYISQRVPTLYSAATTGDSNTNPVIYGQVNPFIVDYDDTVQIVVNNIDTASHPFHLHGHHFQVLYRAASGAGNWTGRDENYAANPPMRDTITVMPRSYVVLRFRATNPGVWLFHCHIEWHVEMGLTATVIEAPDRLRNMAFPDDHIDACKKTGTPYQGNAAGNIGNATDTTGFITVPPTTYYGFTDNLHSDKLDIPAPEHHVSTEASYADTANAQKKSGTICQARLAMASLGNN

SEQ ID NO: 708 - protein, 596 aa, Myceliophthora thermophilia
ETVNYDWNVTWVWATPDGFGRPVIGINNQWPCPPIQATAGDVVVVNLSNQLGNQTTGLHFHGINQIQTADMDGPSGVTQCAIPPDSTIKYQFTVDAPGTFWCTLIAPPCFHNPLVDADTQRSDHSHNMGQYPDGLRGPLVVQDPNDPYKGDYDEEHILTVSDWYHNDSITSVRNMLTPSNTLFQPPIPDNLTVNEGQGLHINFTKGKRYRIRMISFAAFGAAMVHFDSHTMNVIMNDGAYIKKQDAYQLRLAPAQRYDVLLSPNDSDEGNYPFLVSLDINRDWTNSSERFVWPHNYTGYLVMDESKPLDRLDVVDKWQPVDDAQFQPYDGAAAYSTYQKLMKLDFAFCFDQNGYPRSCFNNLTYISQRVPTLYSAATTGDSNTNPVIYGQVNPFIVDYDDTVQIVVNNIDTASHPFHLHGHHFQVLYRAASGAGNWTGRDENYAANPPMRDTITVMPRSYVVLRFRATNPGVWLFHCHIEWHVEMGLTATVIEAPDRLRNMAFPDDHIDACKKTGTPYQGNAAGNIGNATDTTGFITVPPTTYYGFTDNLHSDKLDIPAPEHHVSTEASYADTANAQKKSGTICQARLAMASLGNN

SEQ ID NO: 709 - DNA, 1818 bp, Myceliophthora thermophilia
atgagggcctcaccatcgtcaaggacgcttctggcgtctctcgccctgtcatctctcccactctcgtttggccagctctcaatccctacggaccttccggactcctgggagtaccagggatgctacaccgatgtgcctggccggaccatcaacagtgcctcgtatgccgatggcaccaacatgacaaatgcggcctgcctcagttactgcgcctccaagggcttcccgtatgccggcaccgagtactcggttgagtgcttctgcggcaccactctcgcctcctcttcggcgaaggtcgccgattcggaatgcaatatgccttgctcgggagcccccagcgagccctgcggagctgggagcaggctgtcgctcttccactccagcgccgtgaccggaccagcagcgaacccaggggtcaacgacttcacccacctgggctgctacgccgagggcaagaccggccgtgcccttacctacaaccccggccttccgggggcggacatgacggtcgccaagtgcacggctgcctgccgcgcggccaactatatcctcgccggcgtcgagtacgggggagaatgctactgcggtaacacgattgccaacggcggcgcccccgccgacagcgggtgtagcatggtctgcaacggcaacagcaccgagttctgtggtggccctgaccgtctcaacgtgtatagctacaagaatcagtacgagccaacggccacctcgaccacgggcgccgggtcgacctcgagctcctcggtgccgtcggcgaccggcctccccgagggatggtcttaccagggatgctggatcgacgggaagcaggggcgtatcctgccgtaccagctcccggacagccagaccaacagccgggcggcttgcgcaaacgcctgcgccgaggccggttacaccgtctccggtaccgagtacgctgtccagtgcttctgcggcgatgccatccacaacggaggtgtcgagaccgacgaggccgactgcagcactccctgccccggcgccccgggcgagaagtgcggtgccggagaccgcctgagcatcgtctccagggggccgcccaagatctacgcccctccggccccgattgagaagatcggcgactgggagtaccagggctgcgccgaggacaacatcaacgacaagcggaccttcttctggcagatcttcttcaacgacatcatgacgcccgagatgtgcctggaccgctgcgccgagttcggctaccacgctgccggcctcgagtacgggcaggagtgctactgcggcgacccggccaacatggccacccacggcgccaccttccggccggagagcgagtgcaacgtcgtctgcgccggcaactcgaccgccatctgcggcggcctcgcccgcctcaccacctacttctggatcggcaccccgttctactcgtgggacttcccgcaggactggcgggccggcaagtacgagttcctggtcgacggcgtcaacatcccgctcatcacccacgagacgatcaccggcaaggtctccttcatctccaagggcgccaccggcccgggcaacgagacgggcgcgtacgagtttgaccccgccacgctcgagttccgcgagctccacatcaagacggacgtcttctgcgccgccagcgtcaccctgccggacaaggccggccggcagctcaacgtcggcgggtgggccggcgaggccacctacggtacccgcctgtactggcccgacggcgcccccggcgtccccggcaagtgggataaaaaacgatggctatggtttcatttctttttttcgtttttttattactaa

SEQ ID NO: 710 - protein, 605 aa, Myceliophthora thermophilia
MRASPSSRTLLASLALSSLPLSFGQLSIPTDLPDSWEYQGCYTDVPGRTINSASYADGTNMTNAACLSYCASKGFPYAGTEYSVECFCGTTLASSSAKVADSECNMPCSGAPSEPCGAGSRLSLFHSSAVTGPAANPGVNDFTHLGCYAEGKTGRALTYNPGLPGADMTVAKCTAACRAANYILAGVEYGGECYCGNTIANGGAPADSGCSMVCNGNSTEFCGGPDRLNVYSYKNQYEPTATSTTGAGSTSSSSVPSATGLPEGWSYQGCWIDGKQGRILPYQLPDSQTNSRAACANACAEAGYTVSGTEYAVQCFCGDAIHNGGVETDEADCSTPCPGAPGEKCGAGDRLSIVSRGPPKIYAPPAPIEKIGDWEYQGCAEDNINDKRTFFWQIFFNDIMTPEMCLDRCAEFGYHAAGLEYGQECYCGDPANMATHGATFRPESECNVVCAGNSTAICGGLARLTTYFWIGTPFYSWDFPQDWRAGKYEFLVDGVNIPLITHETITGKVSFISKGATGPGNETGAYEFDPATLEFRELHIKTDVFCAASVTLPDKAGRQLNVGGWAGEATYGTRLYWPDGAPGVPGKWDKKRWLWFHFFFSFFYY

SEQ ID NO: 711 - protein, 581 aa, Myceliophthora thermophilia
QLSIPTDLPDSWEYQGCYTDVPGRTINSASYADGTNMTNAACLSYCASKGFPYAGTEYSVECFCGTTLASSSAKVADSECNMPCSGAPSEPCGAGSRLSLFHSSAVTGPAANPGVNDFTHLGCYAEGKTGRALTYNPGLPGADMTVAKCTAACRAANYILAGVEYGGECYCGNTIANGGAPADSGCSMVCNGNSTEFCGGPDRLNVYSYKNQYEPTATSTTGAGSTSSSSVPSATGLPEGWSYQGCWIDGKQGRILPYQLPDSQTNSRAACANACAEAGYTVSGTEYAVQCFCGDAIHNGGVETDEADCSTPCPGAPGEKCGAGDRLSIVSRGPPKIYAPPAPIEKIGDWEYQGCAEDNINDKRTFFWQIFFNDIMTPEMCLDRCAEFGYHAAGLEYGQECYCGDPANMATHGATFRPESECNVVCAGNSTAICGGLARLTTYFWIGTPFYSWDFPQDWRAGKYEFLVDGVNIPLITHETITGKVSFISKGATGPGNETGAYEFDPATLEFRELHIKTDVFCAASVTLPDKAGRQLNVGGWAGEATYGTRLYWPDGAPGVPGKWDKKRWLWFHFFFSFFYY

SEQ ID NO: 712 - DNA, 1269 bp, Myceliophthora thermophilia
atgggccggcctgcaccgctagctgtgctgccgctggccaacgttctgcggtcgctcatgacgaccacggtctcgtcctcgccgctactgctgccgccctcactggctgtgatgtctgccctggccaacactacccggccgctgctcaacccggacaggaatcccatcctccgcttctttctcaaaaagacattctatgcccagttttgcgccggcgagaacgcggctgaagtacgacggactatcgagtcgctcaaggggatcggtttcgccggcgtcattctgggccatgccagggaggtagttcttagcgaagcgcaaatgaaggatctcatgtcgtgtagcagcggcgccgtggccgacgaatgtgtgcgaaatgaaatcaccccgtgggccaaaggaacgatggaaacggtgatgctggcgtccccgggcgactttgttgcgctcaagctcacgggcgccggccgacaggccctctatgccctttccaagcgcctgccgccatccgaggccctgtcgagtgctatcgacgccatctgccgcctggccgctgaccgtggtgtccgcctgctcttcgatgccgagcagcaggccctccagccgggtatcgacgattggtccctcgaatacatgcgcaagttcaacaccgccgatagcgccgtcgtctacgggacttaccaggcctatctgaaggcaacgccctcgacgctcagccggcaccttgctgctgcgcgtgagggtgggtttgcgctgggcgtcaagctcgtccggggcgcctacctgggctctgatccgcggcatctcatccacgataccaaggctgacacggacatggcgtatgacggccttgccgaggcgctcctgcggagacggtggaacgaccagctcaggccgcagagcgagagcgacgaagacgcggcgttccccaacgtgggcgtggttctggctacgcacaaccgcgagtctgtgcttagggcgcaggcaatcctttctgaggggagtgccgactgcgtggacgtggcatttgcccagctgcagggcatggcggacgaggtcagctgcgagctggtgacgaaaggtgccggggataagacgccccgtgcctacaagtacctcgtctgggggtcgacgggcgaatgtatgaagtatctgctgcggagagcccacgagaaccgagacgcggtgcagaggacacgagccgggcgcgatgccatgcgggccgaactgatgcggagggtcaagaaggcgtttgggttgtccacttga

SEQ ID NO: 713 - protein, 422 aa, Myceliophthora thermophilia
MGRPAPLAVLPLANVLRSLMTTTVSSSPLLLPPSLAVMSALANTTRPLLNPDRNPILRFFLKKTFYAQFCAGENAAEVRRTIESLKGIGFAGVILGHAREVVLSEAQMKDLMSCSSGAVADECVRNEITPWAKGTMETVMLASPGDFVALKLTGAGRQALYALSKRLPPSEALSSAIDAICRLAADRGVRLLFDAEQQALQPGIDDWSLEYMRKFNTADSAVVYGTYQAYLKATPSTLSRHLAAAREGGFALGVKLVRGAYLGSDPRHLIHDTKADTDMAYDGLAEALLRRRWNDQLRPQSESDEDAAFPNVGVVLATHNRESVLRAQAILSEGSADCVDVAFAQLQGMADEVSCELVTKGAGDKTPRAYKYLVWGSTGECMKYLLRRAHENRDAVQRTRAGRDAMRAELMRRVKKAFGLST

SEQ ID NO: 714 - protein, 401 aa, Myceliophthora thermophilia
TTVSSSPLLLPPSLAVMSALANTTRPLLNPDRNPILRFFLKKTFYAQFCAGENAAEVRRTIESLKGIGFAGVILGHAREVVLSEAQMKDLMSCSSGAVADECVRNEITPWAKGTMETVMLASPGDFVALKLTGAGRQALYALSKRLPPSEALSSAIDAICRLAADRGVRLLFDAEQQALQPGIDDWSLEYMRKFNTADSAVVYGTYQAYLKATPSTLSRHLAAAREGGFALGVKLVRGAYLGSDPRHLIHDTKADTDMAYDGLAEALLRRRWNDQLRPQSESDEDAAFPNVGVVLATHNRESVLRAQAILSEGSADCVDVAFAQLQGMADEVSCELVTKGAGDKTPRAYKYLVWGSTGECMKYLLRRAHENRDAVQRTRAGRDAMRAELMRRVKKAFGLST

SEQ ID NO: 715 - DNA, 663 bp, Myceliophthora thermophilia
atgcagcacattctcgctcttgtggctctcgtgcccgccgtccttgcgcagacctactatggctgttacaccgagatacctgctcgcgccctgaccggttcttccctgatcgactatgagaacatgaccattgctgtctgcgaggctcactgcacgggactggactttgacatctggggcgtcgagtacgggggcgagtgctactgtggcaacgccctcgcccaggggtcgttccccgccttcgtgacagactgcgccatgccgtgcccgggcgacgcggcgaccgtgtgcggcgggcccaaccggctgtccctctacggcgcgtccgaggaggcgccggtcgtgaccccgcagccgcacgacccggtgagcgagactcagtacgcgggttgctggagcgaggtagagggcggcgcgcgcgccctcgcgggcaccagcgccttctccctctccgcaatgaccgtccccgcctgtggcgactactgcctcaacagcggcttcctgtggtttggcctcgagtacggcgccgagtgctactgcggcgaggagctcagtgtcaacagcaccagcgtcgccgaggctgactgcgacatgccgtgctcgggcgatgcggcgaccacgtgtggcggttcgaaccggctaagcgtctaccagtgggtgtaa

SEQ ID NO: 716 - protein, 220 aa, Myceliophthora thermophilia
MQHILALVALVPAVLAQTYYGCYTEIPARALTGSSLIDYENMTIAVCEAHCTGLDFDIWGVEYGGECYCGNALAQGSFPAFVTDCAMPCPGDAATVCGGPNRLSLYGASEEAPVVTPQPHDPVSETQYAGCWSEVEGGARALAGTSAFSLSAMTVPACGDYCLNSGFLWFGLEYGAECYCGEELSVNSTSVAEADCDMPCSGDAATTCGGSNRLSVYQWV

SEQ ID NO: 717 - protein, 204 aa, Myceliophthora thermophilia
QTYYGCYTEIPARALTGSSLIDYENMTIAVCEAHCTGLDFDIWGVEYGGECYCGNALAQGSFPAFVTDCAMPCPGDAATVCGGPNRLSLYGASEEAPVVTPQPHDPVSETQYAGCWSEVEGGARALAGTSAFSLSAMTVPACGDYCLNSGFLWFGLEYGAECYCGEELSVNSTSVAEADCDMPCSGDAATTCGGSNRLSVYQWV

SEQ ID NO: 718 - DNA, 1089 bp, Myceliophthora thermophilia
atgcccaccatcgtcgtcctcggcgccggcgtcagcggccttacgtgcgcgctgctgctggcgaagcagaagggcaacaccgtgacggtcgtcgcaaagcacatgcccggcgactatgacatcgagtacacctcgccatgggctggtgccaatgtcctaccaatgaacctcgagaaagacagccgctgggaacgccgcacctggcccgaaatgcgccgtctggcggccgaggtccccgaagccgggctgcatttccaaaccgcccgcgtgctccgccgcaaggtcgacgtggaagcgggtctcaagagcgccctggcggacgggctgttccagctgtcgccctggtacagggaggtgatggacaacttccgcgagctgccggcgtcggagctgccgccggggatgcactcgggcgccgagttcacgtccgtctgcatcaacacggccatctacctgccctggctggtcggccagtgcgcccgccacggcgtcgtcttcaggcgcgccgtgctcaagcacatctcggaggcggcccgcatgagccacacggggcggagggccgacgtggtggtgaacgcgtccggcctgctggcgtgccgcctgggcggcgtcatggacgccaaggtgcagccggcgcgcggccagatcgtgctggtgcgcaacgaggcggccggcgtcatgcccacgacgagcggctgcgacgacggggacgacgaggtcgtctacgtgatgcagcgcgcccacggcggcggcaccatcctgggcggcacgtaccagaagggcaactgggaggccaacccggaccccaacgtcgccgtgcgcatcatgaagcgcgcggtcgagacgcacccggagctgacgggcggcaagggcatcgaggccttggacatcatccggcacggggtcgggttgaggccgtggagggagggcggggtcaggctcgagaaggaactgatcgacgggacgtgggttgtgcacaattacggccacgccggttggggctatcagggaagttatggttgtgccgagagagtggtggagctagtggacgagatcgtagggaggacgaagtgcgagtcaaagttgtga

SEQ ID NO: 719 - protein, 362 aa, Myceliophthora thermophilia
MPTIVVLGAGVSGLTCALLLAKQKGNTVTVVAKHMPGDYDIEYTSPWAGANVLPMNLEKDSRWERRTWPEMRRLAAEVPEAGLHFQTARVLRRKVDVEAGLKSALADGLFQLSPWYREVMDNFRELPASELPPGMHSGAEFTSVCINTAIYLPWLVGQCARHGVVFRRAVLKHISEAARMSHTGRRADVVVNASGLLACRLGGVMDAKVQPARGQIVLVRNEAAGVMPTTSGCDDGDDEVVYVMQRAHGGGTILGGTYQKGNWEANPDPNVAVRIMKRAVETHPELTGGKGIEALDIIRHGVGLRPWREGGVRLEKELIDGTWVVHNYGHAGWGYQGSYGCAERVVELVDEIVGRTKCESKL

SEQ ID NO: 720 - protein, 345 aa, Myceliophthora thermophilia
LLLAKQKGNTVTVVAKHMPGDYDIEYTSPWAGANVLPMNLEKDSRWERRTWPEMRRLAAEVPEAGLHFQTARVLRRKVDVEAGLKSALADGLFQLSPWYREVMDNFRELPASELPPGMHSGAEFTSVCINTAIYLPWLVGQCARHGVVFRRAVLKHISEAARMSHTGRRADVVVNASGLLACRLGGVMDAKVQPARGQIVLVRNEAAGVMPTTSGCDDGDDEVVYVMQRAHGGGTILGGTYQKGNWEANPDPNVAVRIMKRAVETHPELTGGKGIEALDIIRHGVGLRPWREGGVRLEKELIDGTWVVHNYGHAGWGYQGSYGCAERVVELVDEIVGRTKCESKL

SEQ ID NO: 721 - DNA, 1026 bp, Myceliophthora thermophilia
atgggcaagatcaccatcttcggtgccggaatcaccgggctcgcaacagcggctgtgattcgcgagaaaaatcctgatcacaccattaccatcgtagcccgcgacctcccgggagacgaaccctcccaagcctgggctagtccatgggcatgtgctggctgggtggcactgggcgggatcaacccgctcgagcgggagatgcagctggcggcgctcgaccacctccgctcgctggccgcccggcacccggagagcggggcgcgcctcgtcgagctgacggactgcttccccggcggggtgcgcgcgtcggacccggacggcgccgtcggctggttccgcgaccgggtgcccggcttcgaggtcctcgacgagggtgaggggggcggcggcgaggacgacggagcccgggtgaggtacggcagcgtggtgctcacgcccgccgtcttcctcccctggctgcggcggcggctcgaggaggacggggtgcggttcgtccggatcgccgaggtcggggcgctcgcggacctggcgcacctcggccacgacgtgctcgtcaacgcctccgcctggccagctcgacgctgcgggacgtcaaggacgacttggtcgtcacggaccggacctgggtggcagtggtgcggtccgactaccgggacgcctttgtccgccgccggcaacggggtgtacacgtacatcttcggtcgcggcgacgggacggccgtggtgggaggcgtgtcggagccgacgacgggcgagctgaagtcgaaggaggagatccaccaagatcttttccgccgcgctcacgagaacctgccggagcacttcccctctgcttcgcccgccgactatgacattgtccaggacctggtggggatacgcccactgagaccggctggtgtcagggtagagaaggtggaagtcgggggccagaaagtggtgcatgcatacggcactaccattggcgggtatatacacagctttggccttgcaaaggaggtcgccagactggtggaagaagctctctga

SEQ ID NO: 722 - protein, 341 aa, Myceliophthora thermophilia
MGKITIFGAGITGLATAAVIREKNPDHTITIVARDLPGDEPSQAWASPWACAGWVALGGINPLEREMQLAALDHLRSLAARHPESGARLVELTDCFPGGVRASDPDGAVGWFRDRVPGFEVLDEGEGGGGEDDGARVRYGSVVLTPAVFLPWLRRRLEEDGVRFVRIAEVGALADLAHLGHDVLVNASAWPARRCGTSRTTWSSRTGPGWQWCGPTTGTPLSAAGNGVYTYIFGRGDGTAVVGGVSEPTTGELKSKEEIHQDLFRRAHENLPEHFPSASPADYDIVQDLVGIRPLRPAGVRVEKVEVGGQKVVHAYGTTIGGYIHSFGLAKEVARLVEEAL

SEQ ID NO: 723 - protein, 324 aa, Myceliophthora thermophilia
AVIREKNPDHTITIVARDLPGDEPSQAWASPWACAGWVALGGINPLEREMQLAALDHLRSLAARHPESGARLVELTDCFPGGVRASDPDGAVGWFRDRVPGFEVLDEGEGGGGEDDGARVRYGSVVLTPAVFLPWLRRRLEEDGVRFVRIAEVGALADLAHLGHDVLVNASAWPARRCGTSRTTWSSRTGPGWQWCGPTTGTPLSAAGNGVYTYIFGRGDGTAVVGGVSEPTTGELKSKEEIHQDLFRRAHENLPEHFPSASPADYDIVQDLVGIRPLRPAGVRVEKVEVGGQKVVHAYGTTIGGYIHSFGLAKEVARLVEEAL

SEQ ID NO: 724 - DNA, 819 bp, Myceliophthora thermophilia
atgcttccctggagacgcgtgctggtcctggctcccttcgttgccaaccagagctgcgaccccttcacctcgccgtccaagccgtgcaccctgggcaactatgtggtctacgccgtggaagcccagtcggcggccgacatcatcgccgccgtcaagttcgccaagcagaacaacatccgcttcgtcatccgcaacaccggccatgactacctgggtcggtccacaggcgccggcgccctctcgttcagggagtggaagggcaaggactacaccggcagcgccgtcaagctcggcgccggcgtccagggcttccaggtattgtcggccgctctcgaaaagaagcaggtggtcgtgggcggtgagtgcccgaccgtcggaatcgctggtggttacacccaaggcggtggtcactctgccctgagcacctcgttcggccgacgacaacacgctcgagttcgaggtcgtcacggcctcgcgcacgcagaacgccgaaacctgtactgggccctgtccggagccatggtcgtctactactccacctcgagcttcttccagatagcgcccctgacggcctacaacaagacggcggccgaggtcgaggccatgctgtctccgttcgcggccaagctcaccgccatgggcgtcaagtataccctcggatactcgcagtcggccacctactacgaccactacgacaagtacttcggcccgctgcccgtcggcaacatcgaggtcggcatcgcccagtacggcggccggctcgtccccctctccacctttgccaacgacccggccgccatgtccgccgtaacccgctga

SEQ ID NO: 725 - protein, 272 aa, Myceliophthora thermophilia
MLPWRRVLVLAPFVANQSCDPFTSPSKPCTLGNYVVYAVEAQSAADIIAAVKFAKQNNIRFVIRNTGHDYLGRSTGAGALSFREWKGKDYTGSAVKLGAGVQGFQVLSAALEKKQVVVGGECPTVGIAGGYTQGGGHSALSTSFGRRQHARVRGRHGLAHAERRNLYWALSGAMVVYYSTSSFFQIAPLTAYNKTAAEVEAMLSPFAAKLTAMGVKYTLGYSQSATYYDHYDKYFGPLPVGNIEVGIAQYGGRLVPLSTFANDPAAMSAVTR

SEQ ID NO: 726 - protein, 253 aa, Myceliophthora thermophilia
DPFTSPSKPCTLGNYVVYAVEAQSAADIIAAVKFAKQNNIRFVIRNTGHDYLGRSTGAGALSFREWKGKDYTGSAVKLGAGVQGFQVLSAALEKKQVVVGGECPTVGIAGGYTQGGGHSALSTSFGRRQHARVRGRHGLAHAERRNLYWALSGAMVVYYSTSSFFQIAPLTAYNKTAAEVEAMLSPFAAKLTAMGVKYTLGYSQSATYYDHYDKYFGPLPVGNIEVGIAQYGGRLVPLSTFANDPAAMSAVTR

SEQ ID NO: 727 - DNA, 1785 bp, Myceliophthora thermophilia
atgagaggcggcgtctttggcttgctgtgcggcgcgctgctgctccccggcagcaagtctaccaagtgggtgctgcggcgtgctggcgattctgactacgcttgcaagtgctaccctggtgacaactgctggcccaacaagggccaatggcagaagctcaacaacacggtcggcggaaaccttcgcgtcaacatccctcccggcgccccgtgctacaacaccttccaaggtctgctaggcaatgtattacagacctacaatgcggccgggtgccagaaggtgaggcaaaactggggcgacgaacagttccaaatcgagatgcctgcggccggtctctggacgtatttcaccaatgacacctgccgcccgaccacaaaccctaccgacacctgcaccccgggctactacccggtccttgtcatcatggccaagaccacggctcacatccaggccggcatcaactttgcccgcgagaacaacctgcgcctgatcatccggaataccggtcacgacttcctcggccgcagcgttggctggggcgccctcgttatcaacacccacagcttccaggacatcaagttcaccgactcgtgggagggtgctggaaactataccggccccgccgtgactgtcggcgctggtgtacaggcattccaggtccttaagaaggccaacgccctgaatccgcccaagatcatggtgacgggcgagtgcgcgacggttggcgttgccggcggccttgtccaaggcggtggccacggtccgctgaccggcttctacggcttcgtcgccgacaatgcgctcgaattcaaggtcatcacggcggacggtaagctaaatacggccaacgcggagaccaacgccgacctcttctgggccctacgcggcggcggcccggccgccttcgccgtcatcgtcgaggcgtcttacaggatcttcgacgacaagccgaccgccggcgtcctcctcgacattgaccagacccacatgaccaacgcgacgctcttctgggaggccgtgcgcgtcttccacagctacagcacgcactttgtcgacaacgacctctacgtctactacgagctcggcaccgcgggccagaacctgcacgtgcaccccatcgtgggcgtgggcaagacgcccgacgagctgcaggcggtcctgcagcccatgtttgacgacctcgacgcgctcggcatctcctattacaccaccggcgcagccgacttcccgaccttttacgacctctaccaggccatgttcgagaccgaggtggcgggcaactcggcgctgaccggcggctggaccatcgcgcgccaggacgccgaggagaggcacgaggccatcatctcggccttccagaccgtcgtccgcgcgggctccttcatgatcggccacatgtggagcgccggccacggcctgcccgaggagcggtgggccgagagctccgtcaacccgcgcttccgcagcgtcgtcgacaagctcatcaccgtcgtccccgtcgccggcaatgccccgctcgcggacaaggccgccgcccaggacacgctgaccaacgtggtggacgccgcgctgcgcgaggcctcgccgaacgggtgcgcttatgtcaatgaggcggacccctacgaacccaactggcaacaggccttctggggcgacaactaccccaggctgctggagatcaggaagaagtacgaccctgacggggtcttttacgccatctcaactccgggcaccgagaactgggagcagatcgagaccggaactaggctgtgccgcaagctctga

SEQ ID NO: 728 - protein, 594 aa, Myceliophthora thermophilia
MRGGVFGLLCGALLLPGSKSTKWVLRRAGDSDYACKCYPGDNCWPNKGQWQKLNNTVGGNLRVNIPPGAPCYNTFQGLLGNVLQTYNAAGCQKVRQNWGDEQFQIEMPAAGLWTYFTNDTCRPTTNPTDTCTPGYYPVLVIMAKTTAHIQAGINFARENNLRLIIRNTGHDFLGRSVGWGALVINTHSFQDIKFTDSWEGAGNYTGPAVTVGAGVQAFQVLKKANALNPPKIMVTGECATVGVAGGLVQGGGHGPLTGFYGFVADNALEFKVITADGKLNTANAETNADLFWALRGGGPAAFAVIVEASYRIFDDKPTAGVLLDIDQTHMTNATLFWEAVRVFHSYSTHFVDNDLYVYYELGTAGQNLHVHPIVGVGKTPDELQAVLQPMFDDLDALGISYYTTGAADFPTFYDLYQAMFETEVAGNSALTGGWTIARQDAEERHEAIISAFQTVVRAGSFMIGHMWSAGHGLPEERWAESSVNPRFRSVVDKLITVVPVAGNAPLADKAAAQDTLTNVVDAALREASPNGCAYVNEADPYEPNWQQAFWGDNYPRLLEIRKKYDPDGVFYAISTPGTENWEQIETGTRLCRKL

SEQ ID NO: 729 - protein, 574 aa, Myceliophthora thermophilia
TKWVLRRAGDSDYACKCYPGDNCWPNKGQWQKLNNTVGGNLRVNIPPGAPCYNTFQGLLGNVLQTYNAAGCQKVRQNWGDEQFQIEMPAAGLWTYFTNDTCRPTTNPTDTCTPGYYPVLVIMAKTTAHIQAGINFARENNLRLIIRNTGHDFLGRSVGWGALVINTHSFQDIKFTDSWEGAGNYTGPAVTVGAGVQAFQVLKKANALNPPKIMVTGECATVGVAGGLVQGGGHGPLTGFYGFVADNALEFKVITADGKLNTANAETNADLFWALRGGGPAAFAVIVEASYRIFDDKPTAGVLLDIDQTHMTNATLFWEAVRVFHSYSTHFVDNDLYVYYELGTAGQNLHVHPIVGVGKTPDELQAVLQPMFDDLDALGISYYTTGAADFPTFYDLYQAMFETEVAGNSALTGGWTIARQDAEERHEAIISAFQTVVRAGSFMIGHMWSAGHGLPEERWAESSVNPRFRSVVDKLITVVPVAGNAPLADKAAAQDTLTNVVDAALREASPNGCAYVNEADPYEPNWQQAFWGDNYPRLLEIRKKYDPDGVFYAISTPGTENWEQIETGTRLCRKL

SEQ ID NO: 730 - DNA, 1470 bp, Myceliophthora thermophilia
atgcagcatatcgtgcgtgtcggggtcagcctcggcttccttgcggcgacagcggcgacagcggcggccgctacgatcggcggcaagtgcaccaacaccattgtgcgcgacgttgccgtcatcggtggcggtgcctccggtgcccacgctgcagtctggctgcgcgacaatggttacagcgttgtggtcgtcgagaaggccgaccaactgggcggccacaccaacttctacagggacccggtcacgggcaaagagatcaatgtcggggtgcaggcctggatggagtacaaggacagcttcgagttccccaagcgcatgaacgtgtcgactagcgggtccatgtccttcacgcccaacacggcccagtacatcgacttcacgacggggctgcccgttgcgggctacaaggcgcccgcgaccgaggagatgtacgcggccctgcagaggtacctcgacgtgctcgagaagtacgaggacatggtgctgccgggcttcttcaacttccccgagccgggcgccatccccgaggacctgctcatgccgttcggcgagttcgtagccaagtacaacctcgaggctgccgtcccccagatctgggactcgaccgcccagggcctcggcgacaccatgaacgtgccgaccctctgggtcatccaggcctcgggcgtccccatggtccgcgccctgctgggccaggccgccgccgccgttcccgcctcgggccggctgtacgacctgtttgagagcatcgccgacttcctcggcgacgacgtcctctactcgagcaccgtcgtctcctccacccgctacgacgccacccgcaaccccaagaagggcgtctcgctgaccgtgaggggccccggcggcaagctcacctgcgtcgaggccaagcggctgctggtctcgatcgaaccgacgttggccaacatggcccccttcgacctcgaccggtcggagctgacgatcctgtccaagttccaatacaccaccgtctacgccggcattctccggcacccgtcgctgcagacgctcaacgcctacaccggccgcaccaccggcccggcctcgctcaactacaccgccttccccgtggcgccccaggtcggccgcatcgactacgtcggcgacacccaggacctgttccagttcaccgccgtcggcaccgccgccgacacgtccaagatcatgcaggcgctcctgtccgggtccatcgacgccatgatcgccgccggcaccctcccggccgcgcccggcggcagcagcgtcgactacgccatctttgccgattacggccccatgcacgcccgcgtctcggccgccgagctccgcgccggcttcatccagcagctctactccctccagggccgccgcaacaccttctacaccggcgccgccttctccgccggcttctccaccgtcctgtgggagttcaacaaggtgctgctgcccaaggtggtcgagggactctga

SEQ ID NO: 731 - protein, 489 aa, Myceliophthora thermophilia
MQHIVRVGVSLGFLAATAATAAAATIGGKCTNTIVRDVAVIGGGASGAHAAVWLRDNGYSVVVVEKADQLGGHTNFYRDPVTGKEINVGVQAWMEYKDSFEFPKRMNVSTSGSMSFTPNTAQYIDFTTGLPVAGYKAPATEEMYAALQRYLDVLEKYEDMVLPGFFNFPEPGAIPEDLLMPFGEFVAKYNLEAAVPQIWDSTAQGLGDTMNVPTLWVIQASGVPMVRALLGQAAAAVPASGRLYDLFESIADFLGDDVLYSSTVVSSTRYDATRNPKKGVSLTVRGPGGKLTCVEAKRLLVSIEPTLANMAPFDLDRSELTILSKFQYTTVYAGILRHPSLQTLNAYTGRTTGPASLNYTAFPVAPQVGRIDYVGDTQDLFQFTAVGTAADTSKIMQALLSGSIDAMIAAGTLPAAPGGSSVDYAIFADYGPMHARVSAAELRAGFIQQLYSLQGRRNTFYTGAAFSAGFSTVLWEFNKVLLPKVVEGL

SEQ ID NO: 732 - protein, 466 aa, Myceliophthora thermophilia
ATIGGKCTNTIVRDVAVIGGGASGAHAAVWLRDNGYSVVVVEKADQLGGHTNFYRDPVTGKEINVGVQAWMEYKDSFEFPKRMNVSTSGSMSFTPNTAQYIDFTTGLPVAGYKAPATEEMYAALQRYLDVLEKYEDMVLPGFFNFPEPGAIPEDLLMPFGEFVAKYNLEAAVPQIWDSTAQGLGDTMNVPTLWVIQASGVPMVRALLGQAAAAVPASGRLYDLFESIADFLGDDVLYSSTVVSSTRYDATRNPKKGVSLTVRGPGGKLTCVEAKRLLVSIEPTLANMAPFDLDRSELTILSKFQYTTVYAGILRHPSLQTLNAYTGRTTGPASLNYTAFPVAPQVGRIDYVGDTQDLFQFTAVGTAADTSKIMQALLSGSIDAMIAAGTLPAAPGGSSVDYAIFADYGPMHARVSAAELRAGFIQQLYSLQGRRNTFYTGAAFSAGFSTVLWEFNKVLLPKVVEGL

SEQ ID NO: 733 - DNA, 1992 bp, Myceliophthora thermophilia
atggctgtcctctctcttcaacgcgccctgctgctcgcaggtgccgcccttccgctcgttcaacagggctttgcccagaccatcaagactgaggatggggaggtcctccccgccaacgaagttaccgtcgccccggccgccgagcctgcatccgaagacgatgagattgcggcgctccagctgaccgacaatgtgttggccaacctgacggcccacgagctgaccgacgtcgagctcttccagttcggcgacgacgcggacgccgccgatccgacccagattgccaagcgcaccgctgtgggcagctgcaagacctacccgggcgactggaaatggccttcgcgcctcacctggagcgtcttcaacctgctgaccggcggcgccctcatcgaaaccgtccccatcggtgccgtctgctaccctaacagcggcgtgtacaacgccgccaagtgcgccgacatcatcgagcactggcaagagtccgccacccacgaagccgacccgacctccgtcatgtctccgctcttccagggcgagacgtgcatgccgcagaacggcaacacgtcgcagtgcaccctgggcggcttccccgcctatgccgtcaaggcaaccagcgtctaccagatccagctggccgtcaactttgcccgctcgctcaatctgcgcctcgtcgtcaagaacaccggccacgatttcctgggcaagtcgttgggctatggctccctctccatctggacccaccacctcaagtcgatccgcttccgtcagtccgtcaggacgccgtcgtactcgggcccggccctcgagctcggcgccggcgtgacggtgggcgagctctacgcggccgccaaccagtacggcgtcaccgccgtgggcggagagtgcaagggcgtcggcgtcgcgggcggctacctcgccggcggtggccactcgcccctgtcgggcaagtacggcctcggctctgaccaggtgctcagcatcgacctggtgctgcccaacgggcgcttcgtcaccgccagcgagacggagaataccgacctcttctgggccctccgcggcggcggcggctccaccttcggcgtcgtcacgtccgtgaccgtcaaggcgcaccccaagatgaagttctccggcgtcacctgggtcatcaactcgggcaacgacacggccaactcggacgaggtcttctggcaggctatgtatgcctactggtccaagttccccgagtacgcggaccaggaggtctacgggtacggcaacatcttcccgcgcggcgcccccggctccggctacacgtggaccatgctcccctggatggtgcccaacaagacgctgtccgagttcaaggcgatggtccagcccctcttcgacgagtggacggccatgggcttcgagttcgagccgcagtactttgagcacgacaacttctacgacgcctggacgtcgcacttcccgaccgaggtggtggccaactcgaacctgcgcaccgcctcgcgcctcttccctcgctcggcgtgggacgacgataccacgcgcatcgccatgttcgacgccgtccggtccgtgatcgaggagggctcggcgctgatccagtacaacatgaaccccgcggcgccggcgggcaccccggccagcggggccaactcgcactggcgcgacgccgtctggttcggcatcatgggcaccggctgggcgcccggcatctcgcaggaggagctcgaggcggtgcagcgcaagatcaccgacgactggatgggccgactgcggccctacggcccgggcgggtacggcaacgagggcgacgtcatggagcccgactttgccgaggccttcttcggcaccaactacgaccgtctgctccagatcaagcgcacggtcgacccctacgacctgttctgggccccgaccgccgtcggctccgagcgctggaagatcgccggccagcccgactggctgacgctgcagaccggcaagctgtgcaaggtctccaactga

SEQ ID NO: 734 - protein, 663 aa, Myceliophthora thermophilia
MAVLSLQRALLLAGAALPLVQQGFAQTIKTEDGEVLPANEVTVAPAAEPASEDDEIAALQLTDNVLANLTAHELTDVELFQFGDDADAADPTQIAKRTAVGSCKTYPGDWKWPSRLTWSVFNLLTGGALIETVPIGAVCYPNSGVYNAAKCADIIEHWQESATHEADPTSVMSPLFQGETCMPQNGNTSQCTLGGFPAYAVKATSVYQIQLAVNFARSLNLRLVVKNTGHDFLGKSLGYGSLSIWTHHLKSIRFRQSVRTPSYSGPALELGAGVTVGELYAAANQYGVTAVGGECKGVGVAGGYLAGGGHSPLSGKYGLGSDQVLSIDLVLPNGRFVTASETENTDLFWALRGGGGSTFGVVTSVTVKAHPKMKFSGVTWVINSGNDTANSDEVFWQAMYAYWSKFPEYADQEVYGYGNIFPRGAPGSGYTWTMLPWMVPNKTLSEFKAMVQPLFDEWTAMGFEFEPQYFEHDNFYDAWTSHFPTEVVANSNLRTASRLFPRSAWDDDTTRIAMFDAVRSVIEEGSALIQYNMNPAAPAGTPASGANSHWRDAVWFGIMGTGWAPGISQEELEAVQRKITDDWMGRLRPYGPGGYGNEGDVMEPDFAEAFFGTNYDRLLQIKRTVDPYDLFWAPTAVGSERWKIAGQPDWLTLQTGKLCKVSN

SEQ ID NO: 735 - protein, 638 aa, Myceliophthora thermophilia
QTIKTEDGEVLPANEVTVAPAAEPASEDDEIAALQLTDNVLANLTAHELTDVELFQFGDDADAADPTQIAKRTAVGSCKTYPGDWKWPSRLTWSVFNLLTGGALIETVPIGAVCYPNSGVYNAAKCADIIEHWQESATHEADPTSVMSPLFQGETCMPQNGNTSQCTLGGFPAYAVKATSVYQIQLAVNFARSLNLRLVVKNTGHDFLGKSLGYGSLSIWTHHLKSIRFRQSVRTPSYSGPALELGAGVTVGELYAAANQYGVTAVGGECKGVGVAGGYLAGGGHSPLSGKYGLGSDQVLSIDLVLPNGRFVTASETENTDLFWALRGGGGSTFGVVTSVTVKAHPKMKFSGVTWVINSGNDTANSDEVFWQAMYAYWSKFPEYADQEVYGYGNIFPRGAPGSGYTWTMLPWMVPNKTLSEFKAMVQPLFDEWTAMGFEFEPQYFEHDNFYDAWTSHFPTEVVANSNLRTASRLFPRSAWDDDTTRIAMFDAVRSVIEEGSALIQYNMNPAAPAGTPASGANSHWRDAVWFGIMGTGWAPGISQEELEAVQRKITDDWMGRLRPYGPGGYGNEGDVMEPDFAEAFFGTNYDRLLQIKRTVDPYDLFWAPTAVGSERWKIAGQPDWLTLQTGKLCKVSN

SEQ ID NO: 736 - DNA, 1725 bp, Myceliophthora thermophilia
atgcctgcctccctccttcgttttctcgctctggccgggacggccgtgggcctgacgaccaaccacaatcacagtccgtcatgccgggtcctccccggggatgctgcttggcccagctcaagggactgggccaagctgaacaagacactcaacggccatctgatcgccacggttccgcaggcctccgtgtgccacaaatctccgttcggacagtatgatgcccaagcttgtgaagagctcaagagcagctgggatatttcgacaatcactcacgtcaatgccccgggtgacgttctcagccagaacttccagaactattcttgcgtgccgttcacggacccgtctcagccgtgtcaactgggcaactaccccagctatgttgtcaatgtcaccggcgcagccgacgtgcaggccgccttgaagttcgcacagaagcataatgtgcggatcgtcatcaagaacacgggtcacgactacctcggcaagtccaccggcaagggcgccctctccctctggatgcataacctcaagagcaccaagttcatcaagaattacaaggcgccctactacaagggccccgccgccaagctgggcgccggcgtcgaggggttcgaggcgtacgcgatggccaactcgacgggccaccggatcgtgggcggcacgtgcccgacggtgggcatcgtcggcggctacacccagggcggagggcactcgatcctctcgagctcgtacggggtcgcggccgacaacgtgcttgagtgggaggtggtgacggcggacgggaggcacctggtggcgacgccgacgcggaactcggacctgtactgggcgctgagcggcggcggcggcggcaccttcgccgtcgtgctctccatgacggcgcggctgcacagggacggcatcgtgggcggcacgctgctcggcttcaacgacagcgccgtcggcaacgaggtctactgggaggcggtggcggccttccacgcgctgctgcccgacttcctggacggcggcaactcgttcacctactcggtgggcaacaactcgctgaccgcgtacggcaccatgccgggggccgaccgggacgcggtcgaccggctgctcaggccgttcctggacgacctggcgtcgcgggggatcacgccggtggtgcagccgcgggtgtcgaccaactactacgaccacttcttcacctacctggggccggccccctacggcaacgccgcctacttccccttcaccaacagccggatcatcccgcgctcgctcgtgacggacccgaagagcaacgcggtggtgacggacctgttccgcaacatctcgcaggtacccgccttctcgcccttctactgcgacagcttcagcgtggccgacaagccgcacccggccaactcgctgcacccggcctggcgcacgggcatgctgctgtgcgcgcccgcggggtcgtgggactgggacgcgagcccggaggagatggcggcccgggaccgctacgcggccgagacgctgcagcccatgatggacgcggccacgcccggcggcagcgtctacctcaacgaggccaaccacctgtacgccaactggaaggagagcttctacggcgacaactacgcccgcctgctgcgggtcaagaaaaagtacgaccccgactcggtcttctacgtcaagacgggcgtcggcagcgaggtttgggatgtggacgccaccggcaggctctgtcgcgcctga

SEQ ID NO: 737 - protein, 574 aa, Myceliophthora thermophilia
MPASLLRFLALAGTAVGLTTNHNHSPSCRVLPGDAAWPSSRDWAKLNKTLNGHLIATVPQASVCHKSPFGQYDAQACEELKSSWDISTITHVNAPGDVLSQNFQNYSCVPFTDPSQPCQLGNYPSYVVNVTGAADVQAALKFAQKHNVRIVIKNTGHDYLGKSTGKGALSLWMHNLKSTKFIKNYKAPYYKGPAAKLGAGVEGFEAYAMANSTGHRIVGGTCPTVGIVGGYTQGGGHSILSSSYGVAADNVLEWEVVTADGRHLVATPTRNSDLYWALSGGGGGTFAVVLSMTARLHRDGIVGGTLLGFNDSAVGNEVYWEAVAAFHALLPDFLDGGNSFTYSVGNNSLTAYGTMPGADRDAVDRLLRPFLDDLASRGITPVVQPRVSTNYYDHFFTYLGPAPYGNAAYFPFTNSRIIPRSLVTDPKSNAVVTDLFRNISQVPAFSPFYCDSFSVADKPHPANSLHPAWRTGMLLCAPAGSWDWDASPEEMAARDRYAAETLQPMMDAATPGGSVYLNEANHLYANWKESFYGDNYARLLRVKKKYDPDSVFYVKTGVGSEVWDVDATGRLCRA

SEQ ID NO: 738 - protein, 557 aa, Myceliophthora thermophilia
LTTNHNHSPSCRVLPGDAAWPSSRDWAKLNKTLNGHLIATVPQASVCHKSPFGQYDAQACEELKSSWDISTITHVNAPGDVLSQNFQNYSCVPFTDPSQPCQLGNYPSYVVNVTGAADVQAALKFAQKHNVRIVIKNTGHDYLGKSTGKGALSLWMHNLKSTKFIKNYKAPYYKGPAAKLGAGVEGFEAYAMANSTGHRIVGGTCPTVGIVGGYTQGGGHSILSSSYGVAADNVLEWEVVTADGRHLVATPTRNSDLYWALSGGGGGTFAVVLSMTARLHRDGIVGGTLLGFNDSAVGNEVYWEAVAAFHALLPDFLDGGNSFTYSVGNNSLTAYGTMPGADRDAVDRLLRPFLDDLASRGITPVVQPRVSTNYYDHFFTYLGPAPYGNAAYFPFTNSRIIPRSLVTDPKSNAVVTDLFRNISQVPAFSPFYCDSFSVADKPHPANSLHPAWRTGMLLCAPAGSWDWDASPEEMAARDRYAAETLQPMMDAATPGGSVYLNEANHLYANWKESFYGDNYARLLRVKKKYDPDSVFYVKTGVGSEVWDVDATGRLCRA

SEQ ID NO: 739 - DNA, 189 bp, Myceliophthora thermophilia
atggccgccattaagcccatcactggtatgctccgccggggcctcattaccgatcttagcattgcgctcggtcttggtctcgttttcagcaacgccttctggtatgggttccacgtcccgcggacgaacgcccgtgacaactactacaagaagcttgaggagcagcgcgctgccaggcaaggggcttag

SEQ ID NO: 740 - protein, 62 aa, Myceliophthora thermophilia
MAAIKPITGMLRRGLITDLSIALGLGLVFSNAFWYGFHVPRTNARDNYYKKLEEQRAARQGA

SEQ ID NO: 741 - protein, 32 aa, Myceliophthora thermophilia
NAFWYGFHVPRTNARDNYYKKLEEQRAARQGA

SEQ ID NO: 742 - DNA, 1581 bp, Myceliophthora thermophilia
atgagactcaaccatgcatttggcactgctgccgtcgcgcttttagggtctggctttgcccaagcatctgatgaatcagtccggcaagtagctattgttggcgccggggcagctgggtcatctgctgcctactttctacggcagttcgcggcagaggctggcgtgcatgtcaatgtcactgtctttgagaaaacagatcgcatcggtggccggacgctcactaccaatccgttcaatgacccgactcagcggtttgagcagggcgccagcatcttcgtcaaggtcaatcatatcttgtacaacgccatgaccgagttcggactctccccgagctatcgtgatgctgatgtcgattcggtcatgggtatctgggacggggatcgcttcgtcttcaccattgaccaaaacgccccatcgtggtggaaaatcctgaaagtcatccggaagtacggaataagcggcccgcgaaaggtccagcatctgacagccaccactgtcgccaagtttctccgattgtacgagccacagttctttccgtttgagtcgcttacccagagagccgaggaccttgggctacttgaggtgaccggcgtcactggagagcaatatctcgaggcaaacgatgtcgacgctcgctacgctcgtgacctcgtccaagccagcacgcgggtgaactatgcctccaaccttgcccagatccacggactggacaccatggtctccatggctgctgacggcgctctcgccgttgaggggggaaactggcagatcttccatgagatgatacaaagatcaggggccgtggtcgctctcaacacaacagtcatcggcatcgacaaggtatccgacagtacaaccagtcagcagcggtacgctgttcagacaagatccggtagcgcgctggatagttcgaccacacacccggttacgttcgaccatgtcgttctggccaaccccttccagttcagtggcatttcggtcggagagggtgttctggaaaccgccattgatgagattccttatgtacagcttcacgtcaccatctttacatcaccttatcgtctcagtcctgaattcttcggcttgcctacctcggccaaagtgcccggcatggtcctgaccacccttgctcagtccgatactccatcatcgggagtcgggggggtgggcaaggcgggcttcctcagcgtgagcatgcttggccaggccacgaacccacaaacaaagaggagggaatacgtctataagatcttttcccccgaggctgtcacgcccgaccgcctgcttggtagatccgttccctcgggatttacgggcagcgacagccccatctcgtggtacctcccacatgtcttcaactcgtatcctcgggcgttaccgcgggtgaccttccaagaccccgttgtcggcgcgggggtttattacacgtcgggcatggagagcttcatctcaaccatggagacaaatgccttgatggggaagaatgttgcacgcttggtcgttgatgacatgcaaggcgcaactgtagccaagagcaagaatggcctggcgtgggaagagaagcagagtatcttggtctaa

SEQ ID NO: 743 - protein, 526 aa, Myceliophthora thermophilia
MRLNHAFGTAAVALLGSGFAQASDESVRQVAIVGAGAAGSSAAYFLRQFAAEAGVHVNVTVFEKTDRIGGRTLTTNPFNDPTQRFEQGASIFVKVNHILYNAMTEFGLSPSYRDADVDSVMGIWDGDRFVFTIDQNAPSWWKILKVIRKYGISGPRKVQHLTATTVAKFLRLYEPQFFPFESLTQRAEDLGLLEVTGVTGEQYLEANDVDARYARDLVQASTRVNYASNLAQIHGLDTMVSMAADGALAVEGGNWQIFHEMIQRSGAVVALNTTVIGIDKVSDSTTSQQRYAVQTRSGSALDSSTTHPVTFDHVVLANPFQFSGISVGEGVLETAIDEIPYVQLHVTIFTSPYRLSPEFFGLPTSAKVPGMVLTTLAQSDTPSSGVGGVGKAGFLSVSMLGQATNPQTKRREYVYKIFSPEAVTPDRLLGRSVPSGFTGSDSPISWYLPHVFNSYPRALPRVTFQDPVVGAGVYYTSGMESFISTMETNALMGKNVARLVVDDMQGATVAKSKNGLAWEEKQSILV

SEQ ID NO: 744 - protein, 504 aa, Myceliophthora thermophilia
SDESVRQVAIVGAGAAGSSAAYFLRQFAAEAGVHVNVTVFEKTDRIGGRTLTTNPFNDPTQRFEQGASIFVKVNHILYNAMTEFGLSPSYRDADVDSVMGIWDGDRFVFTIDQNAPSWWKILKVIRKYGISGPRKVQHLTATTVAKFLRLYEPQFFPFESLTQRAEDLGLLEVTGVTGEQYLEANDVDARYARDLVQASTRVNYASNLAQIHGLDTMVSMAADGALAVEGGNWQIFHEMIQRSGAVVALNTTVIGIDKVSDSTTSQQRYAVQTRSGSALDSSTTHPVTFDHVVLANPFQFSGISVGEGVLETAIDEIPYVQLHVTIFTSPYRLSPEFFGLPTSAKVPGMVLTTLAQSDTPSSGVGGVGKAGFLSVSMLGQATNPQTKRREYVYKIFSPEAVTPDRLLGRSVPSGFTGSDSPISWYLPHVFNSYPRALPRVTFQDPVVGAGVYYTSGMESFISTMETNALMGKNVARLVVDDMQGATVAKSKNGLAWEEKQSILV

SEQ ID NO: 745 - DNA, 1614 bp, Myceliophthora thermophilia
atgggactcaccgaggctctcatcgagcgtgcctcggccaagtcggcccttatcctcgtcccaggtctcttgttggcctacgtcatcgtcgccatcgtggtgaggccagcatggcaggagatcaagctggctcgcatgccgggcacaagggcgccccggatcaagtcgaagctcccattcggcctcgacttcctctggggggcagtcacctcggcgcaaaagaaccagaacctcgccttctggaacaagatgttgggcgaggccggggcatacacggtcgagggccgtatcgccggccgccgcatcgtcttcaccgccgaccccgagaacatcaaggcgatcctggctacccagttcaacgactacggcaagggcgagcccttccaccgggagtggcgagccttcctcggggacagcatcttcaccaccgacggcgccctgtggcatgacagccgccagctgatccgcccccagttcgtcagggaccgcgtcagcgacctgcacgtcttcgagaagcacatgcagatcctgttccgcgccatcgccaacgggggcgccctcgacggcgagaaccagccggtcgacgtcgaggccggcaacgggaagcccgtcgagatcaccgatctgttcttccgcttcactctcgactcggccaccgagttcctgctgggccacgatgtcaagtcgctcagccacccacgtcaggaatttgccgatgccttcggcgaggtccagcggatccagagcctgatctcccgcgccggcgccctcaacgggctcgtaccgcgcggccagttcaaccggagcatgaaggtgatcaacaacttcatcaacacgtacatcgagcgcgccctgcgcctgagccccgaagagctggccagcaagtccaagagcgacgccggctacaccttcctgcacgccctcgccgcctacacgcgcgaccgccgggtcctccgcgaccagctcatcgccgtcctgctcgccggccgcgacaccaccgcctgcaccctgtcctggaccgtctacgagctggcccgccacccggacgtcctccagaagctgcgcgccgagatcctgtccgtcgtcggccccaccaggccgcccacctacgaagacctcaagagcatgaagtacctgcagagcgtcatgaatgagaccctccgcctgtacccggtcgtgcccttcaacgtccgcctggccctccgagacacgacgctgccgcgcgggggcgggccggacgggctcgagccggtcaaggtgctcaaggacacgccgatcgcgtactcgacgctggtgatgcagcgccgcgaggacctgtacccgccgccggggggcgccgccgcctccgcccccgccgacgccttctcgccggaccgctgggcgacctggcagccccggccctggcagtacatccccttcaacggcgggccgcgcatctgcatcggccagcagttcgccctcaccgagatggcctacgtcctgaccaggctgttccagcgctacgaccgcatcgacaactacacccaccgccaccccggcctcaaggccgacattgtgctgcagccggccgagggggttagggtcggtctgtgggaggcgagggcggagaagtga

SEQ ID NO: 746 - protein, 537 aa, Myceliophthora thermophilia
MGLTEALIERASAKSALILVPGLLLAYVIVAIVVRPAWQEIKLARMPGTRAPRIKSKLPFGLDFLWGAVTSAQKNQNLAFWNKMLGEAGAYTVEGRIAGRRIVFTADPENIKAILATQFNDYGKGEPFHREWRAFLGDSIFTTDGALWHDSRQLIRPQFVRDRVSDLHVFEKHMQILFRAIANGGALDGENQPVDVEAGNGKPVEITDLFFRFTLDSATEFLLGHDVKSLSHPRQEFADAFGEVQRIQSLISRAGALNGLVPRGQFNRSMKVINNFINTYIERALRLSPEELASKSKSDAGYTFLHALAAYTRDRRVLRDQLIAVLLAGRDTTACTLSWTVYELARHPDVLQKLRAEILSVVGPTRPPTYEDLKSMKYLQSVMNETLRLYPVVPFNVRLALRDTTLPRGGGPDGLEPVKVLKDTPIAYSTLVMQRREDLYPPPGGAAASAPADAFSPDRWATWQPRPWQYIPFNGGPRICIGQQFALTEMAYVLTRLFQRYDRIDNYTHRHPGLKADIVLQPAEGVRVGLWEARAEK

SEQ ID NO: 747 - protein, 506 aa, Myceliophthora thermophilia
IVVRPAWQEIKLARMPGTRAPRIKSKLPFGLDFLWGAVTSAQKNQNLAFWNKMLGEAGAYTVEGRIAGRRIVFTADPENIKAILATQFNDYGKGEPFHREWRAFLGDSIFTTDGALWHDSRQLIRPQFVRDRVSDLHVFEKHMQILFRAIANGGALDGENQPVDVEAGNGKPVEITDLFFRFTLDSATEFLLGHDVKSLSHPRQEFADAFGEVQRIQSLISRAGALNGLVPRGQFNRSMKVINNFINTYIERALRLSPEELASKSKSDAGYTFLHALAAYTRDRRVLRDQLIAVLLAGRDTTACTLSWTVYELARHPDVLQKLRAEILSVVGPTRPPTYEDLKSMKYLQSVMNETLRLYPVVPFNVRLALRDTTLPRGGGPDGLEPVKVLKDTPIAYSTLVMQRREDLYPPPGGAAASAPADAFSPDRWATWQPRPWQYIPFNGGPRICIGQQFALTEMAYVLTRLFQRYDRIDNYTHRHPGLKADIVLQPAEGVRVGLWEARAEK

SEQ ID NO: 748 - DNA, 1134 bp, Myceliophthora thermophilia
atgtcagtaacaagcctggccaagacggcgggcatctgggctggcggtctgctgctcggtctcagcctcccgcacctgccccatctcggggctcctcgcctcctcacgtccctcgtcggcgacttttccatactaccgggccgcggtctcggactcccgttcttgacgaagccgatccgcaccaccaccaccaccaccaccaacaacaacaacaacacagcgtcgtcccccccgaccaccgccgcagtggtgggagcggaggaggaggaggaggaggaggcgacgaggacgtttgtgtgcgacacgacgcacacgtaccggaccgagctggtctcgctggacccgctcatcatgtacatccacgacctgatcacgccggccgagatcgcgtggctgctggagacgggggagccccggttcgcgccgtcgcaggtgagcaagtacgggcggcagcagcagacggccgaccggacgtcgagctcggcgggcttgccgcgcgacgacccggccgtcatgtgcgtgctcaaccggacccgggccttcctcggcaccatgctccgcgacggctgggacgagatggggccgccgcagctggtccgctacaccgccgggcagcgcttcaacctgcaccacgactggttcgacgtgccccagcgggctgctgccgcggcggccagcgacgacggcgagttcgtcccccggaggtggaaccgcgtggcgagcttcttcgccatcctggaggacgactgcaccggcggcgagacgtacttcccgtacgcgaagcccatcgtgcccccgagccgtcgtggcgaagccatgtggcagggtggcggtgtggcaggtgagaagaacaagaagaaaaggagtaaaacgaagacggcagcgacgggggtagagcaacaagaagagaaacaagaacgggaacaggaacaggagcaagaggaggcgcggccgctgtggagggagcacgaggacggcgggctggcgttccggccggtggcaggcaacgccgtgttctgggtgaacttacacgcgaacgggaccggggacccacgaacgaaccacgcggggctgccgctggagtctgggcggaagacggccatgaacatctggccgaggcaatactacccgtga

SEQ ID NO: 749 - protein, 377 aa, Myceliophthora thermophilia
MSVTSLAKTAGIWAGGLLLGLSLPHLPHLGAPRLLTSLVGDFSILPGRGLGLPFLTKPIRTTTTTTTNNNNNTASSPPTTAAVVGAEEEEEEEATRTFVCDTTHTYRTELVSLDPLIMYIHDLITPAEIAWLLETGEPRFAPSQVSKYGRQQQTADRTSSSAGLPRDDPAVMCVLNRTRAFLGTMLRDGWDEMGPPQLVRYTAGQRFNLHHDWFDVPQRAAAAAASDDGEFVPRRWNRVASFFAILEDDCTGGETYFPYAKPIVPPSRRGEAMWQGGGVAGEKNKKKRSKTKTAATGVEQQEEKQEREQEQEQEEARPLWREHEDGGLAFRPVAGNAVFWVNLHANGTGDPRTNHAGLPLESGRKTAMNIWPRQYYP

SEQ ID NO: 750 - protein, 345 aa, Myceliophthora thermophilia
RLLTSLVGDFSILPGRGLGLPFLTKPIRTTTTTTTNNNNNTASSPPTTAAVVGAEEEEEEEATRTFVCDTTHTYRTELVSLDPLIMYIHDLITPAEIAWLLETGEPRFAPSQVSKYGRQQQTADRTSSSAGLPRDDPAVMCVLNRTRAFLGTMLRDGWDEMGPPQLVRYTAGQRFNLHHDWFDVPQRAAAAAASDDGEFVPRRWNRVASFFAILEDDCTGGETYFPYAKPIVPPSRRGEAMWQGGGVAGEKNKKKRSKTKTAATGVEQQEEKQEREQEQEQEEARPLWREHEDGGLAFRPVAGNAVFWVNLHANGTGDPRTNHAGLPLESGRKTAMNIWPRQYYP

SEQ ID NO: 751 - DNA, 1284 bp, Myceliophthora thermophilia
atgtctccgactgtactccgagtactcattagtggtggcggcatcgctggcaacgcccttgccttctggctggccaagcaaggccacatcgtcaccgtcgtcgagcggtttccgcacctgcgcgccacgggactgcaactcgacctgcgcggccccggcatccaagtcctcaaaaagatgggcctcgaggaggcctttcgggccagggcagcccctgaacagggcatgcaggtggtcgacaggtcgggcagacggcgggcctacttcccggccaacaagtcgggcagcggcaagcagagcctgacttccgagttcgagatcatgaggggcgacctgtgccgcctcctctacgacgccgcgcgaggatgcgagaatccgccccggtacgtcttcgggacggccgtcgagagcttcgagcagaacaagaacggctccgtcgagatccgcttcgagaacggccagagagacagcttcgacctcctcgtcggcgccgacggccagtggtcgcgaacccggaggatgatgctcgggatcgggcccacggacggaatgcagcggatcccgggcttccatatcgcctacttcaccatgcctctgcccatgcagaaaggggaggagtgcctggcgacgacctacatggcccccggacggcgcgggttcatgacgagaaggcacagccccgacaaggttcaggtgatgctcacgtccaagaccgacccggaccggctgcagagcgtaccgaggggcgacgtggagcaggagaaggaagccatggccgacatattcagaggcgcagggtggataacggaagacgtcatcgagggcatgcgggccgcagaggacttttactgcgagcggatcggcctggtcaaggtgccgcgctggtcttccggccacgtcgcgctggtcggggacgccgcccactgcccgaccgtgctctcgggcatgggcaccacctgcgccatggtgggcgcttacatcctggctggcgagattgggaggtattctgtgagcggtagcgggaatggggagccggacggtctggaggccgcactgaagcgctacgaagagacgctccggccattcgtggacggcatgcaggagggcatcctcgagagggccgacagtcagtgggtcctgtcggggtccgcgttcggggtcgagctctggaactgtctcatgggacttgtttcctttttcaggatcaacattgcagaagttttcggtatccgcgagaccgtcaagggctggaacctccctgactacgaggttcttcgcgagtaa

SEQ ID NO: 752 - protein, 427 aa, Myceliophthora thermophilia
MSPTVLRVLISGGGIAGNALAFWLAKQGHIVTVVERFPHLRATGLQLDLRGPGIQVLKKMGLEEAFRARAAPEQGMQVVDRSGRRRAYFPANKSGSGKQSLTSEFEIMRGDLCRLLYDAARGCENPPRYVFGTAVESFEQNKNGSVEIRFENGQRDSFDLLVGADGQWSRTRRMMLGIGPTDGMQRIPGFHIAYFTMPLPMQKGEECLATTYMAPGRRGFMTRRHSPDKVQVMLTSKTDPDRLQSVPRGDVEQEKEAMADIFRGAGWITEDVIEGMRAAEDFYCERIGLVKVPRWSSGHVALVGDAAHCPTVLSGMGTTCAMVGAYILAGEIGRYSVSGSGNGEPDGLEAALKRYEETLRPFVDGMQEGILERADSQWVLSGSAFGVELWNCLMGLVSFFRINIAEVFGIRETVKGWNLPDYEVLRE

SEQ ID NO: 753 - protein, 406 aa, Myceliophthora thermophilia
FWLAKQGHIVTVVERFPHLRATGLQLDLRGPGIQVLKKMGLEEAFRARAAPEQGMQVVDRSGRRRAYFPANKSGSGKQSLTSEFEIMRGDLCRLLYDAARGCENPPRYVFGTAVESFEQNKNGSVEIRFENGQRDSFDLLVGADGQWSRTRRMMLGIGPTDGMQRIPGFHIAYFTMPLPMQKGEECLATTYMAPGRRGFMTRRHSPDKVQVMLTSKTDPDRLQSVPRGDVEQEKEAMADIFRGAGWITEDVIEGMRAAEDFYCERIGLVKVPRWSSGHVALVGDAAHCPTVLSGMGTTCAMVGAYILAGEIGRYSVSGSGNGEPDGLEAALKRYEETLRPFVDGMQEGILERADSQWVLSGSAFGVELWNCLMGLVSFFRINIAEVFGIRETVKGWNLPDYEVLRE

SEQ ID NO: 754 - DNA, 933 bp, Myceliophthora thermophilia
atgtttacctaccttctagccctcgttccggttctccttttcttctccaacccgatttcccagctcttctcctccccgccgccgcagatccaccggctcccgcggccgcaactcaacgaagacctcttggcgctcgaatcaccagggaaccagaccgcttgccccccgaatccgtatacggtccatgtcttctcccgcgcgccattggtgctctatatcgagaacttcctatcactagatgaacgcgctcacctactagagataagcgaaccgctttacgccccgtcgacgatcacacacgacgccggggggacgacccaccgggacccggcggtgcgcgactccgaggtcgcggtggtgccgcggaccggggcggtgcgctgcgtcgaggagcgggcgcgcgccctgcaggggtggcgcgaccaagtgtggctcgagcggctgcgggtgcagcggtaccgcgcgggcgggcactacgcccaccacttcgactggagcaccggcaggggcgggtggggccgcgtcagcagcttcatggtctgggtcgacgacggttccctctcgcagagtcacggtcgccgtcatcatgtagaggaggggaaggaggaggaggaggaggaggaggaggaggaggaggaggaggagaagctcgaagggggagggacggagttccccttgctgagagcagggcaggatccgaggtggtgccgatttgtggagtgtcccgagtccggggctgaatttggcgcgtctgagggagagaaggaaaagggagttgtgttcaagcctctgccgggaaatgccgtgttctgggaaaacttcatggcggacgggacgggaaggggttacgaagagacttggcacgccggtctgcccgtcaagaaggggatcaaagttgggttgaacatctggagttggggcaggatcgagtag

SEQ ID NO: 755 - protein, 310 aa, Myceliophthora thermophilia
MFTYLLALVPVLLFFSNPISQLFSSPPPQIHRLPRPQLNEDLLALESPGNQTACPPNPYTVHVFSRAPLVLYIENFLSLDERAHLLEISEPLYAPSTITHDAGGTTHRDPAVRDSEVAVVPRTGAVRCVEERARALQGWRDQVWLERLRVQRYRAGGHYAHHFDWSTGRGGWGRVSSFMVWVDDGSLSQSHGRRHHVEEGKEEEEEEEEEEEEEEKLEGGGTEFPLLRAGQDPRWCRFVECPESGAEFGASEGEKEKGVVFKPLPGNAVFWENFMADGTGRGYEETWHAGLPVKKGIKVGLNIWSWGRIE

SEQ ID NO: 756 - protein, 286 aa, Myceliophthora thermophilia
SPPPQIHRLPRPQLNEDLLALESPGNQTACPPNPYTVHVFSRAPLVLYIENFLSLDERAHLLEISEPLYAPSTITHDAGGTTHRDPAVRDSEVAVVPRTGAVRCVEERARALQGWRDQVWLERLRVQRYRAGGHYAHHFDWSTGRGGWGRVSSFMVWVDDGSLSQSHGRRHHVEEGKEEEEEEEEEEEEEEKLEGGGTEFPLLRAGQDPRWCRFVECPESGAEFGASEGEKEKGVVFKPLPGNAVFWENFMADGTGRGYEETWHAGLPVKKGIKVGLNIWSWGRIE

SEQ ID NO: 757 - DNA, 1608 bp, Myceliophthora thermophilia
atggcgctttacatccccaacccctacactctggcattgcttgcccttcctctggtctatagtctcgtcaaatggcttctctcgaccaggcgacccagtcaattcccccccgggccaccaggtgcgccctttctcggcaactggcaccagatcccttctctcttgcactgctttaagctccatgagtgggcgaggcagtatggccccatcatgggcctcaagctgggacctcgcaacgtggtcgtgctgaacgagggctccctggtctacgagctgatcgtaaagaaggccaactccttctcggagcgcgtccccatgtacatcgcccagaaccacatcttgcccgagggcaagcactcctacagcctgtttatgcggaacgactacggcggccggctgcggaccctctcgaaacagaccgttgtcggctctgggctgaacaacctggctcctctgcagaaggcggcggctacgcgtttgctctatcagctgtaccaggatggcgagcattgggtcgagcatctcaagccatggtcgctcgaaactcccgtcgccatgatgagcggcgcgccgatccaggactacgtccgcgactttggcaagcagtggatcgaagactataacctctctcagcagctgtggatcgagctcctggatcagctaagcccgccggttgacctcttccccatcttgcgttgggtgccaggtctcatcgcggaatggaagcgcaaagctccggtggcgcgtaagtacctcctggacgcgtacaacggggtcatcgagcaggccgaaaagagcatgaagcgtcagggcggcaccttcagtcacctcgccatcattcccaagctcctccgtcaggaaccggatcatttcaccaacaaacaggggctcgacaacacggtcttcatggggggcctatttgatgccgctgtagggtccaccctcatgtcgttccagaccctgatcctcgccctggccgcccaccccgaggtgcagcgtaaggcgcaggaagaagtcgaccgcgtgtttggcaccgagcagctgccggagcagatcgagctggacaagctcccctacatccacgcgtgcgtgaccgaggcgcagcggtggcggcccctgggggcctacttcatgggccagttcggcctgccgcgcgagtgcgtgcacgaggaggagattggcgggttccggatcccgcgcggggcgtcggtcgtgatcaaccagtggtcgatccaccacgacccggacttctacgaccagccggggcggtacgacccggagcgctacgtcaagaaccccgtcggcgccaaggagggcgtttcgcagcccggccgcaagcccatctacaccttcggcgccggccggagggagtgcatgggcaaggacttttatttccagaacgcccgcatcgcctgcgcccaggtcctctgggccttcgacatcgtccccgacggggacctcgacatcgacgcccgcaccggcttcacccccgccgtcgtcatgatgcccaagccgttcaaggtcaacttcgtcccgcgcaagagtgccgatatcctgctacgggaaaagcagaaggcggatatcaagtttacagagtttttggggtaa

SEQ ID NO: 758 - protein, 535 aa, Myceliophthora thermophilia
MALYIPNPYTLALLALPLVYSLVKWLLSTRRPSQFPPGPPGAPFLGNWHQIPSLLHCFKLHEWARQYGPIMGLKLGPRNVVVLNEGSLVYELIVKKANSFSERVPMYIAQNHILPEGKHSYSLFMRNDYGGRLRTLSKQTVVGSGLNNLAPLQKAAATRLLYQLYQDGEHWVEHLKPWSLETPVAMMSGAPIQDYVRDFGKQWIEDYNLSQQLWIELLDQLSPPVDLFPILRWVPGLIAEWKRKAPVARKYLLDAYNGVIEQAEKSMKRQGGTFSHLAIIPKLLRQEPDHFTNKQGLDNTVFMGGLFDAAVGSTLMSFQTLILALAAHPEVQRKAQEEVDRVFGTEQLPEQIELDKLPYIHACVTEAQRWRPLGAYFMGQFGLPRECVHEEEIGGFRIPRGASVVINQWSIHHDPDFYDQPGRYDPERYVKNPVGAKEGVSQPGRKPIYTFGAGRRECMGKDFYFQNARIACAQVLWAFDIVPDGDLDIDARTGFTPAVVMMPKPFKVNFVPRKSADILLREKQKADIKFTEFLG

SEQ ID NO: 759 - protein, 514 aa, Myceliophthora thermophilia
LVKWLLSTRRPSQFPPGPPGAPFLGNWHQIPSLLHCFKLHEWARQYGPIMGLKLGPRNVVVLNEGSLVYELIVKKANSFSERVPMYIAQNHILPEGKHSYSLFMRNDYGGRLRTLSKQTVVGSGLNNLAPLQKAAATRLLYQLYQDGEHWVEHLKPWSLETPVAMMSGAPIQDYVRDFGKQWIEDYNLSQQLWIELLDQLSPPVDLFPILRWVPGLIAEWKRKAPVARKYLLDAYNGVIEQAEKSMKRQGGTFSHLAIIPKLLRQEPDHFTNKQGLDNTVFMGGLFDAAVGSTLMSFQTLILALAAHPEVQRKAQEEVDRVFGTEQLPEQIELDKLPYIHACVTEAQRWRPLGAYFMGQFGLPRECVHEEEIGGFRIPRGASVVINQWSIHHDPDFYDQPGRYDPERYVKNPVGAKEGVSQPGRKPIYTFGAGRRECMGKDFYFQNARIACAQVLWAFDIVPDGDLDIDARTGFTPAVVMMPKPFKVNFVPRKSADILLREKQKADIKFTEFLG

SEQ ID NO: 760 - DNA, 1572 bp, Myceliophthora thermophilia
atgttgcaagttctttgctccgctacgtcactcgtgctgctgctcgctaccgccctggtgctggcgatacggagagtcttctttcgcggcctttggttcgtcccgggaccgtttgttgcccggttcacggatctgtggtatgcttaccgtgtctttcgtggccggtttgagaaggacaacgttgagctgcatcggaaatatggccccgtagtgcggtacggcgtcaaccggtacagcatcgccgaccccctggcagccaatgccatctacggcccggggagcaagttcacaaagtcctcctggtatcagccctggtcttccccctctcctcaagactggaccttgtttgcagatcaagatgccaagcggcacgcgtccaaccgacgccagtaccaaaacacgtataacatgtccgcgctcgtccactacgaggcatacgtcgacgagtgtgtggagctcctgtgtcagaggctgtccggaatgggcgccaacgcgtggagccagcccgtggacatgggccactggctgcagtgctacgccttcgatgtcatcagcctggtgacgtactcgaggaggatcggcttcctcgacgccggccaggacgtcggcaatgtgatccagaatatcgacgacgctctggcctacgccagcgtcgtcggggtctacccgtggcttcaccccatccttttcagggtgcgcaattggctggccgggtcgcgcggaaagggaaggcagtacatcatcaatttcaccaaggaatgtatggcggttcatcaggagaagcccagcggacaaccggttgccgaaaagaacagcaactcttccgaggaccagtggcagcagcagcagccaacgacgatggacttcctcagcaagttcctccagaaacacacggagacgccctccgcatttacccggtaccacgtcctcgcggggtgcgtgtccaacatgatggcgggctccgacaccacgtccatcagcctcagcgcgatactgtaccacgccctgcggaacccggccgttttccgacggctgcgcgaggaggtcgaccagctctgcccccgcgaccacgacgagaacgcggcgtcggctcgcgtcacgttcgcacaaagccaggacatgccctacctccaagcggtcatcaaggaggcgctgcgcgtccatccggccaccggtctgcccctcgagagggtggttccggaggaggggctgaccttcaatgggatcttcttcccggcagggaccatcgtcggcatcaacagctgggttgagcacagcaataaagggatatttggtgacgacgcagatgtcttcaacccagacagatggctccatggagacaaggagaagatccgtgtcatgaaccggcactggatgccgtttgggctgggctctcgcacctgcatcgggcgccacatttccatgctggaaatgtgcaagctggtgccgaggctggttcgggatttcgatttcgagctctgcgacgaacaggaatggcggacccggaaccattggttcgtgaagccggagaactttaaggtgctagttcggcaaagggtggcccggggttga

SEQ ID NO: 761 - protein, 523 aa, Myceliophthora thermophilia
MLQVLCSATSLVLLLATALVLAIRRVFFRGLWFVPGPFVARFTDLWYAYRVFRGRFEKDNVELHRKYGPVVRYGVNRYSIADPLAANAIYGPGSKFTKSSWYQPWSSPSPQDWTLFADQDAKRHASNRRQYQNTYNMSALVHYEAYVDECVELLCQRLSGMGANAWSQPVDMGHWLQCYAFDVISLVTYSRRIGFLDAGQDVGNVIQNIDDALAYASVVGVYPWLHPILFRVRNWLAGSRGKGRQYIINFTKECMAVHQEKPSGQPVAEKNSNSSEDQWQQQQPTTMDFLSKFLQKHTETPSAFTRYHVLAGCVSNMMAGSDTTSISLSAILYHALRNPAVFRRLREEVDQLCPRDHDENAASARVTFAQSQDMPYLQAVIKEALRVHPATGLPLERVVPEEGLTFNGIFFPAGTIVGINSWVEHSNKGIFGDDADVFNPDRWLHGDKEKIRVMNRHWMPFGLGSRTCIGRHISMLEMCKLVPRLVRDFDFELCDEQEWRTRNHWFVKPENFKVLVRQRVARG

SEQ ID NO: 762 - protein, 501 aa, Myceliophthora thermophilia
IRRVFFRGLWFVPGPFVARFTDLWYAYRVFRGRFEKDNVELHRKYGPVVRYGVNRYSIADPLAANAIYGPGSKFTKSSWYQPWSSPSPQDWTLFADQDAKRHASNRRQYQNTYNMSALVHYEAYVDECVELLCQRLSGMGANAWSQPVDMGHWLQCYAFDVISLVTYSRRIGFLDAGQDVGNVIQNIDDALAYASVVGVYPWLHPILFRVRNWLAGSRGKGRQYIINFTKECMAVHQEKPSGQPVAEKNSNSSEDQWQQQQPTTMDFLSKFLQKHTETPSAFTRYHVLAGCVSNMMAGSDTTSISLSAILYHALRNPAVFRRLREEVDQLCPRDHDENAASARVTFAQSQDMPYLQAVIKEALRVHPATGLPLERVVPEEGLTFNGIFFPAGTIVGINSWVEHSNKGIFGDDADVFNPDRWLHGDKEKIRVMNRHWMPFGLGSRTCIGRHISMLEMCKLVPRLVRDFDFELCDEQEWRTRNHWFVKPENFKVLVRQRVARG

SEQ ID NO: 763 - DNA, 1857 bp, Myceliophthora thermophilia
atggggctgctcgtcgagtatgggcattacatccttgctgccgcagtcctggccattctcgttcgcgccgtatccgcctcccgcagatccatcagaagaaacgggaaaccattgagaaaccccccagacactctcccgttactcgggaacggcctcaagttcctccagtcccgctgggagctgttcggctggttcgacagatgccagcgccagttcggttacgagacggtcgctctgcacgtaccaaccctgcctccgggagtgctcatacatgaccctcggaacctcgatttcgtcttcaagagcgaggggctgttcaccaagggcgattttgtgaagcggcgctcgtgggacttgttcggtcggccccttcccagcctcataggaaacggcatcatcaatgccgatggagatttatggaagctgcagcgaaaagcaggctctgctttcctcaacaccgccaacctgagggtgctcaccgaagtcgcgcttcctcagtacctggcagaggcggtcaggcacctgcgatccaacgtcggcaaggatcctgtagacttacaaaatgtcttccacgagattaccaccaaactgatgggaaagatggcctacaacgtgcgaccgaacccccccatggagatgcacgccgacgatgacttttccaagtgcttcgactacgcttccggtgccacagcagagcgattccaaaatcccctatggcctatcaaggagctgtttgccgggtccgagatgcgcaagtcgataagagtggtcaaagattttggtcgtcgcattgtcacgagtgcggtacgggaccgaaatgagttgaaatccaagagagaaaaaacggccgactctccagacggggacagcaagcttgaccagatctcaggctccctgatccagtcgctcctcgaagcgctcggcgacgagcagatcgtcgccgacgccgccctgacctacctctccgccggccgggacaccacaggccaagccctcacctggaccttctatctcctcctccagcatccgtcagccgtgtccaagatccggcaggaagtccaagatctcctgtctcaacatgccgccgccgaggcggaggaggaggacccgccacatccaactaatagttctcctcccacatcagcatctgcgccgaaaccggaagtggatccaaccctcttcacgcccgcggcgctcccctacacgacggccgtcttctacgaggccctccgcctcttcccgcccatccccttcgagatccgccaggcccaggccgacaccaccctgcccgacggcaccttcctgcccaagcactcggtgctggtctggtgcctgtgggcgatgcatcgctcgcgcctgacatggggccccgacgcggacgagttccgcccggaacgcttcctcacccgagaagacggagatgcgaaagaaggcgaagtagtagagaaggaagaggaaatagaagaagaagaagaagatgatgatgatgatgatgatgataaaacaaaacaggaacggaagatcgggagggagaaagaagaagtaatagcagctgcggggagggctcgtcggacaacaaagttcacgctgggcaagagctcggccgagttccccgtcttctacggcggggcgcgggcgtgcctgggccgcaagatggccgaggccatagccgtccaggtcatccccaccgtcttggtcgcggcgggggtgcggctggagggcgcttgggaaggcgagaggaggagccagctgagcctcactctgcccatggaagggggcttacctgtccgggttgtgaggatgggggatggtggtgagaagaaggtgggagcacatgatggcaatgatagttcatga

SEQ ID NO: 764 - protein, 618 aa, Myceliophthora thermophilia
MGLLVEYGHYILAAAVLAILVRAVSASRRSIRRNGKPLRNPPDTLPLLGNGLKFLQSRWELFGWFDRCQRQFGYETVALHVPTLPPGVLIHDPRNLDFVFKSEGLFTKGDFVKRRSWDLFGRPLPSLIGNGIINADGDLWKLQRKAGSAFLNTANLRVLTEVALPQYLAEAVRHLRSNVGKDPVDLQNVFHEITTKLMGKMAYNVRPNPPMEMHADDDFSKCFDYASGATAERFQNPLWPIKELFAGSEMRKSIRVVKDFGRRIVTSAVRDRNELKSKREKTADSPDGDSKLDQISGSLIQSLLEALGDEQIVADAALTYLSAGRDTTGQALTWTFYLLLQHPSAVSKIRQEVQDLLSQHAAAEAEEEDPPHPTNSSPPTSASAPKPEVDPTLFTPAALPYTTAVFYEALRLFPPIPFEIRQAQADTTLPDGTFLPKHSVLVWCLWAMHRSRLTWGPDADEFRPERFLTREDGDAKEGEVVEKEEEIEEEEEDDDDDDDDKTKQERKIGREKEEVIAAAGRARRTTKFTLGKSSAEFPVFYGGARACLGRKMAEAIAVQVIPTVLVAAGVRLEGAWEGERRSQLSLTLPMEGGLPVRVVRMGDGGEKKVGAHDGNDSS

SEQ ID NO: 765 - protein, 592 aa, Myceliophthora thermophilia
SRRSIRRNGKPLRNPPDTLPLLGNGLKFLQSRWELFGWFDRCQRQFGYETVALHVPTLPPGVLIHDPRNLDFVFKSEGLFTKGDFVKRRSWDLFGRPLPSLIGNGIINADGDLWKLQRKAGSAFLNTANLRVLTEVALPQYLAEAVRHLRSNVGKDPVDLQNVFHEITTKLMGKMAYNVRPNPPMEMHADDDFSKCFDYASGATAERFQNPLWPIKELFAGSEMRKSIRVVKDFGRRIVTSAVRDRNELKSKREKTADSPDGDSKLDQISGSLIQSLLEALGDEQIVADAALTYLSAGRDTTGQALTWTFYLLLQHPSAVSKIRQEVQDLLSQHAAAEAEEEDPPHPTNSSPPTSASAPKPEVDPTLFTPAALPYTTAVFYEALRLFPPIPFEIRQAQADTTLPDGTFLPKHSVLVWCLWAMHRSRLTWGPDADEFRPERFLTREDGDAKEGEVVEKEEEIEEEEEDDDDDDDDKTKQERKIGREKEEVIAAAGRARRTTKFTLGKSSAEFPVFYGGARACLGRKMAEAIAVQVIPTVLVAAGVRLEGAWEGERRSQLSLTLPMEGGLPVRVVRMGDGGEKKVGAHDGNDSS

SEQ ID NO: 766 - DNA, 1650 bp, Myceliophthora thermophilia
atgcccctgattccagacatcaaactcctcctcggcgccgtcgtcctcctggtcgtcgtccgggtgctcttcacacgccgcccgccgcaccctctgccccccgggcccaagccggcgccgctgattggaaacctgcaccagctgcccaagagcctccagtggtttcagctgtaccactggagcaagaagtatggtcccataatgcatctcagcatgggcgggcagccgctcatcatcctgtcgacccaccaggccgcccacgacctgctcaacaagcggagcgccaggtactcggaccggccgcgcatggtcatgtcgggcgagctggtcacacggggcatgcacatgctgctccggcagtacgacgagcggtaccggctgcaccagcgaatggaggcgccgctgctcaacctgcggtccgcgagctcgtaccggccgctgcaggacatggagtcgcggcagctgctctttgacgtgctggccgagtacgacgaggtcggggccaagggggtcgacttccaccaccacttcgagcgggccatggccagcttcatctacacggtcaactacggctaccgcctgcggaccgggtacgagaaggagctcatggacggcaagcgagtgcaggccgagttcgcccggaccggccaggtgggcgcctacctggtcgactcgttcccctcgctcaactacctcccccgcttcctggcgccctggaagaaggaggcggacgagctgtacgagctcgagtgccggctgcacctcggcaacctcgacaagggcctgaccaacccgggctggaacttcagcaagcacatgaagcagtcgcccgagggccgggacatgcccaaggtcgagctcgcctttgacctgggcatcctcgccgacgccggcctcgacacctccaccgtggcgctggattggttcatcgtcgcctggatcaccacgggctcgagctgggtccccaaggcacagaagctcctcgaagaggtcgttggcagagatcggctgcccacgttcgaagaccggcccaaactggcgtacattgatgctattgtgtgcgagacgctgcggtggcgccccgtggtggtcggcggcgtgccgcacttcatcaaggtccaggacagctacatgggctatcacatccccgccaactcgatcgtgctggccaacgccttcgccatcacgcgcgacgaatccgtgtttgggcccgacgttgacgacttcatgcccgaacgatggatggttgacgagaaagacgtaaaggccgagccgacgatcgacgcgtgcggcctcaacgtctcggcgctcaaggacctgccccagacgggcttcgggttcgggcgccgcatctgcaccggccgcatcatcgcccgcaaccagctcttcatccagatggcccgcatgctctgggccttcgacgtcgagccgggcatcaacgaggccaccggccagaggccaaagatcacggcagaaatcacccccgcgaactgcacagagggcttcgtcacgctgcccaagccgttcaaggtcgagatgcgcccgcgcggtcagtgggtgcgcgacgtcatcctgcgctcgggcaccacccacggcatcgaccatgccgaggtgctgaaccaggccgccaaggacagggagcgtgcttag

SEQ ID NO: 767 - protein, 549 aa, Myceliophthora thermophilia
MPLIPDIKLLLGAVVLLVVVRVLFTRRPPHPLPPGPKPAPLIGNLHQLPKSLQWFQLYHWSKKYGPIMHLSMGGQPLIILSTHQAAHDLLNKRSARYSDRPRMVMSGELVTRGMHMLLRQYDERYRLHQRMEAPLLNLRSASSYRPLQDMESRQLLFDVLAEYDEVGAKGVDFHHHFERAMASFIYTVNYGYRLRTGYEKELMDGKRVQAEFARTGQVGAYLVDSFPSLNYLPRFLAPWKKEADELYELECRLHLGNLDKGLTNPGWNFSKHMKQSPEGRDMPKVELAFDLGILADAGLDTSTVALDWFIVAWITTGSSWVPKAQKLLEEVVGRDRLPTFEDRPKLAYIDAIVCETLRWRPVVVGGVPHFIKVQDSYMGYHIPANSIVLANAFAITRDESVFGPDVDDFMPERWMVDEKDVKAEPTIDACGLNVSALKDLPQTGFGFGRRICTGRIIARNQLFIQMARMLWAFDVEPGINEATGQRPKITAEITPANCTEGFVTLPKPFKVEMRPRGQWVRDVILRSGTTHGIDHAEVLNQAAKDRERA

SEQ ID NO: 768 - protein, 524 aa, Myceliophthora thermophilia
RRPPHPLPPGPKPAPLIGNLHQLPKSLQWFQLYHWSKKYGPIMHLSMGGQPLIILSTHQAAHDLLNKRSARYSDRPRMVMSGELVTRGMHMLLRQYDERYRLHQRMEAPLLNLRSASSYRPLQDMESRQLLFDVLAEYDEVGAKGVDFHHHFERAMASFIYTVNYGYRLRTGYEKELMDGKRVQAEFARTGQVGAYLVDSFPSLNYLPRFLAPWKKEADELYELECRLHLGNLDKGLTNPGWNFSKHMKQSPEGRDMPKVELAFDLGILADAGLDTSTVALDWFIVAWITTGSSWVPKAQKLLEEVVGRDRLPTFEDRPKLAYIDAIVCETLRWRPVVVGGVPHFIKVQDSYMGYHIPANSIVLANAFAITRDESVFGPDVDDFMPERWMVDEKDVKAEPTIDACGLNVSALKDLPQTGFGFGRRICTGRIIARNQLFIQMARMLWAFDVEPGINEATGQRPKITAEITPANCTEGFVTLPKPFKVEMRPRGQWVRDVILRSGTTHGIDHAEVLNQAAKDRERA

SEQ ID NO: 769 - DNA, 2127 bp, Myceliophthora thermophilia
atggtcatctcgttgttcctgatcctggtagtcgccctcttggtaataccagggtacatccaagggcaaaagctgcctcgaggggcacgtcggttgccagggccgagaggcctgccgtacatcgggcgcgtacacgacgtgccctcgcaaacgtcatggctaaagttcttcgagtggagcaagcagtatggcccgatctaccagatgaagatgttcgggaccgtccatgtctggatatcctccgaatcggtcgcccgcgaccttctctccaaacggtccaagatctactcggaccggcctatgatccccaaccttcccgataaccgcaccagtggtacttatctcgccttgctgggaaggacagcggcgtggttccgccaaagaaagctctgcaacttcctgatgcacacgagcacctctgcctctctgcactcatacccgacgctggagcgtgaccggttcctgtacctcctctttctgtggcccgaccagtacatcgaatggatcgagcagctcaccagccgaacagtgtcgcgcctctgctggggcaccccgcagccgggccagatcctgcggcacacgactctgggcttgctcgagaccatcagcccgtccgggtcactgcccaacgtcctcaacttcctccgccacctgcccttcctcctgagcccgtggaagcgcaaagagaagggccggcgcgagctcgagatgaggctgttcgacgccaacctcgccttcgtgcaggacggcctcgaccgcggccaggccggccccagcttcgtccgcgccttcttcgagactaaggaggacccggacgagcgggttcggcagcggtggggggacgtgcccgaggccgtcaacgtggtcggcctcatggccatcgcgggcgcgctgaccatcggcagcccgctgcagtcgtacatgctcgccatgctgcactgcccggaatggcagagccgcctccaggacgagatcgacgccgtctgcggcggcgcctgcccgcagtgggacgacagagagcggctgcctctgctccgcgccgtcgtcaaggaggtcatccgctggcgcccgcccgtgcccacagacgatgtctacaacggatacttcatcccggccggagccacgatccacgctctcgagtggggcatcacccgtgacgaagctacgtacccggacgccgaaaccttcaacccggcccgctggctcgacccgtccttcccgaccttccgcgagcccctgacgcagtaccccaacctgagcggcttctcgcagttcgggttcggccggcgcacgtgccagggcgtccccatcgtcgagcaggatctgttcctgaccatgggcggtatggcgtgggggttcaacatcggcaagaagcgcgacccccagcacgcgggccgcgagctggccgtccactggaacgactatacgcccctcctcatcgccaagccctccatcttccccttcgaggcgacgccccggtccccggagaaggccgggcgcatgcgcgccatgtacggagcctcggttgccgccggccggctcccccgagacatggacctcggccagttccgggacgagctgggcgatcaagtctactgcgacgtcgacgacgatcttatgcgttgcgagcaggaggaggagagggaggaggaggaggccgggaaagccagggacgtgccggcggtcggtggaggcgagcaagatgaacacaacggggagatgaaagaggccgaagtgatgggtcgcgaggagaccggcgaggttgaggagagcggggagaatgacaaggccggggatgtggacctgtctgaaccacgattctcgcccaagtttcaacgccattccccgtcctgctccggcagagagccggggaggactcggcccggcgccgacataccggcccgggtctccaacggcagcgtcgtggcggtggtgagcggctggctcgaatcgctggcagacggagagagagcctggacctgtccgacatgccggccgctttctactccaagaaggtcggcttgcaagagggaagacctgctaccactagacagagtccaggagctcttccggcgggtggacgaccaggaaggacaagctgaggggagaggggatggctttttgtga

SEQ ID NO: 770 - protein, 708 aa, Myceliophthora thermophilia
MVISLFLILVVALLVIPGYIQGQKLPRGARRLPGPRGLPYIGRVHDVPSQTSWLKFFEWSKQYGPIYQMKMFGTVHVWISSESVARDLLSKRSKIYSDRPMIPNLPDNRTSGTYLALLGRTAAWFRQRKLCNFLMHTSTSASLHSYPTLERDRFLYLLFLWPDQYIEWIEQLTSRTVSRLCWGTPQPGQILRHTTLGLLETISPSGSLPNVLNFLRHLPFLLSPWKRKEKGRRELEMRLFDANLAFVQDGLDRGQAGPSFVRAFFETKEDPDERVRQRWGDVPEAVNVVGLMAIAGALTIGSPLQSYMLAMLHCPEWQSRLQDEIDAVCGGACPQWDDRERLPLLRAVVKEVIRWRPPVPTDDVYNGYFIPAGATIHALEWGITRDEATYPDAETFNPARWLDPSFPTFREPLTQYPNLSGFSQFGFGRRTCQGVPIVEQDLFLTMGGMAWGFNIGKKRDPQHAGRELAVHWNDYTPLLIAKPSIFPFEATPRSPEKAGRMRAMYGASVAAGRLPRDMDLGQFRDELGDQVYCDVDDDLMRCEQEEEREEEEAGKARDVPAVGGGEQDEHNGEMKEAEVMGREETGEVEESGENDKAGDVDLSEPRFSPKFQRHSPSCSGREPGRTRPGADIPARVSNGSVVAVVSGWLESLADGERAWTCPTCRPLSTPRRSACKREDLLPLDRVQELFRRVDDQEGQAEGRGDGFL

SEQ ID NO: 771 - protein, 686 aa, Myceliophthora thermophilia
QKLPRGARRLPGPRGLPYIGRVHDVPSQTSWLKFFEWSKQYGPIYQMKMFGTVHVWISSESVARDLLSKRSKIYSDRPMIPNLPDNRTSGTYLALLGRTAAWFRQRKLCNFLMHTSTSASLHSYPTLERDRFLYLLFLWPDQYIEWIEQLTSRTVSRLCWGTPQPGQILRHTTLGLLETISPSGSLPNVLNFLRHLPFLLSPWKRKEKGRRELEMRLFDANLAFVQDGLDRGQAGPSFVRAFFETKEDPDERVRQRWGDVPEAVNVVGLMAIAGALTIGSPLQSYMLAMLHCPEWQSRLQDEIDAVCGGACPQWDDRERLPLLRAVVKEVIRWRPPVPTDDVYNGYFIPAGATIHALEWGITRDEATYPDAETFNPARWLDPSFPTFREPLTQYPNLSGFSQFGFGRRTCQGVPIVEQDLFLTMGGMAWGFNIGKKRDPQHAGRELAVHWNDYTPLLIAKPSIFPFEATPRSPEKAGRMRAMYGASVAAGRLPRDMDLGQFRDELGDQVYCDVDDDLMRCEQEEEREEEEAGKARDVPAVGGGEQDEHNGEMKEAEVMGREETGEVEESGENDKAGDVDLSEPRFSPKFQRHSPSCSGREPGRTRPGADIPARVSNGSVVAVVSGWLESLADGERAWTCPTCRPLSTPRRSACKREDLLPLDRVQELFRRVDDQEGQAEGRGDGFL

SEQ ID NO: 772 - DNA, 615 bp, Myceliophthora thermophilia
atgttccggtcaaccttccgccctctcacttccgcagctgcggccgcggcggccacggcctcgcgccgcgccgccgtcctcggcagcgccgccccgcgcgtctcccagttccacagcaccgcccgcgtgctcatcaagccgggcgacccgctcccggacacggacgccctcatggagggcagcccgggccagcgggtgaacctggccgaggaggccaggaagtacaacagcatgctgctgatcggcgtccccgccgccttctcgcccgcctgctccgcgacgcacgtccccggctacgcgagccacccgcgcaccaaggagttcgagctcgtcggggtcgtgtcggtcaacgacgttttcgtgatgaaggcctggggtgagacgctggaccctgccgggcagttgggcatccgtttttttgccgacccgaccggcaagtttaccaagatgctcgacatggcgtttgatggctcggccatttttggtggggaccggtctaagcggtatgccatcattgtcgagcagggcaaggtcaagtccgttgcggtcgagcctgacaacactggcacgagtgtgtcgctggcggagaaggtgcttggtccggtgtctccctaa

SEQ ID NO: 773 - protein, 204 aa, Myceliophthora thermophilia
MFRSTFRPLTSAAAAAAATASRRAAVLGSAAPRVSQFHSTARVLIKPGDPLPDTDALMEGSPGQRVNLAEEARKYNSMLLIGVPAAFSPACSATHVPGYASHPRTKEFELVGVVSVNDVFVMKAWGETLDPAGQLGIRFFADPTGKFTKMLDMAFDGSAIFGGDRSKRYAIIVEQGKVKSVAVEPDNTGTSVSLAEKVLGPVSP

SEQ ID NO: 774 - protein, 180 aa, Myceliophthora thermophilia
AVLGSAAPRVSQFHSTARVLIKPGDPLPDTDALMEGSPGQRVNLAEEARKYNSMLLIGVPAAFSPACSATHVPGYASHPRTKEFELVGVVSVNDVFVMKAWGETLDPAGQLGIRFFADPTGKFTKMLDMAFDGSAIFGGDRSKRYAIIVEQGKVKSVAVEPDNTGTSVSLAEKVLGPVSP

SEQ ID NO: 775 - DNA, 1662 bp, Myceliophthora thermophilia
atggcgcccacggtcagcctggtgctgggcggtctcgctgctacctacgtcttcctccgggttttgctaaccctcacccaggatgcccgggaacccccggccatcctgaccgacatcccatttgtgcagcccttgattggcatgattcgggagaaggcgggcttctacatccgcctaagagacgaaacacggctgcccatctacaccctgcggctgcccttccagcgcatctacgtggtcaatgccaccgagctcatccccgtgctgcagaagcaatggcgcgtcatcagctttgcggccatcgcggccgacgcgggcaacgtggtgggcatcagcaaggagggtctcgagatcatgaagcgcgatctcacgagcgagcacggcttcagcacgagctggccccgctacatcatgccgaccatggcgcccggcccggacctcgacgccatcaaccggcgcgccatcgagatctacgtcgacgagatggcccggctgagggcccgggcggcgggggaggaggggcagcccggcaaggtggtcgtcggcctgtgggagtggacgcgccgcatgatggtcgactcgaccaccgaggccgtctggggtcccgagaacccgtaccgcgacccggccgtggccgacgcctggaagacgtttgaggccggcttcctgaccatgtccatgttcccgctcgcctggctcctgttccccaagctgcacgccgcccgcgaggtggccgcccgcgccatgatcgactacatgcgccgcggcggctacaagacggcctcgggcctcgtccgccgccgcgtcgagcaccactgcgacctcttcggcctctctctcgacgacgtcggccgcggcgagctgggcaacaccttcgccgtcctcggcaacaccaccccctgcgccctctgggtcctctaccagatcgtgtcggacgaccgggtgctggccgacgtccgcgccgagctggaggccctggtcgaggaagaggtggtggagggggaggaggaggaggcggaggacggcccaacgctcgtaagctccatcgacctggcccggatcaaggagtcctgcccggtcctgctcagcaccttccaggagacgctccggttccgcgccgtcaacccgggcccgcgcgtcctgctcgaggacgtctcgctcgacggcggccgcaccctgctcaagaagggcgccatgctcatgatccccgcccccgtgcagcacaccgacacggacgcctggggcgacgacgcgcgccagttcgaccaccgccggttcgcgccgccctccgcgggggacggcggcggcagcgcccaggggaacaacaagaagaggaagaagccgaaccgggtcgccttccgggcctttggcggcggccacgtgctgtgccccggtcgccacttcgccagcaccgagatcctctcgctggccgccctgctggtcctccagttcgacgtcgtccccgtcgccggccgctgggtcgagcccacctgggacaactcgcccgcccaggccggattccccgtcatcgaccaggacatacccgtcgagctgcgcccccgcgacccccgccggaagtggcgcgtcgtctactcgggctccgacaaggccatgaacatcgtcgccgaggacatctcggccggcggccggggcgccctctga

SEQ ID NO: 776 - protein, 553 aa, Myceliophthora thermophilia
MAPTVSLVLGGLAATYVFLRVLLTLTQDAREPPAILTDIPFVQPLIGMIREKAGFYIRLRDETRLPIYTLRLPFQRIYVVNATELIPVLQKQWRVISFAAIAADAGNVVGISKEGLEIMKRDLTSEHGFSTSWPRYIMPTMAPGPDLDAINRRAIEIYVDEMARLRARAAGEEGQPGKVVVGLWEWTRRMMVDSTTEAVWGPENPYRDPAVADAWKTFEAGFLTMSMFPLAWLLFPKLHAAREVAARAMIDYMRRGGYKTASGLVRRRVEHHCDLFGLSLDDVGRGELGNTFAVLGNTTPCALWVLYQIVSDDRVLADVRAELEALVEEEVVEGEEEEAEDGPTLVSSIDLARIKESCPVLLSTFQETLRFRAVNPGPRVLLEDVSLDGGRTLLKKGAMLMIPAPVQHTDTDAWGDDARQFDHRRFAPPSAGDGGGSAQGNNKKRKKPNRVAFRAFGGGHVLCPGRHFASTEILSLAALLVLQFDVVPVAGRWVEPTWDNSPAQAGFPVIDQDIPVELRPRDPRRKWRVVYSGSDKAMNIVAEDISAGGRGAL

SEQ ID NO: 777 - protein, 524 aa, Myceliophthora thermophilia
REPPAILTDIPFVQPLIGMIREKAGFYIRLRDETRLPIYTLRLPFQRIYVVNATELIPVLQKQWRVISFAAIAADAGNVVGISKEGLEIMKRDLTSEHGFSTSWPRYIMPTMAPGPDLDAINRRAIEIYVDEMARLRARAAGEEGQPGKVVVGLWEWTRRMMVDSTTEAVWGPENPYRDPAVADAWKTFEAGFLTMSMFPLAWLLFPKLHAAREVAARAMIDYMRRGGYKTASGLVRRRVEHHCDLFGLSLDDVGRGELGNTFAVLGNTTPCALWVLYQIVSDDRVLADVRAELEALVEEEVVEGEEEEAEDGPTLVSSIDLARIKESCPVLLSTFQETLRFRAVNPGPRVLLEDVSLDGGRTLLKKGAMLMIPAPVQHTDTDAWGDDARQFDHRRFAPPSAGDGGGSAQGNNKKRKKPNRVAFRAFGGGHVLCPGRHFASTEILSLAALLVLQFDVVPVAGRWVEPTWDNSPAQAGFPVIDQDIPVELRPRDPRRKWRVVYSGSDKAMNIVAEDISAGGRGAL

SEQ ID NO: 778 - DNA, 1644 bp, Myceliophthora thermophilia
atggctctcgtgctagttcccatcgccggcgcagcagtagttgccctggtcgtctttctcctggaccgccttctcaaccttccgcacgacccccaagagccgccactggtccggccaaagattcccttgatcggccatgtaattgggctgctacgccatgggaccaggtattactcaatgattgcagaggagtgcaagcagcccatcttcacgctcggggtgccccgcggcaagatgtacattgtgacgtccccgggcctgatcgcggcctgcgaccggcggtccaaggtggtctccttcgccccctacgtcgtcgagttcggcaagcgcatcctggccggcagcgagcacagcgtccgcctgctgtccgaggacctgctcgaggagaaggaggaagccaagggctcaggtggcgacggcagcagcagcagcagcagcctgcgcccagaaacgatggcggccatgcaccggtcgcaagcccccggcgagcacctcgacgccctgatgcgcgtcgcgctgcggagcgcggccacccatatcgactccatcatcggcgatgccgccgcccagggggccgctggcgttcctctgtttgggtgggtgcgccagttcatgacgagggccggcaccgatgccgtctatggcgaagaaaagaatccgttcagggatcccgaggttgcggagagcttttgggcggtcgacagggactttgcgcttctcgggctcatggtgctgcccgatcttctcgcacccagagggagccgggggcggaaacggttcttccgggccttccgcgagtactacgcctcgggcgggttggaaacggcatcctacctcatcaaggcgcgctacgaggtcaacaagaagtacggcgtctccgacgaggacatcgcccggttcgacctcggcgtctgcacggccctgctcgtcaacacggcgcccgccgtcggctggaccctgtgccacgcctactcggaccgcgcgctcctggccgagctgcggcgcggtatcgacgccgccgtcttcccggggggcgcgccccagaccgccgcagcagtagacgtgacggtcaacatctgcgaggtcgccgaggccctgccgctcctcgagtcgttcgtcagggaggtgctccgggtccagagcaacagcgcgtcggcccggttcgtgctccgggacacggtcctcgacgagggcggcggcggcggcggcgcggggggccgccgctacctggtcaaggcgggctcgttcctcggcatgccgtcggcgccggtgcacagtgacgaggcggtctggggcccgacggcgcgctcgttcgacccgacccgcttcctgccggagaggcagaaagagcgcaaggtacccgcctcggcgtggcgcacctttggcggcggcaacgccctctgccccgggcggcacctcgcgctgcgcgagatcatgagcgtcctggtcattatggtgctgaggttcgacctggagccgtgcgaggacgggggccggtgggagatgccggctaagaggcaccacatctccacgagcatcctgacgccggtcgacgatatccgggtcagggtccggccgcggaaggagttggcgcgcgtaacgagctggaactttgtgtgggagcccaccgcgcccaaggagtaa

SEQ ID NO: 779 - protein, 547 aa, Myceliophthora thermophilia
MALVLVPIAGAAVVALVVFLLDRLLNLPHDPQEPPLVRPKIPLIGHVIGLLRHGTRYYSMIAEECKQPIFTLGVPRGKMYIVTSPGLIAACDRRSKVVSFAPYVVEFGKRILAGSEHSVRLLSEDLLEEKEEAKGSGGDGSSSSSSLRPETMAAMHRSQAPGEHLDALMRVALRSAATHIDSIIGDAAAQGAAGVPLFGWVRQFMTRAGTDAVYGEEKNPFRDPEVAESFWAVDRDFALLGLMVLPDLLAPRGSRGRKRFFRAFREYYASGGLETASYLIKARYEVNKKYGVSDEDIARFDLGVCTALLVNTAPAVGWTLCHAYSDRALLAELRRGIDAAVFPGGAPQTAAAVDVTVNICEVAEALPLLESFVREVLRVQSNSASARFVLRDTVLDEGGGGGGAGGRRYLVKAGSFLGMPSAPVHSDEAVWGPTARSFDPTRFLPERQKERKVPASAWRTFGGGNALCPGRHLALREIMSVLVIMVLRFDLEPCEDGGRWEMPAKRHHISTSILTPVDDIRVRVRPRKELARVTSWNFVWEPTAPKE

SEQ ID NO: 780 - protein, 520 aa, Myceliophthora thermophilia
PHDPQEPPLVRPKIPLIGHVIGLLRHGTRYYSMIAEECKQPIFTLGVPRGKMYIVTSPGLIAACDRRSKVVSFAPYVVEFGKRILAGSEHSVRLLSEDLLEEKEEAKGSGGDGSSSSSSLRPETMAAMHRSQAPGEHLDALMRVALRSAATHIDSIIGDAAAQGAAGVPLFGWVRQFMTRAGTDAVYGEEKNPFRDPEVAESFWAVDRDFALLGLMVLPDLLAPRGSRGRKRFFRAFREYYASGGLETASYLIKARYEVNKKYGVSDEDIARFDLGVCTALLVNTAPAVGWTLCHAYSDRALLAELRRGIDAAVFPGGAPQTAAAVDVTVNICEVAEALPLLESFVREVLRVQSNSASARFVLRDTVLDEGGGGGGAGGRRYLVKAGSFLGMPSAPVHSDEAVWGPTARSFDPTRFLPERQKERKVPASAWRTFGGGNALCPGRHLALREIMSVLVIMVLRFDLEPCEDGGRWEMPAKRHHISTSILTPVDDIRVRVRPRKELARVTSWNFVWEPTAPKE

SEQ ID NO: 781 - DNA, 231 bp, Myceliophthora thermophilia
atgaagcttgccgccgttctctcaaccgaagtcgccattctcggtgtcccaagcgcagaggactcggcggtagagaactttgacaacccggcatggtgggggaagaagaagagagactcaactgttgaaaactttgataatccggcgtggtggggaaaggacaagatggcgacgacagttgagaactttgacaacccggcgtggtgggggaagagtgaagaggaccgctga

SEQ ID NO: 782 - protein, 76 aa, Myceliophthora thermophilia
MKLAAVLSTEVAILGVPSAEDSAVENFDNPAWWGKKKRDSTVENFDNPAWWGKDKMATTVENFDNPAWWGKSEEDR

SEQ ID NO: 783 - protein, 57 aa, Myceliophthora thermophilia
EDSAVENFDNPAWWGKKKRDSTVENFDNPAWWGKDKMATTVENFDNPAWWGKSEEDR

SEQ ID NO: 784 - DNA, 1335 bp, Myceliophthora thermophilia
atgccgataatctccctgggtgccatgttgatacttgcaggccccctatgcttattcattatcccactcctcttccagaaatggcgagcctggcgactcgatgaatgggtccacgaacaactgcgtgtggcagacttccgctatgccggaaacataaggctggaagagcgtttgcgtctgcgggcaaccgagaaccgccggctgagggcggcattcggcatcgacaattccctgacaacaacgtccccctctgaccacagggccttcctcaagagagcctcctggctgctgaaacgaggggatcgcagctgggagcaactgtatagaaccgccgaggactttcttggtgccgaggtcagagctgccgtcaaggaagggagatacggcctccatctcgccgagtccgtacgctgcatggtcctcgcggtggtgctcttcgacaattttggcatcgagccggcgagcatccctcgtgctcatctcgtcaccatcaccagggagatcaacgagcagtggctacgctccaagcgtgaccccgtcggcgtcgctccatcgtcgcttctctactcaaccatcgaatcgctaaacgtcatgtccccgttcgcgaataccgagtcggtcgtgctgtcggcccccgaggtcctcagcctgctcatgccgcagtacgaaaccctctggcgcgtggtcctcctcacatttgtcacagcataccaccaccagccggacgcataccctgacgccgtgcaaagaacagccgacgtcccggcctgcttgggccaccccgccaaggagaaggaagctctcaagctagccaaggagggcctgcgactttacccctccaacaaacacctctaccgcgcggccccttcgtgcctcgcgaacccggaagggagcacgaaccgccggggccccgcccgggcagccgacatctcggcgctgcaccgacacccttccatctggggagggggcgccggcggcggcggcggcgcgctggccttccgtcccgcgcgcttcgacgacggcgccctgaccgacctgcagcgccgcgcctacgcgcccttctcgcgcccgccgcaccggtgtcccgccgccgggtcgtcgtcgtcgtcgtcgtcgacagcggcagaagccggcaagaactcgtttggcgagcgcatgatcgtcgtcctggtcgtcgcgctcgggcgggcgctcgggagggacaaggggagggttgtcttgggagaggagaagggaggagagggcggagtcggtgagccgagtttgttcgtgggaagggagcctctgcctacggggagagacgagatggaagggtgggtctgggtgtggtattaa

SEQ ID NO: 785 - protein, 444 aa, Myceliophthora thermophilia
MPIISLGAMLILAGPLCLFIIPLLFQKWRAWRLDEWVHEQLRVADFRYAGNIRLEERLRLRATENRRLRAAFGIDNSLTTTSPSDHRAFLKRASWLLKRGDRSWEQLYRTAEDFLGAEVRAAVKEGRYGLHLAESVRCMVLAVVLFDNFGIEPASIPRAHLVTITREINEQWLRSKRDPVGVAPSSLLYSTIESLNVMSPFANTESVVLSAPEVLSLLMPQYETLWRVVLLTFVTAYHHQPDAYPDAVQRTADVPACLGHPAKEKEALKLAKEGLRLYPSNKHLYRAAPSCLANPEGSTNRRGPARAADISALHRHPSIWGGGAGGGGGALAFRPARFDDGALTDLQRRAYAPFSRPPHRCPAAGSSSSSSSTAAEAGKNSFGERMIVVLVVALGRALGRDKGRVVLGEEKGGEGGVGEPSLFVGREPLPTGRDEMEGWVWVWY

SEQ ID NO: 786 - protein, 414 aa, Myceliophthora thermophilia
WRLDEWVHEQLRVADFRYAGNIRLEERLRLRATENRRLRAAFGIDNSLTTTSPSDHRAFLKRASWLLKRGDRSWEQLYRTAEDFLGAEVRAAVKEGRYGLHLAESVRCMVLAVVLFDNFGIEPASIPRAHLVTITREINEQWLRSKRDPVGVAPSSLLYSTIESLNVMSPFANTESVVLSAPEVLSLLMPQYETLWRVVLLTFVTAYHHQPDAYPDAVQRTADVPACLGHPAKEKEALKLAKEGLRLYPSNKHLYRAAPSCLANPEGSTNRRGPARAADISALHRHPSIWGGGAGGGGGALAFRPARFDDGALTDLQRRAYAPFSRPPHRCPAAGSSSSSSSTAAEAGKNSFGERMIVVLVVALGRALGRDKGRVVLGEEKGGEGGVGEPSLFVGREPLPTGRDEMEGWVWVWY

SEQ ID NO: 787 - DNA, 1770 bp, Myceliophthora thermophilia
atgttatctgctcttgtttccaatcttctcgccgtcaccagcggagtgtttgcccatctcgccgtgtttcgccgcggcgagtgggacgtagccgccccatccgtctttgccctctacttcaccgtcttcgccgcggccatgtgtttcgcttacacaggcgttctaggcctccgatttgtttcttgctcagcggtcgcacagattggggccttgcacgttgctggcctctacacgagcatgctcgtgtaccgagccttcttccaccggctctccaactatccgggccccttccttgcccgccttaccaatttttacattacagccagatcaatgaagaagctccatctctttgaggaggtccagaaactccacgaagagtacggcgactatgtccgacttggaccgagtgagctctccatcgccgatcccgaggccgtcaaggccatctatggcagccagtcaccgtgtaccaaaggcccttggtacacacttcttgagccgcgtgtgcccctattcatggcccgcgacaagcagaagcatgctcgtaggcgtaaggtctgggatcagggcttcacaacaaaagctattcagggatacgacccccggattaccaaggcaatcaatcagctcctccgcgccattgaccgccacaagggccagcccttggacgtatcgaagtggttttctttttttgtatttgacgtcatggaagacctcgctttcaacaagtcgtccaatatgctcgagaacggccaggaggcctacgtgttcaagaccatccgcaccgacatgttcaacattgccctctttacacacatgccctggcttctgcccttcattaagcggacgcccatccttaactggaactaccttgagtttctagactggatccagaaattgatcgacgagaggaagcaggtgcgtctccccattccctttcccctctcctcctcaaatacccctccctgcggcggattttcagacgaccgctccaagcaatcgagtgaacccctcctccccccccccccccaaaccacgctaacactagcccggccatcgcaacagaaagaaccagagaaacccgatatcttctcttggatcctcgccgcctacgagaagagccccaagacgaagcgggaccagctgaacctgcatggcgacgcccagctgatcgtcatcgcgggcagcgacagcgtcgccgcagccctttcgcacgtcttcttccacctcgcgtgggatcctagcctggtcaagcgcctccaggccgagttcgacgccctcccggacatctcgcacgacaacctggtgaccgtgcccctcctggacgccgtcatcaacgagaccatgcgcctccaccccccggtgccctcgggcacccagcgcatgacgcccccggaggggctctggatcggagaccgcttcatcccgggcaacacgatcgtccaggtgcccagctacaccgtgttccgcgacgagcgggcgttcctgtaccccaacgagttcatccccgaacgctggaccaccaggccggagctgatcctggacaaaaccgtctacattcccttcaacacaggagcctatgcctgtgtcggcaagcgcctggccatgttggagctgaggcgggtggtggccgagatcctgtcgcgctacgacctgaccatcagcccgggccagacaaagcaggcgttcttggatggcaagcaggacaccttcacgaccgtctccgcaccgctgccaattatttttacagagaggtctcgacaagtgtga

SEQ ID NO: 788 - protein, 589 aa, Myceliophthora thermophilia
MLSALVSNLLAVTSGVFAHLAVFRRGEWDVAAPSVFALYFTVFAAAMCFAYTGVLGLRFVSCSAVAQIGALHVAGLYTSMLVYRAFFHRLSNYPGPFLARLTNFYITARSMKKLHLFEEVQKLHEEYGDYVRLGPSELSIADPEAVKAIYGSQSPCTKGPWYTLLEPRVPLFMARDKQKHARRRKVWDQGFTTKAIQGYDPRITKAINQLLRAIDRHKGQPLDVSKWFSFFVFDVMEDLAFNKSSNMLENGQEAYVFKTIRTDMFNIALFTHMPWLLPFIKRTPILNWNYLEFLDWIQKLIDERKQVRLPIPFPLSSSNTPPCGGFSDDRSKQSSEPLLPPPPQTTLTLARPSQQKEPEKPDIFSWILAAYEKSPKTKRDQLNLHGDAQLIVIAGSDSVAAALSHVFFHLAWDPSLVKRLQAEFDALPDISHDNLVTVPLLDAVINETMRLHPPVPSGTQRMTPPEGLWIGDRFIPGNTIVQVPSYTVFRDERAFLYPNEFIPERWTTRPELILDKTVYIPFNTGAYACVGKRLAMLELRRVVAEILSRYDLTISPGQTKQAFLDGKQDTFTTVSAPLPIIFTERSRQV

SEQ ID NO: 789 - protein, 571 aa, Myceliophthora thermophilia
HLAVFRRGEWDVAAPSVFALYFTVFAAAMCFAYTGVLGLRFVSCSAVAQIGALHVAGLYTSMLVYRAFFHRLSNYPGPFLARLTNFYITARSMKKLHLFEEVQKLHEEYGDYVRLGPSELSIADPEAVKAIYGSQSPCTKGPWYTLLEPRVPLFMARDKQKHARRRKVWDQGFTTKAIQGYDPRITKAINQLLRAIDRHKGQPLDVSKWFSFFVFDVMEDLAFNKSSNMLENGQEAYVFKTIRTDMFNIALFTHMPWLLPFIKRTPILNWNYLEFLDWIQKLIDERKQVRLPIPFPLSSSNTPPCGGFSDDRSKQSSEPLLPPPPQTTLTLARPSQQKEPEKPDIFSWILAAYEKSPKTKRDQLNLHGDAQLIVIAGSDSVAAALSHVFFHLAWDPSLVKRLQAEFDALPDISHDNLVTVPLLDAVINETMRLHPPVPSGTQRMTPPEGLWIGDRFIPGNTIVQVPSYTVFRDERAFLYPNEFIPERWTTRPELILDKTVYIPFNTGAYACVGKRLAMLELRRVVAEILSRYDLTISPGQTKQAFLDGKQDTFTTVSAPLPIIFTERSRQV

SEQ ID NO: 790 - DNA, 2058 bp, Myceliophthora thermophilia
atgccgggaatcaagttcaacactcccttgcctctcttcgcgctcgcggcggcagcgtcattctactgtacaaggaagctggatgaagaggtctggccgacgacgccaatcctgactgcatacgtatcccttgcctactgggttatctggcgaggatggctgtatcctatctacttctccagtctgcgacatgtcccgactgttccggggttccccctctggggtcagttcatccccatcatcttcgaggagtgcgggatcccgcagcgccgctggcaccgacaacatggccccattatccgctatttcttcccctttggctgcgagaggctctctatcgccaacgacacgtccatccggcacctgacggtcaagaacccgtacaacttcccgaagccggtgcgcgccaagctgtggatggtgcgcatcctgggcgagggtgttctcctggccgaaggtgcggaccacgtgtaccagcgcaagacgctcaccccagggttctctatctcggccatccgcacattcacccccgtcttctgggagaaggcgctgttaatggccgacctccagcggcgccagctagacgtgaccggcaagtcgtctgctccgttggaggttctcgagtggcttaaccggtgcaccctcgacatcatcggcatggccgggttcggatacgacatcgactcgctcagagaggccgcgctaccgcttcgccacgcgtaccggctggtcttcaactttgacctggcctcgcgcatcctgcacggcgcccaggccttcttccccagcacgaagcacataccggcccagatgaatcgcgacatggagacggcccgcggcatcatcatggacgaggccaccaggatcatcaaggacaagctcgaggaggccgagagggtcccgacggccaaggacatcctggccctcatcgcgcaggagaacctgaagctcaaggccaagggcgaggccggcctgtcgttcgagacgatgcgcgaccagatcatgacgttcctcggggcgggccacgacaccacggccacgggcgtcacctggacgatccacctgctctccatccacccgcaagtccatgacgctgacggacccggaccggctgccgtacctcgacacgtctgccgcgagtcgctccgctacatcccgccgattcccatgacggtgcgccagtccgtggccgacgacgtcatcgacgggtacaaggtgcccgccggcacggtcgtgtacatgctcgccaacgccatcaaccgcatggagtggttctggggcgacgacgccgacaccttcgacccggaccgctgggacaagctgcccgagacggcggtgcccaacgccttcatgaccttcttgcaagggccccgcggctgcctcgggcgcaagtttgccgaggtagagatgaaggtcctgctctgcgtcctgctgagccgctgggagtttagccgcgactacaccgccgaagacccggaggactggaagatgtggcgcctcgtgctgcggcccaggaacggcctcgccgtcgtggccaagcctgtcatcatgcctaccgagacgccgcccgactcgccagctcttcccccggacgagccgcctaccgatccgacgtgccggtaccggtcgcctgacaacgacgacgacaacgacaacgacaaccaccttatgaacgaggaattcttcgaccagccctcctacgtcgttgccccgacaccttgcaatacccctgctgagcaatcacctaccagcacccccgaggagtcgcccatcaacacccctcccgagacgcctgcggaaactccgccggcatcgcccgccgacgcccccccggaaacaacccacgtcgacaacaaccgcgctcccgagacgcacgtacagccgcccgtcgagaggccggaaggtggggagctacgaagggaaagaggcgctcggccgggagcccgcagagcgcctttcccggtccgtgccttcaggcttctggccatcctgccccgtctcatggcgcctggaaataggattctggtgtggctcaggcatagacgtcttcagctctga

SEQ ID NO: 791 - protein, 685 aa, Myceliophthora thermophilia
MPGIKFNTPLPLFALAAAASFYCTRKLDEEVWPTTPILTAYVSLAYWVIWRGWLYPIYFSSLRHVPTVPGFPLWGQFIPIIFEECGIPQRRWHRQHGPIIRYFFPFGCERLSIANDTSIRHLTVKNPYNFPKPVRAKLWMVRILGEGVLLAEGADHVYQRKTLTPGFSISAIRTFTPVFWEKALLMADLQRRQLDVTGKSSAPLEVLEWLNRCTLDIIGMAGFGYDIDSLREAALPLRHAYRLVFNFDLASRILHGAQAFFPSTKHIPAQMNRDMETARGIIMDEATRIIKDKLEEAERVPTAKDILALIAQENLKLKAKGEAGLSFETMRDQIMTFLGAGHDTTATGVTWTIHLLSIHPQVHDADGPGPAAVPRHVCRESLRYIPPIPMTVRQSVADDVIDGYKVPAGTVVYMLANAINRMEWFWGDDADTFDPDRWDKLPETAVPNAFMTFLQGPRGCLGRKFAEVEMKVLLCVLLSRWEFSRDYTAEDPEDWKMWRLVLRPRNGLAVVAKPVIMPTETPPDSPALPPDEPPTDPTCRYRSPDNDDDNDNDNHLMNEEFFDQPSYVVAPTPCNTPAEQSPTSTPEESPINTPPETPAETPPASPADAPPETTHVDNNRAPETHVQPPVERPEGGELRRERGARPGARRAPFPVRAFRLLAILPRLMAPGNRILVWLRHRRLQL

SEQ ID NO: 792 - protein, 667 aa, Myceliophthora thermophilia
ASFYCTRKLDEEVWPTTPILTAYVSLAYWVIWRGWLYPIYFSSLRHVPTVPGFPLWGQFIPIIFEECGIPQRRWHRQHGPIIRYFFPFGCERLSIANDTSIRHLTVKNPYNFPKPVRAKLWMVRILGEGVLLAEGADHVYQRKTLTPGFSISAIRTFTPVFWEKALLMADLQRRQLDVTGKSSAPLEVLEWLNRCTLDIIGMAGFGYDIDSLREAALPLRHAYRLVFNFDLASRILHGAQAFFPSTKHIPAQMNRDMETARGIIMDEATRIIKDKLEEAERVPTAKDILALIAQENLKLKAKGEAGLSFETMRDQIMTFLGAGHDTTATGVTWTIHLLSIHPQVHDADGPGPAAVPRHVCRESLRYIPPIPMTVRQSVADDVIDGYKVPAGTVVYMLANAINRMEWFWGDDADTFDPDRWDKLPETAVPNAFMTFLQGPRGCLGRKFAEVEMKVLLCVLLSRWEFSRDYTAEDPEDWKMWRLVLRPRNGLAVVAKPVIMPTETPPDSPALPPDEPPTDPTCRYRSPDNDDDNDNDNHLMNEEFFDQPSYVVAPTPCNTPAEQSPTSTPEESPINTPPETPAETPPASPADAPPETTHVDNNRAPETHVQPPVERPEGGELRRERGARPGARRAPFPVRAFRLLAILPRLMAPGNRILVWLRHRRLQL

SEQ ID NO: 793 - DNA, 1686 bp, Myceliophthora thermophilia
atggttgcgaatctcgtgctccttgccctcccgctcctggccacttaccttgccgcaacgctatggcatcgccgcttcagacagtgggccaatttcccccagctgaagccctctcttctctggggtcacctgcaggtcattcacgaatacaccctccgggccaagccaaagattcatatcgatgccgtgtttgcgcaaatcgccaaagacctcggaagtccgccactcatgtaccttgatcttcgccccgtcagttatccgatggttgtcatcaacagccatgaaatagccgagcaggtttcgcgcgtgagcaagctattcccctggagaacgcctaagtctcccacgatgtgggacctggtacgggtgatcggtccagagtccatcctgctcaggcagagcgaggactggaagcaactacggaagcgcttcaaccccggtttcgccccccagcacctgatgacgcttctcgggtgcatctgcgataagaccatgatctttgtagaccagttggagcgctacgctcgctcgggtagagagtttcccctcaacaagctcaccattaacctgacgtttgacatcatcggcgccatcaccatggacgtcgacttcgacgcacagcagtccgagtcctcgggccagggcgagttcatcaagctgtacgaccggctcctcaacatgtacggtaccgaggacagccggttcccgtggtggatgtatccgaggcgggagtggcgccgctacaagctcagcaagcagattgacaggcgcctcgaggacatgatccggcagaagcacgccgagcagcagcagcagcagcagcagcgaaagcagcaacaggaaggaggagaagccggcaaaggaaagccccgcgacatcctcagccttagcctgcagggaagcagcgagctgagcagagagctcctcgccgagacgcgagatcagctcaagacgtttctgttcgccggccacgacaccaccggcatcttgctggcgtggctcttctacgagctgtctcggtctccccacgtgctcaaggccgtgcgcggcgagcttgatgccgtcttcggcccggacccggacccgggagccgtgcgggagaagctcatggccccgaacggggaggagctgatcaacaagatgccgtacatcaactcggtcatcaaggaggtccttcggctgagaccgccggccgggacggcgcgcatggctcccccggggaccggctttaccgtccgcactcccgatgggcagagcttttgcctcgacggcgccatcatttacaactgcgccaccatcatccagcgagatgggacggtctacggggacacggccgacgacttcgtcccggagcggtggctgggcgacaagagcatcgggagcgccgacgcagaacagaacgaggcggggggcaggaagttcccgccgggggcgtggcggccgttcgaacgaggcccccgcaactgcatcgggcaggacctggccaccatcgaggcgcgagtcattgtggccctcgtggcgaggcggtatgactttgtcaaggtcgggctgggggagctcgatcttgaggaggcagggcggccgatcctggacgagaaggggcagtataaaaccaagccggagttgtacaacgtgacggccaaaccagtcgatggcatgatgatgaaagtgagacggctggcgtga

SEQ ID NO: 794 - protein, 561 aa, Myceliophthora thermophilia
MVANLVLLALPLLATYLAATLWHRRFRQWANFPQLKPSLLWGHLQVIHEYTLRAKPKIHIDAVFAQIAKDLGSPPLMYLDLRPVSYPMVVINSHEIAEQVSRVSKLFPWRTPKSPTMWDLVRVIGPESILLRQSEDWKQLRKRFNPGFAPQHLMTLLGCICDKTMIFVDQLERYARSGREFPLNKLTINLTFDIIGAITMDVDFDAQQSESSGQGEFIKLYDRLLNMYGTEDSRFPWWMYPRREWRRYKLSKQIDRRLEDMIRQKHAEQQQQQQQRKQQQEGGEAGKGKPRDILSLSLQGSSELSRELLAETRDQLKTFLFAGHDTTGILLAWLFYELSRSPHVLKAVRGELDAVFGPDPDPGAVREKLMAPNGEELINKMPYINSVIKEVLRLRPPAGTARMAPPGTGFTVRTPDGQSFCLDGAIIYNCATIIQRDGTVYGDTADDFVPERWLGDKSIGSADAEQNEAGGRKFPPGAWRPFERGPRNCIGQDLATIEARVIVALVARRYDFVKVGLGELDLEEAGRPILDEKGQYKTKPELYNVTAKPVDGMMMKVRRLA

SEQ ID NO: 795 - protein, 542 aa, Myceliophthora thermophilia
TLWHRRFRQWANFPQLKPSLLWGHLQVIHEYTLRAKPKIHIDAVFAQIAKDLGSPPLMYLDLRPVSYPMVVINSHEIAEQVSRVSKLFPWRTPKSPTMWDLVRVIGPESILLRQSEDWKQLRKRFNPGFAPQHLMTLLGCICDKTMIFVDQLERYARSGREFPLNKLTINLTFDIIGAITMDVDFDAQQSESSGQGEFIKLYDRLLNMYGTEDSRFPWWMYPRREWRRYKLSKQIDRRLEDMIRQKHAEQQQQQQQRKQQQEGGEAGKGKPRDILSLSLQGSSELSRELLAETRDQLKTFLFAGHDTTGILLAWLFYELSRSPHVLKAVRGELDAVFGPDPDPGAVREKLMAPNGEELINKMPYINSVIKEVLRLRPPAGTARMAPPGTGFTVRTPDGQSFCLDGAIIYNCATIIQRDGTVYGDTADDFVPERWLGDKSIGSADAEQNEAGGRKFPPGAWRPFERGPRNCIGQDLATIEARVIVALVARRYDFVKVGLGELDLEEAGRPILDEKGQYKTKPELYNVTAKPVDGMMMKVRRLA

SEQ ID NO: 796 - DNA, 1956 bp, Myceliophthora thermophilia
atgtcgtttgctgtgctcgctgccgttggcgttgccttggcagcggcaacttacacctacgtcttagggctatataagaacgtcgccaaagcgcggaaaacaggcctaccctatctagttgttcctatttcccccatcaacctcgcctggcagcttaccttcaccttctgggtgcccctcatcaagctgctgccaaaatcgctatgggagaactggttatttgtcatgatccccgagtgggcttaccacaccggccagactcattgggaccgcctcggggctgaaagtttcctggtcgcgtcacctggtcacctcgctctgtacacccagagcgccgaggtcatccaccaggtcacgcagcggcgcgaggcattccccaagaacatcgcccagtacggcatcctcgagatgtttggcaggaacgtgctcaccacagagggcgccgtgtggcgcttgcaccgcaagatcaccagcgccagcttcaacgagaagaacgctgcccacacgttcgcccaggccatacaccagactaagggcatgctcgacatgtggtttggcccggacggcgccaagacgggcacgaccggaaccatcaggtccctcgagcacgacaccatgacctgggcgctcaacattatcggctacgttggcttcggcctgcgcctgctctggccgggcgagacgatgcccaaggatatcgaccccaagctggcaaagtatggcagcttgaacccgccggcgggacacagccttacctttgccgattcgttggccaagaccctggagaggatcgtcgccatcttggtgtacaacgagaccatcctgcgacttctccccttcaagttcgccaaggaggcttaccaagggaagcgcaactacctccaatacatggacgagttcctccgtgacaagatagacgagacccggcgcggcgtgccccagcgcgaagggatggacatcatgggccagcttgtccagtcgagttatggctccgagtccaagaaggccgggtctaccggtactaccaaaggagatcccacctcgacctttaagctctccgacgcggacatcatcggcaacgccttcatcatgatcgtcgcgggccacgagacgaccgccaacacgctgcactttgcgctggtcgagctggccaccaacccgtcgacgcagcggcgcctgcagcaggaggtggacgccctgtttggggacagcgacccgtcgacgtgggagtacgagaagaacatcaacgcgctcctggcctcccacgtcggcgccaccgtcaacgagacgctccggctcgtgccccccgtcacggtgatccccaaggtggtcacgccggacgcggagcagacgctcaggatcgacgggcgcacgtacgtcctgccgccggggctggccatctccctcgtcgccgtgtgcgcgcaccgcaacccgcgctggtggccgacgcggccgagcgagcggacgggcgccccgacggacctggacgacttcctcccggagcggtggtaccggaccgcccgagacgggagcagggaagcggaggaggaggacggcgacatcgtcgacaagggcgactacggcgggttccagggcagcgacgtggccgcgtcgctgtaccggccggtgcggggcagctacgtgcccttcagcgacggcccgcggtcgtgcctggggcggcggatcgccatggtcgagatgggcgccgtgctggccgtcatcttccagcggtacagcatcgagctggccgtggacgagtgggcggacgacggcgaggtcgaggccatgacgcccgcccagaggagggcgctctaccgcaaggcgcagcacaagagcagggagaccatccggggcgccaactcggtgctcacgctcaagctgcacgggggcgcccacgtgccggtgaggttggtgaggagggggagggagcggttcgtgagcgaccccgagctatga

SEQ ID NO: 797 - protein, 651 aa, Myceliophthora thermophilia
MSFAVLAAVGVALAAATYTYVLGLYKNVAKARKTGLPYLVVPISPINLAWQLTFTFWVPLIKLLPKSLWENWLFVMIPEWAYHTGQTHWDRLGAESFLVASPGHLALYTQSAEVIHQVTQRREAFPKNIAQYGILEMFGRNVLTTEGAVWRLHRKITSASFNEKNAAHTFAQAIHQTKGMLDMWFGPDGAKTGTTGTIRSLEHDTMTWALNIIGYVGFGLRLLWPGETMPKDIDPKLAKYGSLNPPAGHSLTFADSLAKTLERIVAILVYNETILRLLPFKFAKEAYQGKRNYLQYMDEFLRDKIDETRRGVPQREGMDIMGQLVQSSYGSESKKAGSTGTTKGDPTSTFKLSDADIIGNAFIMIVAGHETTANTLHFALVELATNPSTQRRLQQEVDALFGDSDPSTWEYEKNINALLASHVGATVNETLRLVPPVTVIPKVVTPDAEQTLRIDGRTYVLPPGLAISLVAVCAHRNPRWWPTRPSERTGAPTDLDDFLPERWYRTARDGSREAEEEDGDIVDKGDYGGFQGSDVAASLYRPVRGSYVPFSDGPRSCLGRRIAMVEMGAVLAVIFQRYSIELAVDEWADDGEVEAMTPAQRRALYRKAQHKSRETIRGANSVLTLKLHGGAHVPVRLVRRGRERFVSDPEL

SEQ ID NO: 798 - protein, 635 aa, Myceliophthora thermophilia
TYTYVLGLYKNVAKARKTGLPYLVVPISPINLAWQLTFTFWVPLIKLLPKSLWENWLFVMIPEWAYHTGQTHWDRLGAESFLVASPGHLALYTQSAEVIHQVTQRREAFPKNIAQYGILEMFGRNVLTTEGAVWRLHRKITSASFNEKNAAHTFAQAIHQTKGMLDMWFGPDGAKTGTTGTIRSLEHDTMTWALNIIGYVGFGLRLLWPGETMPKDIDPKLAKYGSLNPPAGHSLTFADSLAKTLERIVAILVYNETILRLLPFKFAKEAYQGKRNYLQYMDEFLRDKIDETRRGVPQREGMDIMGQLVQSSYGSESKKAGSTGTTKGDPTSTFKLSDADIIGNAFIMIVAGHETTANTLHFALVELATNPSTQRRLQQEVDALFGDSDPSTWEYEKNINALLASHVGATVNETLRLVPPVTVIPKVVTPDAEQTLRIDGRTYVLPPGLAISLVAVCAHRNPRWWPTRPSERTGAPTDLDDFLPERWYRTARDGSREAEEEDGDIVDKGDYGGFQGSDVAASLYRPVRGSYVPFSDGPRSCLGRRIAMVEMGAVLAVIFQRYSIELAVDEWADDGEVEAMTPAQRRALYRKAQHKSRETIRGANSVLTLKLHGGAHVPVRLVRRGRERFVSDPEL

SEQ ID NO: 799 - DNA, 1518 bp, Myceliophthora thermophilia
atgctccccgaagccttctccttcatacccgggccctaccaggttccggctctcgcctccctcctgctctttgttttcctcgtcatctggtacggcctctcgtggcggcgcttgtcgcacattcctggaccccctcttgcctcgctctcctacctctggatgctgcgcatcgcccggtcgggcgagcagtcggcgcggtacgcgcacatcaacgccaagtatggctcgctcgcgcgcatcggccccaacgagctcatcatcgacgacccggccgtggtgcggcgcatgaacgcggcccgcagcccctaccggcgtagctcctggtactcggccatgcgcctggacccgtaccaggaggacttgttcagcatggcggacacggcggagcacgacctcctgcgcgccaagatgtcctttggcttcggcggcaaggagctcccggacgtggagggtgacatcgacgcgcaggtggacttgctcgtgcacctgatccggtcaaaatacctgtcggacgagaacggggtgacgtgccccttcgacatggccatcacggcccagtacttcaccatggacgtcatcaccaagctcgttttcggcaagcagctcggctttctagagaccgactcggacgtatacaacctgatccacagttctgagggcccgttgcagcttcaggtgctgaagagcgagatgcccctgattgggcgcatctttagccagccttgggtcttgaagaatctcggcccgaagaagaccaacgcgggcggactgggccgaatcttggggacggccgaggaagtggtcgccaagcgcttccgccatgacgcaaaggacgagatggacatgatgggttccttcattcgccacggagtcacgcagcaacagtgcgaggtcaacacccccttcattctggtcgccggaagtgacacgaccgcgtcggcaatccgcggcaccatgcttcatctggccaccacccggcacgcgtacaacaaactccgggatgagattgaccgcgctgtggccgagggtcgcatctccagcccggttacggtcgaggaggcaatgaagctcgaatatcttcaggccgtcatctacgaaggaatccgcgtccagatccccttctccggcctgctcatgaaggaggtgccgccggagggggacaccatcaacggcgttttcgtgcctggcggcagccgcattgcgcacaacacgctggccatcatgcgccggcccgagatctttggccaggacgtcgacgtcttccgcccggaacgctggttgggtgtttcgccggagcagaagcagctcatggtccagacaaccgagctcgtttttggctacggccggtggagctgcctcggcaagcccgtcgcctttattgagctgaacaaggtctttgtcgagctcctgcgacgcttcgatttcgagatcctctaccccaagcggccttggcgcgaattgaacttcaacattttctatcactcggagctctggatgcgcgtcactgggcggcactaa

SEQ ID NO: 800 - protein, 505 aa, Myceliophthora thermophilia
MLPEAFSFIPGPYQVPALASLLLFVFLVIWYGLSWRRLSHIPGPPLASLSYLWMLRIARSGEQSARYAHINAKYGSLARIGPNELIIDDPAVVRRMNAARSPYRRSSWYSAMRLDPYQEDLFSMADTAEHDLLRAKMSFGFGGKELPDVEGDIDAQVDLLVHLIRSKYLSDENGVTCPFDMAITAQYFTMDVITKLVFGKQLGFLETDSDVYNLIHSSEGPLQLQVLKSEMPLIGRIFSQPWVLKNLGPKKTNAGGLGRILGTAEEVVAKRFRHDAKDEMDMMGSFIRHGVTQQQCEVNTPFILVAGSDTTASAIRGTMLHLATTRHAYNKLRDEIDRAVAEGRISSPVTVEEAMKLEYLQAVIYEGIRVQIPFSGLLMKEVPPEGDTINGVFVPGGSRIAHNTLAIMRRPEIFGQDVDVFRPERWLGVSPEQKQLMVQTTELVFGYGRWSCLGKPVAFIELNKVFVELLRRFDFEILYPKRPWRELNFNIFYHSELWMRVTGRH

SEQ ID NO: 801 - protein, 471 aa, Myceliophthora thermophilia
WRRLSHIPGPPLASLSYLWMLRIARSGEQSARYAHINAKYGSLARIGPNELIIDDPAVVRRMNAARSPYRRSSWYSAMRLDPYQEDLFSMADTAEHDLLRAKMSFGFGGKELPDVEGDIDAQVDLLVHLIRSKYLSDENGVTCPFDMAITAQYFTMDVITKLVFGKQLGFLETDSDVYNLIHSSEGPLQLQVLKSEMPLIGRIFSQPWVLKNLGPKKTNAGGLGRILGTAEEVVAKRFRHDAKDEMDMMGSFIRHGVTQQQCEVNTPFILVAGSDTTASAIRGTMLHLATTRHAYNKLRDEIDRAVAEGRISSPVTVEEAMKLEYLQAVIYEGIRVQIPFSGLLMKEVPPEGDTINGVFVPGGSRIAHNTLAIMRRPEIFGQDVDVFRPERWLGVSPEQKQLMVQTTELVFGYGRWSCLGKPVAFIELNKVFVELLRRFDFEILYPKRPWRELNFNIFYHSELWMRVTGRH

SEQ ID NO: 802 - DNA, 1587 bp, Myceliophthora thermophilia
atgaccttcagtgccgaacacctccagctttggctgggcttggtagccatctctggcttcctctacacaacatgcctggtcatctaccgactcttcttccaccccctggccaagtacccgggcccgttcctggccaaactcaccgatgcgtacatgctctactacgcctggaggggtgatcgccacctcgagttctggcggatgcacgagaaatacggcaagtttgtgcgcttcggacccaactcgctttcaatcaactccaacacggccctgaaggacatctacggcttccgcgccaacgtccgcaaggccgagttctacgacgcctttgtgcacccggcgcccaacacccacaacgcccgtgacaaagatctccacgcccgtaagcgccgtgtcctctcgcacgccttctcggacggcgccatcaaggaggttgagcggtacattctggccaacatccgcactttctgcgaggccatcggagactatggacgcgtgattcacgagaagaaggggtggagttcgcccaagaacatgtctgactggtgcaactggcttgccatggacatcctgggcgacctctgctttgggaaggccttccacatgctcgaccgcccggacaaccggtacgccgtcgatctcgttggcgtcgcggcccagaggcatcttctttgcggcaccatgcccatcatcaacaagctcagcctggacaagatcctcttccacaggatcgcggctggccgcgcgaggtacatggcatatagccggcagcaactcgccgagcgcacagcgttgggtgacgaaaccgaccgccgcgacttcttttatcatcttctcaaggctcgcgacccggaaaccggccagggcttcaccacgcccgaactctggggcgagtccaatctcctcatcattgcgggctcggacacgacctccaccgccatggccgcaaccctcttctacctcgtccgccacccagacgctctcgccaaagtcacggccgagatccgctcccagttcgcgtccctcgaagatatccaccagggcgcgcagctcaacgcgtgcgtctacctgcgcgcttgcatcgacgaggccatgcgcctgtcgccctcagtcggcggtctgctgcctcgcgaggtgctgaaggggggtatgaccatcgatggcgagcacattcctgccggcatcatcgtcggcaccccgcactatgccatccatcacaacccggcctactacccggatccgttcgcgtaccggcccgagcggtggatcgttggcagcgagaaaggggacggcgttgacgtgagcgacgaggcccaggtggcgctcgcgcagagcgctttctgccccttctcgatcgggccgcgcgggtgcatcggcaagggcctggcgtacgtcgagatgactcttactttggcgagggtgctgttcttgtatgatttgcgcaaggcggtcggcgtcgctgaccccggggagggcaaacctggtgcgggctgcgggagggacagagttggggagttccagctggtggatattttcacgagtctgaaggatgggccgatggtagagttccggagacgggagttgtga

SEQ ID NO: 803 - protein, 528 aa, Myceliophthora thermophilia
MTFSAEHLQLWLGLVAISGFLYTTCLVIYRLFFHPLAKYPGPFLAKLTDAYMLYYAWRGDRHLEFWRMHEKYGKFVRFGPNSLSINSNTALKDIYGFRANVRKAEFYDAFVHPAPNTHNARDKDLHARKRRVLSHAFSDGAIKEVERYILANIRTFCEAIGDYGRVIHEKKGWSSPKNMSDWCNWLAMDILGDLCFGKAFHMLDRPDNRYAVDLVGVAAQRHLLCGTMPIINKLSLDKILFHRIAAGRARYMAYSRQQLAERTALGDETDRRDFFYHLLKARDPETGQGFTTPELWGESNLLIIAGSDTTSTAMAATLFYLVRHPDALAKVTAEIRSQFASLEDIHQGAQLNACVYLRACIDEAMRLSPSVGGLLPREVLKGGMTIDGEHIPAGIIVGTPHYAIHHNPAYYPDPFAYRPERWIVGSEKGDGVDVSDEAQVALAQSAFCPFSIGPRGCIGKGLAYVEMTLTLARVLFLYDLRKAVGVADPGEGKPGAGCGRDRVGEFQLVDIFTSLKDGPMVEFRRREL

SEQ ID NO: 804 - protein, 503 aa, Myceliophthora thermophilia
LVIYRLFFHPLAKYPGPFLAKLTDAYMLYYAWRGDRHLEFWRMHEKYGKFVRFGPNSLSINSNTALKDIYGFRANVRKAEFYDAFVHPAPNTHNARDKDLHARKRRVLSHAFSDGAIKEVERYILANIRTFCEAIGDYGRVIHEKKGWSSPKNMSDWCNWLAMDILGDLCFGKAFHMLDRPDNRYAVDLVGVAAQRHLLCGTMPIINKLSLDKILFHRIAAGRARYMAYSRQQLAERTALGDETDRRDFFYHLLKARDPETGQGFTTPELWGESNLLIIAGSDTTSTAMAATLFYLVRHPDALAKVTAEIRSQFASLEDIHQGAQLNACVYLRACIDEAMRLSPSVGGLLPREVLKGGMTIDGEHIPAGIIVGTPHYAIHHNPAYYPDPFAYRPERWIVGSEKGDGVDVSDEAQVALAQSAFCPFSIGPRGCIGKGLAYVEMTLTLARVLFLYDLRKAVGVADPGEGKPGAGCGRDRVGEFQLVDIFTSLKDGPMVEFRRREL

SEQ ID NO: 805 - DNA, 1602 bp, Myceliophthora thermophilia
atgacggtagcatctcagctcttcggcttccctagcctcacacttgctgcggccatcgagtttctggtggccatcaggctatttccagacttggtcagctcgcatggtcggctcacattggcggccggcgccatcttagtcaactatgccttcggactcgtcttttgggcatttctgtaccccaacttcttcagccctctacgccggatccgtggtcccagagctatagtgagcgccgcgtatcgggccctgatcgtgaaagaggggccttctggtaacctgtttcttgacctcgtcagacggtacccggacgaggacttgatcgccctcgactgcttcggccgtcagatcctggttgccaaacctcacctgttggccgacctactcgtccacaggtgctacgacttcgccaagcccaggaggatcagcgcctttctacggcgcgttctcggggatggcctaatcaccgtcgaggaggaccagcacaagttcatccgcaagaacaccatgcctgcgttccgcgcccgccacatcaccgacctgtaccccatgatgtggtccaaggccggtatcctagtcaggacactggaccgccagatcgccagcgcgtcgagcgccgagtccaagggctccggctccgccgtgctggagctgaccagctgggcgcacaaggtcaccctcgacatcatcggcgttgccggcatgggccgcgccctcaacgtggtcgagaagccgggcgacccgctccaggagctctacgaggagctcctcgagcccgaccgggagaagatcatcttcgccgccctctccctggccttcggcttcccggtcatccgcatgttcccctggaggatgaacaatctcttcatctacctgacctcctccctggaaaacatctgcagggacctgatcaaggagaagcgaaaggccatcgtcgagaacaaggacgaccactttgacattctgtctctcctgatcaagacgggcaactttgacgacgaggtcctcaaggaccagctcctcacattcctggctgccgggcacgagaccacggcgtccgccctcacctggtcgtcatacttgctggccaagcaccaagagtaccagaagaagctgcgggacgaggtgacggaggcgctgggggagaagccgctggcgggcgagccgccggacgacctggcgggcgtgctgaagcagctgcccgccctccgcgacacccggctcggcgatcaggcgatccccaagggcaccgaggtggtcgtctccatctggcaggtcaaccggtcggccgagatctggggccccgacgcggaccggttccggccggagcgctggatcaacgcggacgacggcaaggcgaaccgccacggcggcgccaggagcaactacgacttcctcaccttcctccagggcccccgcagctgcatcggccaggagttcgcaaaggccgagatgcgctgcctgctcgccgccctcgtcacctccttctcctgggacctggccatggacgagtccaagatcgtgccccgcggcgtcatcaccatcaagcccgagcacggcatgtacttaaggatgaggcccctgcaccacagcgcagcatga

SEQ ID NO: 806 - protein, 533 aa, Myceliophthora thermophilia
MTVASQLFGFPSLTLAAAIEFLVAIRLFPDLVSSHGRLTLAAGAILVNYAFGLVFWAFLYPNFFSPLRRIRGPRAIVSAAYRALIVKEGPSGNLFLDLVRRYPDEDLIALDCFGRQILVAKPHLLADLLVHRCYDFAKPRRISAFLRRVLGDGLITVEEDQHKFIRKNTMPAFRARHITDLYPMMWSKAGILVRTLDRQIASASSAESKGSGSAVLELTSWAHKVTLDIIGVAGMGRALNVVEKPGDPLQELYEELLEPDREKIIFAALSLAFGFPVIRMFPWRMNNLFIYLTSSLENICRDLIKEKRKAIVENKDDHFDILSLLIKTGNFDDEVLKDQLLTFLAAGHETTASALTWSSYLLAKHQEYQKKLRDEVTEALGEKPLAGEPPDDLAGVLKQLPALRDTRLGDQAIPKGTEVVVSIWQVNRSAEIWGPDADRFRPERWINADDGKANRHGGARSNYDFLTFLQGPRSCIGQEFAKAEMRCLLAALVTSFSWDLAMDESKIVPRGVITIKPEHGMYLRMRPLHHSAA

SEQ ID NO: 807 - protein, 517 aa, Myceliophthora thermophilia
AAIEFLVAIRLFPDLVSSHGRLTLAAGAILVNYAFGLVFWAFLYPNFFSPLRRIRGPRAIVSAAYRALIVKEGPSGNLFLDLVRRYPDEDLIALDCFGRQILVAKPHLLADLLVHRCYDFAKPRRISAFLRRVLGDGLITVEEDQHKFIRKNTMPAFRARHITDLYPMMWSKAGILVRTLDRQIASASSAESKGSGSAVLELTSWAHKVTLDIIGVAGMGRALNVVEKPGDPLQELYEELLEPDREKIIFAALSLAFGFPVIRMFPWRMNNLFIYLTSSLENICRDLIKEKRKAIVENKDDHFDILSLLIKTGNFDDEVLKDQLLTFLAAGHETTASALTWSSYLLAKHQEYQKKLRDEVTEALGEKPLAGEPPDDLAGVLKQLPALRDTRLGDQAIPKGTEVVVSIWQVNRSAEIWGPDADRFRPERWINADDGKANRHGGARSNYDFLTFLQGPRSCIGQEFAKAEMRCLLAALVTSFSWDLAMDESKIVPRGVITIKPEHGMYLRMRPLHHSAA

SEQ ID NO: 808 - DNA, 534 bp, Myceliophthora thermophilia
atggctcccatggcaatgcaactgtgtcccctgtctctgtcccaaccatgtggcgcaggtaccagaagcacgcccgctactggggggcccgacgccgccgagtggcggcccgagcggtggatcgcccggcgcgaccaggtgctcacggcggacggccagctgacgtgccacgcggggaatgataatacccggttcaacaacgccgccgtcgccgatgctggtgctggtgctggcgacggagacggcgacgggatcctgctgccgccgccgtcgcggggcgacttcctgggctggtccgggggcgcgcgcgactgccccggcaagcgcttctcgcacgtcgagtgggtggccttcctggccgccctgttccgggactggaaggtcgagccgcagctgcgcgacggcgagacgtttgccgaggcccgcacccgcctcctcgactttgtcgaggccgacacgggctacggcggcctgctgctccagctcttgcacccggagcgcgtgcccctcgtctggaagcccagggaaccctga

SEQ ID NO: 809 - protein, 177 aa, Myceliophthora thermophilia
MAPMAMQLCPLSLSQPCGAGTRSTPATGGPDAAEWRPERWIARRDQVLTADGQLTCHAGNDNTRFNNAAVADAGAGAGDGDGDGILLPPPSRGDFLGWSGGARDCPGKRFSHVEWVAFLAALFRDWKVEPQLRDGETFAEARTRLLDFVEADTGYGGLLLQLLHPERVPLVWKPREP

SEQ ID NO: 810 - protein, 158 aa, Myceliophthora thermophilia
GTRSTPATGGPDAAEWRPERWIARRDQVLTADGQLTCHAGNDNTRFNNAAVADAGAGAGDGDGDGILLPPPSRGDFLGWSGGARDCPGKRFSHVEWVAFLAALFRDWKVEPQLRDGETFAEARTRLLDFVEADTGYGGLLLQLLHPERVPLVWKPREP

SEQ ID NO: 811 - DNA, 1503 bp, Myceliophthora thermophilia
atgttcgtcatgttcttgagttccttgccgtctgtggtagggcctggagcggcacttgtaggagtgctgctgttcttcgtcgccgcgaggagcgtgtactatgccttcttccacccccttgccaaagtgcccggacccaagctctacgcgttctgggacctggctttcctgtaccacctcgtgcgcggcgagtggccgcacaagctgaagcagctgcacgacgagtatgggccggtggtgcggtacacgtccaagcacgtctccttcatcagccccggcgcgtggaagatcatatacggccaccggatggccggccaggagaccttccagaaggaccgcctttcttaccggccgaccatgtccggatacccgaacatcttgatcgccaacgatagcgaccaccggcggcatcggcgcctgctctcacacgccttctccgagaaggccctgcgcggccaggaagacatcatgatgcgctacgtcgacctcctgatggccaggctcgccgagaaggcccgcgccggcgaggtggtcgacatggtccggtggttcaacttcaccaccttcgacctgatcggcgacctcgccttcggccagccgttcggctgcctcagcagcggcgagtaccacgcgtgggtggccatgatcttcaaaaccgtcaaactgggcgccttcctcgaggtcatccgacgacatccggtcctgggcatcctcaagtcactcctggtcccgacggagttgacgcgcagccacgcggagcactgggcgctgagcgagcagacggccaagcggcggctggccggcgccgatatgagacgcgaggacttcgtgtcgcatatcctgcggcacaacgacgagaagggcatgagcgagggcgagataatcgagaacgccaacctgctcatcgtcgccgggagcgagacgacggcgacgcagctgagcggcaccaccttttaccttctcaccaaccgggacaagtacgacaaggtagtgagcgagatccgcggctccttcgagcgcgaggacgacatcacgctgctgtctgtcaacgagctcgagtacatgaacgccgtgctcaaagaagggttccgcgtttacccccctgctcccctggcgttgccgcgcagcacgccgcccgagggcgagtacattgaaggatactggatccccggaaatacaaccgtgtcaatcccccatttggcagcgtatcatagcgagaccaacttccgcaacgcagacaagttcgtcccggagcgctggctcggcgaccccgagtacgcccacgacgctcgcggcgttctgcagcccttctcagtcgggccgcggaactgcatcggcatgaatcttgcctacgccgagatgcgcctcatcctggcgcggctgctctggaactttgacctagagctcatgcccgagagcaggagctggaacgagcagaagatctattcgctctgggacaagggcgccattaacgtgaagctcactcctgtgccgagggagtaa

SEQ ID NO: 812 - protein, 500 aa, Myceliophthora thermophilia
MFVMFLSSLPSVVGPGAALVGVLLFFVAARSVYYAFFHPLAKVPGPKLYAFWDLAFLYHLVRGEWPHKLKQLHDEYGPVVRYTSKHVSFISPGAWKIIYGHRMAGQETFQKDRLSYRPTMSGYPNILIANDSDHRRHRRLLSHAFSEKALRGQEDIMMRYVDLLMARLAEKARAGEVVDMVRWFNFTTFDLIGDLAFGQPFGCLSSGEYHAWVAMIFKTVKLGAFLEVIRRHPVLGILKSLLVPTELTRSHAEHWALSEQTAKRRLAGADMRREDFVSHILRHNDEKGMSEGEIIENANLLIVAGSETTATQLSGTTFYLLTNRDKYDKVVSEIRGSFEREDDITLLSVNELEYMNAVLKEGFRVYPPAPLALPRSTPPEGEYIEGYWIPGNTTVSIPHLAAYHSETNFRNADKFVPERWLGDPEYAHDARGVLQPFSVGPRNCIGMNLAYAEMRLILARLLWNFDLELMPESRSWNEQKIYSLWDKGAINVKLTPVPRE

SEQ ID NO: 813 - protein, 469 aa, Myceliophthora thermophilia
VYYAFFHPLAKVPGPKLYAFWDLAFLYHLVRGEWPHKLKQLHDEYGPVVRYTSKHVSFISPGAWKIIYGHRMAGQETFQKDRLSYRPTMSGYPNILIANDSDHRRHRRLLSHAFSEKALRGQEDIMMRYVDLLMARLAEKARAGEVVDMVRWFNFTTFDLIGDLAFGQPFGCLSSGEYHAWVAMIFKTVKLGAFLEVIRRHPVLGILKSLLVPTELTRSHAEHWALSEQTAKRRLAGADMRREDFVSHILRHNDEKGMSEGEIIENANLLIVAGSETTATQLSGTTFYLLTNRDKYDKVVSEIRGSFEREDDITLLSVNELEYMNAVLKEGFRVYPPAPLALPRSTPPEGEYIEGYWIPGNTTVSIPHLAAYHSETNFRNADKFVPERWLGDPEYAHDARGVLQPFSVGPRNCIGMNLAYAEMRLILARLLWNFDLELMPESRSWNEQKIYSLWDKGAINVKLTPVPRE

SEQ ID NO: 814 - DNA, 1560 bp, Myceliophthora thermophilia
atggacattctaccacgaccaacctcagttgtggacatcttccgggacgtcctgtcgctgcgcggcctggcgaccctcgtcttgctgtgggttgtttaccggatcgccgtggcgctgtacaacatctcaccgttccacccgctttcgcgcttccccggccccaagatcgcagcggcgagttacctgtacgaagcctactacgactggatcctggtcggacggtacggcaaggtgatcaagcgcatgcatgacaaatatggccccatcgtgaggattaacccggacgagctccactgctccgacccgtacttcaccgaccagatctacgccgggccgggccggatccgcgacaagtggcaacaccagctcaacacgggcggcgccggtcccgtctcggtgacgggcttttcgacggtgccgcacgagctacaccggatgcgcaagggcgccatctcgcgcttcttctcgcgcaaccagatgctcaagctcgagggcgaggtcttggacatggctcagatggtggccgacaagatgctctcctgggccggcaaggggcccttcgacgtcaaggaggccttcaactgcttcaccgccgacgtcatctcgcagtacgccttcggcgagcccatgggcttcgtcgcccaggagggctgggagcccaactttgccacctgggtcaagtccttcctccggagcgcctacatgatgcgtcacaacgtcgtcgcccgcaagctggcccaggtgatgcccatcatggccgactacctcggcgaggacgtcaagacggtcatgcggcagatgaacgtcgtcatccccggctacatccgggccgccctcagcaacccggaaaagggccgcgtctttgccgagctggtccagtccgacctgctgcccgaggaggagaagaccatgtaccgtctctccggcgagggcttcaactttttgctcgccgggaccgagaccaccgcggccacgctcaccgtcatcacgtactacctcctctcccagccggagatgtacaagcgcctgatggaggacctcgagggcctggacccggccaagctcaagtggaccgagctggagcagcgaccgtacctgtgggccatcgtgcacgagtcgctgcgcgtcatgccgggcgtctcgcaccgctcggcccgcatcgcccgcgacgaggacctcgtctaccgcacccgcgacggcaagaaggagtgggtcatcccccgcggaaccccgatcggcatgacctccatgatcaaccactgggacccggagctcttcccggatccggacgagttcaagcccgagcgctggctcgtcgacggccagccgaaccacaagctgcagaagttcctcatcgcctttggcaagggaagccggtcctgcatcggcgagaacctggcgtactgcgaggtctacctcatggcagccatcatggccatccgcgtcctcccccgcgcgaagctgcacgagaccacggtggaggatatctcgtatgaccacgacatgatcgtcgttcagaccaagaaagggtccatctcggttcgcatcaagatcgagtga

SEQ ID NO: 815 - protein, 519 aa, Myceliophthora thermophilia
MDILPRPTSVVDIFRDVLSLRGLATLVLLWVVYRIAVALYNISPFHPLSRFPGPKIAAASYLYEAYYDWILVGRYGKVIKRMHDKYGPIVRINPDELHCSDPYFTDQIYAGPGRIRDKWQHQLNTGGAGPVSVTGFSTVPHELHRMRKGAISRFFSRNQMLKLEGEVLDMAQMVADKMLSWAGKGPFDVKEAFNCFTADVISQYAFGEPMGFVAQEGWEPNFATWVKSFLRSAYMMRHNVVARKLAQVMPIMADYLGEDVKTVMRQMNVVIPGYIRAALSNPEKGRVFAELVQSDLLPEEEKTMYRLSGEGFNFLLAGTETTAATLTVITYYLLSQPEMYKRLMEDLEGLDPAKLKWTELEQRPYLWAIVHESLRVMPGVSHRSARIARDEDLVYRTRDGKKEWVIPRGTPIGMTSMINHWDPELFPDPDEFKPERWLVDGQPNHKLQKFLIAFGKGSRSCIGENLAYCEVYLMAAIMAIRVLPRAKLHETTVEDISYDHDMIVVQTKKGSISVRIKIE

SEQ ID NO: 816 - protein, 481 aa, Myceliophthora thermophilia
LYNISPFHPLSRFPGPKIAAASYLYEAYYDWILVGRYGKVIKRMHDKYGPIVRINPDELHCSDPYFTDQIYAGPGRIRDKWQHQLNTGGAGPVSVTGFSTVPHELHRMRKGAISRFFSRNQMLKLEGEVLDMAQMVADKMLSWAGKGPFDVKEAFNCFTADVISQYAFGEPMGFVAQEGWEPNFATWVKSFLRSAYMMRHNVVARKLAQVMPIMADYLGEDVKTVMRQMNVVIPGYIRAALSNPEKGRVFAELVQSDLLPEEEKTMYRLSGEGFNFLLAGTETTAATLTVITYYLLSQPEMYKRLMEDLEGLDPAKLKWTELEQRPYLWAIVHESLRVMPGVSHRSARIARDEDLVYRTRDGKKEWVIPRGTPIGMTSMINHWDPELFPDPDEFKPERWLVDGQPNHKLQKFLIAFGKGSRSCIGENLAYCEVYLMAAIMAIRVLPRAKLHETTVEDISYDHDMIVVQTKKGSISVRIKIE

SEQ ID NO: 817 - DNA, 927 bp, Myceliophthora thermophilia
atgaccccaattcgcagtcctttgggcgtcgcatggcccgcagttgctgctctgagcgtagcaattgtttactttgtcgttcgcgtttctaccggcgtcatgaccttgtgcccccaaccgccgcacgacccaatctggggacacttgaagcttatcggggagtacgggaagaaggtcacgggcgactacatgcaagcaggacttcaacctccccgacatcttctacctggacatgtggccccgctggacccgagttcatcgtttgctccggtctcggacctgtataaaggggccaagcggctgaacgacatcagtggcccgaccaggccggtcctcagtccgatcacgagacgaatggacaaggaggtcgacaggaagacctgctcccgcttcgagaaactccaaacgcagaagagtcttcccaccagagcaagtgccagctgccttcttgacaggatgcttcttgaccaggtgcaggccggtctgcctctagacgaccgcctaatgaggctcgtccgagagaatgtcaaaggtttcatgattgccgggtatgggacgacaactgacacgacgaggtacatcctcatactgctctgggccttccctgaagccctgcgaaagctccgggaggaacatgaccgcgtttttgccaacgactttgacgaaacgctccggctcctgagggaagaaccgagccgggtcaacgatctgcattacaccaccgccgtcatcaacgagacgctccgcctgtaccccccggcatcatcatccgccagccgccccccgacatgtgagctcccccaacttacttactttacggtttccctggctccggcttcagccccagacccagcgccgaatcccaaccccaaccatcgacagtctaacccccccggcacgcacgcagccgcagagggagacccttaa

SEQ ID NO: 818 - protein, 308 aa, Myceliophthora thermophilia
MTPIRSPLGVAWPAVAALSVAIVYFVVRVSTGVMTLCPQPPHDPIWGHLKLIGEYGKKVTGDYMQAGLQPPRHLLPGHVAPLDPSSSFAPVSDLYKGAKRLNDISGPTRPVLSPITRRMDKEVDRKTCSRFEKLQTQKSLPTRASASCLLDRMLLDQVQAGLPLDDRLMRLVRENVKGFMIAGYGTTTDTTRYILILLWAFPEALRKLREEHDRVFANDFDETLRLLREEPSRVNDLHYTTAVINETLRLYPPASSSASRPPTCELPQLTYFTVSLAPASAPDPAPNPNPNHRQSNPPGTHAAAEGDP

SEQ ID NO: 819 - protein, 277 aa, Myceliophthora thermophilia
GVMTLCPQPPHDPIWGHLKLIGEYGKKVTGDYMQAGLQPPRHLLPGHVAPLDPSSSFAPVSDLYKGAKRLNDISGPTRPVLSPITRRMDKEVDRKTCSRFEKLQTQKSLPTRASASCLLDRMLLDQVQAGLPLDDRLMRLVRENVKGFMIAGYGTTTDTTRYILILLWAFPEALRKLREEHDRVFANDFDETLRLLREEPSRVNDLHYTTAVINETLRLYPPASSSASRPPTCELPQLTYFTVSLAPASAPDPAPNPNPNHRQSNPPGTHAAAEGDP

SEQ ID NO: 820 - DNA, 1548 bp, Myceliophthora thermophilia
atggcgctttcaaagctcagcgtgggccaggctctggcccttggcttcgcatctctcatcctctacgttgtctcccacgtcctctacaacctcttcctgcaccccctccgccggtacccgggcccgctgctgatgcgcgccacccgctggggctacgccctgcggcacatggcgggcaccctgcccttcgacatgctcgcgctgcacaagcgctacggccccgtggtgcgcgtggcgcccaacgagctggccttctcggacccgcgcgcgtggcgcgacatcatggggcaccgcagcggcggcggcggcggcggtggtggtagcggtggtggtggagggggctcgatgatcgtcgaaggtggggaggagatgctcaagtacgaccggttctacaggccggtggagggcgtgacgaccgacatcgtcaacgccgggcgcgaggagcacgcgctgctgcgccgcagcatggctcacggtttcagcgaccgcagcatgcgcgagcagcagccgctcatccagggctacgtcgacctgctgatcaggcggctgcgggagaagagcgagggaggcagcaaggccgtcgaccttgcggcgtggtataactacactaccttcgacgtgattggtgatctggcgtttggtgagagtttcgggtgtctcgacagctccgactaccacccctgggtcaaagcgattttcgaggtcgctcgcgcaggaaccgtctttcagagtctggcacattaccctgcgattatcaagttggtgctggccctcatcccctcgcggttcaaggaggagcgcgagaagcacatgcggatgaccatggaaaagctgaaaaggcggatgcaagcgggaaaggagaggccggacttggtcgagggtctgctcaagagggctgacgaatgggggctcaccctcgagaaactccaagcgaacagtgccattctgatcatcggcgggtccgagacgacggcgaccttgctctcgggcgtgacgtacctcctcttgacgaatcgtcaggccatggagaagctcactgccgagatccgcggaagcttcaagtccgaagacgagatcaacttcaccagtgtcagcactctcccctatctcctggcctgcctggacgaggcactgcggatgtacccccccgtcccaacaggtttgccacgcgtcgtgcccaaggggggtgcgaacattgctggcaactacgtgcccgagaagaccgtagtggcagttcaccaatgggccatgtaccacaacgacgaccacttcaaggatccctttgtgtaccacccggagcggtggcttggcgacccggcttttgcgggcgaccggaaggacgcattccagccgtttcaccttggcccacgcaactgcctcggcaagaatcttgcctacatcgagatgcgtctcattctgacccggatgttatggaactttgacctgcggattgccgaagacagcctggactggatgagcaaacagcggatctacaatctgtgggagaaaggaaagctgaacgtatacctaacgccagtggccaggtag

SEQ ID NO: 821 - protein, 515 aa, Myceliophthora thermophilia
MALSKLSVGQALALGFASLILYVVSHVLYNLFLHPLRRYPGPLLMRATRWGYALRHMAGTLPFDMLALHKRYGPVVRVAPNELAFSDPRAWRDIMGHRSGGGGGGGGSGGGGGGSMIVEGGEEMLKYDRFYRPVEGVTTDIVNAGREEHALLRRSMAHGFSDRSMREQQPLIQGYVDLLIRRLREKSEGGSKAVDLAAWYNYTTFDVIGDLAFGESFGCLDSSDYHPWVKAIFEVARAGTVFQSLAHYPAIIKLVLALIPSRFKEEREKHMRMTMEKLKRRMQAGKERPDLVEGLLKRADEWGLTLEKLQANSAILIIGGSETTATLLSGVTYLLLTNRQAMEKLTAEIRGSFKSEDEINFTSVSTLPYLLACLDEALRMYPPVPTGLPRVVPKGGANIAGNYVPEKTVVAVHQWAMYHNDDHFKDPFVYHPERWLGDPAFAGDRKDAFQPFHLGPRNCLGKNLAYIEMRLILTRMLWNFDLRIAEDSLDWMSKQRIYNLWEKGKLNVYLTPVAR

SEQ ID NO: 822 - protein, 490 aa, Myceliophthora thermophilia
HVLYNLFLHPLRRYPGPLLMRATRWGYALRHMAGTLPFDMLALHKRYGPVVRVAPNELAFSDPRAWRDIMGHRSGGGGGGGGSGGGGGGSMIVEGGEEMLKYDRFYRPVEGVTTDIVNAGREEHALLRRSMAHGFSDRSMREQQPLIQGYVDLLIRRLREKSEGGSKAVDLAAWYNYTTFDVIGDLAFGESFGCLDSSDYHPWVKAIFEVARAGTVFQSLAHYPAIIKLVLALIPSRFKEEREKHMRMTMEKLKRRMQAGKERPDLVEGLLKRADEWGLTLEKLQANSAILIIGGSETTATLLSGVTYLLLTNRQAMEKLTAEIRGSFKSEDEINFTSVSTLPYLLACLDEALRMYPPVPTGLPRVVPKGGANIAGNYVPEKTVVAVHQWAMYHNDDHFKDPFVYHPERWLGDPAFAGDRKDAFQPFHLGPRNCLGKNLAYIEMRLILTRMLWNFDLRIAEDSLDWMSKQRIYNLWEKGKLNVYLTPVAR

SEQ ID NO: 823 - DNA, 1704 bp, Myceliophthora thermophilia
atggcggtagccaacctcgtcgaacttagccgcgaccggagcgccggcggctggctgctcgccctcggcgcggttgctgcgacctactacgtgatatcgtccatcgtggcatggtggcgtctccgcgagttcaaaggacccttcctggcctccttctcgtacatgtggctgggctggatatcctacagcggccgcatgagcgagtacatggcgaaggcggaggccaagtacggcggtctgccgccgtcgacgatacgcatcggccccaacgagctgctaacgagcgacccggacgtcatccggcgctcgtccggggcgcggtccagatacacgaggtcgaactggtacaaggcggccaccctggacccgtacgaccccgccatgctcagcacgctcgacacggccgcgcacgacaggctcaaggcccagacggcgcccgggtacgcgggcaaggagaacgcgacgctcgagcccgacttggacgcgatgctgggccagatgacggacaagatccggaccaagtacgccgccgcaaccccgggcgacgtgaagcctatgctggacctggccatgatggtgcagtacttcaccctcgactccatctccaagctcgctttcggagaagagttcggcttcctccgggcagagggcgacattcacgggtacctcgagacggtcgaatccttggcgcccaccaccgtcaccatcttggccctccccttcctccgggacatcctaacctccaagttcatgctgagtttgctcgggcctacgcccaaggacaagagagggatgggcgttttcatgcggtgcgttgtcttccgtccctcgctgggtcccggtacctggagcgccttggggcccaagttcatgattaggcgtggtgtggctgactgtcgaatcaccaaatggaccaggatcggaaggtctatcgtcgacaaacgcttcgctcgcgaggaccccggagccatccaggacatgttgggctccttcatccgccacggcctgacacggcgacaatgcgagacggagtcactcgtccagattgttgcagggtccgacacgacggccacggcgatccgtaccggcctgctctacctcatgaccaatccgcgcgcctatcgcgctctgcaggccgagatcgacgagggcatccgggacggacgtatctcgagccccatcaccagcgccgaggccgccaagttgccctatttgcaggccgtaatctacgagactctccgcatccacccgcccctcacggccacgcccttcaaggtggtcccgcccgagggcgacacgatcgacggcaagcgggtgccggggggcacgctggtggcgcccgacttctggacgacgtcgcgcaaccgggcgctgttcgggcccgacgtggacgtgttccgcccggagcgctggctgctcgcacccgagcgtggaggcggcggcggcggcggaggtgcggaccgggccgagatgcggcgcgtcgccgagatggcgttcggctacggaaggtggatgtgcgcgggcaagatgatcgccttcctcgagctgaacaaggtctttgtcgagctgctacgccggttcgatttccagttggtatatccctctcggccgtggaagtgcgtcaactacaacctgttccttcagcgggagatgtgggtgtcggtatctctgcgagaggaaccgaagccgctagagaagaattaa

SEQ ID NO: 824 - protein, 567 aa, Myceliophthora thermophilia
MAVANLVELSRDRSAGGWLLALGAVAATYYVISSIVAWWRLREFKGPFLASFSYMWLGWISYSGRMSEYMAKAEAKYGGLPPSTIRIGPNELLTSDPDVIRRSSGARSRYTRSNWYKAATLDPYDPAMLSTLDTAAHDRLKAQTAPGYAGKENATLEPDLDAMLGQMTDKIRTKYAAATPGDVKPMLDLAMMVQYFTLDSISKLAFGEEFGFLRAEGDIHGYLETVESLAPTTVTILALPFLRDILTSKFMLSLLGPTPKDKRGMGVFMRCVVFRPSLGPGTWSALGPKFMIRRGVADCRITKWTRIGRSIVDKRFAREDPGAIQDMLGSFIRHGLTRRQCETESLVQIVAGSDTTATAIRTGLLYLMTNPRAYRALQAEIDEGIRDGRISSPITSAEAAKLPYLQAVIYETLRIHPPLTATPFKVVPPEGDTIDGKRVPGGTLVAPDFWTTSRNRALFGPDVDVFRPERWLLAPERGGGGGGGGADRAEMRRVAEMAFGYGRWMCAGKMIAFLELNKVFVELLRRFDFQLVYPSRPWKCVNYNLFLQREMWVSVSLREEPKPLEKN

SEQ ID NO: 825 - protein, 540 aa, Myceliophthora thermophilia
TYYVISSIVAWWRLREFKGPFLASFSYMWLGWISYSGRMSEYMAKAEAKYGGLPPSTIRIGPNELLTSDPDVIRRSSGARSRYTRSNWYKAATLDPYDPAMLSTLDTAAHDRLKAQTAPGYAGKENATLEPDLDAMLGQMTDKIRTKYAAATPGDVKPMLDLAMMVQYFTLDSISKLAFGEEFGFLRAEGDIHGYLETVESLAPTTVTILALPFLRDILTSKFMLSLLGPTPKDKRGMGVFMRCVVFRPSLGPGTWSALGPKFMIRRGVADCRITKWTRIGRSIVDKRFAREDPGAIQDMLGSFIRHGLTRRQCETESLVQIVAGSDTTATAIRTGLLYLMTNPRAYRALQAEIDEGIRDGRISSPITSAEAAKLPYLQAVIYETLRIHPPLTATPFKVVPPEGDTIDGKRVPGGTLVAPDFWTTSRNRALFGPDVDVFRPERWLLAPERGGGGGGGGADRAEMRRVAEMAFGYGRWMCAGKMIAFLELNKVFVELLRRFDFQLVYPSRPWKCVNYNLFLQREMWVSVSLREEPKPLEKN

SEQ ID NO: 826 - DNA, 1617 bp, Myceliophthora thermophilia
atgataacagaccagatagcacgtgtcctcagccagcactggccttccatcctagtcaccgtcgtcgtcgcctggctggtgaggaacaggtaccacaatgggttgaacaagtatccagggccgttcctggcctccttgacggactggtggaggttctttgatgtgtacgggcgccggccggagaggtcgcacattgcgctccataagaaatacggcccggtcgtccgtctcggaccaaacgctctgtcgttttccgacccagaggcgctcaagacgatttacggtctcaacaagggcttcatcaagtccgacttctatgtcgtccagcagtcggtggtcaaaggccacagcctgccgtcgctctttagcaccaccgataatgacttccacatgcagttccgccgctgcgtcaactcggcctttgccatgtccgccctggtgcagtacgagccgtttgttgacaacacgaccaagctgttcctcaagcagaccgagcgcttgtacatcgacaagtcggagccctgcgactttacccgctggctgcagttttacgctttcgatgtcattggcgagatcacgtatagcaaacggcacggcttcattgagaggaacgaagatgtcgacggcatcgtggcctatctgaccaaactgttcctctacgtggcccccgttggccaaatccctatcctggaccgcttcttcctcaagaaccccatctacctcaagctttccgaatggggcatcctcgacgccaccttccccgtggccaagttcgcccgcgcccgcatggccgaacggctgcccgagctcgaaaagggcgagcccgtcctgcccacttcggagaagccgacggtcaagtcgccggacctcctctccaagttcctggccgcgcgcgaggcccgtccggacttcatgacggacacgctggtgcagaccatggcggtgagcatggcgtttgccggctccgagacgacggccatctcgctctcggccgtcttctacttcctcctcaagaacccgcccgcgctggagcgcctgcgccgcgagatcgacgacgccgcccgcgagggccgcttcagcgactacgagaccggcctcgtcacctggcaggagagccagaccctgccctacctcgacatgtgcatcaaggaggccttccggctgcaccccgccccgggcctgcccatggagcgcgtcgtgccccccggcggcatcgagatcgccggccggaggatcgagggcggcaccatcgtcggctgctccgcctgggtcatccaccgggacccggccatcttcggcgacgacgtggacgcgtaccggcccgagcggtgggaggtcaagggggaaggcgacgaggccagggtcaaggtcatgaacgggaccatgctgcagttcggcatgggcagccgcacgtgcatcgggaagaacattagcctgttggagatttacaagctggtcccgaccatgttgcgacgctttgagattcgcttcgacgatcccaactcggagtgggagattgtcaatgcctggtttgtcaagcagaaaaacttcatcacgcggttcagcctgcgggatatcgtcatgcccgagaagggggtcaaggctgcggagaagtag

SEQ ID NO: 827 - protein, 538 aa, Myceliophthora thermophilia
MITDQIARVLSQHWPSILVTVVVAWLVRNRYHNGLNKYPGPFLASLTDWWRFFDVYGRRPERSHIALHKKYGPVVRLGPNALSFSDPEALKTIYGLNKGFIKSDFYVVQQSVVKGHSLPSLFSTTDNDFHMQFRRCVNSAFAMSALVQYEPFVDNTTKLFLKQTERLYIDKSEPCDFTRWLQFYAFDVIGEITYSKRHGFIERNEDVDGIVAYLTKLFLYVAPVGQIPILDRFFLKNPIYLKLSEWGILDATFPVAKFARARMAERLPELEKGEPVLPTSEKPTVKSPDLLSKFLAAREARPDFMTDTLVQTMAVSMAFAGSETTAISLSAVFYFLLKNPPALERLRREIDDAAREGRFSDYETGLVTWQESQTLPYLDMCIKEAFRLHPAPGLPMERVVPPGGIEIAGRRIEGGTIVGCSAWVIHRDPAIFGDDVDAYRPERWEVKGEGDEARVKVMNGTMLQFGMGSRTCIGKNISLLEIYKLVPTMLRRFEIRFDDPNSEWEIVNAWFVKQKNFITRFSLRDIVMPEKGVKAAEK

SEQ ID NO: 828 - protein, 514 aa, Myceliophthora thermophilia
WLVRNRYHNGLNKYPGPFLASLTDWWRFFDVYGRRPERSHIALHKKYGPVVRLGPNALSFSDPEALKTIYGLNKGFIKSDFYVVQQSVVKGHSLPSLFSTTDNDFHMQFRRCVNSAFAMSALVQYEPFVDNTTKLFLKQTERLYIDKSEPCDFTRWLQFYAFDVIGEITYSKRHGFIERNEDVDGIVAYLTKLFLYVAPVGQIPILDRFFLKNPIYLKLSEWGILDATFPVAKFARARMAERLPELEKGEPVLPTSEKPTVKSPDLLSKFLAAREARPDFMTDTLVQTMAVSMAFAGSETTAISLSAVFYFLLKNPPALERLRREIDDAAREGRFSDYETGLVTWQESQTLPYLDMCIKEAFRLHPAPGLPMERVVPPGGIEIAGRRIEGGTIVGCSAWVIHRDPAIFGDDVDAYRPERWEVKGEGDEARVKVMNGTMLQFGMGSRTCIGKNISLLEIYKLVPTMLRRFEIRFDDPNSEWEIVNAWFVKQKNFITRFSLRDIVMPEKGVKAAEK

SEQ ID NO: 829 - DNA, 1476 bp, Myceliophthora thermophilia
atggatgcgctcctgttcacctggcccgccattgcggtgcagcttctgatcgctgccctcagcatcttggcatggcgtcgctacctctcaccactcgctgacatacccggccccttcctcgcctccttcagccgctggtggcacatccgccgcatcctggttggtgaccagaacgtccaactcgttcggttacacgagaagcacggccactttgtgcgcattgcccagaatgagatcagcgtcagtcatccggacggcatcaagcagattctgctccagccgctgtggaaggccaaatggtatgagctgctgcagctgcccgactaccggtacaagccgccaatggcgacgctcgaccccaagaagaaggtcgagaagtcgagaaacctggcgcccggctacgcactctccaacgtgatcaagtcggaagacgccatcagccgcaccatcgagatgctgctcgactggatggacaagtgcgccgagaagcgcgagcccatgcacatcgacaagttcttcacctacacggcctttgacatcgtgggtgaggtcgtcttctccaagcagttcggcttcctgcgggaaggcatcgacatcggcaactcgatcgccaactcgctcgcgctgaacgcctacgccgccgtcggtggtttcttccagccgttgaacctgatcgtcgccaaccccttcgtcacctggctgcaggtcatgcccatgggccacctcttcaacaccaccatgaaggccatcaacgagcgcgagcgcaaccaggacgcccggttcgacctcatcgcccactggttcaagatgctggagcagcacccggagcgcatgacgctgcgcgacatccacgcccaggccaccaccagcgtcggcgccggcgccgacacggtgtcgtgcgccctgcagtccttcatctaccacatgatacgccacccgaccgcctgggcccgcgcgcgcgacgagatcgacaccgcccgccgcgagcgcggcctctgcaccgaccgcgtcgtctccttcgaccacgcccagcagctgccctacctgcagtcctgcatcaaggaggccatgcgcgtcttcggacccgtcccaatgggcctgcctcgcgtcgtccccaagggcggcctcaccatcggcaaccgaaccttccccgccggcaccgtcctgtccatcaacccctgggtcatgcaccactccaaggagatctggggccccgatgcccacgagttcaatcccgaccgctggctgagcgactccatcgcctccaaggagaagtactggattccgttcggcgcaggatacaactcgtgccccggccaaaatatcgccaagatggagatatccaagatcctcgccaccattgttcgcgactacgacatccgccaggtcgacaagaaccaggagtggaagtacaaggcctatttcaccgtcgtgccccattcttggccttgctacatcgacaagcggcgagactaa

SEQ ID NO: 830 - protein, 491 aa, Myceliophthora thermophilia
MDALLFTWPAIAVQLLIAALSILAWRRYLSPLADIPGPFLASFSRWWHIRRILVGDQNVQLVRLHEKHGHFVRIAQNEISVSHPDGIKQILLQPLWKAKWYELLQLPDYRYKPPMATLDPKKKVEKSRNLAPGYALSNVIKSEDAISRTIEMLLDWMDKCAEKREPMHIDKFFTYTAFDIVGEVVFSKQFGFLREGIDIGNSIANSLALNAYAAVGGFFQPLNLIVANPFVTWLQVMPMGHLFNTTMKAINERERNQDARFDLIAHWFKMLEQHPERMTLRDIHAQATTSVGAGADTVSCALQSFIYHMIRHPTAWARARDEIDTARRERGLCTDRVVSFDHAQQLPYLQSCIKEAMRVFGPVPMGLPRVVPKGGLTIGNRTFPAGTVLSINPWVMHHSKEIWGPDAHEFNPDRWLSDSIASKEKYWIPFGAGYNSCPGQNIAKMEISKILATIVRDYDIRQVDKNQEWKYKAYFTVVPHSWPCYIDKRRD

SEQ ID NO: 831 - protein, 467 aa, Myceliophthora thermophilia
WRRYLSPLADIPGPFLASFSRWWHIRRILVGDQNVQLVRLHEKHGHFVRIAQNEISVSHPDGIKQILLQPLWKAKWYELLQLPDYRYKPPMATLDPKKKVEKSRNLAPGYALSNVIKSEDAISRTIEMLLDWMDKCAEKREPMHIDKFFTYTAFDIVGEVVFSKQFGFLREGIDIGNSIANSLALNAYAAVGGFFQPLNLIVANPFVTWLQVMPMGHLFNTTMKAINERERNQDARFDLIAHWFKMLEQHPERMTLRDIHAQATTSVGAGADTVSCALQSFIYHMIRHPTAWARARDEIDTARRERGLCTDRVVSFDHAQQLPYLQSCIKEAMRVFGPVPMGLPRVVPKGGLTIGNRTFPAGTVLSINPWVMHHSKEIWGPDAHEFNPDRWLSDSIASKEKYWIPFGAGYNSCPGQNIAKMEISKILATIVRDYDIRQVDKNQEWKYKAYFTVVPHSWPCYIDKRRD

SEQ ID NO: 832 - DNA, 1230 bp, Myceliophthora thermophilia
atgcgtcccttcttcatgctggcgctgacggcgctggccgcagtggccaacgcggctgctctcccccagacccagacacagaaagagcccggtctcggcaccgactacgatgccatcattgtcggcggcggccctgccggactgagcgcggccagcggcttggcgcgggtgcgcaggaatgtcctgctgatcgactcgggcgagtaccgcaacgcgccgacgaggcacatgcacgatgtgccggggttcgacggcgtcacgcccgcctacttccgctgggcggcccgccagcagatctcttactataagaccgtcaccatggtcaacggcaccgtgttcaagatccagcccggtaacgagaagaacacgtactttgtcgtgtcgagtcgcgagcccggagccgagggtggcgaagaggtgaaggagcgcaccgcccgcaaggtcgtgctggccacgggcctgcgcgacctcctcccggagacgcccggcgtgcgcgagaactggggcaagggcatcttctggtgcccctggtgcgacgggcacgagcacgccgaccagacgctgggcctgctcggtagcctcgacaacgtgccggcggccgtgcgcgagatgttgacgctcaatcgggacatcatcgccttcgtcaacggcaccgacacccccgaggtgcgcgcggtcaccgagaagaagctcgcccgctgggagacgtacctgcagctgcacaacgtccgcctcgacaaccggaccatctcggccatcgtccgcctccaaaacggcaccgacggttccgaggaccccagcctgcctacggcccccgagcacgacttcttccgcgtcgatttcaccaacggcgagcccgaataccgtgccgccttcctggccgccttcccctccgagcagacctccagcgtcggcgaggacctcggcgtccagctgcttggcggccgcctgttcgccaaccagagcgccggcctcgtcaccaacatccccggcgtctacgccgtcggcgacgccaactcggacaacaccaccaacgtgccccacgccctgttctccgggaagcgcaccgcagtcttcctgcatgtcgcgatcgcacgagaggatgctgagagggaactgaacgagaccgaggtgtccaagagagacctcgagcccgttgcgcggtcgctgtgggacaccgtcaacggcccccctggtgacattctctacgctggcgaatttgatcagtaa

SEQ ID NO: 833 - protein, 409 aa, Myceliophthora thermophilia
MRPFFMLALTALAAVANAAALPQTQTQKEPGLGTDYDAIIVGGGPAGLSAASGLARVRRNVLLIDSGEYRNAPTRHMHDVPGFDGVTPAYFRWAARQQISYYKTVTMVNGTVFKIQPGNEKNTYFVVSSREPGAEGGEEVKERTARKVVLATGLRDLLPETPGVRENWGKGIFWCPWCDGHEHADQTLGLLGSLDNVPAAVREMLTLNRDIIAFVNGTDTPEVRAVTEKKLARWETYLQLHNVRLDNRTISAIVRLQNGTDGSEDPSLPTAPEHDFFRVDFTNGEPEYRAAFLAAFPSEQTSSVGEDLGVQLLGGRLFANQSAGLVTNIPGVYAVGDANSDNTTNVPHALFSGKRTAVFLHVAIAREDAERELNETEVSKRDLEPVARSLWDTVNGPPGDILYAGEFDQ

SEQ ID NO: 834 - protein, 391 aa, Myceliophthora thermophilia
AALPQTQTQKEPGLGTDYDAIIVGGGPAGLSAASGLARVRRNVLLIDSGEYRNAPTRHMHDVPGFDGVTPAYFRWAARQQISYYKTVTMVNGTVFKIQPGNEKNTYFVVSSREPGAEGGEEVKERTARKVVLATGLRDLLPETPGVRENWGKGIFWCPWCDGHEHADQTLGLLGSLDNVPAAVREMLTLNRDIIAFVNGTDTPEVRAVTEKKLARWETYLQLHNVRLDNRTISAIVRLQNGTDGSEDPSLPTAPEHDFFRVDFTNGEPEYRAAFLAAFPSEQTSSVGEDLGVQLLGGRLFANQSAGLVTNIPGVYAVGDANSDNTTNVPHALFSGKRTAVFLHVAIAREDAERELNETEVSKRDLEPVARSLWDTVNGPPGDILYAGEFDQ

SEQ ID NO: 835 - DNA, 1641 bp, Myceliophthora thermophilia
atggtgctcgttcgattcgtcagggctcgaccatgtgcgccctcgagacgagcgctcagcgcttcgtcgtttaggcccttgctcggcggcggcgcactcacctcacggagcctgtcgacggctccgtctactactccgtgcacccgcgatggacggcccttccggcttgctatcatcggctccgggccggccgggtttctacacccgcctacaggggccatgtccagaatccaaggcaccaaggtcgacatgtacgaggcgctgcccgttccctttggcttggtcaggttcggcgttgccccggaccaccccgaagtgaagaattgtcaggagaagttcgaggaggtggcttcctctcccgactttaccttcatcggaaacgtctcagtcggcaccaagagcgaccacccagacggcgccaccgttccgctggcaagcatcctccgtcactacaatgccgtcgtcttctcgtacggcgctgccaaggacaggacgctcggggtgcccggagaggacctcaagggcgtctactcggcccgcgagttcgttggctggtacaacggcctcccggagcacgccgacctcggcccagacctcacccggggtgacgaggctgtcattatcgggcagggaaacgtggccttggacgtggcccgcatgctcctcgaggacgtcgacgtcctccgcaagtccgacatcgcagagcacgccatcgagacgctgtccaggagcaagatccggcgcgtgcacatcgtcggccgccggggccccatgcaggccgccttcaccatcaaggagatccgcgagctgatgcgtctcccctcggtcgccttccaccctatcgacacctccctcgtacccccggacctcaagtccctgccgcgcgccccccgccggctcatggaggtcctcctcaagggctcccccaccccaccctccagcaccaccgcctcgaaccagaagtcctggtccctcgatttccttctctcccctgccgccttcctcccctcgcccaccgacccagcccgtctcgctgccacgaaattcacccgcaccaccctctccccgtccgcctttgaccccaacgcctacgccctcccgtcctacccgccatcgccgccggccacgctcccctccgcgatcgccttccgctccatcggctaccgctccaccccgctgcccgagttcgccccgctcggaatccccttcaacgaccgctggggcgtcatcagcaacgacggccgcggccgcgtccggcacgaggagcgcggccgggacgccgccatggagatgggcaccttcccgggcctctactgcgccggctgggtcaagcggggccccaccggcgtcatcgcgtccaccatggaggacgccttctcgaccgccgacgccctcgccgaggactggctggcccccggcggccgcgtgcccttcctcaacgacgaccggcccggcggcgccgtcgacctcggcggctgggacgccgtcaaggccgaggtgccacccgacactgtcgccagggtcgtccactgggacgggtggaggaagatcgacgccgccgaacgggagaggggcaagaaggtgggcaaggagagggagaagtttacgaggacgcgggacatgctcgccgtgctggcatga

SEQ ID NO: 836 - protein, 546 aa, Myceliophthora thermophilia
MVLVRFVRARPCAPSRRALSASSFRPLLGGGALTSRSLSTAPSTTPCTRDGRPFRLAIIGSGPAGFLHPPTGAMSRIQGTKVDMYEALPVPFGLVRFGVAPDHPEVKNCQEKFEEVASSPDFTFIGNVSVGTKSDHPDGATVPLASILRHYNAVVFSYGAAKDRTLGVPGEDLKGVYSAREFVGWYNGLPEHADLGPDLTRGDEAVIIGQGNVALDVARMLLEDVDVLRKSDIAEHAIETLSRSKIRRVHIVGRRGPMQAAFTIKEIRELMRLPSVAFHPIDTSLVPPDLKSLPRAPRRLMEVLLKGSPTPPSSTTASNQKSWSLDFLLSPAAFLPSPTDPARLAATKFTRTTLSPSAFDPNAYALPSYPPSPPATLPSAIAFRSIGYRSTPLPEFAPLGIPFNDRWGVISNDGRGRVRHEERGRDAAMEMGTFPGLYCAGWVKRGPTGVIASTMEDAFSTADALAEDWLAPGGRVPFLNDDRPGGAVDLGGWDAVKAEVPPDTVARVVHWDGWRKIDAAERERGKKVGKEREKFTRTRDMLAVLA

SEQ ID NO: 837 - protein, 507 aa, Myceliophthora thermophilia
TAPSTTPCTRDGRPFRLAIIGSGPAGFLHPPTGAMSRIQGTKVDMYEALPVPFGLVRFGVAPDHPEVKNCQEKFEEVASSPDFTFIGNVSVGTKSDHPDGATVPLASILRHYNAVVFSYGAAKDRTLGVPGEDLKGVYSAREFVGWYNGLPEHADLGPDLTRGDEAVIIGQGNVALDVARMLLEDVDVLRKSDIAEHAIETLSRSKIRRVHIVGRRGPMQAAFTIKEIRELMRLPSVAFHPIDTSLVPPDLKSLPRAPRRLMEVLLKGSPTPPSSTTASNQKSWSLDFLLSPAAFLPSPTDPARLAATKFTRTTLSPSAFDPNAYALPSYPPSPPATLPSAIAFRSIGYRSTPLPEFAPLGIPFNDRWGVISNDGRGRVRHEERGRDAAMEMGTFPGLYCAGWVKRGPTGVIASTMEDAFSTADALAEDWLAPGGRVPFLNDDRPGGAVDLGGWDAVKAEVPPDTVARVVHWDGWRKIDAAERERGKKVGKEREKFTRTRDMLAVLA

SEQ ID NO: 838 - DNA, 1806 bp, Myceliophthora thermophilia
atggcaacaagcgttatcgttgttggcggcggcctttccggcctcagcgctgcccacaccatctatctcgccggtggtaacgtcacagtccttgacaagcagggcttcttcggcggcaactcgacgaaggctacctccggcatcaacggtgccctcactaggacacagattgagctcggcatccaggacagcgtgaagcagttttacgacgacacgctcaagtctgcccgcgacaaggcgaggcccgagctcatcaaggtccttacctacaagtcggccgccgccgttgagtggctgcaggacgtgttcaaccttgatctcacactcgtctctcgcttgggtggccattctcaaccccgcacccaccgtgggcacgacgccaagttccctggcatggccatcacttacgccctgatgcagaggctcgaggagctcgccgagactgagcctcaccgcgttaagatcatcaagaaggctcgcgtcaccagcctcaacaaggaaggaaacaccatcaccggtgtccagtacgaacacgatggacagactaagacccttaacgggcccgtcgtcctcgccactggcggctatgctgccgatttcggcgaaggctctcttctgaagaagcaccggcctgacacctacgggctggccaccaccaacggctcccacgccaccggtgacggccagaagatggtcatggccattggtggcaacggcatcgacatggacaaggttcaggtccaccctactggtctcgttgaccccaaggaccccggctccaagtggaaattcctggctgctgaggccctccgtggtgagggcggtatcctcctgaacgccgacggcgaccgcttctgcgacgaactcggccaccgtgactacgtctcgggtatgatgtggaaggagaaggacaagggcaaggttctggacttccacacccgccactattccggccgcggcctcatgaagaagatgaccggtagggagctcgccaaggagattggctgcacccccgagcacctgcagcaaaccttccagacctacaacgccatcgccgagggcaagcagaaggacccttggggcaagcgcttcttccacaacatgcctctggatatcaatgatgacttccatgtcgccttgatggagcccgtccttcacttcaccatgggtggtattgagatcaacgagaaagcccaagttctcaacaaggagaagaagcccttcgaaggtctcttcgcttgcggtgagcttgccggcggtgtccacggcgccaaccgtctcggtggctcgtctctgctgggctgcgttgtctatggccgtgtcgctggtgactccgcgagcaactacctcttccagcaggcgctcaagggctccgctggtgccgcccgccttggccagattgccctgcacatcgatccctcgacaccgggcaagatctctgttgagtgggccggtgccggcggcaacgaggcccccagggcgcaggccgtgccggcaagcgcccctgcggcgaagaaggagactgaggaaaagccgttttccatcccagacaaggagttcaccatggaggaggtcgccaagcacaacaagaaggacgacctctgggttgttgtcaagggcgtcgtccttgacctcaccaactggctcgatgaccacccgggtggccctcaggcccttctcaacttcatgggccgcgacgccactgaggagtttgagatgctccacgacgatgaggtcatccccaagtatgccccctcgcaggttatcgggcgggtcaagggccaggaggtcacccttaaggtctag

SEQ ID NO: 839 - protein, 601 aa, Myceliophthora thermophilia
MATSVIVVGGGLSGLSAAHTIYLAGGNVTVLDKQGFFGGNSTKATSGINGALTRTQIELGIQDSVKQFYDDTLKSARDKARPELIKVLTYKSAAAVEWLQDVFNLDLTLVSRLGGHSQPRTHRGHDAKFPGMAITYALMQRLEELAETEPHRVKIIKKARVTSLNKEGNTITGVQYEHDGQTKTLNGPVVLATGGYAADFGEGSLLKKHRPDTYGLATTNGSHATGDGQKMVMAIGGNGIDMDKVQVHPTGLVDPKDPGSKWKFLAAEALRGEGGILLNADGDRFCDELGHRDYVSGMMWKEKDKGKVLDFHTRHYSGRGLMKKMTGRELAKEIGCTPEHLQQTFQTYNAIAEGKQKDPWGKRFFHNMPLDINDDFHVALMEPVLHFTMGGIEINEKAQVLNKEKKPFEGLFACGELAGGVHGANRLGGSSLLGCVVYGRVAGDSASNYLFQQALKGSAGAARLGQIALHIDPSTPGKISVEWAGAGGNEAPRAQAVPASAPAAKKETEEKPFSIPDKEFTMEEVAKHNKKDDLWVVVKGVVLDLTNWLDDHPGGPQALLNFMGRDATEEFEMLHDDEVIPKYAPSQVIGRVKGQEVTLKV

SEQ ID NO: 840 - protein, 583 aa, Myceliophthora thermophilia
HTIYLAGGNVTVLDKQGFFGGNSTKATSGINGALTRTQIELGIQDSVKQFYDDTLKSARDKARPELIKVLTYKSAAAVEWLQDVFNLDLTLVSRLGGHSQPRTHRGHDAKFPGMAITYALMQRLEELAETEPHRVKIIKKARVTSLNKEGNTITGVQYEHDGQTKTLNGPVVLATGGYAADFGEGSLLKKHRPDTYGLATTNGSHATGDGQKMVMAIGGNGIDMDKVQVHPTGLVDPKDPGSKWKFLAAEALRGEGGILLNADGDRFCDELGHRDYVSGMMWKEKDKGKVLDFHTRHYSGRGLMKKMTGRELAKEIGCTPEHLQQTFQTYNAIAEGKQKDPWGKRFFHNMPLDINDDFHVALMEPVLHFTMGGIEINEKAQVLNKEKKPFEGLFACGELAGGVHGANRLGGSSLLGCVVYGRVAGDSASNYLFQQALKGSAGAARLGQIALHIDPSTPGKISVEWAGAGGNEAPRAQAVPASAPAAKKETEEKPFSIPDKEFTMEEVAKHNKKDDLWVVVKGVVLDLTNWLDDHPGGPQALLNFMGRDATEEFEMLHDDEVIPKYAPSQVIGRVKGQEVTLKV

SEQ ID NO: 841 - DNA, 2250 bp, Myceliophthora thermophilia
atgaggccgcacctgttctccggactgctggtgctgctgagcatcctgccatggaccgccgtcgccctgatcggcctcggccagcaaatgtactacccggcgtgcggatacgcctgcgtgaacgccctctcgaccttccccttgtcgtgttcgacccatgaccatcatcacgcggggggcgacgacgactcggagatggacatggacatgtcgagtatggtgacgacgtcgccggcctgccgggccggggaccgggcctacctgacgacgctggcctggtgcatgcacaccaggtgcaccgatgacgcgggcgccgtacccgcctgggacctggagaagttctgggccgagcaggccaccacagacccggccgtcgcccccgaatggacctacggcgacgccctcgccaacgtctccgaccgcccgccgaccaaggagatcgccgacggcgacacgctcaacgccaccgcgctggtgcccgaggacgcctggacgatccagtatgggaccatgaccaccatggagtttgtcgagacgatgcatgagagatacggcgtcgccatcgtcctcgtcggtttcggcaccccgattctgttcaccgccctccgctacctcccctacatgaaccgccttctcgaccgcctgaagccctacgccgtctacccggccatctggggcgggcgccaggtgcggccgctgccctaccagctgggcaaccccccgaccgtggggcaggcgctgtacgtgacggtgctgctggtgctcaacgtggtgctgacggccgtgtcgtaccgctccttccagccaagcgcctggtacgccgaccggtaccaggaggtcatggtctgggtcatgtaccgcacgggcgtgctggccttcgccctgctgccgctcgccctcctgctggccggccgcaacaacgtgctgctctggctgagcgactggtcccacgcgacctacgtgctgctgcaccgctgggtcgcccgcctcttcgccctccaggccctgctgcactccctcctcgccctcgtcctctacgaccgcaccggcctctaccggggcgagacgaccaagccctggtgggtctggggcgccgtcgccaccgtcgccgccagcgtcatgctcgtcgccagcggcctgtacgtgcgccgctggtcctacgagatcttcctcgtctcccacgtgcttctcgccgtcttcgtcatcgtcggctgttggtatcacgtcgagctgaggttcatgaggatgtttggctacgagcagtggatctacgcggcgtgcgcggtctggttcttcgaccgcctcatccgcctgctgcgagtcctcaagacgggcgtgcgccgcgcccgggtgactgaggtcggccaggactacgtccgggtcgacatcgagggcgtccgctgggggtccgcgccgggtcagcacgcctacgtctactttccgactctcagcccgctccggccgtgggagaaccacccgttctccctcctccccacctccatcctctcccgggctcccgccgccgccgccgccgccgcggagagtcacggcagcgccgcgtccgcttcgtcagacgcggagccagacgatccagagaaggccggcgatccggaaaagggcaatggcaacatcaccactaccactaccactaccactaccgccaccgccaacaatattaaccacagtaacaaccaccgttcagcaacagccgcagcaaccgcagcaaccacaacaaccaccacaacaacaacaacaacagaatcagagaccccaacccgcacacaagccggcgtcaccttcttcatccgcaaatccgccgggctcacccgccggctccgcgcccacgcgtccctgccggtgctcctggacgggccgtaccccaacaaccggacgggggcggtgctgcggtgcgaccgcgtgctgctcgtcgcgggcggcatcggcatcacgggggtgctgccgtggtgggccacctcgcgccacccgaacgcgcggctgtgctggagcgtgcgggccgggtctgaccacggcggaggcgagcggttggtcgaggcgctgaggccggcgatcgagacggcggggacggcggaccgcgaggtgagcgtggggcggcggttcgacgtgcgcgagctcgtcgaggccgaggtgcgcgccgggtggcggcgcatcggcgtcgtcgcgtgcgggcccggccccccccccctctctcccccctactcaatcctcaacttgcaagccctgcgttcttga

SEQ ID NO: 842 - protein, 749 aa, Myceliophthora thermophilia
MRPHLFSGLLVLLSILPWTAVALIGLGQQMYYPACGYACVNALSTFPLSCSTHDHHHAGGDDDSEMDMDMSSMVTTSPACRAGDRAYLTTLAWCMHTRCTDDAGAVPAWDLEKFWAEQATTDPAVAPEWTYGDALANVSDRPPTKEIADGDTLNATALVPEDAWTIQYGTMTTMEFVETMHERYGVAIVLVGFGTPILFTALRYLPYMNRLLDRLKPYAVYPAIWGGRQVRPLPYQLGNPPTVGQALYVTVLLVLNVVLTAVSYRSFQPSAWYADRYQEVMVWVMYRTGVLAFALLPLALLLAGRNNVLLWLSDWSHATYVLLHRWVARLFALQALLHSLLALVLYDRTGLYRGETTKPWWVWGAVATVAASVMLVASGLYVRRWSYEIFLVSHVLLAVFVIVGCWYHVELRFMRMFGYEQWIYAACAVWFFDRLIRLLRVLKTGVRRARVTEVGQDYVRVDIEGVRWGSAPGQHAYVYFPTLSPLRPWENHPFSLLPTSILSRAPAAAAAAAESHGSAASASSDAEPDDPEKAGDPEKGNGNITTTTTTTTTATANNINHSNNHRSATAAATAATTTTTTTTTTTESETPTRTQAGVTFFIRKSAGLTRRLRAHASLPVLLDGPYPNNRTGAVLRCDRVLLVAGGIGITGVLPWWATSRHPNARLCWSVRAGSDHGGGERLVEALRPAIETAGTADREVSVGRRFDVRELVEAEVRAGWRRIGVVACGPGPPPLSPPYSILNLQALRS

SEQ ID NO: 843 - protein, 727 aa, Myceliophthora thermophilia
LIGLGQQMYYPACGYACVNALSTFPLSCSTHDHHHAGGDDDSEMDMDMSSMVTTSPACRAGDRAYLTTLAWCMHTRCTDDAGAVPAWDLEKFWAEQATTDPAVAPEWTYGDALANVSDRPPTKEIADGDTLNATALVPEDAWTIQYGTMTTMEFVETMHERYGVAIVLVGFGTPILFTALRYLPYMNRLLDRLKPYAVYPAIWGGRQVRPLPYQLGNPPTVGQALYVTVLLVLNVVLTAVSYRSFQPSAWYADRYQEVMVWVMYRTGVLAFALLPLALLLAGRNNVLLWLSDWSHATYVLLHRWVARLFALQALLHSLLALVLYDRTGLYRGETTKPWWVWGAVATVAASVMLVASGLYVRRWSYEIFLVSHVLLAVFVIVGCWYHVELRFMRMFGYEQWIYAACAVWFFDRLIRLLRVLKTGVRRARVTEVGQDYVRVDIEGVRWGSAPGQHAYVYFPTLSPLRPWENHPFSLLPTSILSRAPAAAAAAAESHGSAASASSDAEPDDPEKAGDPEKGNGNITTTTTTTTTATANNINHSNNHRSATAAATAATTTTTTTTTTTESETPTRTQAGVTFFIRKSAGLTRRLRAHASLPVLLDGPYPNNRTGAVLRCDRVLLVAGGIGITGVLPWWATSRHPNARLCWSVRAGSDHGGGERLVEALRPAIETAGTADREVSVGRRFDVRELVEAEVRAGWRRIGVVACGPGPPPLSPPYSILNLQALRS

SEQ ID NO: 844 - DNA, 783 bp, Myceliophthora thermophilia
atggcttcggcccagggcaagaccgtgatcgtcacgggcgccggcggcggtctcggaaaggccatcgcggccgctttcctcgccgccggtgccaacgtggccatctgcgacgtcctgccacagcgcatcgccgacgtcatcagtgagtggtcggagccgtacggcgacaggttcatcacccggcccgtggacgtcacggacgcggctgccgtccaggggcttatcgacgacaccgtcgccgcctacggccgtctggacgtcctcgtcaacgcggccggggtcatggacggcttcgagccggctggcgatctccccaaggagaagtgggatcgcgtgctcaacatcaacctgacgggtcccttcctcaccaccaaggccgccatcgcccagttcgagaagcaggagggctcatacggcgtcatcatcaacattggctctgtcgccagcgtgcacggcttcaagagcggcgccgcctacgccgtgtccaaggccggcctcatggccttgaccaagaacacggccggctactacggcgacaagggcatctacagcatcgggctgatgctcggcgccatggacaccaacatcacggatgccttcgtccacgggatgcacaccgagatgtacaagaagatccaggcctcgcagacccctttccgtccggatctccagatacctctcgaatcggtggccaagtactgcgtcttccttaccgacaaggacatcgcgcctagtgccaacggctcatggattccattcaataagaactggcccgaggcgtga

SEQ ID NO: 845 - protein, 260 aa, Myceliophthora thermophilia
MASAQGKTVIVTGAGGGLGKAIAAAFLAAGANVAICDVLPQRIADVISEWSEPYGDRFITRPVDVTDAAAVQGLIDDTVAAYGRLDVLVNAAGVMDGFEPAGDLPKEKWDRVLNINLTGPFLTTKAAIAQFEKQEGSYGVIINIGSVASVHGFKSGAAYAVSKAGLMALTKNTAGYYGDKGIYSIGLMLGAMDTNITDAFVHGMHTEMYKKIQASQTPFRPDLQIPLESVAKYCVFLTDKDIAPSANGSWIPFNKNWPEA

SEQ ID NO: 846 - protein, 224 aa, Myceliophthora thermophilia
DVLPQRIADVISEWSEPYGDRFITRPVDVTDAAAVQGLIDDTVAAYGRLDVLVNAAGVMDGFEPAGDLPKEKWDRVLNINLTGPFLTTKAAIAQFEKQEGSYGVIINIGSVASVHGFKSGAAYAVSKAGLMALTKNTAGYYGDKGIYSIGLMLGAMDTNITDAFVHGMHTEMYKKIQASQTPFRPDLQIPLESVAKYCVFLTDKDIAPSANGSWIPFNKNWPEA

SEQ ID NO: 847 - DNA, 1056 bp, Myceliophthora thermophilia
atgtctcctcttgtcgctcaatcgccgacgccccgcgtcatcctgggtctgatgaccttcggccccgacgagtcggcgggagctcgggtgacggatgtgagcgagttcgccaaggtgctcgacctgttccaatcacgtggctacaacgaggtcgacacggcccgcgtgtatatcggcggcaagcaggaggcattcagccgcgaggccggctggaaggaccgcggcctgaccctggccaccaagatcaagtatccaaacgagccgggagccaacacctatgacaaggtgctggagtcggcagagctcagcctcaaggaactgggcactgactctgtcgacattctctacctccacgcagccgaccgcgcaaccccctttgccgagacgctccgagccatcaacgagctgcacaaggccggcaagtttgtccgcttcggcatctccaactttaccgcctacgaggtggccgagatcgtcctgacgtgcaagtacaacggctgggtgcgtccgaccgtgtaccaggccatgtacaacgccatcactcgcggcatcgagcccgagctggtgcccgcctgccgccgctacggcctcgacattgtcgtgtacaaccccatcgccggcgggctcttctccggcaagatcaagtccaaggacatggtgccggccgaggggcggtacagcgacaagtgccacaccggccgcgtctaccgggaccggtactaccgcgacgccaccttccgggccctgcagctggtggagcaggcggccgagaaggccggcctgaccgtcatcgaggcggcactgcgctgggtcgtgcaccattcggcgctcaggatcaaggacggcaacgacggcgtcatcatcggcgtgtcgaggctcgagcagctggacgagaacctgacccacctcgagaagggcccgctgcccgacgaggtcgtcaaggccctggacgaggcctgggccatcagcaaggccgacaccaccaactactggcacggcaaggtcgagtacacctacgatacccgcgaagccctgttcggagccggcgcgcagtga

SEQ ID NO: 848 - protein, 351 aa, Myceliophthora thermophilia
MSPLVAQSPTPRVILGLMTFGPDESAGARVTDVSEFAKVLDLFQSRGYNEVDTARVYIGGKQEAFSREAGWKDRGLTLATKIKYPNEPGANTYDKVLESAELSLKELGTDSVDILYLHAADRATPFAETLRAINELHKAGKFVRFGISNFTAYEVAEIVLTCKYNGWVRPTVYQAMYNAITRGIEPELVPACRRYGLDIVVYNPIAGGLFSGKIKSKDMVPAEGRYSDKCHTGRVYRDRYYRDATFRALQLVEQAAEKAGLTVIEAALRWVVHHSALRIKDGNDGVIIGVSRLEQLDENLTHLEKGPLPDEVVKALDEAWAISKADTTNYWHGKVEYTYDTREALFGAGAQ

SEQ ID NO: 849 - protein, 324 aa, Myceliophthora thermophilia
ARVTDVSEFAKVLDLFQSRGYNEVDTARVYIGGKQEAFSREAGWKDRGLTLATKIKYPNEPGANTYDKVLESAELSLKELGTDSVDILYLHAADRATPFAETLRAINELHKAGKFVRFGISNFTAYEVAEIVLTCKYNGWVRPTVYQAMYNAITRGIEPELVPACRRYGLDIVVYNPIAGGLFSGKIKSKDMVPAEGRYSDKCHTGRVYRDRYYRDATFRALQLVEQAAEKAGLTVIEAALRWVVHHSALRIKDGNDGVIIGVSRLEQLDENLTHLEKGPLPDEVVKALDEAWAISKADTTNYWHGKVEYTYDTREALFGAGAQ

SEQ ID NO: 850 - DNA, 642 bp, Myceliophthora thermophilia
atgcttatcgaaacagcgattgtcgtcgtggcagtggccgcactcctcagactggtcgtgaagccccaacccgagccccaatttcagcctgccatggcgacctcagtcgctccagacggaaaatcgtgcgactacgcaccagaggaaggagggtatttcgacccgcctctccagagggtgtcatatggcaccaaacccggcgctagagtgtttggctggcccgccaagggcggcgtatacaccatgcgagctgctaccgtcgaccttgagttcttgggctacggccggtttgaacctgtgccgcgtcccgatccaaaagaccccaacacggccgcagacgaagaggcgcactgcaataagatgcgtcagctgggtgcccgatggtgggagagcgagcatgcatgggctaggagtttcagggaggtacacgcagtacccctagaggagaaatttatcgctaccggatggccggctggaggcggtgtatgggtcctcagcggggatgtcgaagcggctagcgagaagaacgccggcatgctattcaacgcctacactatggaggagcgctgcaacgtgatcgagaagctaggcggtaccttctacgccaaccccaaggattgcccagatttggacttggcgtag

SEQ ID NO: 851 - protein, 213 aa, Myceliophthora thermophilia
MLIETAIVVVAVAALLRLVVKPQPEPQFQPAMATSVAPDGKSCDYAPEEGGYFDPPLQRVSYGTKPGARVFGWPAKGGVYTMRAATVDLEFLGYGRFEPVPRPDPKDPNTAADEEAHCNKMRQLGARWWESEHAWARSFREVHAVPLEEKFIATGWPAGGGVWVLSGDVEAASEKNAGMLFNAYTMEERCNVIEKLGGTFYANPKDCPDLDLA

SEQ ID NO: 852 - protein, 191 aa, Myceliophthora thermophilia
QPEPQFQPAMATSVAPDGKSCDYAPEEGGYFDPPLQRVSYGTKPGARVFGWPAKGGVYTMRAATVDLEFLGYGRFEPVPRPDPKDPNTAADEEAHCNKMRQLGARWWESEHAWARSFREVHAVPLEEKFIATGWPAGGGVWVLSGDVEAASEKNAGMLFNAYTMEERCNVIEKLGGTFYANPKDCPDLDLA

SEQ ID NO: 853 - DNA, 384 bp, Myceliophthora thermophilia
atgtcggccctccgcccaagcgcccgtctcgccgcgcgcatcgccgcggcctccccctcatccgccgctggcacaacgacgacaacgacaacggccgtcgcccccgcgcgcctccgccacttctccacgaccccgcgccgcgccggcggcggcggcatgcagtacgacccgccctcgggctggctctggggcgtgcgcccgggcgagaagtaccagaacgagggctgggaggggcccttcatctacggcttctggggcagcctgattgtgtttgccattgcgtatgcctggaagcctgatacctcgatccagacttgggctttggaagaggcgaggaggaggttggaggccgaggggatcctggaggatcccgagaagaaatag

SEQ ID NO: 854 - protein, 127 aa, Myceliophthora thermophilia
MSALRPSARLAARIAAASPSSAAGTTTTTTTAVAPARLRHFSTTPRRAGGGGMQYDPPSGWLWGVRPGEKYQNEGWEGPFIYGFWGSLIVFAIAYAWKPDTSIQTWALEEARRRLEAEGILEDPEKK

SEQ ID NO: 855 - protein, 105 aa, Myceliophthora thermophilia
AGTTTTTTTAVAPARLRHFSTTPRRAGGGGMQYDPPSGWLWGVRPGEKYQNEGWEGPFIYGFWGSLIVFAIAYAWKPDTSIQTWALEEARRRLEAEGILEDPEKK

SEQ ID NO: 856 - DNA, 2634 bp, Myceliophthora thermophilia
atgctttccgcttgtgctgttgccctgagggcgggcgcccgccgcagcgtccgccgcctgccccggtcgcgcctcgccgccgtgcctgcttcccttcatcgagcgagacctttctcgtcttctgccgcccgatccatcgacctcagcacccgcggcatgatcgtgcagacgctgtcgtctgtgggatccaagcgcgaagttcagcagtacctctcgctcttcacctccgtttcgtcgcagcgcttcgccgtcatcaaggtcggcggtgccatcctgaccgactacctggacgagttatgctctagcttggcattcctctacgccgtcggcctctatcccgtcatcgtccacggggccgggccccagctcaacaccctgctcgagcaggccggcgtcgagcctcagtttgaggaagggatccgggtgaccgactccaagactctgcgtgtcgcacgcgacctgttcctccaggagaacctcaacctggtgaacaagctggaggagaagggcgtgcacgcccagcccctgacgaccggcatgttcagggcagactatcttgacaaggacaagtggggctttgtcggaaagatcacgagcgtcaacaagaagcccatcgagacggccatcaacaatggctatcttccgattctcacctccatggccgagaccgacgatggccagatcctcaatgtcaatgccgacgtcgctgctgccgagctggcccgggccctggagcccctcaaggtcgtctacctgtccgagaagggtggtcttttcgacgctgcgggccagaggatctcggccatcaacctggacgaggagtatgactacctcatgtcgcagtcatgggtcaagtacggcacccggttgaagatcaaggagatcaaggagctgctggataccctgcctcgcgctaccagtgtcgccatcattcaccctggagagcttcagaaggaactgttcacggactctggggccggcacgctcatccgccgcggcaacaagctgctctcggctaccagcctgtccgagttcaaggacctggacgccctgaaggaggtgctgattcgcgaccgggagggccccgatgcccgggccaccgttgacaagtacctcgacttcctccaggaaaacgacttcaaggcgtattacgacgggccgatgaacgcccttgccatcgtcttgccggcgcgcaacgggcgccaggctacccttgccaccctgactatcaccaagtctggctggctgaccaacgtcgccgataacatcttcacggccctccgcaaggagcacccccagcttgtctggaccgtgagggaggatgacgagaacctcgggtggttcttcgacaaggctgacggcagcatcacccggaacggcagtgttatgttctggtacgggatcgagaacggcgaggaggtggtgcggttgatgaaggacttcacgcagcatggccgtgccatgcttggcgactccaacctcgagtcgcggttgcagcgcgccgccacgaagggggccaagccggtagcccagcaggcccgtgcctattccacgctcgctcgccgccccatcctctcggcgccaatctttggccagaccgctcggaggacctacgttacccagaccaaccccaaccccccgatcggcaagaagaacgcatccaagtcgcagcccgccacggtggcattgattggcgcccgcggctacaccggccaggagctgatccgcttgctcgactctcacccgaacatggatctgcgccatgtctcctcccgcgagcttgcgggcaccaagctcgaggggtacaacaagcgagacgtcatctacgagaatctcagccccgaagacgtccgggatatggagcggcggggtgaaatcgactgttgggtcctggctctgccgaacggcgtctgcaagccattcgtcgaggccgtgtacgagggccgcaagggctcggaccataagagcgtcatcgtcgacttgtcagcagactaccgtttcgacaacacctggacttacggtctccccgagctcgttcctagggcgaacctcacccaggccacccagatcgctaaccccggctgctacgccacggctgcccagctcggtatcgctccgcttgtcccccatctcggcggcatgcctcacgtgtttggcgtctccggctactcgggcgccggcactaagccttctcccaagaacgacgtcaacctgctcacggataacatcatcccgtacagcctgacgggccatatccacgagcgcgaggttagcacgcagctcggcgcgcaggtggcgtttatcccgcacgtcgctgtctggttccgcggcatccaccacaccatctcgatcccgctcaacaagaccatgacgtcgcgcgacatccgccagatctatcaggaccgctacgccggcgagaagctggtcaaggtggtgggcgaggcgccgctggtcaagaacatcagcggcaagcacggcgtcgagattggcgggttcgaggtggacaagagcgggaagcgtgtcgtcgtgtgcgccaccatcgacaacctgctcaagggcgccgctactcaatgtttgcaaaacatgaacctcgccctgggttacgcagagtacgaaggtattcccgtcatgtaa

SEQ ID NO: 857 - protein, 877 aa, Myceliophthora thermophilia
MLSACAVALRAGARRSVRRLPRSRLAAVPASLHRARPFSSSAARSIDLSTRGMIVQTLSSVGSKREVQQYLSLFTSVSSQRFAVIKVGGAILTDYLDELCSSLAFLYAVGLYPVIVHGAGPQLNTLLEQAGVEPQFEEGIRVTDSKTLRVARDLFLQENLNLVNKLEEKGVHAQPLTTGMFRADYLDKDKWGFVGKITSVNKKPIETAINNGYLPILTSMAETDDGQILNVNADVAAAELARALEPLKVVYLSEKGGLFDAAGQRISAINLDEEYDYLMSQSWVKYGTRLKIKEIKELLDTLPRATSVAIIHPGELQKELFTDSGAGTLIRRGNKLLSATSLSEFKDLDALKEVLIRDREGPDARATVDKYLDFLQENDFKAYYDGPMNALAIVLPARNGRQATLATLTITKSGWLTNVADNIFTALRKEHPQLVWTVREDDENLGWFFDKADGSITRNGSVMFWYGIENGEEVVRLMKDFTQHGRAMLGDSNLESRLQRAATKGAKPVAQQARAYSTLARRPILSAPIFGQTARRTYVTQTNPNPPIGKKNASKSQPATVALIGARGYTGQELIRLLDSHPNMDLRHVSSRELAGTKLEGYNKRDVIYENLSPEDVRDMERRGEIDCWVLALPNGVCKPFVEAVYEGRKGSDHKSVIVDLSADYRFDNTWTYGLPELVPRANLTQATQIANPGCYATAAQLGIAPLVPHLGGMPHVFGVSGYSGAGTKPSPKNDVNLLTDNIIPYSLTGHIHEREVSTQLGAQVAFIPHVAVWFRGIHHTISIPLNKTMTSRDIRQIYQDRYAGEKLVKVVGEAPLVKNISGKHGVEIGGFEVDKSGKRVVVCATIDNLLKGAATQCLQNMNLALGYAEYEGIPVM

SEQ ID NO: 858 - protein, 840 aa, Myceliophthora thermophilia
FSSSAARSIDLSTRGMIVQTLSSVGSKREVQQYLSLFTSVSSQRFAVIKVGGAILTDYLDELCSSLAFLYAVGLYPVIVHGAGPQLNTLLEQAGVEPQFEEGIRVTDSKTLRVARDLFLQENLNLVNKLEEKGVHAQPLTTGMFRADYLDKDKWGFVGKITSVNKKPIETAINNGYLPILTSMAETDDGQILNVNADVAAAELARALEPLKVVYLSEKGGLFDAAGQRISAINLDEEYDYLMSQSWVKYGTRLKIKEIKELLDTLPRATSVAIIHPGELQKELFTDSGAGTLIRRGNKLLSATSLSEFKDLDALKEVLIRDREGPDARATVDKYLDFLQENDFKAYYDGPMNALAIVLPARNGRQATLATLTITKSGWLTNVADNIFTALRKEHPQLVWTVREDDENLGWFFDKADGSITRNGSVMFWYGIENGEEVVRLMKDFTQHGRAMLGDSNLESRLQRAATKGAKPVAQQARAYSTLARRPILSAPIFGQTARRTYVTQTNPNPPIGKKNASKSQPATVALIGARGYTGQELIRLLDSHPNMDLRHVSSRELAGTKLEGYNKRDVIYENLSPEDVRDMERRGEIDCWVLALPNGVCKPFVEAVYEGRKGSDHKSVIVDLSADYRFDNTWTYGLPELVPRANLTQATQIANPGCYATAAQLGIAPLVPHLGGMPHVFGVSGYSGAGTKPSPKNDVNLLTDNIIPYSLTGHIHEREVSTQLGAQVAFIPHVAVWFRGIHHTISIPLNKTMTSRDIRQIYQDRYAGEKLVKVVGEAPLVKNISGKHGVEIGGFEVDKSGKRVVVCATIDNLLKGAATQCLQNMNLALGYAEYEGIPVM

SEQ ID NO: 859 - DNA, 867 bp, Myceliophthora thermophilia
atgggcacccaaatcgccatcaccgctgccgttgttggtgtcggcgcatacgcatggtatctgcggagcagcagcaccaatcgggacaagcccgttttcagcagcttcggcttccacaccctccgcctcgaaagcgccgagctgatcaaccacaacaccaagaagttgcgcttcgacctcccagacaagagcaagccgagcggcctctccctcacttccgccctgctgaccatctcctttcccaacggccgctggctgccggtgctgaggccatataccccggtcaatgatctcggtatttatgctcctgccgacctgaccgacgagcccggctacatcgagctgatggtgaagctctaccccggcggcaagcagagcacgcacctgcactcgctccgacctggcgacacgctcaccttcgcacccatcaaggagctggcctggaagcccaacaagcacccgcacgtcgccctgattgccggcggcgccggcatcacccccatgtaccagctcgcccgcggcatcctcaacaacccggccgaccagacgcgcatcaccctggtctggggcgtcaacacggacgaggacatcttcttgcgggacaagtttgccgcgttcgagcgggaccacccagggcggttcagagctgtttacgtggtggcgtcgcctgccgccggatcgccgcatcagaagggtttcatcacgaagcagatcctggagggcgcggggctgagcgcgagggagcacaagaatcgggatgtcaaggttctggtatgtgggccacccgcgatggagaaggcactgaagaagcggacgggtgtgctagcggaactgggctatcgcccggatcaggtgtacagcttctag

SEQ ID NO: 860 - protein, 288 aa, Myceliophthora thermophilia
MGTQIAITAAVVGVGAYAWYLRSSSTNRDKPVFSSFGFHTLRLESAELINHNTKKLRFDLPDKSKPSGLSLTSALLTISFPNGRWLPVLRPYTPVNDLGIYAPADLTDEPGYIELMVKLYPGGKQSTHLHSLRPGDTLTFAPIKELAWKPNKHPHVALIAGGAGITPMYQLARGILNNPADQTRITLVWGVNTDEDIFLRDKFAAFERDHPGRFRAVYVVASPAAGSPHQKGFITKQILEGAGLSAREHKNRDVKVLVCGPPAMEKALKKRTGVLAELGYRPDQVYSF

SEQ ID NO: 861 - protein, 270 aa, Myceliophthora thermophilia
WYLRSSSTNRDKPVFSSFGFHTLRLESAELINHNTKKLRFDLPDKSKPSGLSLTSALLTISFPNGRWLPVLRPYTPVNDLGIYAPADLTDEPGYIELMVKLYPGGKQSTHLHSLRPGDTLTFAPIKELAWKPNKHPHVALIAGGAGITPMYQLARGILNNPADQTRITLVWGVNTDEDIFLRDKFAAFERDHPGRFRAVYVVASPAAGSPHQKGFITKQILEGAGLSAREHKNRDVKVLVCGPPAMEKALKKRTGVLAELGYRPDQVYSF

SEQ ID NO: 862 - DNA, 249 bp, Myceliophthora thermophilia
atgaacggcgcagccccgcgcttctgggccggccccctccgctactggcgctgggccgctcgcgagcgccccgccttcttctggtccgtcgtcatcggcgccctgggccccgtgaccctcgccgtcgtcccgcccatccgccgcgccctgggcgacgaggacgccgctcccatccccctgacttatccggtacccaccgggccaaggaagacgttgaccggatatgacgatgacaccgagaaggattaa

SEQ ID NO: 863 - protein, 82 aa, Myceliophthora thermophilia
MNGAAPRFWAGPLRYWRWAARERPAFFWSVVIGALGPVTLAVVPPIRRALGDEDAAPIPLTYPVPTGPRKTLTGYDDDTEKD

SEQ ID NO: 864 - protein, 41 aa, Myceliophthora thermophilia
VVPPIRRALGDEDAAPIPLTYPVPTGPRKTLTGYDDDTEKD

SEQ ID NO: 865 - DNA, 1281 bp, Myceliophthora thermophilia
atgtcttcgaccgtcatccttggggcgggtatcatcggtgtttcgacggcctactacctctcccagcatcaggatccgacaagcattcaactggtcgagccgtcaccggagctcttctcctctgcatctggctacgccggcggcttcctcgccaaggactggtttggaccctcgttgacagctctcggcgccctcagcttcaatgagcaccgccggcttgcagaggaacacggcggacgcgagaagtggggttactcgcggtctacatgcgtcagctacgcagcatctgccgcggcgcgagactcgggttcgcgaggcgacgactggctacgtcacggaaccagccgcgccgacgcggcccctgtgatccaggaccccttgtccggaaacacgccggggtggctgcggaggctggaaggcgaccacatcgagctcatcagcgacgagggttcgacggcgcagctcgatcccctcttgctctgccagttcctcttgcaagaatgcctccagcgcggtgtgaagcttcatcacccggctaagccggtctcggtgagcacggatgcgaagggcgagctggtcggtattcgcatcatcgataccaagccgtctgctacggagacggagctgccctgtgcgaggctgatcatcacggccggtgcgtggacggggcaggtcttccagacgttgttccccgagtcggatctgcaggtcccgatccagagcctggccgggcactcgctggtcctcaagtcgccgcggtggcataccggactggagagcaaaggctgccatgccgtcttcgccacgcacacacaggggttctgcccagagatgttctcgagactggacgggcacatttacttctcagggttgaactcatcgactctgccgcttccggacgcagcggcggggaaggcgacgccatacaaagaggacctggctcagctgcggcaggcagcaagggagattcttggaaccgggccggaggcggaagacgacctggaggtcgtgcgggaggggctgtgcttccggccggtgacagcgtgggggacgcccatcatctcgcggatacgggatggagacctcggtgctggtgtggtgacgagacccggggccgagggtggcgtgtatattgccgccggccacgggccgtggggtatcgcgatgagtctcggcacgggtatcgtgctggctgagatggtgcagggacggacgctcagtgtggatgtgagcgggctagctcttgacgggaacagggcaagggaactgtctgcgaactga

SEQ ID NO: 866 - protein, 426 aa, Myceliophthora thermophilia
MSSTVILGAGIIGVSTAYYLSQHQDPTSIQLVEPSPELFSSASGYAGGFLAKDWFGPSLTALGALSFNEHRRLAEEHGGREKWGYSRSTCVSYAASAAARDSGSRGDDWLRHGTSRADAAPVIQDPLSGNTPGWLRRLEGDHIELISDEGSTAQLDPLLLCQFLLQECLQRGVKLHHPAKPVSVSTDAKGELVGIRIIDTKPSATETELPCARLIITAGAWTGQVFQTLFPESDLQVPIQSLAGHSLVLKSPRWHTGLESKGCHAVFATHTQGFCPEMFSRLDGHIYFSGLNSSTLPLPDAAAGKATPYKEDLAQLRQAAREILGTGPEAEDDLEVVREGLCFRPVTAWGTPIISRIRDGDLGAGVVTRPGAEGGVYIAAGHGPWGIAMSLGTGIVLAEMVQGRTLSVDVSGLALDGNRARELSAN

SEQ ID NO: 867 - protein, 409 aa, Myceliophthora thermophilia
YYLSQHQDPTSIQLVEPSPELFSSASGYAGGFLAKDWFGPSLTALGALSFNEHRRLAEEHGGREKWGYSRSTCVSYAASAAARDSGSRGDDWLRHGTSRADAAPVIQDPLSGNTPGWLRRLEGDHIELISDEGSTAQLDPLLLCQFLLQECLQRGVKLHHPAKPVSVSTDAKGELVGIRIIDTKPSATETELPCARLIITAGAWTGQVFQTLFPESDLQVPIQSLAGHSLVLKSPRWHTGLESKGCHAVFATHTQGFCPEMFSRLDGHIYFSGLNSSTLPLPDAAAGKATPYKEDLAQLRQAAREILGTGPEAEDDLEVVREGLCFRPVTAWGTPIISRIRDGDLGAGVVTRPGAEGGVYIAAGHGPWGIAMSLGTGIVLAEMVQGRTLSVDVSGLALDGNRARELSAN

SEQ ID NO: 868 - DNA, 378 bp, Myceliophthora thermophilia
atgcctgtcgcgccatccctctactcggccgccgtcaagcggccctggctcatgagcctgctcaagccgctcgccagctggtacaccaacgccgccggctaccgtcagatgggtctcaaggccgacgacctgatcgttgaggaggacgagaacgtcctcaaggcgctcagccgcctgtcgcccaaggagagctacgaccgcatctaccgcatccgccgcgcgacgcagctcagcctgcaacaaaagatcctgcccaagcacgagtggaccaagcccgaggaggacgtgccctacctgtcgcccattctcgagcagatctacgccgagaacgcggagagggatgctctcgacaccatgaccgttctcaagaagcactaa

SEQ ID NO: 869 - protein, 125 aa, Myceliophthora thermophilia
MPVAPSLYSAAVKRPWLMSLLKPLASWYTNAAGYRQMGLKADDLIVEEDENVLKALSRLSPKESYDRIYRIRRATQLSLQQKILPKHEWTKPEEDVPYLSPILEQIYAENAERDALDTMTVLKKH

SEQ ID NO: 870 - protein, 94 aa, Myceliophthora thermophilia
AGYRQMGLKADDLIVEEDENVLKALSRLSPKESYDRIYRIRRATQLSLQQKILPKHEWTKPEEDVPYLSPILEQIYAENAERDALDTMTVLKKH

SEQ ID NO: 871 - DNA, 705 bp, Myceliophthora thermophilia
atgggtctcctttctaacctcgtgctcctcacagcggccgtggctgtcgccgccgatcccgccacgcccaagatctccagcatcagcttttcgggcaacggctgcctcaacgaccccaaattctcgggcaacttcgacgtcccatgcctcaccttttcaaactttgctgccgccctcccgggcaacaacaaaacggtcaactgccaggtccacctgcaaacacagggcgcgacccccgggtggcaggtggcactcaagagcaacgtcgtcaagggccacgtcgttctctctccgggaaccactctgacccactacacgaccgtcttcttcagccaggacgcttcaaacacggtgagtcccgaccgaagacatgcagtcatttccgctttcttctctctccccctcggttattatcatcagcccatcgcagcaggccactcactgacttgggggtccacccccttcgcggtgtcgaaccaggacaccttctcgaacacgatcgaaaacaagggcaccaccgccatcaacaagcccgtcaccctcgtcggcaacgccgacggcggaaaggtgtggtcgccgtgcaccggcagcgacgggtccacgggcatcatgaacatcaacttccggggcgcgctggcgggcgatggggaagcctatttcgaggcgaacaccgaggagtgggatctcgagtggaggaagtgctga

SEQ ID NO: 872 - protein, 234 aa, Myceliophthora thermophilia
MGLLSNLVLLTAAVAVAADPATPKISSISFSGNGCLNDPKFSGNFDVPCLTFSNFAAALPGNNKTVNCQVHLQTQGATPGWQVALKSNVVKGHVVLSPGTTLTHYTTVFFSQDASNTVSPDRRHAVISAFFSLPLGYYHQPIAAGHSLTWGSTPFAVSNQDTFSNTIENKGTTAINKPVTLVGNADGGKVWSPCTGSDGSTGIMNINFRGALAGDGEAYFEANTEEWDLEWRKC

SEQ ID NO: 873 - protein, 216 aa, Myceliophthora thermophilia
DPATPKISSISFSGNGCLNDPKFSGNFDVPCLTFSNFAAALPGNNKTVNCQVHLQTQGATPGWQVALKSNVVKGHVVLSPGTTLTHYTTVFFSQDASNTVSPDRRHAVISAFFSLPLGYYHQPIAAGHSLTWGSTPFAVSNQDTFSNTIENKGTTAINKPVTLVGNADGGKVWSPCTGSDGSTGIMNINFRGALAGDGEAYFEANTEEWDLEWRKC

SEQ ID NO: 874 - DNA, 531 bp, Myceliophthora thermophilia
atgcgtggcatgctgtcgacggtgatttcggtgaaatttgctccctccatctggtcgatgctgggatggggtagcggaaagcctggactgtcctcacctttctctctctccaacccccctcttcccttccccctcacgaaccagggccagggttcgaggccgctgtccaatgctttgctggtcgcggtcgcaatcgcgtggaaagtgcccttcgtttcgttcctaaccagagcaacatgcgtttattttcttggctcgaccactgtcttggtggatcttcagcatcccatcttcttgttactgcagctgcagtcgttacccggaattgcttcggggccatgcgctgcgattgagtggggttctgaccagccagcacatggctggcagcactgtcttttgtacattatttgcaatgcgtatggccgggcgaagggtgcgcatcagaccaagaacgtatcatgcctggccctccagcggaggcatgcaaaggcatctgcggattccaaggagggtgtctccatactaagttag

SEQ ID NO: 875 - protein, 176 aa, Myceliophthora thermophilia
MRGMLSTVISVKFAPSIWSMLGWGSGKPGLSSPFSLSNPPLPFPLTNQGQGSRPLSNALLVAVAIAWKVPFVSFLTRATCVYFLGSTTVLVDLQHPIFLLLQLQSLPGIASGPCAAIEWGSDQPAHGWQHCLLYIICNAYGRAKGAHQTKNVSCLALQRRHAKASADSKEGVSILS

SEQ ID NO: 876 - protein, 157 aa, Myceliophthora thermophilia
MLGWGSGKPGLSSPFSLSNPPLPFPLTNQGQGSRPLSNALLVAVAIAWKVPFVSFLTRATCVYFLGSTTVLVDLQHPIFLLLQLQSLPGIASGPCAAIEWGSDQPAHGWQHCLLYIICNAYGRAKGAHQTKNVSCLALQRRHAKASADSKEGVSILS

SEQ ID NO: 877 - DNA, 1983 bp, Myceliophthora thermophilia
atgatgttcaggtggcttttgatcgggctcggggttctggcgcacaagggctgtgcaggcagcgagagcgacgacaagtattacgattacatcgtcgtcggcagtggacctggaggagggcctctcgcaagcaacctagcacgggcgggttattctgtcttgctgctcgaggcggggagtgatcaaagcaacaacaccaattctgagattgtctcattgtttggggttgcttacaccgatcccactctgcgctgggacttcttcgccttcaactttgcaaacgagacgcggaacttgcagcacaaccatctgacctggcgccgtcccgatggctcgttctatgtcggccgggacccgccccctaattcgaccctgctggggatctattatcctcgcggcggtactctggggggaagctctgccgtcaatgctatgtcgacgatctaccctagcgagagtgattggcaaaacattgttgacttgactggtgacacaacatggagcccagaacatatgcgagagatttttgagcgcatcgagaagaaccattacctgacccctggggctccaggtcacggattcaacggctacctcgacacgattatgagcaccgagacctcctgggctggtcagaacgatcttctagccgtcctcggagccatctctgggcaccttggccagagcccaagcgacatcgccaccaatgtgctcgcagaccccaacggtcctattccggagcgcgaccagaccgagggcattttcggcagcccactgcacgcggacgcagcatggagacgcttcagttcccgcgactatatcctcgagaccgccagggcggtgggtccggatgggcagaagcagtaccagctcactgtccagctcgaaacgttggccaccaaggtgctcttcgccgatctagacgacccgcagaagaaacctagggcgaacggcgtcgagtttcttcaagggcagagtgtttatagcgcagacccccgccacacagcttctaaccagggaaccaccgggcgtgcgtatgctcgcaaggaggtgatcctctccggtggcactttcaactcgcctcagctgcttaagctctctggcatcgggcccgcgtcggagcttgcccagttcgacatcgatgtggttgtcgacctccccggagttggcgcgaatctgcaggacaattacgaggttcctgttgtgggacacgctgcccgggacttccagcagccggcacccgatccggacgctccgacgtgcacttacggggcgccgggcgacccctgcgtagaactctggaagcagggacgagggccatacacggtaggacctcccttgaacagcatcttccgcaagagcgctcatgctgcctacgacgagcgcgaccttttcttggttggcggtacctttgctctgcgcgggttttggccgcccactgactcggtaccggtcgaccccccaaacacgtttgggctgtcaacggtcaagatcaacccgcagagccgatcgggcaccgtcttgttgaggagcgccgacccccgagacacacccgtgatcaacttccacctgttcgaagaggacaacgcgggcactgagctcgatctgaacgccgagcttgacacggtcaagtgggcacgccgtgcatttgctgacgttcctgctccgctggggcccattgtcccggttgaaccgccctgcccgggaacgccggctgcggacggcacttgcgacgacgagaccgaccgggagtggatcaagaatcagatctttggacaccatcccacaagcacatgtgctatcggcgccgacagcgaccccctggccgtactggactctaagtttagagtccgtggcgtccgaggtcttcgagtcgtcgatgcgagcgcgttccctcgcgttcccggcccgttccctgttctcccgacatttatgctcagtgagaaggcaactgagagcgttttggaggacgcggaagaatggtga

SEQ ID NO: 878 - protein, 660 aa, Myceliophthora thermophilia
MMFRWLLIGLGVLAHKGCAGSESDDKYYDYIVVGSGPGGGPLASNLARAGYSVLLLEAGSDQSNNTNSEIVSLFGVAYTDPTLRWDFFAFNFANETRNLQHNHLTWRRPDGSFYVGRDPPPNSTLLGIYYPRGGTLGGSSAVNAMSTIYPSESDWQNIVDLTGDTTWSPEHMREIFERIEKNHYLTPGAPGHGFNGYLDTIMSTETSWAGQNDLLAVLGAISGHLGQSPSDIATNVLADPNGPIPERDQTEGIFGSPLHADAAWRRFSSRDYILETARAVGPDGQKQYQLTVQLETLATKVLFADLDDPQKKPRANGVEFLQGQSVYSADPRHTASNQGTTGRAYARKEVILSGGTFNSPQLLKLSGIGPASELAQFDIDVVVDLPGVGANLQDNYEVPVVGHAARDFQQPAPDPDAPTCTYGAPGDPCVELWKQGRGPYTVGPPLNSIFRKSAHAAYDERDLFLVGGTFALRGFWPPTDSVPVDPPNTFGLSTVKINPQSRSGTVLLRSADPRDTPVINFHLFEEDNAGTELDLNAELDTVKWARRAFADVPAPLGPIVPVEPPCPGTPAADGTCDDETDREWIKNQIFGHHPTSTCAIGADSDPLAVLDSKFRVRGVRGLRVVDASAFPRVPGPFPVLPTFMLSEKATESVLEDAEEW

SEQ ID NO: 879 - protein, 639 aa, Myceliophthora thermophilia
ESDDKYYDYIVVGSGPGGGPLASNLARAGYSVLLLEAGSDQSNNTNSEIVSLFGVAYTDPTLRWDFFAFNFANETRNLQHNHLTWRRPDGSFYVGRDPPPNSTLLGIYYPRGGTLGGSSAVNAMSTIYPSESDWQNIVDLTGDTTWSPEHMREIFERIEKNHYLTPGAPGHGFNGYLDTIMSTETSWAGQNDLLAVLGAISGHLGQSPSDIATNVLADPNGPIPERDQTEGIFGSPLHADAAWRRFSSRDYILETARAVGPDGQKQYQLTVQLETLATKVLFADLDDPQKKPRANGVEFLQGQSVYSADPRHTASNQGTTGRAYARKEVILSGGTFNSPQLLKLSGIGPASELAQFDIDVVVDLPGVGANLQDNYEVPVVGHAARDFQQPAPDPDAPTCTYGAPGDPCVELWKQGRGPYTVGPPLNSIFRKSAHAAYDERDLFLVGGTFALRGFWPPTDSVPVDPPNTFGLSTVKINPQSRSGTVLLRSADPRDTPVINFHLFEEDNAGTELDLNAELDTVKWARRAFADVPAPLGPIVPVEPPCPGTPAADGTCDDETDREWIKNQIFGHHPTSTCAIGADSDPLAVLDSKFRVRGVRGLRVVDASAFPRVPGPFPVLPTFMLSEKATESVLEDAEEW

SEQ ID NO: 880 - DNA, 693 bp, Myceliophthora thermophilia
atgctgcggactctgttctttgggctcttcttagccctgctaaggaccggcaatcagaagctgaccatctgctgcttgttgttttccgtacgtgcagtcttcgcggcgaatgaagtcgtccaggacccggacacggggctcgtctttacctccaactaccaactgtacaagatcaaccaggggatcaccttccgcgttgccatccccggtgacgcccagatcaacaccgcgttcgacgccgtcatccagttggtggtgcccagcgacgtcggttgggtcggcctctcctggggcggctccatgcccaacaacccgctcgtcgtcgcctggcaaaatgcgggctctgtcgttctgtctcctcgctgggctaccggccacgtcatgcccaccgagtccaccaacgcggggacgtacaggctcttccagacgggcaccaagtccaacggcacgcactggcagttcaccgccctctgccagggctgcacctcgtggacgaccagctccggcggctcccgctacctcactcccaccggcggcaaccgcctcgccttcgcctactcgcccggcaggccctccagcccgggcacctcgtcgtcctccatccccatccacgacgtgcacgggtactggaaccacgacttcgcggccgcgcgcaaccccaacttccacgagttggtccagcgcctcgtctga

SEQ ID NO: 881 - protein, 230 aa, Myceliophthora thermophilia
MLRTLFFGLFLALLRTGNQKLTICCLLFSVRAVFAANEVVQDPDTGLVFTSNYQLYKINQGITFRVAIPGDAQINTAFDAVIQLVVPSDVGWVGLSWGGSMPNNPLVVAWQNAGSVVLSPRWATGHVMPTESTNAGTYRLFQTGTKSNGTHWQFTALCQGCTSWTTSSGGSRYLTPTGGNRLAFAYSPGRPSSPGTSSSSIPIHDVHGYWNHDFAAARNPNFHELVQRLV

SEQ ID NO: 882 - protein, 195 aa, Myceliophthora thermophilia
ANEVVQDPDTGLVFTSNYQLYKINQGITFRVAIPGDAQINTAFDAVIQLVVPSDVGWVGLSWGGSMPNNPLVVAWQNAGSVVLSPRWATGHVMPTESTNAGTYRLFQTGTKSNGTHWQFTALCQGCTSWTTSSGGSRYLTPTGGNRLAFAYSPGRPSSPGTSSSSIPIHDVHGYWNHDFAAARNPNFHELVQRLV

SEQ ID NO: 883 - DNA, 696 bp, Myceliophthora thermophilia
atggcttgctccgcatttgtcttctctctctcttctgtagcggcatcattgcaagtgcaattgctagaagcagcaattgcggcgtcgcttttgcagtttcgcaatattagctcaagcgctgtacctaacctcatccgctgggaaggccccgtcttccccgccgagccacactgtaccctatacgttaaggacgtcgacgatttctggaacaagatccttgaaacaaacagcaactgggtcgccgagatgcccgatccggatgagacaatgaagcatttcggcgccagaacttgcggcgccgatagcggcttagccaccggcaactcagacgaggtcacgagtcttccgacccagctgcgcgctctcaacggacactggaccctcggggccaagatgtgccaccgcatcggttgccgtgagaacacgggtctatactggtgcaatgtgatctctccctgcttacacagtgccttgggacggacaacgcctggggcgttcgagtttctgccaagtccctctagctccatggctcccatatccgggacatgtgctgccacggaagcgacggctgtctctattcgggcgaccccatgtccggcgtcgaagccttccctgacagcgaccgcgaggctgcacacacccgcatcttggcgggatatgatcactgctccgatcccgcaaatgtcgaccctttga

SEQ ID NO: 884 - protein, 231 aa, Myceliophthora thermophilia
MACSAFVFSLSSVAASLQVQLLEAAIAASLLQFRNISSSAVPNLIRWEGPVFPAEPHCTLYVKDVDDFWNKILETNSNWVAEMPDPDETMKHFGARTCGADSGLATGNSDEVTSLPTQLRALNGHWTLGAKMCHRIGCRENTGLYWCNVISPCLHSALGRTTPGAFEFLPSPSSSMAPISGTCAATEATAVSIRATPCPASKPSLTATARLHTPASWRDMITAPIPQMSTL

SEQ ID NO: 885 - protein, 215 aa, Myceliophthora thermophilia
LQVQLLEAAIAASLLQFRNISSSAVPNLIRWEGPVFPAEPHCTLYVKDVDDFWNKILETNSNWVAEMPDPDETMKHFGARTCGADSGLATGNSDEVTSLPTQLRALNGHWTLGAKMCHRIGCRENTGLYWCNVISPCLHSALGRTTPGAFEFLPSPSSSMAPISGTCAATEATAVSIRATPCPASKPSLTATARLHTPASWRDMITAPIPQMSTL

SEQ ID NO: 886 - DNA, 1563 bp, Myceliophthora thermophilia
atggcgcctttgcagaggcgtagcccgccgcgttgcgggcacatcactctcgccgttgtccccgtcgatggcacgggcattccatgcctcgaggccgctcctggcagtcaagccggtgttactggccgatattggagaaggtacgggttgttgatcgctcccttagaagtcgacctgaagctgaccgtcaccctgccaggcatcgtcgagtgcgagatcatccaatggttcgtcgaacccggggcgcgcgtcgaggagttctcccctctgtgcgaagtgcaaagcgacaaggcgtcggtagaaattaccagccgtttcgcaggcgtcgtcaagaagctatactatgacgctggcgagatggccaaggttggcaagccgtttgtcgacatcgacatccaaggggatgccaacgaggaaaattcggggaccgcggcacggcccgaagctcctcaaatagaggctgaggctcagcctgcccagaaacctgtccgttctcccgccgaggagacggcgacggcacaggttgatatttcgaccgggcaagaaccggcaacagcacctaaggctaagggaaagcatgcgaccctggcgacgcccgcggtcaggcacttatccaaggaactaaaggtggacatctcagagatagacggtacgggcaaagatggtcgtgtgcttaaggaggatatctacaagttcgtcgagaggaggaacgcagcatccactcaagccccctcgccgcagccggcccctgcgacacaatctaccggtgcactcgcgccaaacgtttcgaccgcggggccgcagcaagaaacacgggtccccctcacaagaactcaggagatgatgttcaagaccatgacccgctcccttagcatcccccatttcctctacgccgacgaggtagactttacctcgctcgtcgagctccgcgggcgcctaaacaaggtcctcgccaagtccggcccgagcgacggtcaggtgggcaagctttcgttcctgcccttcatcatcaaagccgtctccatggccctctataagttcccaatcctcaatgctcgcgtcgacgttgacggtaccggcaatggcaacgggaacggaaaacctgccctcgtcttccgcagccaacacaacattggtgtagccatggacacgccctcgggcctcctggtgcccgttatcaagaacgtcggcagtctcaacatcctggacatcgcggccgagctcgcgcggttgcaaggcctcgccaacgccggcaagctctcgccgcaggacatgacgggcggcaccataacggtcagcaacattgggaacatcggcggcacttatctttcgcccgtggtggtcgagcgcgaggtggccatcctgggggtcggccgcatgcgcaccgtgccggccttctcgaccgtgcccggagagaaagaccgcgtggtgcgccggcaagtttgcaacttcagctggagcgctgatcacagggtcatcgacggcgcaaccatggctagggcagccgaggttgtgagagctattgtggaggagccggatgtcatggttatgcatctgaggtag

SEQ ID NO: 887 - protein, 520 aa, Myceliophthora thermophilia
MAPLQRRSPPRCGHITLAVVPVDGTGIPCLEAAPGSQAGVTGRYWRRYGLLIAPLEVDLKLTVTLPGIVECEIIQWFVEPGARVEEFSPLCEVQSDKASVEITSRFAGVVKKLYYDAGEMAKVGKPFVDIDIQGDANEENSGTAARPEAPQIEAEAQPAQKPVRSPAEETATAQVDISTGQEPATAPKAKGKHATLATPAVRHLSKELKVDISEIDGTGKDGRVLKEDIYKFVERRNAASTQAPSPQPAPATQSTGALAPNVSTAGPQQETRVPLTRTQEMMFKTMTRSLSIPHFLYADEVDFTSLVELRGRLNKVLAKSGPSDGQVGKLSFLPFIIKAVSMALYKFPILNARVDVDGTGNGNGNGKPALVFRSQHNIGVAMDTPSGLLVPVIKNVGSLNILDIAAELARLQGLANAGKLSPQDMTGGTITVSNIGNIGGTYLSPVVVEREVAILGVGRMRTVPAFSTVPGEKDRVVRRQVCNFSWSADHRVIDGATMARAAEVVRAIVEEPDVMVMHLR

SEQ ID NO: 888 - protein, 496 aa, Myceliophthora thermophilia
TGIPCLEAAPGSQAGVTGRYWRRYGLLIAPLEVDLKLTVTLPGIVECEIIQWFVEPGARVEEFSPLCEVQSDKASVEITSRFAGVVKKLYYDAGEMAKVGKPFVDIDIQGDANEENSGTAARPEAPQIEAEAQPAQKPVRSPAEETATAQVDISTGQEPATAPKAKGKHATLATPAVRHLSKELKVDISEIDGTGKDGRVLKEDIYKFVERRNAASTQAPSPQPAPATQSTGALAPNVSTAGPQQETRVPLTRTQEMMFKTMTRSLSIPHFLYADEVDFTSLVELRGRLNKVLAKSGPSDGQVGKLSFLPFIIKAVSMALYKFPILNARVDVDGTGNGNGNGKPALVFRSQHNIGVAMDTPSGLLVPVIKNVGSLNILDIAAELARLQGLANAGKLSPQDMTGGTITVSNIGNIGGTYLSPVVVEREVAILGVGRMRTVPAFSTVPGEKDRVVRRQVCNFSWSADHRVIDGATMARAAEVVRAIVEEPDVMVMHLR

SEQ ID NO: 889 - DNA, 1722 bp, Myceliophthora thermophilia
atgtgcggcattctcggtctcatcctcgccgactcgacgagcatcgaagccgccgtcgacctgcacgagagcctctactacctccagcaccgcggccaggacgcctgtggcatcgcgacatgcggggctggcggtaggatattccagtgcaagggcaatggcatggcctccaaggtgttcgaggacggcaagcgggttgccgacctgccgggatacatgggcatcgcccacttgcggtacccgacggcgggaacgagctcgagcgccgagagccagccgttctacgtcaattccccctacggcatctgcttcgcgcacaacggcaacctgatcaacgcccccgagctgcgcgacttcctcgacaaggaggcgcaccgccacgtcaataccgactcggacagcgagctgatgctcaacgtcttcgccaacgccctcaacgagacgggtaaggcccgtgtcaacaccgacgacatcttcagcgcgctcgcccagacgtatcagcgctgccagggcgcctgggccgtcaccgccatgatcgccggcttcggcatcctcgccttccgcgactcgttcggcatccgcccgctgatcatgggcagccggccctcgcccaccgtcgagggcggcaccgactacatgctggcctcggagagtattgccctccgccagctcggcttccgccatttccaggacatcctcccgggccaggccgtcttcatccagaagggcggcaagccccagttccaccaggtcaccgaggccaaggcctactcgcccgacgtcttcgaatacgtctattttgccaggcccgattccgtcatggacggcatctcggtcaacagcagccggcagaacatgggcgccaagctggccgacaagctgcgcgaggtgctgggcgaggacggcatcaaggagatcgacgtgatcatcccggtcccggagacgagcaacacggcggcggcggtcgtgtcggagcgcctcggcaagcccttctccaacggcttcatcaagaaccgctacgtgtaccgcaccttcatcctgcccggccagaaggcgcgccagaagagcgtccgccgcaagctgagcgccatggagtccgagttccacggccgcgtcgtctgcctcgtggacgactccatcgtgcgcggtaccaccagcagggagattgtcagcatggcgcgcgaggccggcgcccgcaaggtcatctttgcgagctgcgcgcctcccatcaagtaccctcatatctacggcatcgacctggccaccccacaagaactcatcgcgcacgaaaagacgcgccaggacattgcccggcacatcaacgccgacgacgtcatctaccaggatctggacgacctgaagtcggcatgcatggaggccgcgcccggcgggagagtcaccgatttcgaggtgggcgtcttctgcggcaagtaccgcacgcccgtgcccgagggctacttcgagcacctcaacgagagccggggcaagaagcgcaagatcgccgagcaggcggtgccgacgccctcaacagcccccggcagcggcgggcccgtcaatctggcagctaagcgcacactcgtcgacggcggcgctgccggcttgggacaggcgggagccgatgaggatgtgaacggggaggacaagatcgccgccttggcgaacccgccgaacaggcaagatatcagcattcataacctggcgaacgagccgactacccgatag

SEQ ID NO: 890 - protein, 573 aa, Myceliophthora thermophilia
MCGILGLILADSTSIEAAVDLHESLYYLQHRGQDACGIATCGAGGRIFQCKGNGMASKVFEDGKRVADLPGYMGIAHLRYPTAGTSSSAESQPFYVNSPYGICFAHNGNLINAPELRDFLDKEAHRHVNTDSDSELMLNVFANALNETGKARVNTDDIFSALAQTYQRCQGAWAVTAMIAGFGILAFRDSFGIRPLIMGSRPSPTVEGGTDYMLASESIALRQLGFRHFQDILPGQAVFIQKGGKPQFHQVTEAKAYSPDVFEYVYFARPDSVMDGISVNSSRQNMGAKLADKLREVLGEDGIKEIDVIIPVPETSNTAAAVVSERLGKPFSNGFIKNRYVYRTFILPGQKARQKSVRRKLSAMESEFHGRVVCLVDDSIVRGTTSREIVSMAREAGARKVIFASCAPPIKYPHIYGIDLATPQELIAHEKTRQDIARHINADDVIYQDLDDLKSACMEAAPGGRVTDFEVGVFCGKYRTPVPEGYFEHLNESRGKKRKIAEQAVPTPSTAPGSGGPVNLAAKRTLVDGGAAGLGQAGADEDVNGEDKIAALANPPNRQDISIHNLANEPTTR

SEQ ID NO: 891 - protein, 556 aa, Myceliophthora thermophilia
AVDLHESLYYLQHRGQDACGIATCGAGGRIFQCKGNGMASKVFEDGKRVADLPGYMGIAHLRYPTAGTSSSAESQPFYVNSPYGICFAHNGNLINAPELRDFLDKEAHRHVNTDSDSELMLNVFANALNETGKARVNTDDIFSALAQTYQRCQGAWAVTAMIAGFGILAFRDSFGIRPLIMGSRPSPTVEGGTDYMLASESIALRQLGFRHFQDILPGQAVFIQKGGKPQFHQVTEAKAYSPDVFEYVYFARPDSVMDGISVNSSRQNMGAKLADKLREVLGEDGIKEIDVIIPVPETSNTAAAVVSERLGKPFSNGFIKNRYVYRTFILPGQKARQKSVRRKLSAMESEFHGRVVCLVDDSIVRGTTSREIVSMAREAGARKVIFASCAPPIKYPHIYGIDLATPQELIAHEKTRQDIARHINADDVIYQDLDDLKSACMEAAPGGRVTDFEVGVFCGKYRTPVPEGYFEHLNESRGKKRKIAEQAVPTPSTAPGSGGPVNLAAKRTLVDGGAAGLGQAGADEDVNGEDKIAALANPPNRQDISIHNLANEPTTR

SEQ ID NO: 892 - DNA, 1875 bp, Myceliophthora thermophilia
atgcgtcgcgccgccgtccacgcgttccgcacaagcatccaatgcagcgcctggggccttcgctttagcactcgccggggcctatctccgctgctcctgccaaccgcgaccaggcggagcgccgccgccgcagcctcgacccgccgattcctgtccacgtccccacctgcccgcagcagtagcagcaccagcaccagcaaccgcctgcgggcggccgagcacgcaccggtgcccggcgaaccgctgcgatcatccatgtctctccgccgggcgtccgtggcgctggtatcggcgctggtcggctacggcgcgtactactcgtacaacggcaacgccaccgacagcctcgtcaagcgggcgtactcgtcctcgtcctcgtcgagcagcacgtcgaccgcgacgggcgccgccgcagcgcagacccggtccgtcttggtcatcggcgccgacgagctgcacacgggcacctttgtcggcgacgggccaatctccaagacgacgagcgacgacgggaggagagtcatcgagatgttgacccccgagcaggcgacccagatgctccgcaggaacgaggagtcgtactatgtcaatcgcggccagggcgtagtgcgctacgatgtcgtgcagctgcctagcaacgaccccatcgaggatgaccatgccgagaaaatcgtcgagataccggacaagagcgaggctcacgggagtagcgactggatgttctggggtgtctttgacggccattctggatggacgacctcggcaaagctgcgccaggctctcgtcacattcgtcgcccgcgaactgaacgacacgtatagggcagcgaatctcatgccgtcgcaggaggcagtcgacgccgccatcaagaggggcttccttaaactggacgacgatatcgtcaaccagagcgtgcagaaggtcttgcaagccaacaataagattgccgccgccgagctgctggccccggccctgtccggctcctgcgcgctcctctcattctacgacagccggtccaagttgctacgcgtcgcatgcacgggcgactcacgggccgtcctgggtcgccggtcagcgtcgggcaagtgggttgccacgccgctctcggtcgaccagacgggcagcaaccccgacgaggcggcccggctacagaagcagcaccccaacgagccgcacgtcgtccgcaacggccgtgtcctgggtggattggaacctacacgcgcctttggagacgccagctacaagtggacccgcgaggtttcggagaagctgaggcagcacttctttgcccgctccgtctcgtccttcctcaagacccccccatacgtgaccgccgagccggtcatcagcacaaccaagattgagccggagaacggcgactttgtcgtcatggcgaccgatggcctctgggagatgctcaccaacgaggaggttgttggcctggtcggcaagtggctcgagagccagcagatcaccaagagcgactccgcctcgcagttcgactcggtctggacgcgcatctttggatcgcgcggcaccaggggcggtctgcctgtcgaagcgccccgggagacagacgccggcggcgggcagaagactccgttccgcggggcgcggcagtggggaggctcgtccgacaagttcgtcgtgcaggatcccaacgccgccacacacctggtgcgcaacgcgctcggtggcaagaatcaggagcaggtatcggcgctgctgacgctgccggctcccttctcgaggcggtatcgggacgacttgacggtgcaggtcatcttcttcggaaacggcgagcggacgggcgaggtggtggtgaatctggacgcgaccgcgccggcaaaggagcctgtcaaggccaagctgtga

SEQ ID NO: 893 - protein, 624 aa, Myceliophthora thermophilia
MRRAAVHAFRTSIQCSAWGLRFSTRRGLSPLLLPTATRRSAAAAASTRRFLSTSPPARSSSSTSTSNRLRAAEHAPVPGEPLRSSMSLRRASVALVSALVGYGAYYSYNGNATDSLVKRAYSSSSSSSSTSTATGAAAAQTRSVLVIGADELHTGTFVGDGPISKTTSDDGRRVIEMLTPEQATQMLRRNEESYYVNRGQGVVRYDVVQLPSNDPIEDDHAEKIVEIPDKSEAHGSSDWMFWGVFDGHSGWTTSAKLRQALVTFVARELNDTYRAANLMPSQEAVDAAIKRGFLKLDDDIVNQSVQKVLQANNKIAAAELLAPALSGSCALLSFYDSRSKLLRVACTGDSRAVLGRRSASGKWVATPLSVDQTGSNPDEAARLQKQHPNEPHVVRNGRVLGGLEPTRAFGDASYKWTREVSEKLRQHFFARSVSSFLKTPPYVTAEPVISTTKIEPENGDFVVMATDGLWEMLTNEEVVGLVGKWLESQQITKSDSASQFDSVWTRIFGSRGTRGGLPVEAPRETDAGGGQKTPFRGARQWGGSSDKFVVQDPNAATHLVRNALGGKNQEQVSALLTLPAPFSRRYRDDLTVQVIFFGNGERTGEVVVNLDATAPAKEPVKAKL

SEQ ID NO: 894 - protein, 580 aa, Myceliophthora thermophilia
ASTRRFLSTSPPARSSSSTSTSNRLRAAEHAPVPGEPLRSSMSLRRASVALVSALVGYGAYYSYNGNATDSLVKRAYSSSSSSSSTSTATGAAAAQTRSVLVIGADELHTGTFVGDGPISKTTSDDGRRVIEMLTPEQATQMLRRNEESYYVNRGQGVVRYDVVQLPSNDPIEDDHAEKIVEIPDKSEAHGSSDWMFWGVFDGHSGWTTSAKLRQALVTFVARELNDTYRAANLMPSQEAVDAAIKRGFLKLDDDIVNQSVQKVLQANNKIAAAELLAPALSGSCALLSFYDSRSKLLRVACTGDSRAVLGRRSASGKWVATPLSVDQTGSNPDEAARLQKQHPNEPHVVRNGRVLGGLEPTRAFGDASYKWTREVSEKLRQHFFARSVSSFLKTPPYVTAEPVISTTKIEPENGDFVVMATDGLWEMLTNEEVVGLVGKWLESQQITKSDSASQFDSVWTRIFGSRGTRGGLPVEAPRETDAGGGQKTPFRGARQWGGSSDKFVVQDPNAATHLVRNALGGKNQEQVSALLTLPAPFSRRYRDDLTVQVIFFGNGERTGEVVVNLDATAPAKEPVKAKL

SEQ ID NO: 895 - DNA, 1128 bp, Myceliophthora thermophilia
atgagcaagacggtattgatccttggggggtcatttgccggcctccatgtcgcccacgcgctcctgaagaaaagcatcagggatgtcaaagtcatcctcgtgtccaagagcacgcacttctactggaatttggcctccgtgcgggccattattcccggccagatcgaggatgatgacatcttcaagcctctcgaggacgccctcgcccggtacccggcagagtcgtgggagctggtcatcggcagcgcaacccatgccgactttgactccaagacagtcgatatcgccgttggcgacggaacggcccggacgatttcgtacgaccaactggtcctcgccaccggagcccgcacccaccccgacgcgccctggaaagccacgggtagctacgagcaggcgctcgccaccctccacgccacctcggccaaggtcaaggacgcccagcacatcgtagtagcaggagcaggcgggaccggcatcgaggttgcgggcgagctgggctacgagtacggcaagaccaaggagatcgtcctcctctgcgcgggagataagctggccaacgggcacggcatcgcggaggcggcggccaacgagctcaggaagctcgacgtaaccatccggtacgatgcgcgcgcggcggaagtgcggccgtccggcaacggcactggcaaaacggacgtggttctcgccggcggcgagaccatcaccacggacctgtacctcccgacgacggggcaggtccccaacaccgagtacatccccgcgcggttcctcagcacggaccagcgctcggcgacggtgctggtggacgagtacctacgcgtgtccggcgcgcgggacgtctgggcgtgcggcgacgtggtgagccagccgcgcgccggcttcttcatcacgcagaagcaggccgccagcgtggccaggaacgtcgaggcggcgctggccggcctgaagccgacggtcgcaaagggcccgccggtggacatctttgcctgcgctgtgggaaggggcaggggcgtcggacgggtcaacaattcgatcaggatgccgagcctcgtggtgtggctggccaaggggcgcaacctggggatcccgatgttgaaggggtacatcgacgggagcgttgcgtga

SEQ ID NO: 896 - protein, 375 aa, Myceliophthora thermophilia
MSKTVLILGGSFAGLHVAHALLKKSIRDVKVILVSKSTHFYWNLASVRAIIPGQIEDDDIFKPLEDALARYPAESWELVIGSATHADFDSKTVDIAVGDGTARTISYDQLVLATGARTHPDAPWKATGSYEQALATLHATSAKVKDAQHIVVAGAGGTGIEVAGELGYEYGKTKEIVLLCAGDKLANGHGIAEAAANELRKLDVTIRYDARAAEVRPSGNGTGKTDVVLAGGETITTDLYLPTTGQVPNTEYIPARFLSTDQRSATVLVDEYLRVSGARDVWACGDVVSQPRAGFFITQKQAASVARNVEAALAGLKPTVAKGPPVDIFACAVGRGRGVGRVNNSIRMPSLVVWLAKGRNLGIPMLKGYIDGSVA

SEQ ID NO: 897 - protein, 355 aa, Myceliophthora thermophilia
LLKKSIRDVKVILVSKSTHFYWNLASVRAIIPGQIEDDDIFKPLEDALARYPAESWELVIGSATHADFDSKTVDIAVGDGTARTISYDQLVLATGARTHPDAPWKATGSYEQALATLHATSAKVKDAQHIVVAGAGGTGIEVAGELGYEYGKTKEIVLLCAGDKLANGHGIAEAAANELRKLDVTIRYDARAAEVRPSGNGTGKTDVVLAGGETITTDLYLPTTGQVPNTEYIPARFLSTDQRSATVLVDEYLRVSGARDVWACGDVVSQPRAGFFITQKQAASVARNVEAALAGLKPTVAKGPPVDIFACAVGRGRGVGRVNNSIRMPSLVVWLAKGRNLGIPMLKGYIDGSVA

SEQ ID NO: 898 - DNA, 366 bp, Myceliophthora thermophilia
atggccgtgcaagtcgtgccaggttttagcctgacgaaccggtggctcctatataccagctacttcctagctccggcacagttcgtgtcgggactgaacagcaactgccctagcgacatcggctttctcgcatataactggtacacccagatccaatggtacaagctcatgtcgggcaaggacgagatccacgccatctccctactcctgccgcacttcaacctgctctattgtcatgctacttatgggttggccgctcgttatgtggacagagcttatcatatcgcgaaaccatctcgagtcggagaccgatatgatagctgtatggctctttgttgcccaggtggcgacaatgttgatgcctag

SEQ ID NO: 899 - protein, 121 aa, Myceliophthora thermophilia
MAVQVVPGFSLTNRWLLYTSYFLAPAQFVSGLNSNCPSDIGFLAYNWYTQIQWYKLMSGKDEIHAISLLLPHFNLLYCHATYGLAARYVDRAYHIAKPSRVGDRYDSCMALCCPGGDNVDA

SEQ ID NO: 900 - protein, 90 aa, Myceliophthora thermophilia
LNSNCPSDIGFLAYNWYTQIQWYKLMSGKDEIHAISLLLPHFNLLYCHATYGLAARYVDRAYHIAKPSRVGDRYDSCMALCCPGGDNVDA

SEQ ID NO: 901 - DNA, 2070 bp, Myceliophthora thermophilia
atgtcgaggttcgcgaaagcacggcgcctgataccgccgctcgccgtcgccggcgcggcgggcggtgttctctactacacgtaccgaccccgaaacattcccggatacgagggccccgtggtcccgccgcccatctatggcgccgacggcaccttcaagctgcctcgtttcccccgcgtcaagtcgcgccttgagcagatcgccgacctgaagaagagcagcagcggggttgggggcgggggcgagggcaagggcgagggcgagggcgaggagtacgacatcctggtcatcggcgccggcgcgacgggctcgggagtcgccctcgacgccgccacgcgtgggctcaaggtggccgtggtcgagcgcggcgacttcagctgcgggaccagcagcaagagcaccaaactcgtccacggcggagtgcgctacctcgagaaggccgtatggaacctggattacgcccagtacgagctggtcaaggaggcgctcaaggagcgcacctacttcctgcagaccgcgccgcacctcagcagctggctccccatcatgctgccgctcgaccgctggtggaaggtcccctactactgggcgggcaccaagttctacgacttcctcgccggcagcgagggcatagagagctcctacttcctgaccaagagcaaggccatcgacgccttccccatgctgaagcagaccgacctcgtcggcgccctggtctattacgacggcgcccacaacgactcccgcatgaacgtgtcgctcgccatgacggccgccctgtacggcgccaccgtcgtcaaccacatggaggtcaccgggctcctcaaggacgacaagggcaagctctgcggagccaccgtcaaggacaagattcccgagagggacggcaagccggccgaggagttcggcatccgggccaagtgcgtcatcaactgcacggggcccttcaccgacagcatcaggaagatggacgaccccaactgcaaggagatcgtcgctcccgcctcgggcgtgcacgtcatcctgcccggctactacagccccggcaagatgggcctgatcgaccccgcgacgtcggacggccgggtcatcttcttcctgccctggcagggcaacaccatcgccggcaccacggacgagccggccgtggtgtcgacgaacccgctaccggacgagaagtcgatccagtggatcctcaacgagatccgccactacctctccccggacatcaacgtccgccgcggggacgtgctggccgcctggtccggcctgcgcccgctcgtcaaggaccccaaggccaagaacaccgagtcgctcgtgcgcagccacctcgtcgacatctccgagtccggcctgctcacctgcgccggcggcaagtggaccacgtaccggcagatggccgaggagtgcgtcgacgccgccatcaaggccttcaacctccagccgaaaccggtcgtcaacgcgccccgcgtcagcggcaccgagaacgtcgacgacggcgccaacctcgacggcacctgccagacccaccgcgtgcgcctcatcggcgcccacggctggagccgcaccctcttcatccacctgatccagcacttcggcgtcgagaccgaggtcgccaagcaccttaccgagagctacggcgaccgcgcctggaccgtcgccgccttgtgccgccccaccgacaagcgcttccccgcccgcggcgagcgcatctcgcagctctaccccttcgtcgacggcgaggtccgctacgccgtccgccacgagtacgcccagacggccgccgacgtcctcgcccgccgcacccgcctcgccttcctcaacgcccaggccgccctcgaggccctccccaagatcatcgacatcatgtcgcaggagctcggctgggacaagaagaggcaggacttcgagtggaacgagaccgtcaaattcctcgagtcaatgggcctgccccagcctatgctctcggtcacccggaagcagatcgagcagggcaagatcgactggaagtcttcgctcgagtatcgcatgtactcgcgacacgataagccggtcgacgaggaggagtag

SEQ ID NO: 902 - protein, 689 aa, Myceliophthora thermophilia
MSRFAKARRLIPPLAVAGAAGGVLYYTYRPRNIPGYEGPVVPPPIYGADGTFKLPRFPRVKSRLEQIADLKKSSSGVGGGGEGKGEGEGEEYDILVIGAGATGSGVALDAATRGLKVAVVERGDFSCGTSSKSTKLVHGGVRYLEKAVWNLDYAQYELVKEALKERTYFLQTAPHLSSWLPIMLPLDRWWKVPYYWAGTKFYDFLAGSEGIESSYFLTKSKAIDAFPMLKQTDLVGALVYYDGAHNDSRMNVSLAMTAALYGATVVNHMEVTGLLKDDKGKLCGATVKDKIPERDGKPAEEFGIRAKCVINCTGPFTDSIRKMDDPNCKEIVAPASGVHVILPGYYSPGKMGLIDPATSDGRVIFFLPWQGNTIAGTTDEPAVVSTNPLPDEKSIQWILNEIRHYLSPDINVRRGDVLAAWSGLRPLVKDPKAKNTESLVRSHLVDISESGLLTCAGGKWTTYRQMAEECVDAAIKAFNLQPKPVVNAPRVSGTENVDDGANLDGTCQTHRVRLIGAHGWSRTLFIHLIQHFGVETEVAKHLTESYGDRAWTVAALCRPTDKRFPARGERISQLYPFVDGEVRYAVRHEYAQTAADVLARRTRLAFLNAQAALEALPKIIDIMSQELGWDKKRQDFEWNETVKFLESMGLPQPMLSVTRKQIEQGKIDWKSSLEYRMYSRHDKPVDEEE

SEQ ID NO: 903 - protein, 670 aa, Myceliophthora thermophilia
AGGVLYYTYRPRNIPGYEGPVVPPPIYGADGTFKLPRFPRVKSRLEQIADLKKSSSGVGGGGEGKGEGEGEEYDILVIGAGATGSGVALDAATRGLKVAVVERGDFSCGTSSKSTKLVHGGVRYLEKAVWNLDYAQYELVKEALKERTYFLQTAPHLSSWLPIMLPLDRWWKVPYYWAGTKFYDFLAGSEGIESSYFLTKSKAIDAFPMLKQTDLVGALVYYDGAHNDSRMNVSLAMTAALYGATVVNHMEVTGLLKDDKGKLCGATVKDKIPERDGKPAEEFGIRAKCVINCTGPFTDSIRKMDDPNCKEIVAPASGVHVILPGYYSPGKMGLIDPATSDGRVIFFLPWQGNTIAGTTDEPAVVSTNPLPDEKSIQWILNEIRHYLSPDINVRRGDVLAAWSGLRPLVKDPKAKNTESLVRSHLVDISESGLLTCAGGKWTTYRQMAEECVDAAIKAFNLQPKPVVNAPRVSGTENVDDGANLDGTCQTHRVRLIGAHGWSRTLFIHLIQHFGVETEVAKHLTESYGDRAWTVAALCRPTDKRFPARGERISQLYPFVDGEVRYAVRHEYAQTAADVLARRTRLAFLNAQAALEALPKIIDIMSQELGWDKKRQDFEWNETVKFLESMGLPQPMLSVTRKQIEQGKIDWKSSLEYRMYSRHDKPVDEEE

SEQ ID NO: 904 - DNA, 1656 bp, Myceliophthora thermophilia
atgtcgacatgggcagggcagccgaaggtgaagggtagctccgagaccatgcgcatggtgctcttgacctgcgtctctatcggtattaccttcacctggggcgttgaaatgacatactgcacgccatacctcctatcgctcggactgtccaagggacagacatcgttggtctgggttgccggccctttatcgggcttgatcgtgcaacccatcatcggggtcatcgctgacgagtccacgtcaagatggggcaggagacggcccatcatcgctgttggctccgtagttgttgccctcagtcttctggctctgggcttcaccaaggaaatcgtgggctctctcgttacagacccgacgacagcccgggcgttgaccattatgctggccgtcctatccctctactgcgtggacttttccatcaatgcagtcatgtcctgcgcgaggagtctcgttgtcgacactttgccaatacataagcagcaggcgggggctgcctggtcgagccgcatgaactcgctcggccacatcatcggctatgccatgggagcccttgacctcgtgcagatctttggcccaacgctgggcgacacccagttcaagcagctcaccatcattgccgccctgggcatgctgctcacctcgtccattacgtgctgggctgtcacggagcgcgtcctcgtctcggtgcggcgcgaccctcggcgggcccagggtcggttcaaggtcgtccggcagatttactccacgctgctgacgctgccccctcgcatccggggcatatgcaacgctgtgttttggtcatggattggctggtttccctttatcatctacagcagcacctgggtcggcgagacctacttccgctacgacgtctcccccgacgccagggcttctaacgatgcgctgggcaacatgggccgcattgggagcatggccctgaccgtatattcgaccgtgtcattcgccagcgcctggattctcccggccctgatccaagctcccgaagacgagaccttcacccaccgcccacccgctagcctcaagcccctgatcgaggccttcaacaaggtcaagcccgacctgttgaccgcgtgggtcgcaagcagtgtcctgttcgcgctcgccatgttcttcaccccattcgccacgtctttccgcttcgccaccgccattgtcgccttctgcggcatcccctggtgcctctcccaatgggcgccggtcaccttcctcggggtggaggtcaacaaattaagcggcgccgctggcccggccatccgccccgtgaccccccgtcgccggctctccaacgacatcagcagcatcgagctgctccgcctcgagcatggcccggcggccctcgagagcagccgcgcctcgggcggcggcgccccccacacttcgacgggcgaactgagcggcgtttactttggaatcctcaacatctacgtcaccattccacagtttctcagcaccctcatgagcggcgtcgtctttgcgctgctcgagcccggcaagagccccgaattggctaccgaggcccttcccagcgagcatagcgacccgaccgggcccaatgccatcgccgtctgcatgtttctgggcgctctgagctccctggtggcggcgtggtcgacggcccgattgaggcggctgtga

SEQ ID NO: 905 - protein, 551 aa, Myceliophthora thermophilia
MSTWAGQPKVKGSSETMRMVLLTCVSIGITFTWGVEMTYCTPYLLSLGLSKGQTSLVWVAGPLSGLIVQPIIGVIADESTSRWGRRRPIIAVGSVVVALSLLALGFTKEIVGSLVTDPTTARALTIMLAVLSLYCVDFSINAVMSCARSLVVDTLPIHKQQAGAAWSSRMNSLGHIIGYAMGALDLVQIFGPTLGDTQFKQLTIIAALGMLLTSSITCWAVTERVLVSVRRDPRRAQGRFKVVRQIYSTLLTLPPRIRGICNAVFWSWIGWFPFIIYSSTWVGETYFRYDVSPDARASNDALGNMGRIGSMALTVYSTVSFASAWILPALIQAPEDETFTHRPPASLKPLIEAFNKVKPDLLTAWVASSVLFALAMFFTPFATSFRFATAIVAFCGIPWCLSQWAPVTFLGVEVNKLSGAAGPAIRPVTPRRRLSNDISSIELLRLEHGPAALESSRASGGGAPHTSTGELSGVYFGILNIYVTIPQFLSTLMSGVVFALLEPGKSPELATEALPSEHSDPTGPNAIAVCMFLGALSSLVAAWSTARLRRL

SEQ ID NO: 906 - protein, 517 aa, Myceliophthora thermophilia
VEMTYCTPYLLSLGLSKGQTSLVWVAGPLSGLIVQPIIGVIADESTSRWGRRRPIIAVGSVVVALSLLALGFTKEIVGSLVTDPTTARALTIMLAVLSLYCVDFSINAVMSCARSLVVDTLPIHKQQAGAAWSSRMNSLGHIIGYAMGALDLVQIFGPTLGDTQFKQLTIIAALGMLLTSSITCWAVTERVLVSVRRDPRRAQGRFKVVRQIYSTLLTLPPRIRGICNAVFWSWIGWFPFIIYSSTWVGETYFRYDVSPDARASNDALGNMGRIGSMALTVYSTVSFASAWILPALIQAPEDETFTHRPPASLKPLIEAFNKVKPDLLTAWVASSVLFALAMFFTPFATSFRFATAIVAFCGIPWCLSQWAPVTFLGVEVNKLSGAAGPAIRPVTPRRRLSNDISSIELLRLEHGPAALESSRASGGGAPHTSTGELSGVYFGILNIYVTIPQFLSTLMSGVVFALLEPGKSPELATEALPSEHSDPTGPNAIAVCMFLGALSSLVAAWSTARLRRL

SEQ ID NO: 907 - DNA, 1464 bp, Myceliophthora thermophilia
atgctctcggctgtggccgccatagtggccatcgctgttctcgcggtcgcatggctgttccacatcaatgcggccatgcaagatgtacccgagggcgcgcacagagcgtcgccacaccgctggaccaaacagcagctccaggacacctacgagcgggtgaaacagaagccagttgatttcaccaaacttttaccgccacgtctgggaaggcgctatgtcgtggttggcggatcgggcctcgtgggaggagacattgtcttgcagcttctgcagcgcggcgagtctcccgagagcattcgcatagtcgacttcgcgcccatcaatcggcgggacatgctcgaggcggccgcccgctgtgactttgtgaaagccgacatcgcctcacgctcgtctgtcgagaccgccttcgccaagccgtggccaggatccgttgccaagctgcccctgactgtctttcacacggcagctgttgttcggccgcaggaacgtagcctgctgctctaccaccgcatcagccgcgtgaaccgagatggcgccgtgaatgtcctcgagactgcccgggcagccggcgccgacgtcttcatcgcgacctcgtccgcctccgtcagcatcgtcccccctaacttctggatctggccctggcagcgctctcctaccaactatttccaggtggccgacgagaaggatttcgacgctcctctgcgcccgcaccacctcttcttctccaactatgccttctccaaggccgaggccgagcgcgccgtatgcaccgccaaccgggacagcttccgcacgggcactatacgtccgggccagccgatctacggccaaaagacggaccccgtgctcaggataatactccgcacgggtgacaatcacacctggatcccccacgtcgtgcagaactttgtcaactcgcgcaacgtggccctcgcccatctccagttcgaagccgccctcgcccccaagggcgacaacggcgaacccatgcccgcttgtgccggccgcaccttcaacgtgacggaccccggcccgcccatcgcctataccgacctgtactacgcggccgaacagctctccgtcacgcccacccgtacgctgccccggcagccgctggctttgctgctcgtcgcctacgtcatcgaggcttggtgtctcctgctcgcgcgtttgcccttcctgacaaccctctttggcctgcgcgagccctccggcccgattcacgtgctccaggcggccgtcttcaacgtgtcgatccacacgatcgtagacgatagtgcggcacggaagagcgtggccgagggcggcatcgggtatcaggggggttgcacgacgattgagggcctctgccagcagctcctcgagtggaatcgggagcatgaggggactggtggggagaatggggaagtgcctgacgggaggatggcgaaggctgcatcgaccgcgcgaggtgtcacggcctga

SEQ ID NO: 908 - protein, 487 aa, Myceliophthora thermophilia
MLSAVAAIVAIAVLAVAWLFHINAAMQDVPEGAHRASPHRWTKQQLQDTYERVKQKPVDFTKLLPPRLGRRYVVVGGSGLVGGDIVLQLLQRGESPESIRIVDFAPINRRDMLEAAARCDFVKADIASRSSVETAFAKPWPGSVAKLPLTVFHTAAVVRPQERSLLLYHRISRVNRDGAVNVLETARAAGADVFIATSSASVSIVPPNFWIWPWQRSPTNYFQVADEKDFDAPLRPHHLFFSNYAFSKAEAERAVCTANRDSFRTGTIRPGQPIYGQKTDPVLRIILRTGDNHTWIPHVVQNFVNSRNVALAHLQFEAALAPKGDNGEPMPACAGRTFNVTDPGPPIAYTDLYYAAEQLSVTPTRTLPRQPLALLLVAYVIEAWCLLLARLPFLTTLFGLREPSGPIHVLQAAVFNVSIHTIVDDSAARKSVAEGGIGYQGGCTTIEGLCQQLLEWNREHEGTGGENGEVPDGRMAKAASTARGVTA

SEQ ID NO: 909 - protein, 462 aa, Myceliophthora thermophilia
MQDVPEGAHRASPHRWTKQQLQDTYERVKQKPVDFTKLLPPRLGRRYVVVGGSGLVGGDIVLQLLQRGESPESIRIVDFAPINRRDMLEAAARCDFVKADIASRSSVETAFAKPWPGSVAKLPLTVFHTAAVVRPQERSLLLYHRISRVNRDGAVNVLETARAAGADVFIATSSASVSIVPPNFWIWPWQRSPTNYFQVADEKDFDAPLRPHHLFFSNYAFSKAEAERAVCTANRDSFRTGTIRPGQPIYGQKTDPVLRIILRTGDNHTWIPHVVQNFVNSRNVALAHLQFEAALAPKGDNGEPMPACAGRTFNVTDPGPPIAYTDLYYAAEQLSVTPTRTLPRQPLALLLVAYVIEAWCLLLARLPFLTTLFGLREPSGPIHVLQAAVFNVSIHTIVDDSAARKSVAEGGIGYQGGCTTIEGLCQQLLEWNREHEGTGGENGEVPDGRMAKAASTARGVTA

SEQ ID NO: 910 - DNA, 1575 bp, Myceliophthora thermophilia
atgtaccggcttcctatcatcgttgcattgtccgttgcgagagcggccgctgctttccaacaacaacaacagcaacaacaatctgaagaaatcaacagttacgcatggagtccgctgacccccgaatatcagctcacatgtcccgcgcccttcttgagacatcgacgggcatcttccggttccaaattcgggttcccgagagcccgcagcgaggtggatgaaggatactactatgaactctcggcaggacatgaccttccagacccgtgggaggggccagagcagtgtcacgcagggttctgcctcttctcgaacccggaggcaggtggcggcctgtccctgatcacgacaccccgcatagcccacctgatcgccacctcgaaggagattcccgagagcatggggatcgagccagaagccttctatgaggccgaggtcccgggcaaggggagcgggctgatcgccaaccgaacgatccgcaagggcgaggtcatcatgcagcgggggccggtcctgctgatccagtcagtcccgcacatagacctcgagcccgggaggcgactggagctgtaccaggccgccgtcgaccggctgccggagccgatgcggtcccagttcctgcgccagaccggcgacacggtctacgacaaggtcgagaagaactcgttccgcgtcttcctggacggcgacaggaagcactccatccacctcggtctctttcccgacgtgagcaagttcaaccacgactgccggccaaacgtgcactaccgtatctcggacctcacgcacaccaccgtcgcggtccgcgacatccccgcgggcgaagagctgacaatctcgtacatctacggcctaaagccgcgggcggagcgcctcgagcagctgagcgagtgggggtttacgtgtacgtgcccgcagtgcgcgctctcggagcccgaggcgggcgcgtccgacaaccggatccggcagatcaaaatgctcgaggacgagatcgaggagctcgtggccaagggggcacctcgcgggcaccaccaccaccgcaaccgcaaccaaggcccagatgatacatcgttttcgccgtctcccgaatcaggaggccaagaatcgaccgcaaccacagccacagccacggccacggcaacggcaacggctgaaacggcggcggtggcggcggcggcagtgctccggcccgagctgggcgccaggctggtcgagctgtaccgcgaggagcggctggacgcctacatggcgcccgcgctgacccgcgccgccctgctctactccatgttcgggcacgaggagcgcgcgcgcgagtacgcccgcgaggccgtcggcgccctcgggcgcgaggtgggcccccgcgccggcgacctcggcccgatgcgcgccctcgcccgcgatcccaaatcgcactggtcctgggccgtcaaggtcaccagtggcgacaagaaggcggcggcggcggcggcggcggcggggaggaggaggaacgggaccttgggggcgaggtctgggggggagcgggcacggctggggacagggaagggggagaaggagaagggtgtgcgcggatga

SEQ ID NO: 911 - protein, 524 aa, Myceliophthora thermophilia
MYRLPIIVALSVARAAAAFQQQQQQQQSEEINSYAWSPLTPEYQLTCPAPFLRHRRASSGSKFGFPRARSEVDEGYYYELSAGHDLPDPWEGPEQCHAGFCLFSNPEAGGGLSLITTPRIAHLIATSKEIPESMGIEPEAFYEAEVPGKGSGLIANRTIRKGEVIMQRGPVLLIQSVPHIDLEPGRRLELYQAAVDRLPEPMRSQFLRQTGDTVYDKVEKNSFRVFLDGDRKHSIHLGLFPDVSKFNHDCRPNVHYRISDLTHTTVAVRDIPAGEELTISYIYGLKPRAERLEQLSEWGFTCTCPQCALSEPEAGASDNRIRQIKMLEDEIEELVAKGAPRGHHHHRNRNQGPDDTSFSPSPESGGQESTATTATATATATATAETAAVAAAAVLRPELGARLVELYREERLDAYMAPALTRAALLYSMFGHEERAREYAREAVGALGREVGPRAGDLGPMRALARDPKSHWSWAVKVTSGDKKAAAAAAAAGRRRNGTLGARSGGERARLGTGKGEKEKGVRG

SEQ ID NO: 912 - protein, 506 aa, Myceliophthora thermophilia
FQQQQQQQQSEEINSYAWSPLTPEYQLTCPAPFLRHRRASSGSKFGFPRARSEVDEGYYYELSAGHDLPDPWEGPEQCHAGFCLFSNPEAGGGLSLITTPRIAHLIATSKEIPESMGIEPEAFYEAEVPGKGSGLIANRTIRKGEVIMQRGPVLLIQSVPHIDLEPGRRLELYQAAVDRLPEPMRSQFLRQTGDTVYDKVEKNSFRVFLDGDRKHSIHLGLFPDVSKFNHDCRPNVHYRISDLTHTTVAVRDIPAGEELTISYIYGLKPRAERLEQLSEWGFTCTCPQCALSEPEAGASDNRIRQIKMLEDEIEELVAKGAPRGHHHHRNRNQGPDDTSFSPSPESGGQESTATTATATATATATAETAAVAAAAVLRPELGARLVELYREERLDAYMAPALTRAALLYSMFGHEERAREYAREAVGALGREVGPRAGDLGPMRALARDPKSHWSWAVKVTSGDKKAAAAAAAAGRRRNGTLGARSGGERARLGTGKGEKEKGVRG

SEQ ID NO: 913 - DNA, 1314 bp, Myceliophthora thermophilia
atggcgcggcgccagctgtcgtgggcccgggtgctcttcttcggactgctcgcaccgctggccacagcagcggatgccaatgccgaagcagaagggggctcggcagacggcctggcctacgaaaccatccaaaacgtggacatctacaccgataatgccacagctcccaccacccaaacacccccggtcgagggatggtgggattcgagaatctgttcgggatcctactgcgtctacaccaaccgtcgcatcgccaatgggcgaggtctcgtggccgtcaccagaaccgacgatttccagaagtttgagcgcatcgagcagcacctcaaccgcggcgagaacaattacctgcaagatcccgtccccttcaagaccaccgacatacccaacaagggctctggcgtgaccgccacgaagaacatccgccgcggcaagcccctcatggcctggtcgcccgtgctcgcggtgcacaagtccttcttcgaggacgtcaccaagcgaaaggagcgcgaccgcctcctcgaggccgccgtctccttcctgcccgaggccacccgcgccgtgttcgacaagcagcgcgcccgccccggcgacagcgagggcaccaaccggcgctcggtcgaggacattgtgctggcgcacccgttcgagatcgacctgggctacgtcagctaccggcagatgaactccgaggagcactcccggcactacgtcaactacccggaggtggccgtcttccagcacgactgccggcccaacgtggccaccttcatcgacgcctccttcgccctgcgcgccaccgtcgcccgccgcgtccaggagggcgaggagctgaccgtcgcttacgtcgaccccttcctaccgcgcgagcagagggcctcctgggtacgccagtaccgcggcttcccggacagcaaggggtgcccgtgcagcgcgtgcagcccgcccggcgggcccaaggggggcaaggccgcggagggggacaagcggctcaaggagatcctgaggatccgcggcgaactgcggaatcccgatagcaccaaggtggactttgccacgatcgagcgcttcctaaagctgtacgaggaggaccgcctgcacgccaagctggccgaggcgtacgagctggcggcgctcaacttcaactacctgggcgacgacaagagggccaagaagtacgccgatctggcggtgcaggcgggcatcatcgagcagggcgtcgacgccaacgacgtgatcgccatgaagatcatggccaaggatatcaagggacactattcgtatcggtacacgctcaagagacggggaaaataa

SEQ ID NO: 914 - protein, 437 aa, Myceliophthora thermophilia
MARRQLSWARVLFFGLLAPLATAADANAEAEGGSADGLAYETIQNVDIYTDNATAPTTQTPPVEGWWDSRICSGSYCVYTNRRIANGRGLVAVTRTDDFQKFERIEQHLNRGENNYLQDPVPFKTTDIPNKGSGVTATKNIRRGKPLMAWSPVLAVHKSFFEDVTKRKERDRLLEAAVSFLPEATRAVFDKQRARPGDSEGTNRRSVEDIVLAHPFEIDLGYVSYRQMNSEEHSRHYVNYPEVAVFQHDCRPNVATFIDASFALRATVARRVQEGEELTVAYVDPFLPREQRASWVRQYRGFPDSKGCPCSACSPPGGPKGGKAAEGDKRLKEILRIRGELRNPDSTKVDFATIERFLKLYEEDRLHAKLAEAYELAALNFNYLGDDKRAKKYADLAVQAGIIEQGVDANDVIAMKIMAKDIKGHYSYRYTLKRRGK

SEQ ID NO: 915 - protein, 414 aa, Myceliophthora thermophilia
ADANAEAEGGSADGLAYETIQNVDIYTDNATAPTTQTPPVEGWWDSRICSGSYCVYTNRRIANGRGLVAVTRTDDFQKFERIEQHLNRGENNYLQDPVPFKTTDIPNKGSGVTATKNIRRGKPLMAWSPVLAVHKSFFEDVTKRKERDRLLEAAVSFLPEATRAVFDKQRARPGDSEGTNRRSVEDIVLAHPFEIDLGYVSYRQMNSEEHSRHYVNYPEVAVFQHDCRPNVATFIDASFALRATVARRVQEGEELTVAYVDPFLPREQRASWVRQYRGFPDSKGCPCSACSPPGGPKGGKAAEGDKRLKEILRIRGELRNPDSTKVDFATIERFLKLYEEDRLHAKLAEAYELAALNFNYLGDDKRAKKYADLAVQAGIIEQGVDANDVIAMKIMAKDIKGHYSYRYTLKRRGK

SEQ ID NO: 916 - DNA, 1989 bp, Myceliophthora thermophilia
atggagagtcgaacgcggagctgggccctcggcctgagcttcattgggttttttgcccttctattttctctgggcttcgtccagcaagtcaaggcggacgatgtttctgaatatggcaccgtcatcggtattgatctgggcaccacttattcatgcgtgggtgtgatgcagaagggcaaggtcgagattctggtcaatgaccaaggaaaccgtatcaccccctcatatgtcgcctttaccgatgaggaaaggctggtcggagacgcggccaagaaccaggccgccgcgaatcccttcaggactatcttcgacgtcaagcgcctgattggccgcaagttctcggagaaggaagtccagaatgatatcaagcacttcccctacaaggtcgcctccaaggatgacaagcccgttgtcaaggttgaggtgggcggtacggagaagaccttcacacccgaggaaatctcggccatggttctttccaagatgaaggagaccgccgagtcctacctgggcaagaaggtcacccacgccgtcgtcaccgttcctgcctacttcaacgataaccaaaggcaggccacaaaggatgccggcatgatcgctggtctcaacgttctccgcatcgtcaacgagcccaccgccgccgccatcgcctacggtctggacaagacggagggcgagcgccaaatcattgtctatgacctcggtggtggcactttcgatgtgtcgctcctctctattgaccagggtgtctttgaggttctggctaccgccggtgatacccacctcggtggtgaggatttcgaccagcgcatcatcaaccacttcgccaaggccttcaacaagaagcacggtgtcgatatcaccaccgatgccaaggctatgggcaagctcaagcgtgaggccgagaaggcgaagcgcaccctgtcgagccagatgtccactcgtatcgagattgaggctttctaccagggcaaggacttcagcgagaccctgactcgcgccaagttcgaggagctcaacgccgacctgttccgcaagacgctcaagcctgtcgagcaggttctcaaggacgccaagatcagcaagagcgatgttgacgacattgtgctcgtcggtggttccacccgtattcccaagatccagtccctcattgaggagtactttggcaagactgccagcaagggtatcaaccctgacgaggccgtcgcttttggcgccgctgtccaggctggtgtgctgagcggcgaggagggcactgaggagattgtgctcatggatgtcaacccgctcaccctcggtatcgagaccacgggcggtgtcatgaccaagctcatcccccgcaacaccccgatcccgacccgcaagagccagatcttctcgaccgccgccgacaaccagcccgtcgtcctcatccaggtctacgagggtgagcggtcgatgaccaaggacaacaaccttctcggcaagttcgagcttaccggcattcctcccgccccccgtggcgtgcctcagattgaggtcacttttgagctcgacgccaacggaattctcaaggtctctgcccacgacaagggcaccggaaagggcgagtcgatcaccattaccaacgacaaaggacgtctcacccaggaggagattgaccgcatgatcgccgaggccgaaaagtatgccgaggaggacaaggccacccgcgagcgcattgaggctcgcaacggtctggagaactacgctttcagcctgaagaaccaggtaaacgacgaggagggtctgggtaagaagatttcggaggaggacaaggagaccattctcgaggccgtcaaggagacccaggactggctcgaggagaacgctgctactgccaccacggaggactttgaggagcagaaagagaagctcagcaacgtggcgtacccgatcaccagcaagctctactcgggcggcagcgctggtggtgatgacgatgagccgagtgcccacgatgagctttga

SEQ ID NO: 917 - protein, 662 aa, Myceliophthora thermophilia
MESRTRSWALGLSFIGFFALLFSLGFVQQVKADDVSEYGTVIGIDLGTTYSCVGVMQKGKVEILVNDQGNRITPSYVAFTDEERLVGDAAKNQAAANPFRTIFDVKRLIGRKFSEKEVQNDIKHFPYKVASKDDKPVVKVEVGGTEKTFTPEEISAMVLSKMKETAESYLGKKVTHAVVTVPAYFNDNQRQATKDAGMIAGLNVLRIVNEPTAAAIAYGLDKTEGERQIIVYDLGGGTFDVSLLSIDQGVFEVLATAGDTHLGGEDFDQRIINHFAKAFNKKHGVDITTDAKAMGKLKREAEKAKRTLSSQMSTRIEIEAFYQGKDFSETLTRAKFEELNADLFRKTLKPVEQVLKDAKISKSDVDDIVLVGGSTRIPKIQSLIEEYFGKTASKGINPDEAVAFGAAVQAGVLSGEEGTEEIVLMDVNPLTLGIETTGGVMTKLIPRNTPIPTRKSQIFSTAADNQPVVLIQVYEGERSMTKDNNLLGKFELTGIPPAPRGVPQIEVTFELDANGILKVSAHDKGTGKGESITITNDKGRLTQEEIDRMIAEAEKYAEEDKATRERIEARNGLENYAFSLKNQVNDEEGLGKKISEEDKETILEAVKETQDWLEENAATATTEDFEEQKEKLSNVAYPITSKLYSGGSAGGDDDEPSAHDEL

SEQ ID NO: 918 - protein, 630 aa, Myceliophthora thermophilia
DDVSEYGTVIGIDLGTTYSCVGVMQKGKVEILVNDQGNRITPSYVAFTDEERLVGDAAKNQAAANPFRTIFDVKRLIGRKFSEKEVQNDIKHFPYKVASKDDKPVVKVEVGGTEKTFTPEEISAMVLSKMKETAESYLGKKVTHAVVTVPAYFNDNQRQATKDAGMIAGLNVLRIVNEPTAAAIAYGLDKTEGERQIIVYDLGGGTFDVSLLSIDQGVFEVLATAGDTHLGGEDFDQRIINHFAKAFNKKHGVDITTDAKAMGKLKREAEKAKRTLSSQMSTRIEIEAFYQGKDFSETLTRAKFEELNADLFRKTLKPVEQVLKDAKISKSDVDDIVLVGGSTRIPKIQSLIEEYFGKTASKGINPDEAVAFGAAVQAGVLSGEEGTEEIVLMDVNPLTLGIETTGGVMTKLIPRNTPIPTRKSQIFSTAADNQPVVLIQVYEGERSMTKDNNLLGKFELTGIPPAPRGVPQIEVTFELDANGILKVSAHDKGTGKGESITITNDKGRLTQEEIDRMIAEAEKYAEEDKATRERIEARNGLENYAFSLKNQVNDEEGLGKKISEEDKETILEAVKETQDWLEENAATATTEDFEEQKEKLSNVAYPITSKLYSGGSAGGDDDEPSAHDEL

SEQ ID NO: 919 - DNA, 1359 bp, Myceliophthora thermophilia
atgaagctctcggcactttcgctcggccttctggccatttttacgccgttgaccgcagcgtggacgaaagaaggcgagtcgcggtcgtctccctccaaacgcaaatccctcgaccgtgaaatcttccgcgtccgcgacgagttgattgcccacgagggaccggacgtcactttctacgactttctcggcgtcagccggtcggcaagctacgaggaaatcaacaaggcgtacaagaagaaatcgcggcagctccatcccgacaaggtcaggcagcaattgacggccgaacgcgccaaagcccagaaggagaagaacaagcagaacaagggcaaaccgggggtccatgtgacgacgaagccgccgaccgccgccgagatcaaggccgccatcaagcgtgcctcagagcgccaagcccgcctctccatcgtcgccgacatcttgcgcggcccgggccgtgaccgttacgattacttcctcgccaatggattccccacatggaagggcaccgagtactactacagccgctaccgccccggtttgggcaccgccatggttggtgtgttcctcttcgccggcggcgcgacgcactaccttgccctctacatgagctggaagcgccagcgcgagttcgttgagcggtacatcaagtttgcccgccacgccgcctggggcgataacctcggcatcaccattcccggtgttgacgggcaatccggccccgctgctgccccgcctccgcagcagcaactgtacgaggatgaagagggacgggccgtgcccatgaaccgcaagatgcgccggatgcaggaacgtgacgccaagaaggaggcacagggtgctgggcgcaaggcacgtcgcgggcgtccttcccccgccgcatcaggatctgcgactccccggccgcagccccagggtagcgggcctaccgggtcaaagaagcgtgtcgttgctgagaacggcaagattctcgtggtcgactccctcggtgatgtgtacctcgaacaggaggatgaggatggcaacgtggctgagttcctgcttgaccccgacgaacttgtccgccccaccttcaaggacactgctgtcgttcgcctcccactgtggatttaccgactgaccctgggacgcgtcttttcgaagcgcaccgaggacggaggtgaaggtggtgacgaggtaacggaggtcgaagtcgtggatgatgatgcggattcagagcctggaaaggccacgccaagcagcggttctgctgaggatttcgagctgctcgaaaagtcggttgatgaactggggcaggctaagagcagcggcacccagaaaccgggaggcaaggccagcaagcggaagaacaagagaaagtga

SEQ ID NO: 920 - protein, 452 aa, Myceliophthora thermophilia
MKLSALSLGLLAIFTPLTAAWTKEGESRSSPSKRKSLDREIFRVRDELIAHEGPDVTFYDFLGVSRSASYEEINKAYKKKSRQLHPDKVRQQLTAERAKAQKEKNKQNKGKPGVHVTTKPPTAAEIKAAIKRASERQARLSIVADILRGPGRDRYDYFLANGFPTWKGTEYYYSRYRPGLGTAMVGVFLFAGGATHYLALYMSWKRQREFVERYIKFARHAAWGDNLGITIPGVDGQSGPAAAPPPQQQLYEDEEGRAVPMNRKMRRMQERDAKKEAQGAGRKARRGRPSPAASGSATPRPQPQGSGPTGSKKRVVAENGKILVVDSLGDVYLEQEDEDGNVAEFLLDPDELVRPTFKDTAVVRLPLWIYRLTLGRVFSKRTEDGGEGGDEVTEVEVVDDDADSEPGKATPSSGSAEDFELLEKSVDELGQAKSSGTQKPGGKASKRKNKRK

SEQ ID NO: 921 - protein, 432 aa, Myceliophthora thermophilia
WTKEGESRSSPSKRKSLDREIFRVRDELIAHEGPDVTFYDFLGVSRSASYEEINKAYKKKSRQLHPDKVRQQLTAERAKAQKEKNKQNKGKPGVHVTTKPPTAAEIKAAIKRASERQARLSIVADILRGPGRDRYDYFLANGFPTWKGTEYYYSRYRPGLGTAMVGVFLFAGGATHYLALYMSWKRQREFVERYIKFARHAAWGDNLGITIPGVDGQSGPAAAPPPQQQLYEDEEGRAVPMNRKMRRMQERDAKKEAQGAGRKARRGRPSPAASGSATPRPQPQGSGPTGSKKRVVAENGKILVVDSLGDVYLEQEDEDGNVAEFLLDPDELVRPTFKDTAVVRLPLWIYRLTLGRVFSKRTEDGGEGGDEVTEVEVVDDDADSEPGKATPSSGSAEDFELLEKSVDELGQAKSSGTQKPGGKASKRKNKRK

SEQ ID NO: 922 - DNA, 2889 bp, Myceliophthora thermophilia
atggactcctctgccgcagcgtcgacgctgaccaggcagcgcctcagcgtcgcctttttgtcgcttgctgcaaccgcgaccgtgggctacttctgctaccgcatctaccacccgccgctccccgagccccccccggaccgtcggctgcaccggagcaacgccgtccgccaccgccggcgctcgattcccgatgtcgtccgcgcccacagccgcgagccctcggaggcgtccaccacctcggtcgagtccaacgccgacgagaacgcccacctcggcaacgtgcagcccttgaacgacgccgagacggtcgccgacgaccatgtcatggaggacaactggtacgatgatgacgccaacaacaaccagttcggcggccagcagcagcgcgccggccagaacattgtcagcctgctgttccgcgtctccgaggataatgcgcgccgcaacgcctatgtccaccggggctgcctgtgcaacggctgtggcgtcactccgatccgcggcatccgctaccgctgcgccaactgcaccgactttgacctctgcgagacgtgcgagtcccaagggcttcacacaaagacccacatcttctacaagatccgcgtccccgtcccgcgtctcggctcccgcccgctgcagcccgtctggtaccccggcgaccccgagaactgcgtccggctgctgcccaagcacctgatggccaagctctccaaggagacgggcttcgagcgccccgagctggaagccctctgggagcagtggaccttcatggccagcaccgagtggcgcgaggacccggacgagctcggcctggccatggaccgcaagacgtttgagcgctacctggttccgtccggcggctaccgccacatcggcccgaacctgttgcacgaccgcatgttcgccttctacgacgacaacaacgacgacctcatcggcttctccgagttcctgcgcggcaccgcgtaccgcaagaggaaggacaggctccgcaaggtgttcaagggctacgacatcgacggcgacggctacatcagccgccgcgactgcttgcgcttgttccgggcctattacgccatcttcaagcacatgcacagggacatcctcgacggcctcgacgaccaggttatgagctccaccgaggtcgagcagctggtgaccagcaggcagcccctgagcagtctcttcggccgcgagggcggcttctcccacgccgacacggaccgccccatggagggcaaggtggtcaacctgaacaccggcgaggtccacatcacggatggttcaaacagggccgtcagcgaggacacccccgacactgacgaccgccggtccatcctgaccaacgtcttcacccggcaggcacacgttgccgagagcctcttcatgcccgtcatggaccacccgcggtcgaccggcgagaggacctcgggcctggagtatctgaacgggttgctcaacccgccgacgcggatcggcgacctgcccgcgcttctcctcggcgagactcgtgatggcgatgactttgtcgtcgtggtcaatggcagcggtggccaggacggccgcagcggggacgacaactcgtcgagcgcgagagaaaacggcggtgcttccggctccggcgacgacagtggcgataatcgcggcagcgcagataggtcctcaggatccgcatccggcgatgggaatcagcgccggccgtcgtaccgggtcgcctcgagccgtcgcctgagggtgaacgcgcggagaaagttgtttgaccgttggaagaggaggcagttctacctggacgaagaggaaggaatgctgccgccggaggattggagcgaggacgacgacatccttgccaacctcaacaacggcccagttgacgaatccaaatctgcccagccacccttatcctctcggtctcgctcgtcctccaaagtcagatttgcccaagataccgatgacttcgaggtcagatccaacccttcgacttcctcaaggagcatccccgagagatggggcggcattgagatccccgatgccgagcgagacttgggcaaagagatcttctaccaagtcagccagcaagccttcaacgagatcctagacacgctgttcaaggcgaaagaggacctagccgtgcaggctgccgagacgaaagcgctgcgcgaccagtacaggcccttgttcgagtcgataaaccccgacgaagacgatgaaaaggacggcgcaacccccgcaaagtccaaggcgaccgaagaccccgaattgcaggagttgctcgccaggagcggctataccatcgacgagggcacccagaatgacacccagaatgacacccccaagcccgaagaggacgagaccagcgatgaggggggcgacgacgattcatcattgccgcctccagttccagaggaagggtccgccgacgggtcctcctcctcgtctgccgaagtcgatacgtaccgcgacccgaccctgccgcagttccggcccaattccgaggcagcagcatcccgggcgggccgaacccagcagaacccaccacaccaggcggcggcgacagcctcgacgagcgagggccgccgagccgagccgaacccgccacctgcctcctcccggaaatcaagcgccaaagcagccggaaaaacagcggccggggacgggaagaaaccagccgccgccgccgccgccgccgccgcacccaagcagccgatcccgcgcaccacgctggtcaactggaagcgtctcgacctggccgagcaggaggccaaggagcgcggcgggtggggccggctgagctacgacgagttcgagcgcatctacaagagcgccgaggcccgcggcaaccggctggactacctgggcacgtggatcgacttttgcatcccgtcgacgtaa

SEQ ID NO: 923 - protein, 962 aa, Myceliophthora thermophilia
MDSSAAASTLTRQRLSVAFLSLAATATVGYFCYRIYHPPLPEPPPDRRLHRSNAVRHRRRSIPDVVRAHSREPSEASTTSVESNADENAHLGNVQPLNDAETVADDHVMEDNWYDDDANNNQFGGQQQRAGQNIVSLLFRVSEDNARRNAYVHRGCLCNGCGVTPIRGIRYRCANCTDFDLCETCESQGLHTKTHIFYKIRVPVPRLGSRPLQPVWYPGDPENCVRLLPKHLMAKLSKETGFERPELEALWEQWTFMASTEWREDPDELGLAMDRKTFERYLVPSGGYRHIGPNLLHDRMFAFYDDNNDDLIGFSEFLRGTAYRKRKDRLRKVFKGYDIDGDGYISRRDCLRLFRAYYAIFKHMHRDILDGLDDQVMSSTEVEQLVTSRQPLSSLFGREGGFSHADTDRPMEGKVVNLNTGEVHITDGSNRAVSEDTPDTDDRRSILTNVFTRQAHVAESLFMPVMDHPRSTGERTSGLEYLNGLLNPPTRIGDLPALLLGETRDGDDFVVVVNGSGGQDGRSGDDNSSSARENGGASGSGDDSGDNRGSADRSSGSASGDGNQRRPSYRVASSRRLRVNARRKLFDRWKRRQFYLDEEEGMLPPEDWSEDDDILANLNNGPVDESKSAQPPLSSRSRSSSKVRFAQDTDDFEVRSNPSTSSRSIPERWGGIEIPDAERDLGKEIFYQVSQQAFNEILDTLFKAKEDLAVQAAETKALRDQYRPLFESINPDEDDEKDGATPAKSKATEDPELQELLARSGYTIDEGTQNDTQNDTPKPEEDETSDEGGDDDSSLPPPVPEEGSADGSSSSSAEVDTYRDPTLPQFRPNSEAAASRAGRTQQNPPHQAAATASTSEGRRAEPNPPPASSRKSSAKAAGKTAAGDGKKPAAAAAAAAAPKQPIPRTTLVNWKRLDLAEQEAKERGGWGRLSYDEFERIYKSAEARGNRLDYLGTWIDFCIPST

SEQ ID NO: 924 - protein, 933 aa, Myceliophthora thermophilia
YFCYRIYHPPLPEPPPDRRLHRSNAVRHRRRSIPDVVRAHSREPSEASTTSVESNADENAHLGNVQPLNDAETVADDHVMEDNWYDDDANNNQFGGQQQRAGQNIVSLLFRVSEDNARRNAYVHRGCLCNGCGVTPIRGIRYRCANCTDFDLCETCESQGLHTKTHIFYKIRVPVPRLGSRPLQPVWYPGDPENCVRLLPKHLMAKLSKETGFERPELEALWEQWTFMASTEWREDPDELGLAMDRKTFERYLVPSGGYRHIGPNLLHDRMFAFYDDNNDDLIGFSEFLRGTAYRKRKDRLRKVFKGYDIDGDGYISRRDCLRLFRAYYAIFKHMHRDILDGLDDQVMSSTEVEQLVTSRQPLSSLFGREGGFSHADTDRPMEGKVVNLNTGEVHITDGSNRAVSEDTPDTDDRRSILTNVFTRQAHVAESLFMPVMDHPRSTGERTSGLEYLNGLLNPPTRIGDLPALLLGETRDGDDFVVVVNGSGGQDGRSGDDNSSSARENGGASGSGDDSGDNRGSADRSSGSASGDGNQRRPSYRVASSRRLRVNARRKLFDRWKRRQFYLDEEEGMLPPEDWSEDDDILANLNNGPVDESKSAQPPLSSRSRSSSKVRFAQDTDDFEVRSNPSTSSRSIPERWGGIEIPDAERDLGKEIFYQVSQQAFNEILDTLFKAKEDLAVQAAETKALRDQYRPLFESINPDEDDEKDGATPAKSKATEDPELQELLARSGYTIDEGTQNDTQNDTPKPEEDETSDEGGDDDSSLPPPVPEEGSADGSSSSSAEVDTYRDPTLPQFRPNSEAAASRAGRTQQNPPHQAAATASTSEGRRAEPNPPPASSRKSSAKAAGKTAAGDGKKPAAAAAAAAAPKQPIPRTTLVNWKRLDLAEQEAKERGGWGRLSYDEFERIYKSAEARGNRLDYLGTWIDFCIPST

SEQ ID NO: 925 - DNA, 1098 bp, Myceliophthora thermophilia
atgtcagcgcttctctcgctcctgggctggagcttcctccccggcctcgtcacaggctggacgcagtctctctattacagcatcaccatccgcgcgggcgaccccaagccgcaaccgggcaccccgcgctgggcggagcaccgccggcgcatccacatcgccgtcgtcgccctctacctgctctacaccatctacgaagccgactacgagctccggcgccagggcaccttctacacggacctgggcgtgccgctgcacgcgaccgagcgcgaggtcaagtcgcgcttccgccgcctcgcggcgctgcaccacccggacaaggccggcggcgccgacgacgccaacgcctactttgtgcacctcaagacggccgccgacacgctgacggacccggcccggcggtttgcgtacgagcgcttcggcccggacgccgtcgcctcgtgggccccgcgctgcgtcaccgtccgcgacttcgtcatccgcggcgcccagaccctcgtgccctactacgccgtcgccgccgtcgccatgtacggcctcggcctgctcggctacctcgactggggccggtacgagcgctggctggtgctggccgtcctgttcgtcttcgaggcccacaccgtcacgcggcccgacatgcccgggatcctcgacaaggtggtcaacccgctgctggggaggctgctgggccgcgcgccgtatctgcagttccaggccatcgcgctggcgaggaacctgagcgtgacggtgtacattgcgttttcccagatcgggccgctgctgtcggcggacacgtcgagcggccaggtggtggtgagcgggagcaggggcggcaacgaagagaaggcgttgagggaggggctggagaggttagagatgacagtcaagaggctggatgcggatgctaccaggttactggaaacggagctggcgccttttgccggggatgagcagatacggagttccatgtgggccaaggtcaaggagtggctggttcaaaacacgatccgctcggaccctatggttcgggatgctttggggcggtcgtttgcgaagcgcagaatcgacgcgccggcaggggccagaggcacccggtag

SEQ ID NO: 926 - protein, 365 aa, Myceliophthora thermophilia
MSALLSLLGWSFLPGLVTGWTQSLYYSITIRAGDPKPQPGTPRWAEHRRRIHIAVVALYLLYTIYEADYELRRQGTFYTDLGVPLHATEREVKSRFRRLAALHHPDKAGGADDANAYFVHLKTAADTLTDPARRFAYERFGPDAVASWAPRCVTVRDFVIRGAQTLVPYYAVAAVAMYGLGLLGYLDWGRYERWLVLAVLFVFEAHTVTRPDMPGILDKVVNPLLGRLLGRAPYLQFQAIALARNLSVTVYIAFSQIGPLLSADTSSGQVVVSGSRGGNEEKALREGLERLEMTVKRLDADATRLLETELAPFAGDEQIRSSMWAKVKEWLVQNTIRSDPMVRDALGRSFAKRRIDAPAGARGTR

SEQ ID NO: 927 - protein, 346 aa, Myceliophthora thermophilia
WTQSLYYSITIRAGDPKPQPGTPRWAEHRRRIHIAVVALYLLYTIYEADYELRRQGTFYTDLGVPLHATEREVKSRFRRLAALHHPDKAGGADDANAYFVHLKTAADTLTDPARRFAYERFGPDAVASWAPRCVTVRDFVIRGAQTLVPYYAVAAVAMYGLGLLGYLDWGRYERWLVLAVLFVFEAHTVTRPDMPGILDKVVNPLLGRLLGRAPYLQFQAIALARNLSVTVYIAFSQIGPLLSADTSSGQVVVSGSRGGNEEKALREGLERLEMTVKRLDADATRLLETELAPFAGDEQIRSSMWAKVKEWLVQNTIRSDPMVRDALGRSFAKRRIDAPAGARGTR

SEQ ID NO: 928 - DNA, 1548 bp, Myceliophthora thermophilia
atgctggttcgcctctcaacgttggcgctcgccgccggcatcctttcgacgccttcgctggtgacgtgtctgtcagcgtctgacataccccccgacacccccgtttcgaggcttctggcgtcggcgcaggctcatctctcgaagggcgaaaccggcgatgcactcgtgtactacgatgccgccgttgcaagggatcccaacaactacctcaccttcttcaagcgcgctactacctacctctcattggggcgcacatcgcaagccaccgacgattttcagaaggtgctatcgctcaagcccgggttcgagggcgcccacgtgcaactaggcaagctgaaggctcgtatgggcgattgggatgcggcaaaggagcattaccggaaagcgaagagaaatgaggagattgcaagcttggaggaagccaaaggcgcagccgcgctcgccgaggcagccgccaagtcggagaactgggaggagtgcatcaagcaggccgacgatgccatattgacggcgagtcgcgcattggcgctccgggaacttcgcgcaaggtgtgcgttcgagggaggtgcaatggagagaggcatcggcgaccttcagcacgtgttgcagatgaagccaggcgacacagcgccccacgtcaagatttctgccattcaattttttgggctgggagaactgcaagagggaatggcttccattcggaagtgcctgcattctgacccggattccaaggaatgcaagaggttgttgaacgccgagaagaagatggagaaggtgttccaaaaagtcaccaaggcgctagggaagaatcaatacatgacggcggtacgacagcttgtaccgtcaggggagggtgaagggttgatcaaggaggttaaggaccagatgcgcgtactgagggaggacggcataattcccaaggcggcaggcaacgtcctcatcgctaggctagtggagatggcttgccaggcatactacgagtcaaatagcaagaaggccaaggaatactgcgatgagtcccttaaatacgacgagaacgctctctatggtctgctctaccgcgccaaacatctcatggatgccgaagaatttgaagagagcatcaatacgctccgcaaggcggccgaagcccacccgggcaaggacgacgtaatcaacccgcttatgcagaaggctcaggtttcgctcaagcgcagcaagaacaaggactactacaaggttctgggcgtggcacatgacgcagacgagcgccagatcaagtcggcctaccgcaaactgtccaagctgcaccaccccgacaaggcggtcaagcagggactcacaaaggaggaagccgagaagaagatggcagccatcaacgaggcgtacgaggtgcttagcaacccggagctgcgcgcccgcttcgaccgcggcgacgatccaaactcgcacgagcagcagcagtaccacggccacccgtttggcggcggccatccgttcatgttccagcagggcggtccacagttccagttcaacttcaggggttccggcttcccatttgggttttag

SEQ ID NO: 929 - protein, 515 aa, Myceliophthora thermophilia
MLVRLSTLALAAGILSTPSLVTCLSASDIPPDTPVSRLLASAQAHLSKGETGDALVYYDAAVARDPNNYLTFFKRATTYLSLGRTSQATDDFQKVLSLKPGFEGAHVQLGKLKARMGDWDAAKEHYRKAKRNEEIASLEEAKGAAALAEAAAKSENWEECIKQADDAILTASRALALRELRARCAFEGGAMERGIGDLQHVLQMKPGDTAPHVKISAIQFFGLGELQEGMASIRKCLHSDPDSKECKRLLNAEKKMEKVFQKVTKALGKNQYMTAVRQLVPSGEGEGLIKEVKDQMRVLREDGIIPKAAGNVLIARLVEMACQAYYESNSKKAKEYCDESLKYDENALYGLLYRAKHLMDAEEFEESINTLRKAAEAHPGKDDVINPLMQKAQVSLKRSKNKDYYKVLGVAHDADERQIKSAYRKLSKLHHPDKAVKQGLTKEEAEKKMAAINEAYEVLSNPELRARFDRGDDPNSHEQQQYHGHPFGGGHPFMFQQGGPQFQFNFRGSGFPFGF

SEQ ID NO: 930 - protein, 489 aa, Myceliophthora thermophilia
SDIPPDTPVSRLLASAQAHLSKGETGDALVYYDAAVARDPNNYLTFFKRATTYLSLGRTSQATDDFQKVLSLKPGFEGAHVQLGKLKARMGDWDAAKEHYRKAKRNEEIASLEEAKGAAALAEAAAKSENWEECIKQADDAILTASRALALRELRARCAFEGGAMERGIGDLQHVLQMKPGDTAPHVKISAIQFFGLGELQEGMASIRKCLHSDPDSKECKRLLNAEKKMEKVFQKVTKALGKNQYMTAVRQLVPSGEGEGLIKEVKDQMRVLREDGIIPKAAGNVLIARLVEMACQAYYESNSKKAKEYCDESLKYDENALYGLLYRAKHLMDAEEFEESINTLRKAAEAHPGKDDVINPLMQKAQVSLKRSKNKDYYKVLGVAHDADERQIKSAYRKLSKLHHPDKAVKQGLTKEEAEKKMAAINEAYEVLSNPELRARFDRGDDPNSHEQQQYHGHPFGGGHPFMFQQGGPQFQFNFRGSGFPFGF

SEQ ID NO: 931 - DNA, 1590 bp, Myceliophthora thermophilia
atgcgtcgcctcaatttggttctgttagcatcgctccagctgtgccgagctcggcagcacagtttcagtgtccatgacgacctgctagcatatccccagtatgaggttgtctttgcggacgattccatctcagaagccgacgccctcgccatccttgagtcgtcgcacaaaaaagatgccacctacaacaccgcagacttctcgcaatccgacctgtctaacgtgcgcgagtccgcacccgccggatcttccgggacgacaagccgcgagagcacacctgaggccggcgaagacgacgaagatgcgccaattggtgaaacgtacgaattgatcaacgacgatccatggcactatctctgcgccgtgcccattcttgcacccccgcccgtgcttaaccggacggcgacagaactagccaaggccgaggaggcacgcgagctgagtagggcgtcagccagaggctgggaactgatgagcgggctcgaggggcaatgcatgtactatgtgtcgggatggtggagctacagcttttgctacggcaagaacgtcatccagttccacgccctgcccgggagcaagcccacggacccgcccgtgccagacggaaacaaccaggagtatgttcttggtagggtacagcacaaggcgccctcgagaggctcgacagatgatgcggaggcggaggggcaaaccaagagcctcgctccgccaaactcccagctccaggtgaagggcgaccagcgctatctatcacagcgcctcgaggatggcacagtctgcgacctcaccggccgtccgcgcaccatcgagatccagtaccactgcagccccggcgcgacaacggacagaatcggctgggtcaaagaagtcaccacctgtacctacctaatggtcgtctataccccgcgtctctgcagcgacgtggccttcctcccccccaaggaaagccgggcacacccgatccgctgccgcccgatcgtcagcaccaaggaggaagagcttgcttggcggcacaacagactggtcgcggccggcgagctgctgggacgaagaaccggaaccaccaagccggccggcaaggacctttccaagaaccacttcgtcggaatgaccatcggcggcatcgtcgtaggctccaagaagcatgtcagcgacgagctcgcgagcaagctgccgctgccgagaggagtcgtgcgccaagcagcgccgaccgtacaagtgattgccagtaggaagagcggcacggccaaggtggatgtgatgagcgacgccgagctggagaagctgaatctcgatccaaagctggtcaaggagggagtggaggagatgaagagcgttgcgggcgacaggggttggaccctgcaatacgtgaaggacggcgacaaggttgagtactacggcgtattcgaaggggaggaggacgaagtcgagcaggagggtgtcaggcggcaggatttgccctgggagtcgggcaacaagaaggaggaagctgcgaaggacgagaagaaagatgatcgcggagaaactgcaaaccggaagaaggaagaagaggagggctcccaggaggtattcttcaaggaggaactgtag

SEQ ID NO: 932 - protein, 529 aa, Myceliophthora thermophilia
MRRLNLVLLASLQLCRARQHSFSVHDDLLAYPQYEVVFADDSISEADALAILESSHKKDATYNTADFSQSDLSNVRESAPAGSSGTTSRESTPEAGEDDEDAPIGETYELINDDPWHYLCAVPILAPPPVLNRTATELAKAEEARELSRASARGWELMSGLEGQCMYYVSGWWSYSFCYGKNVIQFHALPGSKPTDPPVPDGNNQEYVLGRVQHKAPSRGSTDDAEAEGQTKSLAPPNSQLQVKGDQRYLSQRLEDGTVCDLTGRPRTIEIQYHCSPGATTDRIGWVKEVTTCTYLMVVYTPRLCSDVAFLPPKESRAHPIRCRPIVSTKEEELAWRHNRLVAAGELLGRRTGTTKPAGKDLSKNHFVGMTIGGIVVGSKKHVSDELASKLPLPRGVVRQAAPTVQVIASRKSGTAKVDVMSDAELEKLNLDPKLVKEGVEEMKSVAGDRGWTLQYVKDGDKVEYYGVFEGEEDEVEQEGVRRQDLPWESGNKKEEAAKDEKKDDRGETANRKKEEEEGSQEVFFKEEL

SEQ ID NO: 933 - protein, 512 aa, Myceliophthora thermophilia
RQHSFSVHDDLLAYPQYEVVFADDSISEADALAILESSHKKDATYNTADFSQSDLSNVRESAPAGSSGTTSRESTPEAGEDDEDAPIGETYELINDDPWHYLCAVPILAPPPVLNRTATELAKAEEARELSRASARGWELMSGLEGQCMYYVSGWWSYSFCYGKNVIQFHALPGSKPTDPPVPDGNNQEYVLGRVQHKAPSRGSTDDAEAEGQTKSLAPPNSQLQVKGDQRYLSQRLEDGTVCDLTGRPRTIEIQYHCSPGATTDRIGWVKEVTTCTYLMVVYTPRLCSDVAFLPPKESRAHPIRCRPIVSTKEEELAWRHNRLVAAGELLGRRTGTTKPAGKDLSKNHFVGMTIGGIVVGSKKHVSDELASKLPLPRGVVRQAAPTVQVIASRKSGTAKVDVMSDAELEKLNLDPKLVKEGVEEMKSVAGDRGWTLQYVKDGDKVEYYGVFEGEEDEVEQEGVRRQDLPWESGNKKEEAAKDEKKDDRGETANRKKEEEEGSQEVFFKEEL

SEQ ID NO: 934 - DNA, 3162 bp, Myceliophthora thermophilia
atggcgcgcctaagaggaacgggtgcaactcgctcccccctggccaccctcctcgctttcctcctcttgctcgtcccgcaagtcctcgcggtttccgccgttgtcggcatcgacctcggcaccgagtatatcaaggccgctctcgtgaagccgggcatcccgctcgagatcgtcttgacaaaggactcgcgccgcaaagagatttcggccgtcaccttcaagccctccactggcggcgctgccccgaagcagggctcctttcccgagcgcgcctacggctccgacgctttggctctcgccccccgctttcccggaaatgtgtaccccaatctcaaaaccctcctcggcttgcccgtcgacagcgccgaagtcaaggagtacgccgctcgccacccggccctgaaggtggtccggcacaagatcaagggcaccaccgcgttcgagagccccggcgcgtttgtccccgaggaggaggcctggttggttgaggagctgctggccatggagctgcagagtatccgcgagaacgcagaggcgctggccgggtccgggagctctgtgcgctcggccgtcctgaccgtgcccgtgtattacacggccgaagagcggagggcggtagagctggccgccgaactggccggactgaaggtgctgtcgttgatcggtgacggtatggcggttgggctgcactacgcgaccagcaggcagtttccgaacgtcaacgagggcggaaagcccgagcatcacatggtcttcgacatgggcgctggatcgaccaaggcgacggtgttgcggttccagagcagaaccgtcaaggatgtgggcaagttcaacaagaccgtgcaggaggtgcaggctttgggcagtggttgggacaggacgctcgggggtgacgcgctgaactacttgatcgtggacgacatgatcgcgcagtttgccgcttcgcccaaggctaaagcggccggtgtcgaggcggacgccgtcaagtcccacggccgcgccgtcgcaaagctgaccaaggaggcggagcgcatcaggcacgttctcagcgccaaccagaacacccaggccagcttcgaaggcctctacgacgacgtcgacttcaagtacaaggtcactcgtgccgagttcgaggagatggcggccgcccacgccgggcgtgttggcgtagttgtccagaacgcactcacggcggctgggatcgagctccaggatctcgactcggttatcctccacggcggcgccacgcgcaccccgttcgtgcagaaggagctcgagaagttgctcggcgctgagaaactgcgcaccaacgttaactcggacgaagctgccgtgttcggcgccggcttccgggccgccgagctcagccccagctttcgcgtcaaggagatccgcattgccgaggctgcctcttaccccgccgggatcaagtggaagacagacgagggcaaagagaaacagcagcgcctctggactgctgcgtcgcatctcggtgccgctgccaaggaggttactttgccgaatcgcgaagatttctcggcaaccttctaccagacggttcccgcgcccgcgttggatgctggctctgtcgacgtcgagaccaaggtcttgacaacaaagaacttgaccgcctcggttgcgcagctcgttgagaagcacaagtgtgagaaatccgatgtcaagttgaaactgagcgcccgtctggccagcgagaacggcgaagtggacgttcgcaaggtcacagtcgagtgcgaggctgaggtcaaggaggggttcgtcgacggcgtcaagaacctgtttggcttcggcaagaaggagcagcagccactgaaggacggggagtcggctggagaggccgaggctgagacctcgtcgagcaccgtgagctcctcttcttcttcttcttctactgctacttctactgctactacatctacctctgcatccacgagcaccactccagagtcttctcctgcctctgagtcagctgacgccaagcctgctgagacaaagaagcaactcgtcgttattcccgtcgacttcaccctagagaagtcgggcgttcagctatccaaagccgacgtgaccgctctcaaggaccgccttaaggcctttgaggcctcggaccgcacccggagacaacgcgaagaggcgttgaataagttagaggcctacacctacaaggtccgcgaccttctcgagaaggaagacttcatcagccactcgactcccgaagaacaagctacgctggagaagaagaacagtgacgcgagcgagtggctctacgagggcggtgccgaggcgaccaaggaagagctcaggtccaggctcaaggatctccaggccatcgttgaccctgtgcagaagcgcatcgacgaagccgccaagcggcctgagctcgtcaagggcctgcaggatgcgcttaagagcaccaaggagttcgtcgccgatattaagaacaagattgccgagtacgaggcttggcattcttcaaagtctgcctctgcctcctccacgtcagccactgacacctcttctacctccaccacgaccgctcctccctcatcctcctcggacgactttgacgggctcgaggacgacgatgctgccagcaccaccacggccacggccacggcaatggaagacgttctcaaagagcgtgggcctgtccccccgctgtataccctcgacgacctgaaggcgagcgaggatctgtacaaatccatcaccgcctggctcgaggagaagctcgccgagcaagaaaagctcggtcccaccgatgaccccgtcctgttggtcaaggacctgacagaaaagcgggagaagctggacaaggtgggcctggagcttgcgatgaagggggtgcgcaactttgagaagcgtaaagcgagcgaggacaagggcaaggagaccaagaagagcaaaaaaggcaaggagagcagcagcactagcaccaagtcggccaagccggcgcaacagaccatccagatcaagccgggagaggacggcaagatgccgtcgcccgaggagctggatgagatgctgaaggagttcatcaaggaggacaaggcgcccaataatggggaggaggcgaaccaggaacagaagcagaaacaggaggaaaaaaaggaagagaagaatgtgggacatgatgagctataa

SEQ ID NO: 935 - protein, 1053 aa, Myceliophthora thermophilia
MARLRGTGATRSPLATLLAFLLLLVPQVLAVSAVVGIDLGTEYIKAALVKPGIPLEIVLTKDSRRKEISAVTFKPSTGGAAPKQGSFPERAYGSDALALAPRFPGNVYPNLKTLLGLPVDSAEVKEYAARHPALKVVRHKIKGTTAFESPGAFVPEEEAWLVEELLAMELQSIRENAEALAGSGSSVRSAVLTVPVYYTAEERRAVELAAELAGLKVLSLIGDGMAVGLHYATSRQFPNVNEGGKPEHHMVFDMGAGSTKATVLRFQSRTVKDVGKFNKTVQEVQALGSGWDRTLGGDALNYLIVDDMIAQFAASPKAKAAGVEADAVKSHGRAVAKLTKEAERIRHVLSANQNTQASFEGLYDDVDFKYKVTRAEFEEMAAAHAGRVGVVVQNALTAAGIELQDLDSVILHGGATRTPFVQKELEKLLGAEKLRTNVNSDEAAVFGAGFRAAELSPSFRVKEIRIAEAASYPAGIKWKTDEGKEKQQRLWTAASHLGAAAKEVTLPNREDFSATFYQTVPAPALDAGSVDVETKVLTTKNLTASVAQLVEKHKCEKSDVKLKLSARLASENGEVDVRKVTVECEAEVKEGFVDGVKNLFGFGKKEQQPLKDGESAGEAEAETSSSTVSSSSSSSSTATSTATTSTSASTSTTPESSPASESADAKPAETKKQLVVIPVDFTLEKSGVQLSKADVTALKDRLKAFEASDRTRRQREEALNKLEAYTYKVRDLLEKEDFISHSTPEEQATLEKKNSDASEWLYEGGAEATKEELRSRLKDLQAIVDPVQKRIDEAAKRPELVKGLQDALKSTKEFVADIKNKIAEYEAWHSSKSASASSTSATDTSSTSTTTAPPSSSSDDFDGLEDDDAASTTTATATAMEDVLKERGPVPPLYTLDDLKASEDLYKSITAWLEEKLAEQEKLGPTDDPVLLVKDLTEKREKLDKVGLELAMKGVRNFEKRKASEDKGKETKKSKKGKESSSTSTKSAKPAQQTIQIKPGEDGKMPSPEELDEMLKEFIKEDKAPNNGEEANQEQKQKQEEKKEEKNVGHDEL

SEQ ID NO: 936 - protein, 1023 aa, Myceliophthora thermophilia
VSAVVGIDLGTEYIKAALVKPGIPLEIVLTKDSRRKEISAVTFKPSTGGAAPKQGSFPERAYGSDALALAPRFPGNVYPNLKTLLGLPVDSAEVKEYAARHPALKVVRHKIKGTTAFESPGAFVPEEEAWLVEELLAMELQSIRENAEALAGSGSSVRSAVLTVPVYYTAEERRAVELAAELAGLKVLSLIGDGMAVGLHYATSRQFPNVNEGGKPEHHMVFDMGAGSTKATVLRFQSRTVKDVGKFNKTVQEVQALGSGWDRTLGGDALNYLIVDDMIAQFAASPKAKAAGVEADAVKSHGRAVAKLTKEAERIRHVLSANQNTQASFEGLYDDVDFKYKVTRAEFEEMAAAHAGRVGVVVQNALTAAGIELQDLDSVILHGGATRTPFVQKELEKLLGAEKLRTNVNSDEAAVFGAGFRAAELSPSFRVKEIRIAEAASYPAGIKWKTDEGKEKQQRLWTAASHLGAAAKEVTLPNREDFSATFYQTVPAPALDAGSVDVETKVLTTKNLTASVAQLVEKHKCEKSDVKLKLSARLASENGEVDVRKVTVECEAEVKEGFVDGVKNLFGFGKKEQQPLKDGESAGEAEAETSSSTVSSSSSSSSTATSTATTSTSASTSTTPESSPASESADAKPAETKKQLVVIPVDFTLEKSGVQLSKADVTALKDRLKAFEASDRTRRQREEALNKLEAYTYKVRDLLEKEDFISHSTPEEQATLEKKNSDASEWLYEGGAEATKEELRSRLKDLQAIVDPVQKRIDEAAKRPELVKGLQDALKSTKEFVADIKNKIAEYEAWHSSKSASASSTSATDTSSTSTTTAPPSSSSDDFDGLEDDDAASTTTATATAMEDVLKERGPVPPLYTLDDLKASEDLYKSITAWLEEKLAEQEKLGPTDDPVLLVKDLTEKREKLDKVGLELAMKGVRNFEKRKASEDKGKETKKSKKGKESSSTSTKSAKPAQQTIQIKPGEDGKMPSPEELDEMLKEFIKEDKAPNNGEEANQEQKQKQEEKKEEKNVGHDEL

SEQ ID NO: 937 - DNA, 1569 bp, Myceliophthora thermophilia
atgggatcccactcccgggcctacaatcctctccttcacccgattctctttctcttccagctcttccaatggctcaccgacaagatcctctcgcccaacccccccgggcccagcacgcgccttagccggcccaagatcgccgtcatcggggccggcatcacgggcgtgaccagcgccgcgcactgcatcggccacggcttcgacgtgaccatcttcgaggccggcggcgaggacgaactcggcggcgtctggagccgcgtcaacaacacgtcctccctgcagatccactccgtcatgtaccgcttccacccctcggtcaggtgggcgcgcggctacccggactgccagcagatcctggcccaggtccgcgacctctggacccgctacgggctcgagggccgcacccgcttccgcaccaaggtcgaccgcgtctaccgggacgaccgcgcccgctgggtcgtcaacaacgcctcgctcggccgcttcgacggcgtcgtcgccgccgtcggcacctgcggcgagcccaagatcccccgcatgccgggcatggacaagttccggggcgagatccaccactcgagccgcctgccgggtgcctgctcgacccgggacaagaccgtgatcatcatcggcggcggcgccagcgccgtcgaggcgctcgagttcgcgcacgaggagggcgccgacaagatctacatcctcgctcgcagcgacaagtggatcatcccgcgcaacccgctctggaacacgctgttggccatgaacgtgttcgggcagccgcagacgttcctgagctggatccccgagctgcttctccgcaagatgttctaccgcgacctcgaggacctggccccggccccggcaaacaagggcggcatcttcaccgacacgcccatggtcaactcggacatcatggacaagctgcgctccgggcgggccgagtggatccgctgcgacgtcgagggcttcaccgagacgggcgtcaggatcaaccgcggggccaagggcgtcccccgcggcgggccaggccgccaggacgtcgtcgagggcgacgtggtcgtcatggccacgggcttcgcgcggcccaagctcgacttcctgcccgattcctgcttcgagaagccgtacgaaccgcccaactggtacctgcagaccttcccccccaaccacccgtccatctcgtgcatcaattgcacctacatgaacgccatcggcaccgtcggcaactggcacattggcatctacacccgcatcctgctcatgttcctcatcgaccccctgacccggcccagcccgttctggatgaagcgatggatcgacatgacgaggctgtttaagaagacctctcccgtcgggccgtccgagttctttacctatctcgagctggtctggtggttctgcttctgcgtcgccctcaatcccttccgttggaagtgggccttatttgtcttcttcggcctgggtttcatgctccccaagcacgtagtagcagccgaggacaggatccgcaacggactcgggatgcgtgaacaggacacgaccggtcaggatgtcggcctcagcttgtga

SEQ ID NO: 938 - protein, 522 aa, Myceliophthora thermophilia
MGSHSRAYNPLLHPILFLFQLFQWLTDKILSPNPPGPSTRLSRPKIAVIGAGITGVTSAAHCIGHGFDVTIFEAGGEDELGGVWSRVNNTSSLQIHSVMYRFHPSVRWARGYPDCQQILAQVRDLWTRYGLEGRTRFRTKVDRVYRDDRARWVVNNASLGRFDGVVAAVGTCGEPKIPRMPGMDKFRGEIHHSSRLPGACSTRDKTVIIIGGGASAVEALEFAHEEGADKIYILARSDKWIIPRNPLWNTLLAMNVFGQPQTFLSWIPELLLRKMFYRDLEDLAPAPANKGGIFTDTPMVNSDIMDKLRSGRAEWIRCDVEGFTETGVRINRGAKGVPRGGPGRQDVVEGDVVVMATGFARPKLDFLPDSCFEKPYEPPNWYLQTFPPNHPSISCINCTYMNAIGTVGNWHIGIYTRILLMFLIDPLTRPSPFWMKRWIDMTRLFKKTSPVGPSEFFTYLELVWWFCFCVALNPFRWKWALFVFFGLGFMLPKHVVAAEDRIRNGLGMREQDTTGQDVGLSL

SEQ ID NO: 939 - protein, 496 aa, Myceliophthora thermophilia
DKILSPNPPGPSTRLSRPKIAVIGAGITGVTSAAHCIGHGFDVTIFEAGGEDELGGVWSRVNNTSSLQIHSVMYRFHPSVRWARGYPDCQQILAQVRDLWTRYGLEGRTRFRTKVDRVYRDDRARWVVNNASLGRFDGVVAAVGTCGEPKIPRMPGMDKFRGEIHHSSRLPGACSTRDKTVIIIGGGASAVEALEFAHEEGADKIYILARSDKWIIPRNPLWNTLLAMNVFGQPQTFLSWIPELLLRKMFYRDLEDLAPAPANKGGIFTDTPMVNSDIMDKLRSGRAEWIRCDVEGFTETGVRINRGAKGVPRGGPGRQDVVEGDVVVMATGFARPKLDFLPDSCFEKPYEPPNWYLQTFPPNHPSISCINCTYMNAIGTVGNWHIGIYTRILLMFLIDPLTRPSPFWMKRWIDMTRLFKKTSPVGPSEFFTYLELVWWFCFCVALNPFRWKWALFVFFGLGFMLPKHVVAAEDRIRNGLGMREQDTTGQDVGLSL

SEQ ID NO: 940 - DNA, 1548 bp, Myceliophthora thermophilia
atggcgtcctcattcctcatcttcctcgccggcaccgtagcctacgccctcttccgactcagcagggtcgggagaagaccaaaagggtgcccacctggcccccctacgttgcccatcctcggaaatctgcatcagatcccaaagaagaacgcccacgtccagttcaagaaatgggctgacgagtacgggccgatctactcgctgatcctggggaccatcgtgaccatcgtcctgtcgtccgacgttggtggtcaaagacttgctagacaagaggagcggcatctactcgaatacggaaatcaatggcgccgcatccgaaagttctttcacgccttcttgcaactcaaggcgatcaaggcgtacgtgccctgcctggagcttgagagcacgtcggtcatggcggacctcttggacaagccgcagctcatcttccaccatatccggcggtacacaaactcggtatccacgcagctggtccacggatttcggacgcccaggatcgatgatccgaagctcctcctgatgtacgacaccatggagaagttcggcgacgtcaccggggcgggggctgcggccctgctcgacgtcttccccgtcctgcgctatctaccgccgggcatccggccgctctataatcatgcactctccattcggaaggcgtcgctcgatcttgccggtgacctttggtttgaggccaagcggaaagtgcgcgagggaactgccaagccctgtttctgcgtgggtctggccgatgcccaggccaaggaggacgttgacgacatgggactcgcaatgacagccagtacgggattggaagctgcctcggacacgaccgcgtgcatcctgtccggctttatccaggctatggttatctaccgcgacgcacaaaagaaagcgcaggaggcggtcgaccgtgtgtgcggcgacaggttcccaaccatggccgacatggataaccccgaggcgcaatacatcagggcttgcgtgaaggagattctgcggtggatgcccacggcaactctgggcgtgccacatgccgtcatcagagctgacgagtacatgggataccggattcccaagggcgcgagcgtcgtcctcagcatctggggcatccacaaagacgagaagagatataagaacccgcgggcgtttgacccgtcccgttacatggacgacacgacgacctcgagcgaatcggcactgggcccggatccgacaaagcgcgatcatttcggcttcggagcgggacatcgcatctgcgagggcatgcacgtcgtcgacaggaccctgttcctcttcatctctcgtcccgtttgggcctttgacctgtccccggccaaggatgccgacgggaacgacatcatccccaaccaggacgacttgatcggtaactttctgagacagcccaggccgttcccgctcggggtcaagccgcggagcgagtcgcgcgccgccgcggtccgtcaggcttggaaggacgcccaggaacttctcgatcaagatcagcaatggaaggagacgcccgaagggatgccattcaccttgtga

SEQ ID NO: 941 - protein, 515 aa, Myceliophthora thermophilia
MASSFLIFLAGTVAYALFRLSRVGRRPKGCPPGPPTLPILGNLHQIPKKNAHVQFKKWADEYGPIYSLILGTIVTIVLSSDVGGQRLARQEERHLLEYGNQWRRIRKFFHAFLQLKAIKAYVPCLELESTSVMADLLDKPQLIFHHIRRYTNSVSTQLVHGFRTPRIDDPKLLLMYDTMEKFGDVTGAGAAALLDVFPVLRYLPPGIRPLYNHALSIRKASLDLAGDLWFEAKRKVREGTAKPCFCVGLADAQAKEDVDDMGLAMTASTGLEAASDTTACILSGFIQAMVIYRDAQKKAQEAVDRVCGDRFPTMADMDNPEAQYIRACVKEILRWMPTATLGVPHAVIRADEYMGYRIPKGASVVLSIWGIHKDEKRYKNPRAFDPSRYMDDTTTSSESALGPDPTKRDHFGFGAGHRICEGMHVVDRTLFLFISRPVWAFDLSPAKDADGNDIIPNQDDLIGNFLRQPRPFPLGVKPRSESRAAAVRQAWKDAQELLDQDQQWKETPEGMPFTL

SEQ ID NO: 942 - protein, 499 aa, Myceliophthora thermophilia
LFRLSRVGRRPKGCPPGPPTLPILGNLHQIPKKNAHVQFKKWADEYGPIYSLILGTIVTIVLSSDVGGQRLARQEERHLLEYGNQWRRIRKFFHAFLQLKAIKAYVPCLELESTSVMADLLDKPQLIFHHIRRYTNSVSTQLVHGFRTPRIDDPKLLLMYDTMEKFGDVTGAGAAALLDVFPVLRYLPPGIRPLYNHALSIRKASLDLAGDLWFEAKRKVREGTAKPCFCVGLADAQAKEDVDDMGLAMTASTGLEAASDTTACILSGFIQAMVIYRDAQKKAQEAVDRVCGDRFPTMADMDNPEAQYIRACVKEILRWMPTATLGVPHAVIRADEYMGYRIPKGASVVLSIWGIHKDEKRYKNPRAFDPSRYMDDTTTSSESALGPDPTKRDHFGFGAGHRICEGMHVVDRTLFLFISRPVWAFDLSPAKDADGNDIIPNQDDLIGNFLRQPRPFPLGVKPRSESRAAAVRQAWKDAQELLDQDQQWKETPEGMPFTL

SEQ ID NO: 943 - DNA, 1278 bp, Myceliophthora thermophilia
atgtcgtcaagaaggcaaggattaacaccaagatggcagtggccatggctggttctatgcctcctcgcccattttaagttccagctcgtcagagcacaatcagccgtccagacactcttcgtcctcgactcggacaccattgcctcctttaacgtacctcccgagtcggacgacatcaacttctacgtattgaccccggactggtaccagtacacggccattgggttcggagctaccatgtcagattcattgatgctggtcatgtacccgtccgcggaccgcaaaagtgtgactgtgagtccgcgcaaggctaggggcaacactgagcctgtctactcccctgacacgcagctcgtcatccacgacacgagcatcgacgaagagaactccaacatggtggtcaacgccacctgccgccgctgcctgccctatgccacagccaattccgcttccggagtcgaacggacggccagcatgatgttcgccgtcgggcctgagcttgccctcaacactgatgacctcgacgcccggatacggcggcatgtcgcctatggcaactttgaaatcgacctccgcaaggccacaggcgaagggggcatcggcgagggcatctccggtggcaactcgagtgacgcggtcctgtccggcgagcgcgggctggtccaggacagcaacaaggccgcaacggcccacggcatcctgtacgccctggtggcgctcgccgtcgccccgttcgactcgctggtcgcgggagccctcagaaccaggtgggcctgggtccacggtctcacggcgaccgtgtattttgcgtttgtcatcggcgccttggtgccgggcgtcatggttagccgagagcacgtcgcgacccagcggttccgcaccggccaccaggtcctcgggctgctcgccgttgttgcgctgaccatcatgttcgtctggggcattgccctctcgtggatcaagcattctgccaacaagcgcggccaggagccgcccgagaacacacacctgttgggcatgatccatcggtggacgtgcagaacgatatgggtgctcttcttggtcaatgttggactgggtctgaagctgtccgagcacaagacggtgctgatctttggctacatggcggtggctctagctgtgttggtcgtcttgattcccatctatttctgtctctggaaatgctcgaagaggggaagagagaaagaaggttcaatcgagatgcccaccatctacgaccacaactccaactatcttggagtacatcacaggaattga

SEQ ID NO: 944 - protein, 425 aa, Myceliophthora thermophilia
MSSRRQGLTPRWQWPWLVLCLLAHFKFQLVRAQSAVQTLFVLDSDTIASFNVPPESDDINFYVLTPDWYQYTAIGFGATMSDSLMLVMYPSADRKSVTVSPRKARGNTEPVYSPDTQLVIHDTSIDEENSNMVVNATCRRCLPYATANSASGVERTASMMFAVGPELALNTDDLDARIRRHVAYGNFEIDLRKATGEGGIGEGISGGNSSDAVLSGERGLVQDSNKAATAHGILYALVALAVAPFDSLVAGALRTRWAWVHGLTATVYFAFVIGALVPGVMVSREHVATQRFRTGHQVLGLLAVVALTIMFVWGIALSWIKHSANKRGQEPPENTHLLGMIHRWTCRTIWVLFLVNVGLGLKLSEHKTVLIFGYMAVALAVLVVLIPIYFCLWKCSKRGREKEGSIEMPTIYDHNSNYLGVHHRN

SEQ ID NO: 945 - protein, 393 aa, Myceliophthora thermophilia
QSAVQTLFVLDSDTIASFNVPPESDDINFYVLTPDWYQYTAIGFGATMSDSLMLVMYPSADRKSVTVSPRKARGNTEPVYSPDTQLVIHDTSIDEENSNMVVNATCRRCLPYATANSASGVERTASMMFAVGPELALNTDDLDARIRRHVAYGNFEIDLRKATGEGGIGEGISGGNSSDAVLSGERGLVQDSNKAATAHGILYALVALAVAPFDSLVAGALRTRWAWVHGLTATVYFAFVIGALVPGVMVSREHVATQRFRTGHQVLGLLAVVALTIMFVWGIALSWIKHSANKRGQEPPENTHLLGMIHRWTCRTIWVLFLVNVGLGLKLSEHKTVLIFGYMAVALAVLVVLIPIYFCLWKCSKRGREKEGSIEMPTIYDHNSNYLGVHHRN

SEQ ID NO: 946 - DNA, 1185 bp, Myceliophthora thermophilia
atgtcgacacagaagccagtcctgattgcgggcgcgggaatcgcgtctctgctccttgctcattccctgcgtcggtccgggatacccttcaggatctttgaacgcgatgcttcgtttgtctttcgagcgcaagggtacagactacgcctttctgcggaagggctcgaggccatcgaagaggttctcgacccggacacgtttaagcggttctgggacaagtgcggcaagacggacgggtccaagttcaccgagttcgacgccgtgaccggggaagagaaggagagccgcatcgcggggcagcaggcgctggcatcgcgggacggcaaggtcgtcggcatcgcccgcggagacatgcgcaggatctttgccgcgggttgcgaggcgcacatcgagtggcgcagggaggtcacaggctacgagctgaccgacgacggcgtgagggcgctcttcgccgacggcaccaagtcggtcgagggctcgctgctcgttggcggggagggcatacgatcgcgcgtcgccaggcagctctcgggcggcaagctcaaggtctacgacacgggagccaggggcatccacggccaggcgcccaccacggcgttcgggggcctcggcgagggcgtcttcatcatacgcgacgacacgcacccggacggttcgttcgccctcatcaccaacgtccggcccggggagctcgacgacccctcggtccggttcgggtggaccatgtcggcccagccgggcgtgatccgcccccccaacgacgaccacaccatcgtcggcaagccggccgcggacgtggcccggtcgctgaccaggaactggcacccgcgcttccggccgctgatcgaccagctcgacgagcccgaggccgccttctggaagatcacctgctcggcgccgtcgggggtgcccgagtggcccaacgagccccgcgtgaccctcatcggcgacgccgtccactccatgacgcccgccgccggcctcggcgccaacacggccgtccgcgactcggccctcctcggccggctcctgcgagaggccggcggctgcaagcccggcgtcacggctgcgtatgagaaagagatgcgcatctacgccagccaggccgtgggccagagctatgccaccgccgtgcgccagttcggcataaagatcgacgaagaggccacacgaactgttttctaa

SEQ ID NO: 947 - protein, 394 aa, Myceliophthora thermophilia
MSTQKPVLIAGAGIASLLLAHSLRRSGIPFRIFERDASFVFRAQGYRLRLSAEGLEAIEEVLDPDTFKRFWDKCGKTDGSKFTEFDAVTGEEKESRIAGQQALASRDGKVVGIARGDMRRIFAAGCEAHIEWRREVTGYELTDDGVRALFADGTKSVEGSLLVGGEGIRSRVARQLSGGKLKVYDTGARGIHGQAPTTAFGGLGEGVFIIRDDTHPDGSFALITNVRPGELDDPSVRFGWTMSAQPGVIRPPNDDHTIVGKPAADVARSLTRNWHPRFRPLIDQLDEPEAAFWKITCSAPSGVPEWPNEPRVTLIGDAVHSMTPAAGLGANTAVRDSALLGRLLREAGGCKPGVTAAYEKEMRIYASQAVGQSYATAVRQFGIKIDEEATRTVF

SEQ ID NO: 948 - protein, 374 aa, Myceliophthora thermophilia
HSLRRSGIPFRIFERDASFVFRAQGYRLRLSAEGLEAIEEVLDPDTFKRFWDKCGKTDGSKFTEFDAVTGEEKESRIAGQQALASRDGKVVGIARGDMRRIFAAGCEAHIEWRREVTGYELTDDGVRALFADGTKSVEGSLLVGGEGIRSRVARQLSGGKLKVYDTGARGIHGQAPTTAFGGLGEGVFIIRDDTHPDGSFALITNVRPGELDDPSVRFGWTMSAQPGVIRPPNDDHTIVGKPAADVARSLTRNWHPRFRPLIDQLDEPEAAFWKITCSAPSGVPEWPNEPRVTLIGDAVHSMTPAAGLGANTAVRDSALLGRLLREAGGCKPGVTAAYEKEMRIYASQAVGQSYATAVRQFGIKIDEEATRTVF

SEQ ID NO: 949 - DNA, 1257 bp, Myceliophthora thermophilia
atgacaacgggcacccatttcttgtctgggcggcacattgttgttgccggcgccggcatggcgggcctgtcatttgccgtcgcccttcgcaagatctggccaactggcgtgccgccaccgcgagtcaccatcttcgagcgcgacacgaaacaggacatgctgggccgcgagggatacagcctctcgctcgcgggtgctgacgatacaggcgggctggttgcgctcagagatctcggtctgctggacgagatcctcgggcacgcgatcctgggcacggacgagaagggcgccttcaagctctgggatgccgactggagccaggtcctgagcgtccgactgcgcccggctcccgggctcccgacatccggcatccggattgcgaggaaacacttgcgcgagacgctcctcggtgccgtgaccgacgagattcggtgggggactgcctgtctatcggccaccaagtccgagagcgggaaggtggtggtccgcgtctcggacaaccaggggtcacaagagtccacggtcgagtgcgacctgctggtggtggctgacggggcgagcagcaagatcagggcgagcctgcgtccagacgatgtgctgcagtacgccggcgccgtccagatgggtgggctggcccacttcccggaaggcatcccgccacctctgggcgagaactggggccagcaggtgtccggtggccgcggcgtctcctgcttctactcgcccgtcgacaagcataggctcgtgtgggcgttcagcttccgcgagtcgacgcctcggcagaccatcaaaccgccaacctcggaggaaaccgcgcgggttctgctcgatgagattctccagaagggtcacatgctgggacagctgtttgaaaccatcgcaggctccgccaccgatcccaaggaggtcttctgcttgccggcaagagacaagaaaccattttctcacgacctggcgaagacggggcctatcgtgttcatcggagacagcaaccacgcggtcagcccctttgcgggatacggggccagcttggctctgaaggacggctgggatttggctcagaagctgacggcggcggactcggtcgtggatgcggtccgaaagtacgacgccgtaagcgtccctcgggctaccaaggtgctcgcaacctcgagatcgcggatcaagtggggtcacagcaccggcctgatgttcttcctctggcgcgggttcttgaaggctttgggttatgttctgtggctcactgggagagcttga

SEQ ID NO: 950 - protein, 418 aa, Myceliophthora thermophilia
MTTGTHFLSGRHIVVAGAGMAGLSFAVALRKIWPTGVPPPRVTIFERDTKQDMLGREGYSLSLAGADDTGGLVALRDLGLLDEILGHAILGTDEKGAFKLWDADWSQVLSVRLRPAPGLPTSGIRIARKHLRETLLGAVTDEIRWGTACLSATKSESGKVVVRVSDNQGSQESTVECDLLVVADGASSKIRASLRPDDVLQYAGAVQMGGLAHFPEGIPPPLGENWGQQVSGGRGVSCFYSPVDKHRLVWAFSFRESTPRQTIKPPTSEETARVLLDEILQKGHMLGQLFETIAGSATDPKEVFCLPARDKKPFSHDLAKTGPIVFIGDSNHAVSPFAGYGASLALKDGWDLAQKLTAADSVVDAVRKYDAVSVPRATKVLATSRSRIKWGHSTGLMFFLWRGFLKALGYVLWLTGRA

SEQ ID NO: 951 - protein, 392 aa, Myceliophthora thermophilia
VALRKIWPTGVPPPRVTIFERDTKQDMLGREGYSLSLAGADDTGGLVALRDLGLLDEILGHAILGTDEKGAFKLWDADWSQVLSVRLRPAPGLPTSGIRIARKHLRETLLGAVTDEIRWGTACLSATKSESGKVVVRVSDNQGSQESTVECDLLVVADGASSKIRASLRPDDVLQYAGAVQMGGLAHFPEGIPPPLGENWGQQVSGGRGVSCFYSPVDKHRLVWAFSFRESTPRQTIKPPTSEETARVLLDEILQKGHMLGQLFETIAGSATDPKEVFCLPARDKKPFSHDLAKTGPIVFIGDSNHAVSPFAGYGASLALKDGWDLAQKLTAADSVVDAVRKYDAVSVPRATKVLATSRSRIKWGHSTGLMFFLWRGFLKALGYVLWLTGRA

SEQ ID NO: 952 - DNA, 1149 bp, Myceliophthora thermophilia
atgcttttcaccaaggctgtttccggcctcgccatcctcgcgggcctcgttgccgctcacccggggcacgatgctagcaaggaggctgccgagcgccgggcctacctgcagaacgccaagcgcacctccctcgcccactgcgccgacaagctgagggcccgcggcaccgagtctcgcaacatcgtccggcgcaaggccgtcgtcgagaaggcccgccagaagcgcggccttaccaagcgcgactttagcgacgtcctgggcaccgaccacaacaagaccaccctgggctacacccccaacaccgacgccgccaccctgtttgccggctacaactcgtgcctcctgacgcccgaggtcacccagggaccgtactacgtcgccggcgagtacgtccgcgagaacgtggttgaggaccagcccggcttgcccctcctcctcgagtaccaggtcgtcgacgtggcgacgtgcgagccggtgccggaggtgtacgtcgagatctggcactgcaacgccacgggcgtgtacggcggcgtggtggcgagcggcaacggcgactcgtcggacgcgagcaacctcgacaacacgttcctgcgcggtatccagccgaccgacgccgagggcgtggcccagttcgagtccgtcttcccgggccactacaccggccgggcgacgcacatccacatcatggtgcacaccaacgcgaccctgcaggccaaccagacgctcggcctcgacaactacgccagccacgtcggccaggccttcttcgaccaggcgctgatcacggccgtggagaagctggagccgtacgcgtccaaccagcagccgctgaccaccaacgaggaggacagcatcatggccgaggagtccgccaccgacggcgtcgaccccgtcatggagtacactctgctcggcgacaacctctccgacggtctgttcgcctggatcgccttcggcatcgacacgacccgctccgaggccatcagcccggccgtctaccttgaggagggcggcggcagggccaaccccgacgctggcggtcccggcggtcccggcggttctttcccgactggcagcttccctaccggcggcttccccgtccccactggcaacgtcggccgtggcatcggccgccgcgcacggcactaa

SEQ ID NO: 953 - protein, 382 aa, Myceliophthora thermophilia
MLFTKAVSGLAILAGLVAAHPGHDASKEAAERRAYLQNAKRTSLAHCADKLRARGTESRNIVRRKAVVEKARQKRGLTKRDFSDVLGTDHNKTTLGYTPNTDAATLFAGYNSCLLTPEVTQGPYYVAGEYVRENVVEDQPGLPLLLEYQVVDVATCEPVPEVYVEIWHCNATGVYGGVVASGNGDSSDASNLDNTFLRGIQPTDAEGVAQFESVFPGHYTGRATHIHIMVHTNATLQANQTLGLDNYASHVGQAFFDQALITAVEKLEPYASNQQPLTTNEEDSIMAEESATDGVDPVMEYTLLGDNLSDGLFAWIAFGIDTTRSEAISPAVYLEEGGGRANPDAGGPGGPGGSFPTGSFPTGGFPVPTGNVGRGIGRRARH

SEQ ID NO: 954 - protein, 363 aa, Myceliophthora thermophilia
HPGHDASKEAAERRAYLQNAKRTSLAHCADKLRARGTESRNIVRRKAVVEKARQKRGLTKRDFSDVLGTDHNKTTLGYTPNTDAATLFAGYNSCLLTPEVTQGPYYVAGEYVRENVVEDQPGLPLLLEYQVVDVATCEPVPEVYVEIWHCNATGVYGGVVASGNGDSSDASNLDNTFLRGIQPTDAEGVAQFESVFPGHYTGRATHIHIMVHTNATLQANQTLGLDNYASHVGQAFFDQALITAVEKLEPYASNQQPLTTNEEDSIMAEESATDGVDPVMEYTLLGDNLSDGLFAWIAFGIDTTRSEAISPAVYLEEGGGRANPDAGGPGGPGGSFPTGSFPTGGFPVPTGNVGRGIGRRARH

SEQ ID NO: 955 - DNA, 615 bp, Myceliophthora thermophilia
atgtttctccaaacggcagcgaagctgctgctctcagcaagcttgctgctgagctcggcagtggcgcacaacatccagctcccggcgcatgggcgcgagtgcttccacgagaacctgcactcgggcgacaagatgacggtgaccttccaggttggcgaccgggagtttggcagcgccggcaacctcgacattgacttctggattaccaaccccgtgggcgggtacgaggtcaacgacaagtcggtgtcgaacggcgacttcacgttcaacgcgcggcacgacggcaagtacgtctactgcttcggcaacgagcactggggcgcgtcgtccaaggaggtctcgttcaacgtgcacggcatcgtctacgtgtccgaagcggacgcgccgcaggacccgctcgaggccgaggtgcgcaagctgtcggacatgctggagcgggtcaaggacgagcaggcctacatcgtcgtgcgcgagcgcacccaccgcaacacggccgagagcaccaacagcagggtcaagtggtggaacatctttgtgattggcgtcgtcattggcgagagcgtcttccaggtctggtggctgcggaggttcttcgaggtcaagagggttgtttaa

SEQ ID NO: 956 - protein, 204 aa, Myceliophthora thermophilia
MFLQTAAKLLLSASLLLSSAVAHNIQLPAHGRECFHENLHSGDKMTVTFQVGDREFGSAGNLDIDFWITNPVGGYEVNDKSVSNGDFTFNARHDGKYVYCFGNEHWGASSKEVSFNVHGIVYVSEADAPQDPLEAEVRKLSDMLERVKDEQAYIVVRERTHRNTAESTNSRVKWWNIFVIGVVIGESVFQVWWLRRFFEVKRVV

SEQ ID NO: 957 - protein, 182 aa, Myceliophthora thermophilia
HNIQLPAHGRECFHENLHSGDKMTVTFQVGDREFGSAGNLDIDFWITNPVGGYEVNDKSVSNGDFTFNARHDGKYVYCFGNEHWGASSKEVSFNVHGIVYVSEADAPQDPLEAEVRKLSDMLERVKDEQAYIVVRERTHRNTAESTNSRVKWWNIFVIGVVIGESVFQVWWLRRFFEVKRVV

SEQ ID NO: 958 - DNA, 1248 bp, Myceliophthora thermophilia
atgaaagccttcggttgccccttgctacccgctgctctgctcgctgctgctcccgcagtgagtgagccggtgtggtactgccctcctgggagcggggggacgtgctacagcatcgccatccccgtctcgtcggcgagggccgggtccggcaacatctacttccggatcaaggccccgacttcgctccaatgggtggcgttgggcaccggtgagggcatggtaggtgccaacatctttctgatgtaccaggacggtaaggggaacgtgaccctgtctccgcgtctgggcgtcgggcacagcgagcccatgctcgacacgagcagcaccgccgcccggttgactctcctcgccggcagcggagttagcgaggacggctcgaccatgacagccaatgtcgcgtgctccaactgtgagtcctgggacgggggtgaaatgtctctccagagcagtagctcgggttggatcggcgcctggagacagggcccgtcgctggcaacgacggaccgagccaccaccattgatcagcacgacaatgttgcccagttccgagtcgacctgaccaaggcgaccgtcagcgccgacagcaaccctttcctctcgaccggtaccgacgaaggcggcgatgggtccgagcctggtgcgggtccggactccggtcccggtagtgaccccggctctagcggcggctttacccagatctcggggtcttcaaagcccgccgttctcgtggcccacggcataatcatggcgctcgttatgggcctgttctaccctctcggttcgaccatcatgccgctcattgggaagtggtgggtgcacgctgcgtggcaagccgtcgccttctgtctcatgtgggcgggcttcggactgggcgtcgtggcgggccgcaggattcttggagacccgtggaacgagacgcataccgtcttcggcgccgtcgtcatctgcctgttgggcattcagcccgtgtttggcatcctgcaccacctgcattacctgaaggtccaacgccgcggcctgatcagctatgtgcacatctggtggggccgcattctgatggtgttgggtgtgatcaatggcgggctcggcctgaagttggcgggagaggaggacggtcccgtcgtcgcgtacagcgtcatctccggtgtcgtcttcctgggttacctgggctacaagctatgccgattcttccgccatgggacgtccgagacccataaaatggcaggcgaggcgcctgctgcggcctga

SEQ ID NO: 959 - protein, 415 aa, Myceliophthora thermophilia
MKAFGCPLLPAALLAAAPAVSEPVWYCPPGSGGTCYSIAIPVSSARAGSGNIYFRIKAPTSLQWVALGTGEGMVGANIFLMYQDGKGNVTLSPRLGVGHSEPMLDTSSTAARLTLLAGSGVSEDGSTMTANVACSNCESWDGGEMSLQSSSSGWIGAWRQGPSLATTDRATTIDQHDNVAQFRVDLTKATVSADSNPFLSTGTDEGGDGSEPGAGPDSGPGSDPGSSGGFTQISGSSKPAVLVAHGIIMALVMGLFYPLGSTIMPLIGKWWVHAAWQAVAFCLMWAGFGLGVVAGRRILGDPWNETHTVFGAVVICLLGIQPVFGILHHLHYLKVQRRGLISYVHIWWGRILMVLGVINGGLGLKLAGEEDGPVVAYSVISGVVFLGYLGYKLCRFFRHGTSETHKMAGEAPAAA

SEQ ID NO: 960 - protein, 394 aa, Myceliophthora thermophilia
EPVWYCPPGSGGTCYSIAIPVSSARAGSGNIYFRIKAPTSLQWVALGTGEGMVGANIFLMYQDGKGNVTLSPRLGVGHSEPMLDTSSTAARLTLLAGSGVSEDGSTMTANVACSNCESWDGGEMSLQSSSSGWIGAWRQGPSLATTDRATTIDQHDNVAQFRVDLTKATVSADSNPFLSTGTDEGGDGSEPGAGPDSGPGSDPGSSGGFTQISGSSKPAVLVAHGIIMALVMGLFYPLGSTIMPLIGKWWVHAAWQAVAFCLMWAGFGLGVVAGRRILGDPWNETHTVFGAVVICLLGIQPVFGILHHLHYLKVQRRGLISYVHIWWGRILMVLGVINGGLGLKLAGEEDGPVVAYSVISGVVFLGYLGYKLCRFFRHGTSETHKMAGEAPAAA

SEQ ID NO: 961 - DNA, 996 bp, Myceliophthora thermophilia
atgtttccatcctggatttcgaggcacttcaccgtgttacttctgtcgacttcgatcctcattctggcgctgttgttaaattcctcgtcccctctggcgcgtagcctgccatctttgaccaaggtcaagaatttcagctcgtggtccaagccagcacagtcctcggccaacatgcccaaagcaccggtgtatttcttcagccatggagggcctgacgtccaatacaacaagacgcacccggtctacccggtcctccagaggatcggcaaggagatcacgcagaaagtgaagcccaaggccgtggtggtcttctcggctcactggcaagctgaaccaaacgagatccacctcaacaatgccgaggataccgacctcatctacgacttctacggcttccccccggagttctacaaggccacgtaccccaacaagggcagcccggagctggcctcccggatcctcggcctgctctcggacgcgggcatccgagcgagaggggtcaagcgggggctggaccacggcgtcttctcgggcttcaacgtggccttcagcccggaggagaacccgctggggtgcccgctggtgcaggtgtcgctcttcaacagcgaggacccggacgcgcacttccgcctcgggcaggccgtggcgccgctgcgcgacgacaacgtcgtcatcatcggcaccggcatgacggtgcacaacctgcgcgacatgcgcttcgcccggggcagccccgccgccccgctgccgtacgtggcctcgttcgacaacgcgctcaaggaggcggtcgaggccgacccggccgtgcgcaaggaccgcatggccgccgtcaccaagcggcccgacgccaagcaggctcacccctggatggaccacctcatgcccgtctacgtggcggccggcgccgccggcgaggacaagggggtgcagacctggacgtttcacgagtcttcctttgcctgggcgcaatatcggttcggggaggtgccggcttaa

SEQ ID NO: 962 - protein, 331 aa, Myceliophthora thermophilia
MFPSWISRHFTVLLLSTSILILALLLNSSSPLARSLPSLTKVKNFSSWSKPAQSSANMPKAPVYFFSHGGPDVQYNKTHPVYPVLQRIGKEITQKVKPKAVVVFSAHWQAEPNEIHLNNAEDTDLIYDFYGFPPEFYKATYPNKGSPELASRILGLLSDAGIRARGVKRGLDHGVFSGFNVAFSPEENPLGCPLVQVSLFNSEDPDAHFRLGQAVAPLRDDNVVIIGTGMTVHNLRDMRFARGSPAAPLPYVASFDNALKEAVEADPAVRKDRMAAVTKRPDAKQAHPWMDHLMPVYVAAGAAGEDKGVQTWTFHESSFAWAQYRFGEVPA

SEQ ID NO: 963 - protein, 296 aa, Myceliophthora thermophilia
LPSLTKVKNFSSWSKPAQSSANMPKAPVYFFSHGGPDVQYNKTHPVYPVLQRIGKEITQKVKPKAVVVFSAHWQAEPNEIHLNNAEDTDLIYDFYGFPPEFYKATYPNKGSPELASRILGLLSDAGIRARGVKRGLDHGVFSGFNVAFSPEENPLGCPLVQVSLFNSEDPDAHFRLGQAVAPLRDDNVVIIGTGMTVHNLRDMRFARGSPAAPLPYVASFDNALKEAVEADPAVRKDRMAAVTKRPDAKQAHPWMDHLMPVYVAAGAAGEDKGVQTWTFHESSFAWAQYRFGEVPA

SEQ ID NO: 964 - DNA, 1257 bp, Myceliophthora thermophilia
atgagtgatcaggcgagcgccggagagggcatccaccttattgtcattggcgccggactcgcggggctgagcgccgccctgtcgaccaagctggccaacccggcgcaccgggtgacggtgttggaggcggccaaggagctgcaggagattggcgccggcctgcaaatcacccccaacggcacccgcctgctcgcagcctggtcgctcttcccgcggctcgccccgcgcgccgccgagccgcgctcactctcggtgcggcgctacgacggcacccggctgctcgcgcacgagcccgcgctgcaggacagcgttcgcgcccgctacggcggctaccccttctgggacctgcaccgcgtcgacctgcagcaggccatggtcgcgcgctgcgccgagctcggcgtcgagatccgcctgggctcgcccgcggtgcgggtcgactttgccgaggctcgggtccacgtcctcggcgacaacggcggcgacaacggcggcgccggagccgtcgtcgagggggacgtccgcatcaccatccgggccgacgagctggagggtgaggacgcggaggagctgcgggccttcatccgggacgcggcggtcaacttctggatcggcccccggtcgcactgcgtcggctactcggtcagcgccggcgaggtctacaacctcgtcctgctgtgcccggacgacctgcccggcggcgtggtcaagcgggaaggggacaaggacgagatgcgggcccggttctccggctgggacccgctgctgggcaggctcctgaagcaggtccggggtgtggtgcacaaatggaggctgatgtggctcgacgcgctgcccgagtgggccaacgaggagggcaccttcttcatggccggcgactgctgccacccgatgctgccctatctggcgcagggggccaactcgagcctggaggacggtgccgtgttcgggtcgctgctggggagggtcaagaagagcgagatggcgaggcagctgccccgcgtctcggccctgtatcagaggctgaggatcgagaggagccgcaagatccagatcgagaccttcaagcagagggacgactcccacatggaggacggagaggctcaggagaggagggatgccctgatgctgagcatgctgggcaaggaggtcaaggcacccttcccgagcaggtggacgtgtccggagattcaggcgttcctgtacggatacgacgcatacgccgaggcggagaaggcttatcaggaaaatcccttctga

SEQ ID NO: 965 - protein, 418 aa, Myceliophthora thermophilia
MSDQASAGEGIHLIVIGAGLAGLSAALSTKLANPAHRVTVLEAAKELQEIGAGLQITPNGTRLLAAWSLFPRLAPRAAEPRSLSVRRYDGTRLLAHEPALQDSVRARYGGYPFWDLHRVDLQQAMVARCAELGVEIRLGSPAVRVDFAEARVHVLGDNGGDNGGAGAVVEGDVRITIRADELEGEDAEELRAFIRDAAVNFWIGPRSHCVGYSVSAGEVYNLVLLCPDDLPGGVVKREGDKDEMRARFSGWDPLLGRLLKQVRGVVHKWRLMWLDALPEWANEEGTFFMAGDCCHPMLPYLAQGANSSLEDGAVFGSLLGRVKKSEMARQLPRVSALYQRLRIERSRKIQIETFKQRDDSHMEDGEAQERRDALMLSMLGKEVKAPFPSRWTCPEIQAFLYGYDAYAEAEKAYQENPF

SEQ ID NO: 966 - protein, 392 aa, Myceliophthora thermophilia
LSTKLANPAHRVTVLEAAKELQEIGAGLQITPNGTRLLAAWSLFPRLAPRAAEPRSLSVRRYDGTRLLAHEPALQDSVRARYGGYPFWDLHRVDLQQAMVARCAELGVEIRLGSPAVRVDFAEARVHVLGDNGGDNGGAGAVVEGDVRITIRADELEGEDAEELRAFIRDAAVNFWIGPRSHCVGYSVSAGEVYNLVLLCPDDLPGGVVKREGDKDEMRARFSGWDPLLGRLLKQVRGVVHKWRLMWLDALPEWANEEGTFFMAGDCCHPMLPYLAQGANSSLEDGAVFGSLLGRVKKSEMARQLPRVSALYQRLRIERSRKIQIETFKQRDDSHMEDGEAQERRDALMLSMLGKEVKAPFPSRWTCPEIQAFLYGYDAYAEAEKAYQENPF

SEQ ID NO: 967 - DNA, 1320 bp, Myceliophthora thermophilia
atgcctcctccgtcgaactctaagattgccatcatcggcgctggcccggccgggctcactcttggctccctcctggctgccagcaaacatgggtttaatttcaccatctttgagcgtcgccaacgccccgaccctgacgaggtcaaccgcccgtcgggcaacctggacctccaggaggaatttggcctaaaagtggtcaagacgatcggcctatacgacaagttcgtcaagatcgacagcgggtgcacggagcaaaccacgatccttgacaagaccggccgcgtcttcctggaccacccgggccagggccgcccggagatctcgcgcaacgctctccaccagctcctcctctcggcggtgcccgaggagcgcatcagatggggcaccaaggtggtctcggtcgacgcagagacgcgcaccgtcacgttccagcggggagacgcgcccgagacgcgcgagtcgttcgacctgatcgtcggcgccgacggcgcctggtccaaggtccgcgccgccatcccgggggccccgcagcccatctactcgggcgtcgtctccgtgaccatcgacctgcccccgctcgccgagaagcacccggacctgcacaagctgctgggcggcggtaccttcgccgtctgcggcgacaacaaggtcttgctctcccagcgcggcatccacggcacctcccgcctgtacctgttcctgcactccaagacgcaggcggccacccgcgaggctctcgcacagcagcagcaacagcagcagcagcagccgcacaacgaccaggtgggccccaacccgcagctggacgccgatccgctgctgtccgccctgcccaagacccacgccgacctgctcgggctcctcctgtcggacgacgactactttgccggctggtccgaccagttcaagcacctcctgacggtcgccagcgagtcgcagccggcggacctgcccgtcgacgcgcggccgctctacatgctccccctggacccgttcccgcacccgcacacgcccggtctggcgctggtcggggacgcggcccacctgatgacgcccttcgcgggcaagggggtcaacacggcgatggcggacagcctggcgctggccgagcagctcgagaagctggccgacgccgacgccgacgatggcggccagaccggcttcgcggacgagcgcctggacaaggcgctcgtcgccttcgaggaggacgcgcacccccgcggcctggccgccatgaagttgacttggatgagtttgttgttgtcgtacgatgagagcggcccggcgaagctgtgccaggtcatggcggcgaaccactaa

SEQ ID NO: 968 - protein, 439 aa, Myceliophthora thermophilia
MPPPSNSKIAIIGAGPAGLTLGSLLAASKHGFNFTIFERRQRPDPDEVNRPSGNLDLQEEFGLKVVKTIGLYDKFVKIDSGCTEQTTILDKTGRVFLDHPGQGRPEISRNALHQLLLSAVPEERIRWGTKVVSVDAETRTVTFQRGDAPETRESFDLIVGADGAWSKVRAAIPGAPQPIYSGVVSVTIDLPPLAEKHPDLHKLLGGGTFAVCGDNKVLLSQRGIHGTSRLYLFLHSKTQAATREALAQQQQQQQQQPHNDQVGPNPQLDADPLLSALPKTHADLLGLLLSDDDYFAGWSDQFKHLLTVASESQPADLPVDARPLYMLPLDPFPHPHTPGLALVGDAAHLMTPFAGKGVNTAMADSLALAEQLEKLADADADDGGQTGFADERLDKALVAFEEDAHPRGLAAMKLTWMSLLLSYDESGPAKLCQVMAANH

SEQ ID NO: 969 - protein, 413 aa, Myceliophthora thermophilia
ASKHGFNFTIFERRQRPDPDEVNRPSGNLDLQEEFGLKVVKTIGLYDKFVKIDSGCTEQTTILDKTGRVFLDHPGQGRPEISRNALHQLLLSAVPEERIRWGTKVVSVDAETRTVTFQRGDAPETRESFDLIVGADGAWSKVRAAIPGAPQPIYSGVVSVTIDLPPLAEKHPDLHKLLGGGTFAVCGDNKVLLSQRGIHGTSRLYLFLHSKTQAATREALAQQQQQQQQQPHNDQVGPNPQLDADPLLSALPKTHADLLGLLLSDDDYFAGWSDQFKHLLTVASESQPADLPVDARPLYMLPLDPFPHPHTPGLALVGDAAHLMTPFAGKGVNTAMADSLALAEQLEKLADADADDGGQTGFADERLDKALVAFEEDAHPRGLAAMKLTWMSLLLSYDESGPAKLCQVMAANH

SEQ ID NO: 970 - DNA, 1572 bp, Myceliophthora thermophilia
atgttggacgtcgtcgcgctgagtatagggttagcggcagcgctcgcttatgtcgtgttggaatatccccggcttcaccagagctggcggttgtggtcacaccgctcccagctgccgccgggacccaagaagatcaagacggggatccgcaagccatggctctggttccgcgagctacacaagcagtacggcgacgtggtcttcctccagatggggcccacgccgaccgtcgtcctgggctctgcgcaggccgcctgggacctgctcgagaagcgcggggccatctactcttcccggccgcgcttcatcatgggcggcgagctgctctccgacggcctgcgcggcctgatggccccctactcggccttctggcgccgctggcgcaagctcctccacagcggcttcatgcagcgccagagcgagtcgtaccgccccatccagagcctcgagtccaaggtgctcatgcacgacctcctgaccaaccccgaggactaccgcacccacctggagcgatatgccgcctccgtcatcgtcaccgtcacctacggccgcagagtcgaggacgtccggaccgacgccgtcgttcgcatgaacgccgaggccatggaacggctcactttggtaaatatccctggcaagtatgcagtcgagcgttatcctgcgctcaaacacatcccttccctgtttgccccctggaaggcacaggtgctggaacagcggaagaaggacatcaaaatgtatatgggactcatggacgatgtcaagaagaggatggcagcgggaacgctgccggactgctttgccaagcatatcctggaggaacaagagaacctcggcatgaccgatcttgaggtggcctacacggccggaagtcctttcggtgccggtgtcgaaacatccgccggttcgctggccagcttcttactcgcatgtgtcaagtttggcgacagcttcatcccgagagctcaggcggagctcgacagggtcgtgggcagtgacaggcttcccacgtttgatgacttgccgtccctggagtatgtgcgagcaatcgtgtccgagactctccgctggcgccccgtcgccgttctcggcggcactccacacgcaagcacggccgacgacgtgtacaaggggatgttcattcccaaggggagcaccatcattgccccgttgtggagcatccatctaaacgaggccgacttcccggacccgcacagcttccaaccagagcgcttcctcggacaacgcgagtatcccggaaatctgggccacagcgcgtttggctggggccgccgcatctgtcccggaatgcatctcggatcggcatccgttgctatcaatatcgcccggatactatgggcatttgatgtcaggcctgcccggaacgagaaaggagagccgatcgatgtggacattttcgcgttctcggacggattcaactcgactccgctcccatttgaatgctccatcactccccgctcggacaagcatgcgcgcgtggtcgaggacgagtaccgaagggcccttggtgagttgcagcagtactcggctgcagcaaccgtacatgcataa

SEQ ID NO: 971 - protein, 523 aa, Myceliophthora thermophilia
MLDVVALSIGLAAALAYVVLEYPRLHQSWRLWSHRSQLPPGPKKIKTGIRKPWLWFRELHKQYGDVVFLQMGPTPTVVLGSAQAAWDLLEKRGAIYSSRPRFIMGGELLSDGLRGLMAPYSAFWRRWRKLLHSGFMQRQSESYRPIQSLESKVLMHDLLTNPEDYRTHLERYAASVIVTVTYGRRVEDVRTDAVVRMNAEAMERLTLVNIPGKYAVERYPALKHIPSLFAPWKAQVLEQRKKDIKMYMGLMDDVKKRMAAGTLPDCFAKHILEEQENLGMTDLEVAYTAGSPFGAGVETSAGSLASFLLACVKFGDSFIPRAQAELDRVVGSDRLPTFDDLPSLEYVRAIVSETLRWRPVAVLGGTPHASTADDVYKGMFIPKGSTIIAPLWSIHLNEADFPDPHSFQPERFLGQREYPGNLGHSAFGWGRRICPGMHLGSASVAINIARILWAFDVRPARNEKGEPIDVDIFAFSDGFNSTPLPFECSITPRSDKHARVVEDEYRRALGELQQYSAAATVHA

SEQ ID NO: 972 - protein, 507 aa, Myceliophthora thermophilia
YVVLEYPRLHQSWRLWSHRSQLPPGPKKIKTGIRKPWLWFRELHKQYGDVVFLQMGPTPTVVLGSAQAAWDLLEKRGAIYSSRPRFIMGGELLSDGLRGLMAPYSAFWRRWRKLLHSGFMQRQSESYRPIQSLESKVLMHDLLTNPEDYRTHLERYAASVIVTVTYGRRVEDVRTDAVVRMNAEAMERLTLVNIPGKYAVERYPALKHIPSLFAPWKAQVLEQRKKDIKMYMGLMDDVKKRMAAGTLPDCFAKHILEEQENLGMTDLEVAYTAGSPFGAGVETSAGSLASFLLACVKFGDSFIPRAQAELDRVVGSDRLPTFDDLPSLEYVRAIVSETLRWRPVAVLGGTPHASTADDVYKGMFIPKGSTIIAPLWSIHLNEADFPDPHSFQPERFLGQREYPGNLGHSAFGWGRRICPGMHLGSASVAINIARILWAFDVRPARNEKGEPIDVDIFAFSDGFNSTPLPFECSITPRSDKHARVVEDEYRRALGELQQYSAAATVHA

SEQ ID NO: 973 - DNA, 1437 bp, Myceliophthora thermophilia
atggccatctccccgcctccccccctgcgcgtgctgatctcgggcgcgggcatcgcgggcccggcgctggccctgaacctgagcaagctgcgcgcgccgctgcagtgctccatcaccatcgtggagcggcacccgagcctgcgggcggcggggcagcaggtcgacctgcgcgggcccgggatccaggcgatgcgcaggctggggatcgagcgggaggtgcgggcggcagtggtggacgagcccggggtgcggatcctggactggcgacggggcgcgccgcaggccttcttcggccgcaacgactcgggcaaggggcgccagaccttctcggccgagtgggagctgatgcgcggcgacctgtgccgcctgctctacgacgccacccgcgacctgcccgggatccagtaccgcttcggcaccaccgtcgactcctgggagcacgtccgcggcggccgcgccgtccgcgctcgcctgtccgacggcaccgaggccgagtacgacctcctcgtcggcgccgacgggctcggctcgcgcgtgcgccggctcatgttcgccgacaagaagcgccaaagcaacggagagagcagcaacggagagagcaacggcagcggcagcagaaccgcaaacggcctgtttcccatcggcatctcgtgcgccttctacacggtgccgcccgagcccggcgacacgtccgtcgccaccttctgccactaccccggccggcgctggatcatgacccggcgggaccgcccggactgcctgcgcgtatacatggggtacgcgggcgccggggcggccgacgagcgcttctcgcgcgtggtccggcacggcacgccggccgagcagaaggacgcctgggccgacgtctttgggcgcgatctggccgacgcttggggggtccggcggttcgtcgacggcctgcgctcgccccaggccgacgacttctacacgcaggagttcgcccaggtcaggatcgaccgctggtccgatggccgcgtcgtcctcctcggcgacgccgccttctgccccgcgcccatcaccggccagggcaccacgctggccctcgtcggggcctacgtcctggctggcgagattgcccgggcttgcagcagcagcagcagcggtagcggtagcggcggtggtgccgctgccaacgacgacgacgacggcggtagcccctgggataacctccctgccgggctggcggcatacgagacgaccctccgaccgctcgtcaaaggggtccaagacgtccccgtcaagaccatcgtcagccttatgtgcccggaaaagccctggcttatcaaactgttccactggatcatgtggttcatcgccaccctgcgcattgacctgctcgccgccaggttccgctccgaggaagacagctggtggaagctgccagactaccccgagttggtgtcgcccaaggcgtga

SEQ ID NO: 974 - protein, 478 aa, Myceliophthora thermophilia
MAISPPPPLRVLISGAGIAGPALALNLSKLRAPLQCSITIVERHPSLRAAGQQVDLRGPGIQAMRRLGIEREVRAAVVDEPGVRILDWRRGAPQAFFGRNDSGKGRQTFSAEWELMRGDLCRLLYDATRDLPGIQYRFGTTVDSWEHVRGGRAVRARLSDGTEAEYDLLVGADGLGSRVRRLMFADKKRQSNGESSNGESNGSGSRTANGLFPIGISCAFYTVPPEPGDTSVATFCHYPGRRWIMTRRDRPDCLRVYMGYAGAGAADERFSRVVRHGTPAEQKDAWADVFGRDLADAWGVRRFVDGLRSPQADDFYTQEFAQVRIDRWSDGRVVLLGDAAFCPAPITGQGTTLALVGAYVLAGEIARACSSSSSGSGSGGGAAANDDDDGGSPWDNLPAGLAAYETTLRPLVKGVQDVPVKTIVSLMCPEKPWLIKLFHWIMWFIATLRIDLLAARFRSEEDSWWKLPDYPELVSPKA

SEQ ID NO: 975 - protein, 454 aa, Myceliophthora thermophilia
LNLSKLRAPLQCSITIVERHPSLRAAGQQVDLRGPGIQAMRRLGIEREVRAAVVDEPGVRILDWRRGAPQAFFGRNDSGKGRQTFSAEWELMRGDLCRLLYDATRDLPGIQYRFGTTVDSWEHVRGGRAVRARLSDGTEAEYDLLVGADGLGSRVRRLMFADKKRQSNGESSNGESNGSGSRTANGLFPIGISCAFYTVPPEPGDTSVATFCHYPGRRWIMTRRDRPDCLRVYMGYAGAGAADERFSRVVRHGTPAEQKDAWADVFGRDLADAWGVRRFVDGLRSPQADDFYTQEFAQVRIDRWSDGRVVLLGDAAFCPAPITGQGTTLALVGAYVLAGEIARACSSSSSGSGSGGGAAANDDDDGGSPWDNLPAGLAAYETTLRPLVKGVQDVPVKTIVSLMCPEKPWLIKLFHWIMWFIATLRIDLLAARFRSEEDSWWKLPDYPELVSPKA

SEQ ID NO: 976 - DNA, 1671 bp, Myceliophthora thermophilia
atggaactccgatctgtcgtccgtctcttggtcctgtcggcctccgtcttcgcgccgggggtcctcagtgcgttcgggtacacctcgtccggcaacaactatgtcatcgatgccggctccgccaacccgctggtcttctcggtgagcaagtcgagctgcgacatcaactcgatcaagtatcgcggcaccgagctccagtattccaacaccggaacccacatcggttccgggctcgggtcggccaccgtctcggtcagccagatcagcggatcgtcccggtacatcaaggtgacatgtgtgacgtcgaccctgacgcactacattgtggtccgggagggtgagagcatcatctacatggccacctacatcaccgccgagccgtcggttggcgagctgcgcttcatcgcccgtctgctgcccgacaaactgcccaacgagtacccgtacggcgaggtctccaacacgagcggcgccagcgcgacagtcgaggggtccgatgtcttcatcgtcaacgggcagacgaggtccaagttttactcgtcgacacgcttcatcgacgaggactcgcactgcgtgtacggcggcagcgacctgatccacgtctgcatcatgacgccccagcaggagtcgtcgtccggcggcccgttcttccgcgacatcgactcgaacaacgcgggggattcgaccaacctgtacaactacatgaacagcggccacgtgcagaccgaggcgttccgcatggggcttcacggaccgtacgccatgcagttctcgcgctccggtatccccagcgtgaagaacctggacgtctcgtggttcggcgaggtctcggtcaccgggtacgtgcccgcctccggccgcgggaccgtgcaggggaccgcgagcggcgtgcagagcgggatgcagggggtggtgcactggtacaacagcaatgcgcagtactgggccaagacgtcatccagcggcgccttcacctcgccgctgatgaagcccggcacgtacaccatggtactttaccagaccgagttcaagattgccacgaccaccgtcaccgtgtccgcgggccagacgaccaggcaggacattgccggcaacttcaacacgtcccgcaacacgctcttccagatcggcgagtacgacggccagccgaccgggttccgcaacgccgacaagttcctccgcatgcacccgagcgacagccgcatggacagctggggccccctgacctacacggtgggcagctcgacgctgtccgacttccccatggccgtcttcaagtcggtgaacaacccggtgaccatcaagttcaacctggccagcgccccgggggccgccaccctgcgcatcgccacgaccctcagcttcgcggggagccgcccccaggcgacggtcaacggctggtccggccccgtcccggccgccccgaccaagatcgacagccgcggcgtgacgcgcggcgcctatcgcgggtacggcgagatctataccgtcaacatccccgccggcacgctcgtcgctggcatcaacaccatcacaatcagttccgtctctggcagcgatggagatgccttcctgagccccaactttgtaagtcatggcccctttttctcctcccaccctgacccacccccccactttctttttacgcgtcatccggtgagcagtccctaa

SEQ ID NO: 977 - protein, 556 aa, Myceliophthora thermophilia
MELRSVVRLLVLSASVFAPGVLSAFGYTSSGNNYVIDAGSANPLVFSVSKSSCDINSIKYRGTELQYSNTGTHIGSGLGSATVSVSQISGSSRYIKVTCVTSTLTHYIVVREGESIIYMATYITAEPSVGELRFIARLLPDKLPNEYPYGEVSNTSGASATVEGSDVFIVNGQTRSKFYSSTRFIDEDSHCVYGGSDLIHVCIMTPQQESSSGGPFFRDIDSNNAGDSTNLYNYMNSGHVQTEAFRMGLHGPYAMQFSRSGIPSVKNLDVSWFGEVSVTGYVPASGRGTVQGTASGVQSGMQGVVHWYNSNAQYWAKTSSSGAFTSPLMKPGTYTMVLYQTEFKIATTTVTVSAGQTTRQDIAGNFNTSRNTLFQIGEYDGQPTGFRNADKFLRMHPSDSRMDSWGPLTYTVGSSTLSDFPMAVFKSVNNPVTIKFNLASAPGAATLRIATTLSFAGSRPQATVNGWSGPVPAAPTKIDSRGVTRGAYRGYGEIYTVNIPAGTLVAGINTITISSVSGSDGDAFLSPNFVSHGPFFSSHPDPPPHFLFTRHPVSSP

SEQ ID NO: 978 - protein, 533 aa, Myceliophthora thermophilia
AFGYTSSGNNYVIDAGSANPLVFSVSKSSCDINSIKYRGTELQYSNTGTHIGSGLGSATVSVSQISGSSRYIKVTCVTSTLTHYIVVREGESIIYMATYITAEPSVGELRFIARLLPDKLPNEYPYGEVSNTSGASATVEGSDVFIVNGQTRSKFYSSTRFIDEDSHCVYGGSDLIHVCIMTPQQESSSGGPFFRDIDSNNAGDSTNLYNYMNSGHVQTEAFRMGLHGPYAMQFSRSGIPSVKNLDVSWFGEVSVTGYVPASGRGTVQGTASGVQSGMQGVVHWYNSNAQYWAKTSSSGAFTSPLMKPGTYTMVLYQTEFKIATTTVTVSAGQTTRQDIAGNFNTSRNTLFQIGEYDGQPTGFRNADKFLRMHPSDSRMDSWGPLTYTVGSSTLSDFPMAVFKSVNNPVTIKFNLASAPGAATLRIATTLSFAGSRPQATVNGWSGPVPAAPTKIDSRGVTRGAYRGYGEIYTVNIPAGTLVAGINTITISSVSGSDGDAFLSPNFVSHGPFFSSHPDPPPHFLFTRHPVSSP

SEQ ID NO: 979 - DNA, 1857 bp, Myceliophthora thermophilia
atggagcgagcactacgcgtgacacgccctgctgggcttttggcggctcgttgctcgcccgtcttgtcctcaacgcgcacatcgcttcggctctggcagcagcagcagcagcactgcagtggtccaaccaccaccccgcaacataccggcttcatcccctccttccagcatggccgcctaagcacggtgcgttccaaccacacggacgcccagaacagtggccaagagaacacgcaggcggccaccgcggcggaaggccagaagggtggtgatgtgaaggttcctgagggtgcccagacgggcgatgtccaggctggagatcgtcccgggggagacaggtccaacaagacatccgcgaaaggcaaggcgacgacgacgaagaagaagaagaagcagcccaagaagccggagcgtttcaccaggatgaagaacgacgccggcgtcgtcgagttcaatagccagaagttgaagttccgctggtgggacaccccttcgaaccccgacctcgtcctctcgccgctctggcttcgcgactcgtgcccgtgccacctctgcgtcgacccggactcgggccagaagaacttctcgaccaccgagctccgtgaccgcccggtgatcgaatccgcacaggtcaccgccgaccgcactctcgagatcgtctgggccaacgacccccccagcggcggcgcctcgcacaagtccgtcttccccgccgaggaggtcaaggagtggctgatggacgacaagtggcagcgggggcgcgtcgtcccccgcgacccggagaggatcctctgggacaaggcccagtacgaggcgctcctggccgagggccgctgccgcgtcagctacaaggactggctgagcgacgagcccgccttctgggacgccctgctcgacctccgccagaccggcctgatcatcatcaccgacgtgccgtcggacgaggccgcggtcgagcggatcgccaaccgcgtcggccccatccaggagaccttttacgggcgcacctgggacgtcagggcgaagccccaggccgagaacgtggcctacacggacaagttcctcggcctgcaccaggacctcctgtactacgaccccgtgcccggcctgcagatgctgcactgcctgtccaacagctgcgagggcggcgagtcgctcttcagccacggcgtgcgcgccgcctacgagctgcggctcaaggaccccgcggcgtacaagcgcctggccgagctcagcgtctggttcggctaccgcaagggcgacaaccactacttcgccacccggcagaccatcaagcagggcgccaagggcatcccgagcgaggtccggtgggccccgccgttccaggcgaccttcaagctggcgtcgggcccgtcgcgcggccggaacctgtaccagtggaagcgcgccgccaacgcgttccaggccatcctcgaggacgaccacaacgtggtcgagttcaagctcaaggagggcgagtgcgtcatcttcgacaaccgcaccgtcctccacggccgccgccagttcaagacgggctccggcggcagccgctggctcaagggcacctacgtgtcctaccagagctacctcgccgccgccacccgcctggccgaacacctcgaggccggcggcatccagctgcccctggcccgggccacgtgggtcgagcaggagaaggtcaagcagagcctgcaggagcggaagcgcgccgatttcgaacaagtgttttcggagaagaagaagaagtcggagcccgttcccgagccgtcgccaatacccgccgcgaagtcggcgggggctaccgagacgacgaactcggagccaacgaactcggagccaacgcaatccaagcaataa

SEQ ID NO: 980 - protein, 618 aa, Myceliophthora thermophilia
MERALRVTRPAGLLAARCSPVLSSTRTSLRLWQQQQQHCSGPTTTPQHTGFIPSFQHGRLSTVRSNHTDAQNSGQENTQAATAAEGQKGGDVKVPEGAQTGDVQAGDRPGGDRSNKTSAKGKATTTKKKKKQPKKPERFTRMKNDAGVVEFNSQKLKFRWWDTPSNPDLVLSPLWLRDSCPCHLCVDPDSGQKNFSTTELRDRPVIESAQVTADRTLEIVWANDPPSGGASHKSVFPAEEVKEWLMDDKWQRGRVVPRDPERILWDKAQYEALLAEGRCRVSYKDWLSDEPAFWDALLDLRQTGLIIITDVPSDEAAVERIANRVGPIQETFYGRTWDVRAKPQAENVAYTDKFLGLHQDLLYYDPVPGLQMLHCLSNSCEGGESLFSHGVRAAYELRLKDPAAYKRLAELSVWFGYRKGDNHYFATRQTIKQGAKGIPSEVRWAPPFQATFKLASGPSRGRNLYQWKRAANAFQAILEDDHNVVEFKLKEGECVIFDNRTVLHGRRQFKTGSGGSRWLKGTYVSYQSYLAAATRLAEHLEAGGIQLPLARATWVEQEKVKQSLQERKRADFEQVFSEKKKKSEPVPEPSPIPAAKSAGATETTNSEPTNSEPTQSKQ

SEQ ID NO: 981 - protein, 595 aa, Myceliophthora thermophilia
STRTSLRLWQQQQQHCSGPTTTPQHTGFIPSFQHGRLSTVRSNHTDAQNSGQENTQAATAAEGQKGGDVKVPEGAQTGDVQAGDRPGGDRSNKTSAKGKATTTKKKKKQPKKPERFTRMKNDAGVVEFNSQKLKFRWWDTPSNPDLVLSPLWLRDSCPCHLCVDPDSGQKNFSTTELRDRPVIESAQVTADRTLEIVWANDPPSGGASHKSVFPAEEVKEWLMDDKWQRGRVVPRDPERILWDKAQYEALLAEGRCRVSYKDWLSDEPAFWDALLDLRQTGLIIITDVPSDEAAVERIANRVGPIQETFYGRTWDVRAKPQAENVAYTDKFLGLHQDLLYYDPVPGLQMLHCLSNSCEGGESLFSHGVRAAYELRLKDPAAYKRLAELSVWFGYRKGDNHYFATRQTIKQGAKGIPSEVRWAPPFQATFKLASGPSRGRNLYQWKRAANAFQAILEDDHNVVEFKLKEGECVIFDNRTVLHGRRQFKTGSGGSRWLKGTYVSYQSYLAAATRLAEHLEAGGIQLPLARATWVEQEKVKQSLQERKRADFEQVFSEKKKKSEPVPEPSPIPAAKSAGATETTNSEPTNSEPTQSKQ

SEQ ID NO: 982 - DNA, 462 bp, Myceliophthora thermophilia
atgaagtgcctcagcatgctcgccacggccttcggcctcttggctatggcctctgccatgcccgtcatcgaggagcgggacgaggtccagacagtgcacctcatcttccacgccggtccggcagagtactccctcgccattcccgccgacggcagcgtccacaagaccaacagcgacctctcggtcaacatcattgacgcgcccgactacaacgccttctatcagtgcaagttcgagacgcagaacgacgcgaccctggccagcagcatctcgcccgagggcgtcaaccagatcatggtcggaccccccacccccatcatcagcgtcagctgccagggcatgtgcgtgcccacctacggcgactgttaccgcgacggccagtgggtcggcccctgctgcgccggctactgcgctgccaacaagtgcaggccctgggtcaacccttgggggaaaaacgagtga

SEQ ID NO: 983 - protein, 153 aa, Myceliophthora thermophilia
MKCLSMLATAFGLLAMASAMPVIEERDEVQTVHLIFHAGPAEYSLAIPADGSVHKTNSDLSVNIIDAPDYNAFYQCKFETQNDATLASSISPEGVNQIMVGPPTPIISVSCQGMCVPTYGDCYRDGQWVGPCCAGYCAANKCRPWVNPWGKNE

SEQ ID NO: 984 - protein, 134 aa, Myceliophthora thermophilia
MPVIEERDEVQTVHLIFHAGPAEYSLAIPADGSVHKTNSDLSVNIIDAPDYNAFYQCKFETQNDATLASSISPEGVNQIMVGPPTPIISVSCQGMCVPTYGDCYRDGQWVGPCCAGYCAANKCRPWVNPWGKNE

SEQ ID NO: 985 - DNA, 1896 bp, Myceliophthora thermophilia
atgcgcttctcaacgctgctcgtcgcggcgtcggctcccgtaggcctcttcgcccgggagtcgatcgaccaattgtcgccgggagagctcgtcgcctttctcgagaagcacaacttggccatcgtgcccaagtcggagctgacggacgccctgacggagctcaatgccttgctcaagagccagcagctgcagcagcgccacgtcgttcccatcttcaggagagacaatggcacggcgaacaagtctggccagggtcaggggggtggtggtgatggtggtgccacaacgtccgtcacggacagtgacgacgagggcagcaccgtgaccgcgcaactcctcggcctggacgacctggcagacctgatccgggggctcatcaaggccattggcgacctgcccgagatcctcaaggccgtcgaaggcctgctgacgtccgagttcctcaacggcttccacgacgccatggtctacctcgcccagacgctgcaaccgcccgcgcccgagctgctgcagaaactcgtcaagaaggccggcccgctcgtcgacctgctcgacgggctcgatctcgagcgcctggtcgaccagctcaagggcgtcgacctggccggcctgatcggcggcgtcctgaagctgctctcggacaagaacctcgaaaacatcgagtccctcgtctccaacggcgccgccctgctcaccccttcgttcgtcaaccagacctccaccctcatcgggggcgccgcgccgctcctggccgagctcggccccttgctcgagaaggtgacgccgctgctcgacaagctcggggacgtcgacctggagggcatcctggatgccgtctcgcccctgctcaccaaggagtcgatccagggcctggtcaccctgctgcagaacgcgcagcagctgctgacccaggagacggtcaacagcctcaagtcgctcctcaagacggccggcccgctcctcgacagcctcggcgacctcgacctcaagggtctcctcgaccaggtcggcccgctgctggaggagctcggcaaggtggacctcaagggcctggtggaggccgtcagcccgctgctcacgcccaagtcggtcaggggcctgctcggcctcctgggcaacgccgagaacctgctgacgcccgagttcgtcaagcagaccaaggggctcatcggcgacgcgggcccgctcctgtcggcgctgggcgagatcgacctccagggcctggtcaagcagctgcagccgctgctctcggccctcggcaaggttgacctggccgagctgctcgagcaggcgtccccgctcctctcgcagatctcccccttgctcgaggagctcggcaagatcgacctggccaagctcgtcggccagctgtccccgctgctcgacaccctgggcgagatcgacctcaggggcctgctcgacgccctctccccgctgctcacgccgcagagcgtgaagggcgtcctgggattgctggacaacgccgaggacctgctgacggcccggttcgtcaaccagacgcacacgctcgtcggcggcgccgtcccgctcgtcgccgccctcgagggtgtcgacatcgagggcctcctgaagaaggtcgccccgctgctcgaggagctcggaggcgtcgacctggccggcctcgtcggcgccgccaagccgctcctcgacgccgtgcggaagatcgacgtcaagggcatcgtcgaacagatcatgcccctgctcacgccggagagcgtcaaggccatcgtcggcctcgtccacaacgccggcgtgctcctgagccagacctttgtctcgcagacctcggagctcatcgacgatgccacgccgctcgtggccacgctcgccgacctcatccacgccgtcctcaaggagtttgttggcaagcagtag

SEQ ID NO: 986 - protein, 631 aa, Myceliophthora thermophilia
MRFSTLLVAASAPVGLFARESIDQLSPGELVAFLEKHNLAIVPKSELTDALTELNALLKSQQLQQRHVVPIFRRDNGTANKSGQGQGGGGDGGATTSVTDSDDEGSTVTAQLLGLDDLADLIRGLIKAIGDLPEILKAVEGLLTSEFLNGFHDAMVYLAQTLQPPAPELLQKLVKKAGPLVDLLDGLDLERLVDQLKGVDLAGLIGGVLKLLSDKNLENIESLVSNGAALLTPSFVNQTSTLIGGAAPLLAELGPLLEKVTPLLDKLGDVDLEGILDAVSPLLTKESIQGLVTLLQNAQQLLTQETVNSLKSLLKTAGPLLDSLGDLDLKGLLDQVGPLLEELGKVDLKGLVEAVSPLLTPKSVRGLLGLLGNAENLLTPEFVKQTKGLIGDAGPLLSALGEIDLQGLVKQLQPLLSALGKVDLAELLEQASPLLSQISPLLEELGKIDLAKLVGQLSPLLDTLGEIDLRGLLDALSPLLTPQSVKGVLGLLDNAEDLLTARFVNQTHTLVGGAVPLVAALEGVDIEGLLKKVAPLLEELGGVDLAGLVGAAKPLLDAVRKIDVKGIVEQIMPLLTPESVKAIVGLVHNAGVLLSQTFVSQTSELIDDATPLVATLADLIHAVLKEFVGKQ

SEQ ID NO: 987 - protein, 613 aa, Myceliophthora thermophilia
RESIDQLSPGELVAFLEKHNLAIVPKSELTDALTELNALLKSQQLQQRHVVPIFRRDNGTANKSGQGQGGGGDGGATTSVTDSDDEGSTVTAQLLGLDDLADLIRGLIKAIGDLPEILKAVEGLLTSEFLNGFHDAMVYLAQTLQPPAPELLQKLVKKAGPLVDLLDGLDLERLVDQLKGVDLAGLIGGVLKLLSDKNLENIESLVSNGAALLTPSFVNQTSTLIGGAAPLLAELGPLLEKVTPLLDKLGDVDLEGILDAVSPLLTKESIQGLVTLLQNAQQLLTQETVNSLKSLLKTAGPLLDSLGDLDLKGLLDQVGPLLEELGKVDLKGLVEAVSPLLTPKSVRGLLGLLGNAENLLTPEFVKQTKGLIGDAGPLLSALGEIDLQGLVKQLQPLLSALGKVDLAELLEQASPLLSQISPLLEELGKIDLAKLVGQLSPLLDTLGEIDLRGLLDALSPLLTPQSVKGVLGLLDNAEDLLTARFVNQTHTLVGGAVPLVAALEGVDIEGLLKKVAPLLEELGGVDLAGLVGAAKPLLDAVRKIDVKGIVEQIMPLLTPESVKAIVGLVHNAGVLLSQTFVSQTSELIDDATPLVATLADLIHAVLKEFVGKQ

SEQ ID NO: 988 - DNA, 1083 bp, Myceliophthora thermophilia
atgccgtgcaaactcgccatcacgtccatgtcgcttggccggtgctatgccggccattcttttgcgaccaagatggacgctgcccacaagtacgggtatcagggcattgagctcttccacgaagacctcgtcgatgtcgcttattccttgtcctctgaaacgccgtctcccgaaggaccatcgcaggaggcccaggcagcagcagctcggcacattcggcgtctgtgtcaggccagaggcatcgagatcatctgcctccagcccttcagccactacgacggacttctcgatcgcgaggagcacgagcgccgcctcggccagctcgaactctggtttacgctcgcccgggagctgggaaccgacatgatccagatacccgccagctttctcccggcttctcgcgtgaccgaggacctcaatctgattgtatcggacctgcaaatagtcgccgatatgggactgcgccaggaccctcccattcgcttcgcctatgaaagcctctgctggagcacgcgcgtcgacacatgggagctctgctgggaagtcgtccagcgggtcgaccgtcccaactttggcatgtgtctcgacaccttcaacatcgccggccgcatctatgcagacccgaccgccgcctcgggccggactcccgacgccgaggccgccgtgcgccagtcgatcgcccggatgatcgcacacgtcgatgtcaagaaggtgttctacgtccaggttgtcgatgccgagcgcctcagcgagcctctggtccctggccatcccttctacaacgccgaccagccgccgcgcatgagctggtcccgaaattgcaggctgttttacggagaagacgagcgcggcgcctaccttcccgtccgcgagattgcccgggctttcttccacggtctcggctttgagggatgggtcagcctggagctgtttcaccgccgcatggctgacgaggagccccaagtgcccgaagagcttgccaggaggggggccgcctcatgggtcaagctgcagaaggacatgaagctgaacgtggataagccaaagtcatccaagacgacaagggtgtatgcatcgctgtag

SEQ ID NO: 989 - protein, 360 aa, Myceliophthora thermophilia
MPCKLAITSMSLGRCYAGHSFATKMDAAHKYGYQGIELFHEDLVDVAYSLSSETPSPEGPSQEAQAAAARHIRRLCQARGIEIICLQPFSHYDGLLDREEHERRLGQLELWFTLARELGTDMIQIPASFLPASRVTEDLNLIVSDLQIVADMGLRQDPPIRFAYESLCWSTRVDTWELCWEVVQRVDRPNFGMCLDTFNIAGRIYADPTAASGRTPDAEAAVRQSIARMIAHVDVKKVFYVQVVDAERLSEPLVPGHPFYNADQPPRMSWSRNCRLFYGEDERGAYLPVREIARAFFHGLGFEGWVSLELFHRRMADEEPQVPEELARRGAASWVKLQKDMKLNVDKPKSSKTTRVYASL

SEQ ID NO: 990 - protein, 343 aa, Myceliophthora thermophilia
GHSFATKMDAAHKYGYQGIELFHEDLVDVAYSLSSETPSPEGPSQEAQAAAARHIRRLCQARGIEIICLQPFSHYDGLLDREEHERRLGQLELWFTLARELGTDMIQIPASFLPASRVTEDLNLIVSDLQIVADMGLRQDPPIRFAYESLCWSTRVDTWELCWEVVQRVDRPNFGMCLDTFNIAGRIYADPTAASGRTPDAEAAVRQSIARMIAHVDVKKVFYVQVVDAERLSEPLVPGHPFYNADQPPRMSWSRNCRLFYGEDERGAYLPVREIARAFFHGLGFEGWVSLELFHRRMADEEPQVPEELARRGAASWVKLQKDMKLNVDKPKSSKTTRVYASL

SEQ ID NO: 991 - DNA, 894 bp, Myceliophthora thermophilia
atggagcaagagcttgccgaactcaagaagcagctagagctgctgctgctgctgctgctgctgctgctgctgctgccgccgcctcgcacatctctaacggagcgcgcagatgaggccgaggtccgcaagacgcaccacaagtatggatactacctggacaagtgtctgtacaacgaggtcgtcgacatgttctcggatcatcccgacgcctacgttgaattcctcggttgccggtaccgtggcaaggaagggatcaagcggctctaccaggggcgtttccagcagacgttcgtcaagggtcgtaacggaccggtgcacggctggctgctggaccacatcatgatgcaggacattgtggacgtcgacgagacgggcacgcacgcctggtgccgcatgcgggcgctcatgcaggccggcacccaccagagcatcgaggagtactacccgcgcggccaccgccagtggtgggagggcggcctgtacgagaacgaatacatcaaggagaacggggtgtggaagctgttccggtaccgctactttcccttctggcacgccgacttcgagaggggatggagccacaccaagaagaactacatcccctggcccaccgtcacgtacccggaagacccgctcggcccggacgagatcctggagcaaaagatgctctggcccgacacgcgcgtcgtgcccttccactacccgcacccggtcacgggcaagccgacggcgccggacgacctacgcgcacccgcgtacggcgccgacgttagcactagcgaccccccgctgagcctggacctgcccgccggacagagcaggccaggagcgacttcacgggagccgaagccgggggacagagtgctgccggagctggtgcaaaacaaggtagagtga

SEQ ID NO: 992 - protein, 297 aa, Myceliophthora thermophilia
MEQELAELKKQLELLLLLLLLLLLLPPPRTSLTERADEAEVRKTHHKYGYYLDKCLYNEVVDMFSDHPDAYVEFLGCRYRGKEGIKRLYQGRFQQTFVKGRNGPVHGWLLDHIMMQDIVDVDETGTHAWCRMRALMQAGTHQSIEEYYPRGHRQWWEGGLYENEYIKENGVWKLFRYRYFPFWHADFERGWSHTKKNYIPWPTVTYPEDPLGPDEILEQKMLWPDTRVVPFHYPHPVTGKPTAPDDLRAPAYGADVSTSDPPLSLDLPAGQSRPGATSREPKPGDRVLPELVQNKVE

SEQ ID NO: 993 - protein, 266 aa, Myceliophthora thermophilia
LTERADEAEVRKTHHKYGYYLDKCLYNEVVDMFSDHPDAYVEFLGCRYRGKEGIKRLYQGRFQQTFVKGRNGPVHGWLLDHIMMQDIVDVDETGTHAWCRMRALMQAGTHQSIEEYYPRGHRQWWEGGLYENEYIKENGVWKLFRYRYFPFWHADFERGWSHTKKNYIPWPTVTYPEDPLGPDEILEQKMLWPDTRVVPFHYPHPVTGKPTAPDDLRAPAYGADVSTSDPPLSLDLPAGQSRPGATSREPKPGDRVLPELVQNKVE

SEQ ID NO: 994 - DNA, 1887 bp, Myceliophthora thermophilia
atgatatgctcccaagctctcggcctgctgctcggcctccttgcggcggcccagcctaccatgggacaatcttcatggccacagcccttcgacatgagcgccgtctccctgatcgacagccgctggacggacaaccagaaccgcacggtcacgtacctgaaatgggtcgacgtcgaccgcctgctctacaatttccgggccaaccatggcctgtcgacccagggggctcgccagaacgggggctgggatgcgcccgacttcccgttccgaacccatgtccagggccactttctcactgcgtggtcacactgctacgcctccctgcgggacgacgcctgccgtgaccgggccacttatttcgtggccgagctcgccaagtgccaggcaaacaacgatgccgtcggctttggcgccggctacctgtctgggttcccggagtccgagtttgacgctcttgaagcaagaaccctcagcaacggcaacgtcccgtactacgccatccacaagaccatggctggcctgctggatgtgtggcgccacgtaggcgacaccacggcccgcgacgtgctgctcgcgctggccgggtgggtggactcgcgcaccggccgtctgagctacgagcaaatgcaggccgtgctgggcaccgagtttggcggcatgaacgacgtcctgaccgagctctccctccagaccggggacccgcggtggctcgaggtcgcgcagcggttcgaccacgccgccgtcttcgaccccctggcatcccggcaggaccggctcgacggcctccacgccaacacgcaggtgcccaagtggatcggcgccgtgctcgagtacaaggcgacggggacggcccggtaccgcgacatcgcggccaacgcgtggaacttcacggtcggcgcccacagctacgccatcggcggcaacagccaggcggagcacttccacgagcccgacgccatcgccaagtacctgctcgaggacacggccgaggcgtgcaacacgtacaatatgctccggctcacgcgcgagctgtggatgctcgacccggccagcacggcctactttgacttttatgagcgcgcgctgctgaaccacctcctcgggcagcagaacccggcggacccgcacgggcacgtcacctacttcacgccgctcaacccgggtggccgccgcggggttggcccggcctggggcggcggcacctggagcaccgactacgactccttctggtgctgccagggcaccgcgctcgagaccaacaccaagctgatggactccatctactggcacgacgacgacgacgacgccgacgacgacggggcggcgaacctgtgggtgaacctcttcaccccatcggtgctgcggtggacggagcgcggcgtcaccctcacgcaggagaccgccttccccgcggggagcgacaccatcacgctgacggtcgggggcgagccgacgggcggctgggacatgcacgtccggatcccctcgtggacgacgtcgggcgccgaggtcctcgtcaacggggagaaggcgggcgtcgcggcggcggtgccggggacgtacgtgtccatcagggggcgcgattggaaggcgggcgacgtggtgacggtgaggctgcccatgacgctgcggacggtggcggccaacgacgaccccggcgtcgcggcgctggcgtacgggccagtggtgttatcgggcgactacggcagcgcgtcgctggcgtcgctgcccacgctcgatctggactcggtgaggcgggccaagggaaacgggttggtgtttaccgcgaccgccgacgggcagtcggtgacgctggggccgttttacgacgcgcatgatagcaattataacgtgtactgggtaacgaagggacgcctgccggagtga

SEQ ID NO: 995 - protein, 628 aa, Myceliophthora thermophilia
MICSQALGLLLGLLAAAQPTMGQSSWPQPFDMSAVSLIDSRWTDNQNRTVTYLKWVDVDRLLYNFRANHGLSTQGARQNGGWDAPDFPFRTHVQGHFLTAWSHCYASLRDDACRDRATYFVAELAKCQANNDAVGFGAGYLSGFPESEFDALEARTLSNGNVPYYAIHKTMAGLLDVWRHVGDTTARDVLLALAGWVDSRTGRLSYEQMQAVLGTEFGGMNDVLTELSLQTGDPRWLEVAQRFDHAAVFDPLASRQDRLDGLHANTQVPKWIGAVLEYKATGTARYRDIAANAWNFTVGAHSYAIGGNSQAEHFHEPDAIAKYLLEDTAEACNTYNMLRLTRELWMLDPASTAYFDFYERALLNHLLGQQNPADPHGHVTYFTPLNPGGRRGVGPAWGGGTWSTDYDSFWCCQGTALETNTKLMDSIYWHDDDDDADDDGAANLWVNLFTPSVLRWTERGVTLTQETAFPAGSDTITLTVGGEPTGGWDMHVRIPSWTTSGAEVLVNGEKAGVAAAVPGTYVSIRGRDWKAGDVVTVRLPMTLRTVAANDDPGVAALAYGPVVLSGDYGSASLASLPTLDLDSVRRAKGNGLVFTATADGQSVTLGPFYDAHDSNYNVYWVTKGRLPE

SEQ ID NO: 996 - protein, 606 aa, Myceliophthora thermophilia
QSSWPQPFDMSAVSLIDSRWTDNQNRTVTYLKWVDVDRLLYNFRANHGLSTQGARQNGGWDAPDFPFRTHVQGHFLTAWSHCYASLRDDACRDRATYFVAELAKCQANNDAVGFGAGYLSGFPESEFDALEARTLSNGNVPYYAIHKTMAGLLDVWRHVGDTTARDVLLALAGWVDSRTGRLSYEQMQAVLGTEFGGMNDVLTELSLQTGDPRWLEVAQRFDHAAVFDPLASRQDRLDGLHANTQVPKWIGAVLEYKATGTARYRDIAANAWNFTVGAHSYAIGGNSQAEHFHEPDAIAKYLLEDTAEACNTYNMLRLTRELWMLDPASTAYFDFYERALLNHLLGQQNPADPHGHVTYFTPLNPGGRRGVGPAWGGGTWSTDYDSFWCCQGTALETNTKLMDSIYWHDDDDDADDDGAANLWVNLFTPSVLRWTERGVTLTQETAFPAGSDTITLTVGGEPTGGWDMHVRIPSWTTSGAEVLVNGEKAGVAAAVPGTYVSIRGRDWKAGDVVTVRLPMTLRTVAANDDPGVAALAYGPVVLSGDYGSASLASLPTLDLDSVRRAKGNGLVFTATADGQSVTLGPFYDAHDSNYNVYWVTKGRLPE

SEQ ID NO: 997 - DNA, 837 bp, Myceliophthora thermophilia
atgcgcaccttgccaattttcaccattggggccctagcccccctagtgacttctgcgtccgattgtacccgcgagttcctccaggatagcgcggacagcctggtggccgcgcagactgcgggagatcccagcctgcttcagcctgtctcggacgcactcgactataacgagaattatgctacggcaacttttgagtctggaatcttgtccaagccgctcgagatagactttagccggcactacctcgacacgacgcagtgcgccaccttcacggagctgatctcggccacaggcagcaagccgtacgtgatcggcgtgcaaatgtacttcacagacaattccgtttccaagatcgacaccctcattaccaccaccggcgactggctgttcaacgccacgggcacgctctactgggctagccaggaagactggggcaccatcccggaggaggagcgtgactctcgtgaggtcatccaggctgctgccgacgcctactgcgatatcttcagcgacaagagcgtccaagtgccgtggggatatccctgtgccagacttgaaggcggcgcgtacacaggcaatggcggtcccgacgacaggtgtgacgtcggcatccccagcggcgtgaacctgactaaccgacgatatgtcattgacgagacaattggcgccgtctctgtcttcctgagcttcaacgccataccggattctcatgcttttagagtagaaaagggcaagctgcggtttgtgcataccatgacagtcatgaccgcgagtaggaacggcaggagcacgaccaggaggaggttgaggggagtcatggctccgtcggcgcagtga

SEQ ID NO: 998 - protein, 278 aa, Myceliophthora thermophilia
MRTLPIFTIGALAPLVTSASDCTREFLQDSADSLVAAQTAGDPSLLQPVSDALDYNENYATATFESGILSKPLEIDFSRHYLDTTQCATFTELISATGSKPYVIGVQMYFTDNSVSKIDTLITTTGDWLFNATGTLYWASQEDWGTIPEEERDSREVIQAAADAYCDIFSDKSVQVPWGYPCARLEGGAYTGNGGPDDRCDVGIPSGVNLTNRRYVIDETIGAVSVFLSFNAIPDSHAFRVEKGKLRFVHTMTVMTASRNGRSTTRRRLRGVMAPSAQ

SEQ ID NO: 999 - protein, 259 aa, Myceliophthora thermophilia
SDCTREFLQDSADSLVAAQTAGDPSLLQPVSDALDYNENYATATFESGILSKPLEIDFSRHYLDTTQCATFTELISATGSKPYVIGVQMYFTDNSVSKIDTLITTTGDWLFNATGTLYWASQEDWGTIPEEERDSREVIQAAADAYCDIFSDKSVQVPWGYPCARLEGGAYTGNGGPDDRCDVGIPSGVNLTNRRYVIDETIGAVSVFLSFNAIPDSHAFRVEKGKLRFVHTMTVMTASRNGRSTTRRRLRGVMAPSAQ

SEQ ID NO: 1000 - DNA, 1476 bp, Myceliophthora thermophilia
atggccgtcgttgccggtcttctcacttggagcaacgcaattggagcaataaccctgtactttggaaccttggtgttctaccgcctgttccttcacccacttgctcgcttcccgggccccaagctcgcagccatctcgcgctggtacgaaggctactacgacttctacctgggcggacagtacaccctcaagatccgggacctgcacagacaatatggtccaatcatccggattagcccgcacgagttgcatgtcagtgactcggcgttttacgagaagctctaccgcatggatggccggtgggacaagtatgcgtggacttacgatgccttcggagccaccttctcaaccatatttggatcagcaaggatcgctgcgcggcaagacgtcatccgcaagaatgtggtcaagttttgcggacggattgccggctttgccggaaccacgtttaacttgggtgcagcggtcagcgctttcaccagggacattgccaacgagtttgtggttggaaaggggtacgacgaactcgacatggacgacttcaacgttggcctgtccattcccgtgttgggggctggaacggtatggcgcacgaccaagttcatccgctggtacggccctctactgaaggctatccccagcggatggatcttgaagtgggcgtgggcgagcgaggaaaccaagtcgtacatccgctacctcaagaaatgcttccaacacactgatgagacgttggctgcggtgaaatcgggctcgcccgacgccaacgtcgaaaacaccgtcgttcacgctatcgtccgctccgggctgtcgcccgccgagaagtcggagctccggatccgccaagaagtgtcgacggtgaccacggcgggcttcgagaccaccgcgagcgcgctcaggctgctgctgtgccacgtcttcaccaacgacacggtccgcgggcggctgagagcagagcttgcctcggccggcgtcggggccggcgacgacggccagctcgagctgaagacgctcgagcggctcccgtacctcacggccgtgctgatggaaggcctgcgcctgagcccgggcatcggcacgcggtcggcccgcgtctcggacaaggacctcttctacggcgacgactggcggatccccgccggcacgccggtcggcatgaccgtgctgctgatgcacacggacgagcacaactttgccaacccgcggtccttcgatcccgaccgctggatggaccccgcaacccggagggcggccgagaagacatttgccccgttttcgcgggggacgagagtgtgtctcggcatgcatctggcgtgggcggaattgtacatgctccttgccgctctagtacagcgcttcgacttcactttcgagggcgctacccctgccgattttgagtttgcattcgacagtttcgccattggcaccaaggctgggtgcaatctatttgcgacgccttaccttcgccaggtctaa

SEQ ID NO: 1001 - protein, 491 aa, Myceliophthora thermophilia
MAVVAGLLTWSNAIGAITLYFGTLVFYRLFLHPLARFPGPKLAAISRWYEGYYDFYLGGQYTLKIRDLHRQYGPIIRISPHELHVSDSAFYEKLYRMDGRWDKYAWTYDAFGATFSTIFGSARIAARQDVIRKNVVKFCGRIAGFAGTTFNLGAAVSAFTRDIANEFVVGKGYDELDMDDFNVGLSIPVLGAGTVWRTTKFIRWYGPLLKAIPSGWILKWAWASEETKSYIRYLKKCFQHTDETLAAVKSGSPDANVENTVVHAIVRSGLSPAEKSELRIRQEVSTVTTAGFETTASALRLLLCHVFTNDTVRGRLRAELASAGVGAGDDGQLELKTLERLPYLTAVLMEGLRLSPGIGTRSARVSDKDLFYGDDWRIPAGTPVGMTVLLMHTDEHNFANPRSFDPDRWMDPATRRAAEKTFAPFSRGTRVCLGMHLAWAELYMLLAALVQRFDFTFEGATPADFEFAFDSFAIGTKAGCNLFATPYLRQV

SEQ ID NO: 1002 - protein, 476 aa, Myceliophthora thermophilia
AITLYFGTLVFYRLFLHPLARFPGPKLAAISRWYEGYYDFYLGGQYTLKIRDLHRQYGPIIRISPHELHVSDSAFYEKLYRMDGRWDKYAWTYDAFGATFSTIFGSARIAARQDVIRKNVVKFCGRIAGFAGTTFNLGAAVSAFTRDIANEFVVGKGYDELDMDDFNVGLSIPVLGAGTVWRTTKFIRWYGPLLKAIPSGWILKWAWASEETKSYIRYLKKCFQHTDETLAAVKSGSPDANVENTVVHAIVRSGLSPAEKSELRIRQEVSTVTTAGFETTASALRLLLCHVFTNDTVRGRLRAELASAGVGAGDDGQLELKTLERLPYLTAVLMEGLRLSPGIGTRSARVSDKDLFYGDDWRIPAGTPVGMTVLLMHTDEHNFANPRSFDPDRWMDPATRRAAEKTFAPFSRGTRVCLGMHLAWAELYMLLAALVQRFDFTFEGATPADFEFAFDSFAIGTKAGCNLFATPYLRQV

SEQ ID NO: 1003 - DNA, 1491 bp, Myceliophthora thermophilia
atggccatcgtcaacttcatcctgtcaccctgggcgccggtggccctcttggctgcggcggtggtttactatgtctacccataccttgtaacctaccgacacctgaggcacattccggcgccgtttcccgcccaattcacgaattggtggttgctgttggtctgccggcggggcaatcgatacgaaacggtggacaagctgcacaagaagctgggcccggtcgtgcgtatccagccaaaccacgtcagcctctgcgacgacgcggccatccaggtcgtctacggccatggcaacggcttcttgaaatcggacttttatgacgcctttgtgagcatccagaggggcttgttcaacactcgggatcgcgccgagcacacgcgcaagcgcaagatcgtctcgcacaccttctcggtcaagtcggtcgcccagttcgagccctacatccacagcaacctcgagctctttgtccggcagctggacaacctgatcgcccggtcgaccaaccccgatggcgcggcccatctcgactgcctccactggttcaactacctcgccttcgacgtcatcggcgacctggcgtttggcgctccgttcgggatgctgtcctcgggcgccgacatggccgaggtccgcgcgtcgcccgagagcccgcccatctacgcgcccgccatcgagatcctgaaccgccgcggcgaggtgtcggcgacgctcggcatcctgccggccctcaagccgtacgccaagtacttcccggaccccttcttcagccggggcctccaggcggtcgagaacctggcagggatcgcgatcgcgcgcgtcaaggcccggctcgagaacccgccgccgtcgcaccgcaaggacctgctgcagcgcctgatcgagggccgcgacgagaagggcgagccgctcgggcggcaggagctcacggccgaggcactgacgcagctcatcgccggcagcgacacgacgtccaactcgtcgtgcgccctcctctaccacgcggtccgcacgccgggggtgatgcagaagctccaggccgagctcgacgcggccatccccgccgacatggacgtgccgaccttcgacatggtccgcgacctgccctacctctccgccgtcgtcaacgagacgctccggttccactcgacctcgggcatcggcctgccccggcaggtgcccccggacgggcagggcgtccactttggcgggcactacttcccccccggcacggtgctgagcgtgccgacgtactcgatccaccactccaaggagatctggggcccagacgcggacgagttccggccggagcggtgggagaggctgacgccgaggcagaagaacgccttcatccccttcagccacggcccgcgcgcgtgcgtggggaggaacgtggccgagatggagatgaagctcatcgtggccacgtgggcgcggcggtacgacgtgtccctgaggcaggcgcacatggataccaggggaaggatttcctga

SEQ ID NO: 1004 - protein, 496 aa, Myceliophthora thermophilia
MAIVNFILSPWAPVALLAAAVVYYVYPYLVTYRHLRHIPAPFPAQFTNWWLLLVCRRGNRYETVDKLHKKLGPVVRIQPNHVSLCDDAAIQVVYGHGNGFLKSDFYDAFVSIQRGLFNTRDRAEHTRKRKIVSHTFSVKSVAQFEPYIHSNLELFVRQLDNLIARSTNPDGAAHLDCLHWFNYLAFDVIGDLAFGAPFGMLSSGADMAEVRASPESPPIYAPAIEILNRRGEVSATLGILPALKPYAKYFPDPFFSRGLQAVENLAGIAIARVKARLENPPPSHRKDLLQRLIEGRDEKGEPLGRQELTAEALTQLIAGSDTTSNSSCALLYHAVRTPGVMQKLQAELDAAIPADMDVPTFDMVRDLPYLSAVVNETLRFHSTSGIGLPRQVPPDGQGVHFGGHYFPPGTVLSVPTYSIHHSKEIWGPDADEFRPERWERLTPRQKNAFIPFSHGPRACVGRNVAEMEMKLIVATWARRYDVSLRQAHMDTRGRIS

SEQ ID NO: 1005 - protein, 469 aa, Myceliophthora thermophilia
YLVTYRHLRHIPAPFPAQFTNWWLLLVCRRGNRYETVDKLHKKLGPVVRIQPNHVSLCDDAAIQVVYGHGNGFLKSDFYDAFVSIQRGLFNTRDRAEHTRKRKIVSHTFSVKSVAQFEPYIHSNLELFVRQLDNLIARSTNPDGAAHLDCLHWFNYLAFDVIGDLAFGAPFGMLSSGADMAEVRASPESPPIYAPAIEILNRRGEVSATLGILPALKPYAKYFPDPFFSRGLQAVENLAGIAIARVKARLENPPPSHRKDLLQRLIEGRDEKGEPLGRQELTAEALTQLIAGSDTTSNSSCALLYHAVRTPGVMQKLQAELDAAIPADMDVPTFDMVRDLPYLSAVVNETLRFHSTSGIGLPRQVPPDGQGVHFGGHYFPPGTVLSVPTYSIHHSKEIWGPDADEFRPERWERLTPRQKNAFIPFSHGPRACVGRNVAEMEMKLIVATWARRYDVSLRQAHMDTRGRIS

SEQ ID NO: 1006 - DNA, 1533 bp, Myceliophthora thermophilia
atgatgctctccccgttcctcctctcattcgctctcgtactcctcgccgtccacgccctccaacgggccctcacctcaccgctgaacaagatccccgggccgtggtatgccaggttcacgacgctggtcctgaagtggcatgagttcagggccaatcggacacgctatgtccacgccatgcacctcaagtacgggcctgcagtccgcatcgccccgaacgaggtcgtctttgcctcggccgccgccgtcaaggagatctactgttctggtggcagcggttatgataagaccgacttctatgacatgtttaagatttacgggagaagaaccatgtttaccaccctgaataaggatgatcatgcaaagaggaagcggatccttgccgaccgctacgccaatacgaacattgttcgctccccatccctcgatggcatcgccaaccgtgcgagcaaattcgttcagaggtgcttccggtccgtgggcggaagcgttgatatctatgtgcgtctgctcctctgcgacgagtacggcatcagagatactgacacttggggggggccgcgctgcctacactcgtacgctttcgattgtatcacgcatcacctcttccaccccaacgggacagactcgctgctgaacagcaaggacgaggagatcatgcgcgaggtaacctttgacgacagcctgcagaaccgcttgttccaacactactggccgaccgcacacaagctgtttggcagcatcctgtaccgtttcgcgaagccgcgggagacgccgctggccgacggcttcgtggtcgacacgtgtgcgcggaccgacgcggcgccattcacgctgctcaaccgcctgaaggggcccagctcgggcctcgacgacctggacgtcgcagccgagtgcctcgaccacatggccgccggcatcgacaccaccggcgacgccctgtgcttcctcatgtgggagctctcccagccgtcgtcgatgcaccgccagaggaagctgcaggaggagctcgccaccgccgccgccgcgtcctcttcctcctcgcatcatccgggcgcaggcgcgggcgcgagcctcgaccggctgccatacctcgacgccgtcgtcatggagggcctgcgctgcttcccagccatccccatgtccctgccgcgctccgtgcccgccggcggccgcaccgtcgacggcttcttcctgcccgccggcaccaccgtcagctgccaggcctactcggtccacaggatcgaccagtccgtcttcccccgcccggatgccttcgagcccgagcgctggctcgagcccgagggcgacgccgagaggagacggctcttctttgcctttgccaatggcgggaggggctgtgttggcaagcacctggcactcgccgagatgaagatgctgctccgggccgtctactccacctttactacgcttcccgacccgagcatgacggccgaagaaatggacatgtcggatcagctgatctcgtcgcgcccggccggtcaacggccctgccagctggtcaacaactga

SEQ ID NO: 1007 - protein, 510 aa, Myceliophthora thermophilia
MMLSPFLLSFALVLLAVHALQRALTSPLNKIPGPWYARFTTLVLKWHEFRANRTRYVHAMHLKYGPAVRIAPNEVVFASAAAVKEIYCSGGSGYDKTDFYDMFKIYGRRTMFTTLNKDDHAKRKRILADRYANTNIVRSPSLDGIANRASKFVQRCFRSVGGSVDIYVRLLLCDEYGIRDTDTWGGPRCLHSYAFDCITHHLFHPNGTDSLLNSKDEEIMREVTFDDSLQNRLFQHYWPTAHKLFGSILYRFAKPRETPLADGFVVDTCARTDAAPFTLLNRLKGPSSGLDDLDVAAECLDHMAAGIDTTGDALCFLMWELSQPSSMHRQRKLQEELATAAAASSSSSHHPGAGAGASLDRLPYLDAVVMEGLRCFPAIPMSLPRSVPAGGRTVDGFFLPAGTTVSCQAYSVHRIDQSVFPRPDAFEPERWLEPEGDAERRRLFFAFANGGRGCVGKHLALAEMKMLLRAVYSTFTTLPDPSMTAEEMDMSDQLISSRPAGQRPCQLVNN

SEQ ID NO: 1008 - protein, 485 aa, Myceliophthora thermophilia
SPLNKIPGPWYARFTTLVLKWHEFRANRTRYVHAMHLKYGPAVRIAPNEVVFASAAAVKEIYCSGGSGYDKTDFYDMFKIYGRRTMFTTLNKDDHAKRKRILADRYANTNIVRSPSLDGIANRASKFVQRCFRSVGGSVDIYVRLLLCDEYGIRDTDTWGGPRCLHSYAFDCITHHLFHPNGTDSLLNSKDEEIMREVTFDDSLQNRLFQHYWPTAHKLFGSILYRFAKPRETPLADGFVVDTCARTDAAPFTLLNRLKGPSSGLDDLDVAAECLDHMAAGIDTTGDALCFLMWELSQPSSMHRQRKLQEELATAAAASSSSSHHPGAGAGASLDRLPYLDAVVMEGLRCFPAIPMSLPRSVPAGGRTVDGFFLPAGTTVSCQAYSVHRIDQSVFPRPDAFEPERWLEPEGDAERRRLFFAFANGGRGCVGKHLALAEMKMLLRAVYSTFTTLPDPSMTAEEMDMSDQLISSRPAGQRPCQLVNN

SEQ ID NO: 1009 - DNA, 1620 bp, Myceliophthora thermophilia
atgactgagatgacaaccttttccatctttgggctagaacgcccggccgtgttggccctgtccattgcggttggtgcgtcctatgtcatctacctggtgacgatcacgattcatcgactcttcttccaccgcatctcccacatccccgggccaaagcttgctgctctcacatactactaccagtcgtactacgacttcttcccgcaccagggtcaattcatcttcaaactcgacgagctccacagaaagtatggccccatcgtgcgcatcggacccgacgaggtccacgtcaacgatgccaagttctacaaggagatgtacggttcctcaacacacaagcgcaacaagagcccgatctggtactggatgcatggcctcggggccgtgggcgaccagagcatgttcatcacgctcgaccacgaccatcatcggctccggaaggccgggctgggcacctacttcagcaagcgcaaggtccaggagttggaaccgagagtgaaggagaaagtcctactactacggcagaggcttctggaacgcgccggcggtgccccggtcaatctcaaggatgcctttggtgcaatggcgctggacattatcacgcagtactgcttcaaccgatgcttcggagcgcttgaccgcccagacctcgggcgcgagatgaacaagctgatgggggtcggcgttaagatcaacccctttgctcgcacgtttccgaccctggcccgcaccgtgatcaagctgccgaggtgggctctcaaatggagcggcctcgtgtccaccacggccgagttcctcgacctcgccgacaggctgtccgccgaggcgcggaacgaggcgatccgcgacctcgccagcggcaagtactcgcagacggacgatgccgactcgagaacggtcctccactccatgatgcggagcgacgtcctgcccgagcacgagaagacggagaagcggctgcaggcggacggcatgacgctgatcgcggccggcttcgacaccaccagccgcaccctgaccgtcatcttctaccacctcctgaccaaggaccacatccgggcccgcgtgctcgacgagatccgcaccctgatgccgaccccgacctccccgctgccgaccgtcgcccagctggagcagctgcgctacctgacctgcgtcatccacgagggcacgcgcctggcccacggcgtcgccggccggctggtgcgcatcgcgcccgaggaggacctcgagtactacagccccttcgacgggcgccggtacaccatcccgcgcggcaccaccttcggccagtcgtcctacctggtccacacggacgagtccatctacccgaacccggccgagttcgacccggaccggtactggaccgacgacggcaggccgaccgacgcccagcgctacctcgtccccttcggcaagggcacccgcatgtgcgtcggcatcaacctggcctgggccgagctctacctcaccattgccgccctgatcggcacggtcgacatgaggatcgcccccggcacgaccgagcacgacgtcaccatggtgcaagacctgttcgtcggcgtcttgcccgagaatcccggcgttcgcgtgaacgtcgtcgggcacctccaggcttaa

SEQ ID NO: 1010 - protein, 539 aa, Myceliophthora thermophilia
MTEMTTFSIFGLERPAVLALSIAVGASYVIYLVTITIHRLFFHRISHIPGPKLAALTYYYQSYYDFFPHQGQFIFKLDELHRKYGPIVRIGPDEVHVNDAKFYKEMYGSSTHKRNKSPIWYWMHGLGAVGDQSMFITLDHDHHRLRKAGLGTYFSKRKVQELEPRVKEKVLLLRQRLLERAGGAPVNLKDAFGAMALDIITQYCFNRCFGALDRPDLGREMNKLMGVGVKINPFARTFPTLARTVIKLPRWALKWSGLVSTTAEFLDLADRLSAEARNEAIRDLASGKYSQTDDADSRTVLHSMMRSDVLPEHEKTEKRLQADGMTLIAAGFDTTSRTLTVIFYHLLTKDHIRARVLDEIRTLMPTPTSPLPTVAQLEQLRYLTCVIHEGTRLAHGVAGRLVRIAPEEDLEYYSPFDGRRYTIPRGTTFGQSSYLVHTDESIYPNPAEFDPDRYWTDDGRPTDAQRYLVPFGKGTRMCVGINLAWAELYLTIAALIGTVDMRIAPGTTEHDVTMVQDLFVGVLPENPGVRVNVVGHLQA

SEQ ID NO: 1011 - protein, 512 aa, Myceliophthora thermophilia
YVIYLVTITIHRLFFHRISHIPGPKLAALTYYYQSYYDFFPHQGQFIFKLDELHRKYGPIVRIGPDEVHVNDAKFYKEMYGSSTHKRNKSPIWYWMHGLGAVGDQSMFITLDHDHHRLRKAGLGTYFSKRKVQELEPRVKEKVLLLRQRLLERAGGAPVNLKDAFGAMALDIITQYCFNRCFGALDRPDLGREMNKLMGVGVKINPFARTFPTLARTVIKLPRWALKWSGLVSTTAEFLDLADRLSAEARNEAIRDLASGKYSQTDDADSRTVLHSMMRSDVLPEHEKTEKRLQADGMTLIAAGFDTTSRTLTVIFYHLLTKDHIRARVLDEIRTLMPTPTSPLPTVAQLEQLRYLTCVIHEGTRLAHGVAGRLVRIAPEEDLEYYSPFDGRRYTIPRGTTFGQSSYLVHTDESIYPNPAEFDPDRYWTDDGRPTDAQRYLVPFGKGTRMCVGINLAWAELYLTIAALIGTVDMRIAPGTTEHDVTMVQDLFVGVLPENPGVRVNVVGHLQA

SEQ ID NO: 1012 - DNA, 1713 bp, Myceliophthora thermophilia
atggccataaccaacacgacggcggcggctgcccagcatggccccttatacgggatacagcttctcgctgacggctccgtcgcatccgggcttctgatgtctctcgtgtccatggtggtcctggctgccatcttcggccttgctggggcgctcggaagcggcggcggcggcggtggcggcgacaagcagcccccgagcctctgggaaccgatcccattcgtgtacaacagcctgcagtttctgctggacaacgaggggttcatgaagcgggcgcaggccgccctcaagaaaaccaccgtcgcccgcttccgccagggcggccacctggtctacctggtcaccctgccgctgtggtaccgcctgtccgccgacgacctgcgccgcttcgccacggacaagaccggccgcggccgcaaccccctgcccgggaccgaggacacgccgccggaaaatcgcctcttcctcggctacgagcacgtccacaacgagttcctcgcccgcgcccagcacctcgccccgatggtggagcagtaccagcgccagctgacccagaccctggacggcctgtgtccctctccctcggacgctaccggcaccgggaagaagggccggaacgacgacggggtcgtcctcggcgtcgtcgacttctgcaaggggcgggtggcgcggtgcgcgctgcacgcgctgctgggcccgggggcgttcgagatcagcccggacctggtggagcgcatgtgggagttcgacgacgccgtcttcccgctcgtcatgggcctgagactgggcgtgcccgagtggctcaaccggcgtgcccacgcggcccaccgccgctacctcaacgccgtccgccgctacctcgacgccgcctgggccgacttcgactgggccgacccggcctcggccgacgcccgctgggagccccgcttcggtgcccaggtcacccgcgaagtcgccaagtggttccgagaccacggcttcaccggccccgacaccggtcctggcgccgtcggcatcctcgcctgggcgcaaaactccaatgtgatcccgacgacgacctggctggtgatggaggtcgcccgggacccggagctgctccgggcgctgcgcgaggaggtcgagacggcgttcgcgacggacggggcgacggggcggaggaggacgctcgacccgcaaaaggtggcggcgctgccgctgctggcgtcggcctacaccgagacgctgcggctgcgcatgaacttcaacgtcgtccgcaacgtccgccagtccttcaccatggccggatacaccatccgcggcggcagcctcctccaggtgcccaccctcgtcgcccactacgacgaggacgtctggggcgccgagtcccacccggcctccgagttctgggctgggcgccatatcaagtacaccgacgagcccgatgccgagggccgcgttacccggaagcgcgtctttgccatggccggccggaccgggtcgtattttccctacggcggcggcaacctgatctgccccgggcggcactttgccaaacaggagatcatgctgaccatcgccctgctcatctcccgcttcgacatcgagttcctcggatggacaaagctggacggttctccctccgatcgacccccgcgcaacgacccgcgcttcagcggcggcggggccgcgcctccggatcgagatatgaagattaggatcaggccgatcgcttcgtaa

SEQ ID NO: 1013 - protein, 570 aa, Myceliophthora thermophilia
MAITNTTAAAAQHGPLYGIQLLADGSVASGLLMSLVSMVVLAAIFGLAGALGSGGGGGGGDKQPPSLWEPIPFVYNSLQFLLDNEGFMKRAQAALKKTTVARFRQGGHLVYLVTLPLWYRLSADDLRRFATDKTGRGRNPLPGTEDTPPENRLFLGYEHVHNEFLARAQHLAPMVEQYQRQLTQTLDGLCPSPSDATGTGKKGRNDDGVVLGVVDFCKGRVARCALHALLGPGAFEISPDLVERMWEFDDAVFPLVMGLRLGVPEWLNRRAHAAHRRYLNAVRRYLDAAWADFDWADPASADARWEPRFGAQVTREVAKWFRDHGFTGPDTGPGAVGILAWAQNSNVIPTTTWLVMEVARDPELLRALREEVETAFATDGATGRRRTLDPQKVAALPLLASAYTETLRLRMNFNVVRNVRQSFTMAGYTIRGGSLLQVPTLVAHYDEDVWGAESHPASEFWAGRHIKYTDEPDAEGRVTRKRVFAMAGRTGSYFPYGGGNLICPGRHFAKQEIMLTIALLISRFDIEFLGWTKLDGSPSDRPPRNDPRFSGGGAAPPDRDMKIRIRPIAS

SEQ ID NO: 1014 - protein, 528 aa, Myceliophthora thermophilia
AIFGLAGALGSGGGGGGGDKQPPSLWEPIPFVYNSLQFLLDNEGFMKRAQAALKKTTVARFRQGGHLVYLVTLPLWYRLSADDLRRFATDKTGRGRNPLPGTEDTPPENRLFLGYEHVHNEFLARAQHLAPMVEQYQRQLTQTLDGLCPSPSDATGTGKKGRNDDGVVLGVVDFCKGRVARCALHALLGPGAFEISPDLVERMWEFDDAVFPLVMGLRLGVPEWLNRRAHAAHRRYLNAVRRYLDAAWADFDWADPASADARWEPRFGAQVTREVAKWFRDHGFTGPDTGPGAVGILAWAQNSNVIPTTTWLVMEVARDPELLRALREEVETAFATDGATGRRRTLDPQKVAALPLLASAYTETLRLRMNFNVVRNVRQSFTMAGYTIRGGSLLQVPTLVAHYDEDVWGAESHPASEFWAGRHIKYTDEPDAEGRVTRKRVFAMAGRTGSYFPYGGGNLICPGRHFAKQEIMLTIALLISRFDIEFLGWTKLDGSPSDRPPRNDPRFSGGGAAPPDRDMKIRIRPIAS

SEQ ID NO: 1015 - DNA, 1533 bp, Myceliophthora thermophilia
atgccgaccaccgcttccatcccaggggcaactttggcgcccatgtcgggactgtcggcggcgtcgttggcgctgcttctggtcgggctgaccgcctcgtattttctcctcctgaggcctctctacaacatctacttccatccgctccgccgataccccggacctaaactgtgggccgcgtcgtcgctaccatggggcttttcgttcttgagcgggtactggcatcaccgcgccctgcagctgcatacccagtacggtcacgtcgtgcgtattggcccaaatgagctctcgttcgacgttcccgaggcttgggaggacgtgtacgggcggtcgaagcaccgaaaggaaaaccccaaggctccgtggtacctcaaccccaagaccaaggagattgtgagcgcgcggctcgaagaacacacgcgcatgcgccgcctgctgggcatcggcttcaccaacacagccatgctcgagcaggagccgctgattaagagccacgtcgacctgttcatccagcgtttgcacgaaatcaacagcggaggcaaggccgccgtcgacatgttcgagtggttcgcgtactgcaccttcgacatcatcggcgacctgtcctttggcgagccgttcgggtgtctgcgcgactcgatgctgcacccatggatcgcctgggtgtttgcgaacatcaaattggcccacaccctggtcttgtgcaaccgaatccccttcttcttcctcttcctacccatccggcaaaccctggcgctcgtcaagggcgcggggtactttgagaagaccatgaaggctgtcactgaccggcgtctggcccgcgacgccgagcggcccgacttcttgcagatcatgaagacgccgcgagggaactcgttcatgactcgagaagaaattcacagcaacgcgtcctttttgaccatggcaggatccgagacaacgtcgaattcgatggtcgtggccgtgtacatgatatgcttgtacccagaaaccaaagcaaagatcatcgacgagctggccgcaaccttcaacaccgagtccgagatcgacatgcgcagcgcgggcaagctgacgtatttgatggccgtcattcaggagagcatgcgctaccatccgccgggacccaacgcactgtggcgcataaccccttcggggggcaacgagattctaggcgactggctgcccgcaaagactatacttggcataccgcaccgcgtcatgtatcgcagtgagcacaatttcaagcacgcgaacgaattcataccggagcgttggttggatgttgagggggagcagtccgaatttgccaatgatcgcagagacagcttccatccgttctcttacggaccacggacttgtcttgccgtgaatctcgcctacgccgagatgcgctacatccttgcgcgcctgatgtggaattttgactttgaactggccgagcagagccggaactgggccgatgggctccgcgcttggttgatctgggagaagcgaccactctatgtccatctgaagccgagacgttcgaagtaa

SEQ ID NO: 1016 - protein, 510 aa, Myceliophthora thermophilia
MPTTASIPGATLAPMSGLSAASLALLLVGLTASYFLLLRPLYNIYFHPLRRYPGPKLWAASSLPWGFSFLSGYWHHRALQLHTQYGHVVRIGPNELSFDVPEAWEDVYGRSKHRKENPKAPWYLNPKTKEIVSARLEEHTRMRRLLGIGFTNTAMLEQEPLIKSHVDLFIQRLHEINSGGKAAVDMFEWFAYCTFDIIGDLSFGEPFGCLRDSMLHPWIAWVFANIKLAHTLVLCNRIPFFFLFLPIRQTLALVKGAGYFEKTMKAVTDRRLARDAERPDFLQIMKTPRGNSFMTREEIHSNASFLTMAGSETTSNSMVVAVYMICLYPETKAKIIDELAATFNTESEIDMRSAGKLTYLMAVIQESMRYHPPGPNALWRITPSGGNEILGDWLPAKTILGIPHRVMYRSEHNFKHANEFIPERWLDVEGEQSEFANDRRDSFHPFSYGPRTCLAVNLAYAEMRYILARLMWNFDFELAEQSRNWADGLRAWLIWEKRPLYVHLKPRRSK

SEQ ID NO: 1017 - protein, 477 aa, Myceliophthora thermophilia
YFLLLRPLYNIYFHPLRRYPGPKLWAASSLPWGFSFLSGYWHHRALQLHTQYGHVVRIGPNELSFDVPEAWEDVYGRSKHRKENPKAPWYLNPKTKEIVSARLEEHTRMRRLLGIGFTNTAMLEQEPLIKSHVDLFIQRLHEINSGGKAAVDMFEWFAYCTFDIIGDLSFGEPFGCLRDSMLHPWIAWVFANIKLAHTLVLCNRIPFFFLFLPIRQTLALVKGAGYFEKTMKAVTDRRLARDAERPDFLQIMKTPRGNSFMTREEIHSNASFLTMAGSETTSNSMVVAVYMICLYPETKAKIIDELAATFNTESEIDMRSAGKLTYLMAVIQESMRYHPPGPNALWRITPSGGNEILGDWLPAKTILGIPHRVMYRSEHNFKHANEFIPERWLDVEGEQSEFANDRRDSFHPFSYGPRTCLAVNLAYAEMRYILARLMWNFDFELAEQSRNWADGLRAWLIWEKRPLYVHLKPRRSK

SEQ ID NO: 1018 - DNA, 1719 bp, Myceliophthora thermophilia
atgggtgctgttttctcctcgctaccagggacgctgctgctcggggcgctcctggccggactgtacaggctgtaccgtgcggccctcccgaagccgctgcccaacatctcgtacaaccgggatgccgccaacaagctcttcggagatgtccccgagatgatggcctacgtcatgcgcaccaagcgcatctttagccccatcatccaggccttcatcaagcccatggcgctgccgtgggtggtggtgacggacccgttcgagagccaggacatactgctgcggcggaccaaggagtttgaccgcagcggcttctttggcgacctgatcggcggcatcctgccggaacagcacatccagttcgtgtccagcgacgcccggttcaagaacaaccgcaacctcatcaaccacctgatggcgcccaccttcatcaccgagatcagcgggccgcagctctacaaggtcgccctgaccatgatccgcctgtgggagctcaagtgcagcctggccgagggccaccccttccacgcgcaccacgacatcacctacatggccctcgacaccatcttcgccggcatgttcggccatccggagacagaaagcgtcacgctcggccgcctggatgaggtgtcgggctgggaggcgacgcgcgaacagcggctgcccgcgagcgaggacgagcccgtcgtgttcccggagccggagctgcccgccatcttcgcggccgcgctgacgctggccaactcggtcacggacacgcagctgtcgcccgcgccgcggctgacctcgtgggtgctgcggcagttccccttcatgaagagggccaccgcgatcaaggatcagtacatccgcgaccggcctcctctcactcgtttgttctcggttcttctgcgcgagcgcgacgtggcggccaaggaggggcggcaaccggactaccgcaagcgggccatcgccgacgagttcttcggcttcatgctggccggccacgacacgtcggccaccacggtcgcgtggggcgtcaagttcctggccgaccacccggccgtgcaggaccgactccgggccgacctgcgcgccgccatcccggacgccgccctggcccgccgcgccccgacgtaccaggagctgtcgcgggcgcacgtgccctacctcgacgccgtcgtcgaggaggtcctccgccacgccaacaccatcgccttcgtcgtccgccgcgccatgcaggacaccaccgtgctcggccgccacatccccaagggcaccgacgtcttcctcatggccaacggccccggctacctcgagcccaacatgcccgtgcccgacgagatgcgcagcccgggcgcgcggcggcagcacgcgagtgctgctggcgacaacagcggcggcggtgccgacggcagcggcaagaaggcgccggcgctgacgggcgcgtgggacgacggcgacattggcgccttcaggccggagcggtggctcaagcgggaggccggcggcggcgaggcgtttgatcccatggccggaccgaccctcgcctttgggctcggccatcgcggctgcttcggcaagcgctttgccctgcacggcctcaagatccagttcgccctcatcgtctggcacttccacctcctcaaggtccccgacgcccttaacagctacgaggccgtacagcgcttcgcccgggagccgacacagtgctacgtgcgtctgagcaccaccaccatctag

SEQ ID NO: 1019 - protein, 572 aa, Myceliophthora thermophilia
MGAVFSSLPGTLLLGALLAGLYRLYRAALPKPLPNISYNRDAANKLFGDVPEMMAYVMRTKRIFSPIIQAFIKPMALPWVVVTDPFESQDILLRRTKEFDRSGFFGDLIGGILPEQHIQFVSSDARFKNNRNLINHLMAPTFITEISGPQLYKVALTMIRLWELKCSLAEGHPFHAHHDITYMALDTIFAGMFGHPETESVTLGRLDEVSGWEATREQRLPASEDEPVVFPEPELPAIFAAALTLANSVTDTQLSPAPRLTSWVLRQFPFMKRATAIKDQYIRDRPPLTRLFSVLLRERDVAAKEGRQPDYRKRAIADEFFGFMLAGHDTSATTVAWGVKFLADHPAVQDRLRADLRAAIPDAALARRAPTYQELSRAHVPYLDAVVEEVLRHANTIAFVVRRAMQDTTVLGRHIPKGTDVFLMANGPGYLEPNMPVPDEMRSPGARRQHASAAGDNSGGGADGSGKKAPALTGAWDDGDIGAFRPERWLKREAGGGEAFDPMAGPTLAFGLGHRGCFGKRFALHGLKIQFALIVWHFHLLKVPDALNSYEAVQRFAREPTQCYVRLSTTTI

SEQ ID NO: 1020 - protein, 545 aa, Myceliophthora thermophilia
ALPKPLPNISYNRDAANKLFGDVPEMMAYVMRTKRIFSPIIQAFIKPMALPWVVVTDPFESQDILLRRTKEFDRSGFFGDLIGGILPEQHIQFVSSDARFKNNRNLINHLMAPTFITEISGPQLYKVALTMIRLWELKCSLAEGHPFHAHHDITYMALDTIFAGMFGHPETESVTLGRLDEVSGWEATREQRLPASEDEPVVFPEPELPAIFAAALTLANSVTDTQLSPAPRLTSWVLRQFPFMKRATAIKDQYIRDRPPLTRLFSVLLRERDVAAKEGRQPDYRKRAIADEFFGFMLAGHDTSATTVAWGVKFLADHPAVQDRLRADLRAAIPDAALARRAPTYQELSRAHVPYLDAVVEEVLRHANTIAFVVRRAMQDTTVLGRHIPKGTDVFLMANGPGYLEPNMPVPDEMRSPGARRQHASAAGDNSGGGADGSGKKAPALTGAWDDGDIGAFRPERWLKREAGGGEAFDPMAGPTLAFGLGHRGCFGKRFALHGLKIQFALIVWHFHLLKVPDALNSYEAVQRFAREPTQCYVRLSTTTI

SEQ ID NO: 1021 - DNA, 1656 bp, Myceliophthora thermophilia
atggccatcgcgctctctatgacggctacatcagtggccatcgtgtttgtttccacgattctctggcatatcctgcaaagacgatactttcacccgcttcgttcggcccctggcccctggctcaacagcatatcggagctaccagcagcactagcactggtcgcggggaaccagcatgtgtactaccagtaccttcacgagagatatggcccggtggtgcgggtctccccaaatgagctcagcttcatcagtgtcgaggcgcgtgaggagatctacgggttgaggaaaggcggcctcaacatggaaaagagccccattttcctgggtgcggtcgggagtgtcgatgggcagaccggggtgagtctggccgttaacaaagaacacgcccgccagcgacgggcgctgggatacctcttcaccaacagcgcgttggcacacctggagggccttacccaggctcagatccacaagttcatttccaagctcaagtcgatggcggcggaaggccaggctgtaaatgtctcggactggtacacgtatctagtcttcgacatcatgggcgagctctgttttggcgagccttttggctgcttggaccaaggctcggcgaccgagtggtcgacgtccgtcatcaacgtcttcgtggcagcgacgtggacgcaggccatccggcgcatctcgggcgtcggcacctggctcgaatccctgttgacgtggctcctcgtcccccggcaggccgccgcgtggagggagatccacctgcgcaactcgcgagagaagacgctccgccgcctggccgacccggaccgcgaccatggcgacttcatccaccagattctcaacagccactcggccaagttgctctcccagaccgagatcgtcctgaacatgggcctcttcatcagcgccggctccgacaccacggccaccgccctgacgggctggacctactttgtgtgcacccacccggccgcctaccgccgactggtcggcgaggtccggggcgcgttcgccggggccgggtccgggtccgggtccgagcccggagaagaaggcgaacgcgctgtctcgtgggcaagggtgagggacctgcgcttcctggaggccaccatcctcgaggccctccgcctctacccgccgtcgccggccagccagcagcgcgtcgttccccgcggcggtgccaccgtggacggctactacctgcccgcgggcacgacggtcgccgtggcgccgtgggcgtcgaaccgctcggcccgcaactttgccgagcccgacgccttccgcccggagcgatggctgcagcagcagcaggggccgtccggcgagggcaagggcgagggcgagggcgtgggcgagggcgagggcgtgggcgatgcggacgccgccgcgcggttcgccggcgaccgcctgggcgcctcgttgccgttcggaacggggccccgggtctgcatcggcaagaacctggcgcacatggagatgcggctcatcgctgcgcacctgctgctcaacttcgacatggccctggatacggacccgcgcgcacatgggcaggagaacaaggtctgggggcttgatggccgcctgaggaccatgaaggtgtaccattccatgaccaagccgccgctgtgggtgcggctgacgcctgtgaggacataa

SEQ ID NO: 1022 - protein, 551 aa, Myceliophthora thermophilia
MAIALSMTATSVAIVFVSTILWHILQRRYFHPLRSAPGPWLNSISELPAALALVAGNQHVYYQYLHERYGPVVRVSPNELSFISVEAREEIYGLRKGGLNMEKSPIFLGAVGSVDGQTGVSLAVNKEHARQRRALGYLFTNSALAHLEGLTQAQIHKFISKLKSMAAEGQAVNVSDWYTYLVFDIMGELCFGEPFGCLDQGSATEWSTSVINVFVAATWTQAIRRISGVGTWLESLLTWLLVPRQAAAWREIHLRNSREKTLRRLADPDRDHGDFIHQILNSHSAKLLSQTEIVLNMGLFISAGSDTTATALTGWTYFVCTHPAAYRRLVGEVRGAFAGAGSGSGSEPGEEGERAVSWARVRDLRFLEATILEALRLYPPSPASQQRVVPRGGATVDGYYLPAGTTVAVAPWASNRSARNFAEPDAFRPERWLQQQQGPSGEGKGEGEGVGEGEGVGDADAAARFAGDRLGASLPFGTGPRVCIGKNLAHMEMRLIAAHLLLNFDMALDTDPRAHGQENKVWGLDGRLRTMKVYHSMTKPPLWVRLTPVRT

SEQ ID NO: 1023 - protein, 516 aa, Myceliophthora thermophilia
APGPWLNSISELPAALALVAGNQHVYYQYLHERYGPVVRVSPNELSFISVEAREEIYGLRKGGLNMEKSPIFLGAVGSVDGQTGVSLAVNKEHARQRRALGYLFTNSALAHLEGLTQAQIHKFISKLKSMAAEGQAVNVSDWYTYLVFDIMGELCFGEPFGCLDQGSATEWSTSVINVFVAATWTQAIRRISGVGTWLESLLTWLLVPRQAAAWREIHLRNSREKTLRRLADPDRDHGDFIHQILNSHSAKLLSQTEIVLNMGLFISAGSDTTATALTGWTYFVCTHPAAYRRLVGEVRGAFAGAGSGSGSEPGEEGERAVSWARVRDLRFLEATILEALRLYPPSPASQQRVVPRGGATVDGYYLPAGTTVAVAPWASNRSARNFAEPDAFRPERWLQQQQGPSGEGKGEGEGVGEGEGVGDADAAARFAGDRLGASLPFGTGPRVCIGKNLAHMEMRLIAAHLLLNFDMALDTDPRAHGQENKVWGLDGRLRTMKVYHSMTKPPLWVRLTPVRT

SEQ ID NO: 1024 - DNA, 1050 bp, Myceliophthora thermophilia
atggctcgattctctaagcttgccgtcggcctcctcatggtgtctttggcttctgtggcctgcaccaacccggccaaacgcagggcatggcataccctgagcaacgatgagaagcaggtgtacatccaggccgagctttgtctcatggagctgcccgccaagctgagcttcccggcggcccggacgaggttcgacgagctccaagtcatccaccagctccaggcatatgccacccatttcgtgggggcggccacggcggcgtgggtgggcagccccggcgaccctctattctacctacacaacacatggctggacaaggtgttctgggactggcaggccagggacaggtcgacgcgcacgacgaccatcggcgggaccaacatcgccccggacgcgccgccgggcttccccacgcggccctcgaatatccccaagcctgctggtgccgacggcaaccctggcaaaaccaccacgctaagccatgtgctcaacatgtacggcaatatgcccaacgcgacggtgggtgacgtcttggacattcagggcgactttgtctgctacgagtacgtcgagccagaggaggaggtgacggtaccgttaaagatggcaattcaaaaaaagggcgagaccatggtgttgacgacttttgtatggaatcggtggtctcttttcagtcctatcgccagcattcggctcgcatcttcttctggaattgaccgcactaaggcagccaaagttgcttggatggcgactgagctcgtgattgatatcgtcctgttgctggagcagttgtggacctgcgggtcaaaactcgggcgagatcagaagaaggatgaggactcagaacccagaggagtcgaggagccgaacagtctgtgtgcgggtgcattccaactctttctgaccgactttctcaaaagcgccgagtccgcaaagtggccctgctccatcaatgccccgggcaagtcaggcatgcggaaggaaagaatggagctaggccggggcacctgcagcttccggcgtgagaccgtggagaaaatggattattga

SEQ ID NO: 1025 - protein, 349 aa, Myceliophthora thermophilia
MARFSKLAVGLLMVSLASVACTNPAKRRAWHTLSNDEKQVYIQAELCLMELPAKLSFPAARTRFDELQVIHQLQAYATHFVGAATAAWVGSPGDPLFYLHNTWLDKVFWDWQARDRSTRTTTIGGTNIAPDAPPGFPTRPSNIPKPAGADGNPGKTTTLSHVLNMYGNMPNATVGDVLDIQGDFVCYEYVEPEEEVTVPLKMAIQKKGETMVLTTFVWNRWSLFSPIASIRLASSSGIDRTKAAKVAWMATELVIDIVLLLEQLWTCGSKLGRDQKKDEDSEPRGVEEPNSLCAGAFQLFLTDFLKSAESAKWPCSINAPGKSGMRKERMELGRGTCSFRRETVEKMDY

SEQ ID NO: 1026 - protein, 327 aa, Myceliophthora thermophilia
NPAKRRAWHTLSNDEKQVYIQAELCLMELPAKLSFPAARTRFDELQVIHQLQAYATHFVGAATAAWVGSPGDPLFYLHNTWLDKVFWDWQARDRSTRTTTIGGTNIAPDAPPGFPTRPSNIPKPAGADGNPGKTTTLSHVLNMYGNMPNATVGDVLDIQGDFVCYEYVEPEEEVTVPLKMAIQKKGETMVLTTFVWNRWSLFSPIASIRLASSSGIDRTKAAKVAWMATELVIDIVLLLEQLWTCGSKLGRDQKKDEDSEPRGVEEPNSLCAGAFQLFLTDFLKSAESAKWPCSINAPGKSGMRKERMELGRGTCSFRRETVEKMDY

SEQ ID NO: 1027 - DNA, 1029 bp, Myceliophthora thermophilia
atgtccaaggcctctgctctcctcgctggcctgacgggcgcggccctcgtcgctgcacatggccacgtcagccacatcgtcgtcaacggcgtctactacaggaactacgaccccacgacagactggtaccagcccaacccgccaacagtcatcggctggacggcagccgatcaggataatggcttcgttgaacccaacagctttggcacgccagatatcatctgccacaagagcgccacccccggcggcggccacgctaccgttgctgccggagacaagatcaacatcgtctggacccccgagtggcccgaatcccacatcggccccgtcattgactacctagccgcctgcaacggtgactgcgagaccgtcgacaagtcgtcgctgcgctggttcaagattgacggcgccggctacgacaaggccgccggccgctgggccgccgacgctctgcgcgccaacggcaacagctggctcgtccagatcccgtcggatctcaaggccggcaactacgtcctccgccacgagatcatcgccctccacggtgctcagagccccaacggcgcccaggcctacccgcagtgcatcaacctccgcgtcaccggcggcggcagcaacctgcccagcggcgtcgccggcacctcgctgtacaaggcgaccgacccgggcatcctcttcaacccctacgtctcctccccggattacaccgtccccggcccggccctcattgccggcgccgccagctcgatcgcccagagcacgtcggtcgccactgccaccggcacggccaccgttcccggcggcggcggcgccaaccctaccgccaccaccaccgccgccacctccgccgccccgagcaccaccctgaggacgaccactacctcggccgcgcagactaccgccccgccctccggcgatgtgcagaccaagtacggccagtgtggtggcaacggatggacgggcccgacggtgtgcgcccccggctcgagctgctccgtcctcaacgagtggtactcccagtgtttgtaa

SEQ ID NO: 1028 - protein, 342 aa, Myceliophthora thermophilia
MSKASALLAGLTGAALVAAHGHVSHIVVNGVYYRNYDPTTDWYQPNPPTVIGWTAADQDNGFVEPNSFGTPDIICHKSATPGGGHATVAAGDKINIVWTPEWPESHIGPVIDYLAACNGDCETVDKSSLRWFKIDGAGYDKAAGRWAADALRANGNSWLVQIPSDLKAGNYVLRHEIIALHGAQSPNGAQAYPQCINLRVTGGGSNLPSGVAGTSLYKATDPGILFNPYVSSPDYTVPGPALIAGAASSIAQSTSVATATGTATVPGGGGANPTATTTAATSAAPSTTLRTTTTSAAQTTAPPSGDVQTKYGQCGGNGWTGPTVCAPGSSCSVLNEWYSQCL

SEQ ID NO: 1029 - protein, 323 aa, Myceliophthora thermophilia
HGHVSHIVVNGVYYRNYDPTTDWYQPNPPTVIGWTAADQDNGFVEPNSFGTPDIICHKSATPGGGHATVAAGDKINIVWTPEWPESHIGPVIDYLAACNGDCETVDKSSLRWFKIDGAGYDKAAGRWAADALRANGNSWLVQIPSDLKAGNYVLRHEIIALHGAQSPNGAQAYPQCINLRVTGGGSNLPSGVAGTSLYKATDPGILFNPYVSSPDYTVPGPALIAGAASSIAQSTSVATATGTATVPGGGGANPTATTTAATSAAPSTTLRTTTTSAAQTTAPPSGDVQTKYGQCGGNGWTGPTVCAPGSSCSVLNEWYSQCL

SEQ ID NO: 1030 - DNA, 1731 bp, Myceliophthora thermophilia
atgaagctgctgcgctatctcagcattgcgctgccctgcctcggggcggcgaacgcgaggccgcgcgtattcgatagcaaacaccacgtttcataccacgggctcgaccgcaatgggattgaggtcttcctcgggatcccctacggccaggacacgagcggcgccaaccgcttcaagccgcccaggaggcatgttcctctccccgggactgagatcgaagcgacctcctacggccccagctgcccgcagcagtttgggcaatgggcggtccccatctcgttgggcaacatcacggatgtctccgaggactgtttgaggctgaacgtggcgagaccgcgaggcacacacccatgggaccggttaccggtcatggtgtacatccacggcggcagcttctgggcggggaacaaccatgatcccaccatcctgccggacgggctcgtcctcgagtcggtgtggaacgggctgcctgtcattcatgtcgccatgaactaccgcctcggcttctttggattcgcgcagtccggcgcgctcgagtccgagggttccgagaatgccggtctcagggaccagcggctcgctatcgagtgggtaagggacaacattgagctgttcggaggcgatccgggcagaattaccatcttcgggcagtcttcgggcggcctctcagttggcttgcacataatggcctacggaggcaccaagccggtcccctttcagcagggcatctgccagagccaggcactcgagcccggtatcacgggaaactttaccatcaatgccatgcaggccctggtagactatgtcggctgcaacgcgacggatcttcattccctcgaaacgattgcctgcttgagggcactcgacaccaagaccctcctcgacgccagcctgtccacctatcgtgacgacctcaacatcggcgacatctggctgcccgtggtcgacaacgacttcctcccggccgccccctcgacgctgatccgagaggggcgcttcgccaacgtgaccaccatgatcggctggtgcaataacgacctcaccttcttcaccgatcccgagatccagacgcccgaggacacgcgggacttcatctccggctacgcccccggcctgaccagcgaaaacgtggacaagctcctgtctctctaccccgtgtccgactttgcgagcgcggcgaccgacaccttgtccgccgagttcttccgcgcctccaggatcttccgcgacatcctcatgacctgcgagccgctgttttacgccgaacacatcgcccgggccggcaacgccgtctacctgtacgactggaaccagaccatcctcgagcccttcctcgagcagaagacgggccgggccggctggggacccatccacacggccgagttcgcctacgtctttggcaacctgtcgcattacgacatcgacggcttccccttcaacccgtcctgggccgactaccagctggccgtccggggatcccgctcctggtcgaccttcgcggccaccggccggccgggcagcctggggggccgtgacaccttcacggggttcgggccggccttccaccgcggggacaacaccaccacctacatcttcgtcgccggcgggccgtccgagggcctctcggccattgacgggccgcattcggcgccggcggtgcgcgcgcagaagttgagagagcgctgtgctttcatcaactcgcccgagattatcgaacagctggggtattag

SEQ ID NO: 1031 - protein, 576 aa, Myceliophthora thermophilia
MKLLRYLSIALPCLGAANARPRVFDSKHHVSYHGLDRNGIEVFLGIPYGQDTSGANRFKPPRRHVPLPGTEIEATSYGPSCPQQFGQWAVPISLGNITDVSEDCLRLNVARPRGTHPWDRLPVMVYIHGGSFWAGNNHDPTILPDGLVLESVWNGLPVIHVAMNYRLGFFGFAQSGALESEGSENAGLRDQRLAIEWVRDNIELFGGDPGRITIFGQSSGGLSVGLHIMAYGGTKPVPFQQGICQSQALEPGITGNFTINAMQALVDYVGCNATDLHSLETIACLRALDTKTLLDASLSTYRDDLNIGDIWLPVVDNDFLPAAPSTLIREGRFANVTTMIGWCNNDLTFFTDPEIQTPEDTRDFISGYAPGLTSENVDKLLSLYPVSDFASAATDTLSAEFFRASRIFRDILMTCEPLFYAEHIARAGNAVYLYDWNQTILEPFLEQKTGRAGWGPIHTAEFAYVFGNLSHYDIDGFPFNPSWADYQLAVRGSRSWSTFAATGRPGSLGGRDTFTGFGPAFHRGDNTTTYIFVAGGPSEGLSAIDGPHSAPAVRAQKLRERCAFINSPEIIEQLGY

SEQ ID NO: 1032 - protein, 557 aa, Myceliophthora thermophilia
RPRVFDSKHHVSYHGLDRNGIEVFLGIPYGQDTSGANRFKPPRRHVPLPGTEIEATSYGPSCPQQFGQWAVPISLGNITDVSEDCLRLNVARPRGTHPWDRLPVMVYIHGGSFWAGNNHDPTILPDGLVLESVWNGLPVIHVAMNYRLGFFGFAQSGALESEGSENAGLRDQRLAIEWVRDNIELFGGDPGRITIFGQSSGGLSVGLHIMAYGGTKPVPFQQGICQSQALEPGITGNFTINAMQALVDYVGCNATDLHSLETIACLRALDTKTLLDASLSTYRDDLNIGDIWLPVVDNDFLPAAPSTLIREGRFANVTTMIGWCNNDLTFFTDPEIQTPEDTRDFISGYAPGLTSENVDKLLSLYPVSDFASAATDTLSAEFFRASRIFRDILMTCEPLFYAEHIARAGNAVYLYDWNQTILEPFLEQKTGRAGWGPIHTAEFAYVFGNLSHYDIDGFPFNPSWADYQLAVRGSRSWSTFAATGRPGSLGGRDTFTGFGPAFHRGDNTTTYIFVAGGPSEGLSAIDGPHSAPAVRAQKLRERCAFINSPEIIEQLGY

SEQ ID NO: 1033 - DNA, 1032 bp, Myceliophthora thermophilia
atgcgtctctcctgggttctcgttggcgcttcgatcgccttggccaagtcgcacaaagaccacaatttcgagacgttggtcactttcggcgacagctacaccgacaacggccggctgggctactacatcaaccatggtgggaaggcgcctcggccggggacgatgcacgacgagacgaccacaacggcgtcgggtggcctatcatgggcccagttcgctgccagggatgctggagctacgctgatggattacgccgtcagcggtgccgtctgctccaaccagatcgtctcccggtacttcgacctcatcaaccggaccttcccggccatcctcgacgacgagattccgtccttccaggctgacgtgctcttcaagtcgctctacccgcaccgcactgccgagaacacggtgtatgccgtgtggatcggcaccaatgacctgggctggggcgcttttctgtcggactcgcagacccccggcaagaccatcagcgactttgtcagctgcgtcttctccgtgctcgaccatgtctacaagacgggcggacggcgctttgtcatcctcaacacggtgcccctggagctggccccgctctatgcgctgcccgagaacggcggcacgctcgactcgcagtactggaacaccaagaccaagtataacatgaccgagtacggccagaagatccgcgagtactcgaccagcgtcaacaccatgctggaaaacggcgcccttgtcatggcgtccctgaagaagcgctggcccaaggccatggtcgacgtctttgacgtccacagcctgttcaacgacatctataatgcgcccaccaagtacctggatgcgccgcacaatgtcaacagttactaccatcagtgcggaccggccggcagcccgtgcactgaccagcccggttctctgaatgggtatatgtggtatgacgagctgcatccctccaacaagaccagctccatcgttgcacggaacttcctcgacgtggttgctggaaagtccaagtacggaacgcgcttccattag

SEQ ID NO: 1034 - protein, 343 aa, Myceliophthora thermophilia
MRLSWVLVGASIALAKSHKDHNFETLVTFGDSYTDNGRLGYYINHGGKAPRPGTMHDETTTTASGGLSWAQFAARDAGATLMDYAVSGAVCSNQIVSRYFDLINRTFPAILDDEIPSFQADVLFKSLYPHRTAENTVYAVWIGTNDLGWGAFLSDSQTPGKTISDFVSCVFSVLDHVYKTGGRRFVILNTVPLELAPLYALPENGGTLDSQYWNTKTKYNMTEYGQKIREYSTSVNTMLENGALVMASLKKRWPKAMVDVFDVHSLFNDIYNAPTKYLDAPHNVNSYYHQCGPAGSPCTDQPGSLNGYMWYDELHPSNKTSSIVARNFLDVVAGKSKYGTRFH

SEQ ID NO: 1035 - protein, 328 aa, Myceliophthora thermophilia
KSHKDHNFETLVTFGDSYTDNGRLGYYINHGGKAPRPGTMHDETTTTASGGLSWAQFAARDAGATLMDYAVSGAVCSNQIVSRYFDLINRTFPAILDDEIPSFQADVLFKSLYPHRTAENTVYAVWIGTNDLGWGAFLSDSQTPGKTISDFVSCVFSVLDHVYKTGGRRFVILNTVPLELAPLYALPENGGTLDSQYWNTKTKYNMTEYGQKIREYSTSVNTMLENGALVMASLKKRWPKAMVDVFDVHSLFNDIYNAPTKYLDAPHNVNSYYHQCGPAGSPCTDQPGSLNGYMWYDELHPSNKTSSIVARNFLDVVAGKSKYGTRFH

SEQ ID NO: 1036 - DNA, 1020 bp, Myceliophthora thermophilia
atgcgactgttctgccgcctctacggcccagggggcttgtcggcctggatagcctcgtttaccctgctctcgctcctttcttcacggtttggatcctgcgcggtcgcatcctcgtccggctcgagtccaattctcgacaatgggctccagcacgagatccaatgggaccgtcacagcatcgtcatcgggggcgaccgcctgttcttgtttggaggagagatgcatcccttccgactgccggttcccgagctgtgggagggcattctgcagaagatcaaggccatgggactgagaatggtgtccatctacatacactggggcttccatgcgccggctccgggcaaggccgtgcgggagggcgagaacgtgctgctcgtggtacacgacgacacgggccacgaccagctgaacgcggcggtcaacccccgcagggcgctcaacgccacgctgctgggggccccggaccgggccgggctggaccgggtgcggacgcgctataacgagggcgggctggcggcggagcggctgggctggcacctgcgcgggttcgacgactcggcctgggagacggccgagggcccgtggttgggttcgagggccccggcgtgcgcttctaccgcgggtggttgccgctggacgtgccgcgggggatcgacctgtccctcgcgttccgctttaaagccggccgaggaggacgtcgagagggggacgctggagtacacggtgctcctcttcgtcaacggctggcagtacgggagcggcgacaatctgatcggcttggccgtctggtcgctgcaggaggagggagcgcgggttgatgtcgacgttgtggtcgggtatgtggcggactcgtcgctagacgtgaaattcgacggcagctatctgcggccgggatgggatccggtgaggctcgagcaattatacatgaagggagtttcaatggttgtaattagaggaggctttcctcgtgtgacggcgtaccagtcattgtctcctgaggcacgggaattgtttttttaa

SEQ ID NO: 1037 - protein, 339 aa, Myceliophthora thermophilia
MRLFCRLYGPGGLSAWIASFTLLSLLSSRFGSCAVASSSGSSPILDNGLQHEIQWDRHSIVIGGDRLFLFGGEMHPFRLPVPELWEGILQKIKAMGLRMVSIYIHWGFHAPAPGKAVREGENVLLVVHDDTGHDQLNAAVNPRRALNATLLGAPDRAGLDRVRTRYNEGGLAAERLGWHLRGFDDSAWETAEGPWLGSRAPACASTAGGCRWTCRGGSTCPSRSALKPAEEDVERGTLEYTVLLFVNGWQYGSGDNLIGLAVWSLQEEGARVDVDVVVGYVADSSLDVKFDGSYLRPGWDPVRLEQLYMKGVSMVVIRGGFPRVTAYQSLSPEARELFF

SEQ ID NO: 1038 - protein, 311 aa, Myceliophthora thermophilia
RFGSCAVASSSGSSPILDNGLQHEIQWDRHSIVIGGDRLFLFGGEMHPFRLPVPELWEGILQKIKAMGLRMVSIYIHWGFHAPAPGKAVREGENVLLVVHDDTGHDQLNAAVNPRRALNATLLGAPDRAGLDRVRTRYNEGGLAAERLGWHLRGFDDSAWETAEGPWLGSRAPACASTAGGCRWTCRGGSTCPSRSALKPAEEDVERGTLEYTVLLFVNGWQYGSGDNLIGLAVWSLQEEGARVDVDVVVGYVADSSLDVKFDGSYLRPGWDPVRLEQLYMKGVSMVVIRGGFPRVTAYQSLSPEARELFF

SEQ ID NO: 1039 - DNA, 1398 bp, Myceliophthora thermophilia
atggcggcggcggcggcggcggcggctgccaaggtcaaaagactggccgcgtatttgaaggcgcgggcgttcgtaccctttctctgcctacctggccgatcacgatctggtttacgacaagtcacgatggccgccctcgtagcggtgatctacttgctcctcgccctgctcctaccttctttttcttcttcttcttattcttcctcttcacgcgccactcgcgccgcccgagccaagaccccgctcctctcagttgacttccccgacccctgcatcgtgcaggacgcgtcctcggggacgtggtatgccttcgccacgggcggctggtggacgccgccgccgccgccgccaacagcggcgcccaacaacaacaacaacagcagcagcgccgacaacgcgacggcggcgaccctggaggccgcggccgcggcggtctacaagaacatccaggcggcgtcggcgccccatccggcggggccgtggacgtacctcgcctcggccgacccgctgccctcggccggccgcgtctgggcgccctcggtggcccggctcaacgcgtcggcgtacgtgctgtactacgccgcgttgctggcgccggggtacgtggggagcgcggcaaatgaggggaactcctcgtcatcgtcatcgtcatcctcatcctcatcgtcatcatcgtcctcggcctcggcctcgcgcctgcactgcatcggggcagcgacgtcgacgacgtcgtcgccgctgggaccgtaccggccgcagcgggagccggtcatctgcccggccggggagggcggggcgatcgacccggccgggttcgcggacccggcgacggggcggcggtacgtggcgtacaaggtggacggcaacgcgctcgggcggggcggggagtgcaacaacggggtggcgccctcgcggcggacgccgctcgtgctgcaggaagtggaagtggacggcgccgagggcgtccgcccggtcgggcccgccgccgagatcctcgaccgcgacgccgacgccgacggcccgctcgtcgaggcgcccgacctactgtatttaccgccttccagggacgcggacgcggacgcggacggggatgggggcaggagccggccggggaggtacgtgctgttttacagcaaccgctgctgggacgggcccgggtacagcgtcaactacgcggtggcggaggggagcatcatggggccgtacaagcgggcggcggggagcggcgagggcccgcccctgatcgggacgggggaccggttcgacgtcacggctcccgggggcgcggccagcgtgccgggcggggactggctgctgtttcacgggaactgtccgcaggggaggtgtctgtttggggccgagatggaggtggtggggggtcgtgtcactgtttggtga

SEQ ID NO: 1040 - protein, 465 aa, Myceliophthora thermophilia
MAAAAAAAAAKVKRLAAYLKARAFVPFLCLPGRSRSGLRQVTMAALVAVIYLLLALLLPSFSSSSYSSSSRATRAARAKTPLLSVDFPDPCIVQDASSGTWYAFATGGWWTPPPPPPTAAPNNNNNSSSADNATAATLEAAAAAVYKNIQAASAPHPAGPWTYLASADPLPSAGRVWAPSVARLNASAYVLYYAALLAPGYVGSAANEGNSSSSSSSSSSSSSSSSSASASRLHCIGAATSTTSSPLGPYRPQREPVICPAGEGGAIDPAGFADPATGRRYVAYKVDGNALGRGGECNNGVAPSRRTPLVLQEVEVDGAEGVRPVGPAAEILDRDADADGPLVEAPDLLYLPPSRDADADADGDGGRSRPGRYVLFYSNRCWDGPGYSVNYAVAEGSIMGPYKRAAGSGEGPPLIGTGDRFDVTAPGGAASVPGGDWLLFHGNCPQGRCLFGAEMEVVGGRVTVW

SEQ ID NO: 1041 - protein, 401 aa, Myceliophthora thermophilia
SYSSSSRATRAARAKTPLLSVDFPDPCIVQDASSGTWYAFATGGWWTPPPPPPTAAPNNNNNSSSADNATAATLEAAAAAVYKNIQAASAPHPAGPWTYLASADPLPSAGRVWAPSVARLNASAYVLYYAALLAPGYVGSAANEGNSSSSSSSSSSSSSSSSSASASRLHCIGAATSTTSSPLGPYRPQREPVICPAGEGGAIDPAGFADPATGRRYVAYKVDGNALGRGGECNNGVAPSRRTPLVLQEVEVDGAEGVRPVGPAAEILDRDADADGPLVEAPDLLYLPPSRDADADADGDGGRSRPGRYVLFYSNRCWDGPGYSVNYAVAEGSIMGPYKRAAGSGEGPPLIGTGDRFDVTAPGGAASVPGGDWLLFHGNCPQGRCLFGAEMEVVGGRVTVW

SEQ ID NO: 1042 - DNA, 711 bp, Myceliophthora thermophilia
atgatgaaacccatcttgatcgcggccctttttggcacagccctgtcgtcgccggtgatcgcagccgacgaccccatctcgacgccgacgccgacagagctccaaccgggggcgtactggatccgcgcggtggccgcgcccaacttccacaagtacttccagacgataccggccaatgtgccgggggtggcgatcctcgagtcgcacacgacggccgggcagttcaacatcgaggacggccagctcgtcaacaaggtctcgaacccgccgctgtacatgtgggtggaggagccggccgacaaggcggacccgccgcgcacgctggcgacgggcttcaatacgaccaagaacacgttcggcacgttcgcgtggcagggcgacgccctgacctggtcggatccgagcatcaaccggcagaacctggcggcgtggctggtgtgtgcgaaacaggagctgttcatcaacacgggtgcctacggttggcagacgcccgagggttgcgctgatcagacggtgagttcttcattctccctcttttttcctttcgtttctcccctttccccctcttcctttccgccttggattgccgattcctatgaatgtgcatggatgtgcatgattgctattgtcgatggctggtctgttgtacgtccgcattgcgaaaccacagcaactaatattggggttttgtccgcagatccactactataa

SEQ ID NO: 1043 - protein, 236 aa, Myceliophthora thermophilia
MMKPILIAALFGTALSSPVIAADDPISTPTPTELQPGAYWIRAVAAPNFHKYFQTIPANVPGVAILESHTTAGQFNIEDGQLVNKVSNPPLYMWVEEPADKADPPRTLATGFNTTKNTFGTFAWQGDALTWSDPSINRQNLAAWLVCAKQELFINTGAYGWQTPEGCADQTVSSSFSLFFPFVSPLSPSSFPPWIADSYECAWMCMIAIVDGWSVVRPHCETTATNIGVLSADPLL

SEQ ID NO: 1044 - protein, 215 aa, Myceliophthora thermophilia
ADDPISTPTPTELQPGAYWIRAVAAPNFHKYFQTIPANVPGVAILESHTTAGQFNIEDGQLVNKVSNPPLYMWVEEPADKADPPRTLATGFNTTKNTFGTFAWQGDALTWSDPSINRQNLAAWLVCAKQELFINTGAYGWQTPEGCADQTVSSSFSLFFPFVSPLSPSSFPPWIADSYECAWMCMIAIVDGWSVVRPHCETTATNIGVLSADPLL

SEQ ID NO: 1045 - DNA, 471 bp, Myceliophthora thermophilia
atgaagttcttctcttccgtcgccctcttcctcgcctcactggcaacggcgaaccccgtgagccataacggaccgggtccctaccacatctctgaattctatgcgagcaaaattcacgacagcggcacctgcatatacgacttcgacgtgaccgcgccgggcctcgacggggccgtccactgccacgcctccgtcgacgcgggcttctcgggcgccacctggctggcctacgtgtacgagggcgcgggcaactgcaacaacagcgccgtgacctggaccttcttccagcccgcgtcccccgtgggcagcgacgcccagttcaacgtcaccgtcaacggggtcaagcgccgccgcatcatccccggctccgacatctccgtcaacctcaacaacgagacgaaccccttcgacaacgatgtctactactcggggccgagggagtttgacattaccgagtctgtgaataattaa

SEQ ID NO: 1046 - protein, 156 aa, Myceliophthora thermophilia
MKFFSSVALFLASLATANPVSHNGPGPYHISEFYASKIHDSGTCIYDFDVTAPGLDGAVHCHASVDAGFSGATWLAYVYEGAGNCNNSAVTWTFFQPASPVGSDAQFNVTVNGVKRRRIIPGSDISVNLNNETNPFDNDVYYSGPREFDITESVNN

SEQ ID NO: 1047 - protein, 139 aa, Myceliophthora thermophilia
NPVSHNGPGPYHISEFYASKIHDSGTCIYDFDVTAPGLDGAVHCHASVDAGFSGATWLAYVYEGAGNCNNSAVTWTFFQPASPVGSDAQFNVTVNGVKRRRIIPGSDISVNLNNETNPFDNDVYYSGPREFDITESVNN

SEQ ID NO: 1048 - DNA, 1536 bp, Myceliophthora thermophilia
atggagaaaaagcagaaaattgtcgtgattggagccggccccgttggctcacttgcggccttgtatgccgcaaatcggggtgacgatgtcgagatatacgagctgcgaagtgatctccgagatccaacgacgacgccgctcaacttcaccaaatccatcaacctggctctctcggaacgcggcatcaatgctatgcgccattctggacaaccaaaacttcttgaaaatgttttggaagccacgattccgatgcgtggccgcatgattcacgggagacgagccaacggcgatctatatgaggagccccaagactacgacggcgtacacggacgatccatcctcgctgttgaccgcagccgtcttaacgagcgtctgctcgatatcctggaggggatgcccaatgtgaccttctttttcaaccataagctcaccggcgccaatttccggcagaacaaggcctggtttgaagttcgggagaatggatcggctccggctcctgggcagcgagctcgcgaggtcgaagttgactttgactttatgataggcgctgatggcgcccattctgctgtcaggtaccacatgatgaagtacacgcgcgtggactaccagcaagtgtacgtcgataccctgtggtgcgaatttcagatccgacccaagacgaccgccccggacgcgagtttgaattccaaatttgcgatatccccgaaccaccttcacatctggccgggcaaggatttcatgttcattgccattcccagcggcgacggctccttcacctgtaccctgttcgcccccgctgcgctctacgaacacctcgaatccgactctaccggctcgctcattccgcccttctttgataggcacttccccggcgtcacggcgctgatcccgccggctgaactgatcgagtcattccgccgcaacccgcacctgccgctcatctcgatcaagtgccaaccgcaccactacggctcgtctgtcgtcctggtcggagatgccgcccacgccatggtccccttctacgggcaggggatgaacgccgggctggaagacgtgcgcatcctcttcgacgtgatcgacaagcacgcacgcatggacgagctcagcgcgggcgcggaccgggccagctcccgcgggcgcgccctagccgagtacacggctgtgcgggtgccggacgcgcacgccatcaacgacctggcactgcaaaactacgtcgagatgcgtgcgtcggtgctgtcgcccggctaccggctgcgcaagttcctcgaggaggcgctcgccaagtacgtgccgtcgctcggctggcagaccaagtactcgcgcgtctcgttcggcaacgagcggtactcagaggttgtagccaagagcgagcaccaaggccggatgctggtgcgcgggctcgtcgggctggtcgggctgcccctgctggcgggcgggatggtcttgttgctgcggtacaggagagcgatgaacgtaggcttaaaggccgcgtttgggtcggtggattcgatcgtggagctgatgaccatgaactag

SEQ ID NO: 1049 - protein, 511 aa, Myceliophthora thermophilia
MEKKQKIVVIGAGPVGSLAALYAANRGDDVEIYELRSDLRDPTTTPLNFTKSINLALSERGINAMRHSGQPKLLENVLEATIPMRGRMIHGRRANGDLYEEPQDYDGVHGRSILAVDRSRLNERLLDILEGMPNVTFFFNHKLTGANFRQNKAWFEVRENGSAPAPGQRAREVEVDFDFMIGADGAHSAVRYHMMKYTRVDYQQVYVDTLWCEFQIRPKTTAPDASLNSKFAISPNHLHIWPGKDFMFIAIPSGDGSFTCTLFAPAALYEHLESDSTGSLIPPFFDRHFPGVTALIPPAELIESFRRNPHLPLISIKCQPHHYGSSVVLVGDAAHAMVPFYGQGMNAGLEDVRILFDVIDKHARMDELSAGADRASSRGRALAEYTAVRVPDAHAINDLALQNYVEMRASVLSPGYRLRKFLEEALAKYVPSLGWQTKYSRVSFGNERYSEVVAKSEHQGRMLVRGLVGLVGLPLLAGGMVLLLRYRRAMNVGLKAAFGSVDSIVELMTMN

SEQ ID NO: 1050 - protein, 488 aa, Myceliophthora thermophilia
ANRGDDVEIYELRSDLRDPTTTPLNFTKSINLALSERGINAMRHSGQPKLLENVLEATIPMRGRMIHGRRANGDLYEEPQDYDGVHGRSILAVDRSRLNERLLDILEGMPNVTFFFNHKLTGANFRQNKAWFEVRENGSAPAPGQRAREVEVDFDFMIGADGAHSAVRYHMMKYTRVDYQQVYVDTLWCEFQIRPKTTAPDASLNSKFAISPNHLHIWPGKDFMFIAIPSGDGSFTCTLFAPAALYEHLESDSTGSLIPPFFDRHFPGVTALIPPAELIESFRRNPHLPLISIKCQPHHYGSSVVLVGDAAHAMVPFYGQGMNAGLEDVRILFDVIDKHARMDELSAGADRASSRGRALAEYTAVRVPDAHAINDLALQNYVEMRASVLSPGYRLRKFLEEALAKYVPSLGWQTKYSRVSFGNERYSEVVAKSEHQGRMLVRGLVGLVGLPLLAGGMVLLLRYRRAMNVGLKAAFGSVDSIVELMTMN

SEQ ID NO: 1051 - DNA, 753 bp, Myceliophthora thermophilia
atggttctgtcaaaagtctggggagcgaccctcctcgctggttttgcggtcgcccaaacgtaccctccagatgtggttgatcagctggcgaaggatagtttgcccaagctcaaagaatggctcgagaggaacccacaggagggatgtacctacgagacggcagtcaagcggcgggaatggtttgctgcaccctcccggcccaggagggacttgaccgtcgaggaacgcaaggcatacacggatgccgtcctctgcctccagtcgaagcctgccttgacaagtgaccaagcgccgggagccaagagcaggtttgacgattatgcccgacagataatagaatacaccctactaacggcgttgcatcaaagtcgtcatccatatccaacaaacaccgaggaaccatggctcggtaagccggcaacttcgctgctccctcagcgccccacgacgccaccatctaacatccagcagaccttcttcctcccgtggcatcggtactacgtctggcactacgagaacgcgctgagaaccgagtgcggctacaaaggatatcagccgtactggaactgggatcgatatgctaaagaccccgccaactcgccgctcttcgacggcagcgagggcagcatgggtagcaacggtgccaaggaagaacaccagggcattcctatccccggtgcgccgcctccgtacaacatgatcccgcccggggacggcggtggctgcgtgacctcgggcccctttaagaagtga

SEQ ID NO: 1052 - protein, 250 aa, Myceliophthora thermophilia
MVLSKVWGATLLAGFAVAQTYPPDVVDQLAKDSLPKLKEWLERNPQEGCTYETAVKRREWFAAPSRPRRDLTVEERKAYTDAVLCLQSKPALTSDQAPGAKSRFDDYARQIIEYTLLTALHQSRHPYPTNTEEPWLGKPATSLLPQRPTTPPSNIQQTFFLPWHRYYVWHYENALRTECGYKGYQPYWNWDRYAKDPANSPLFDGSEGSMGSNGAKEEHQGIPIPGAPPPYNMIPPGDGGGCVTSGPFKK

SEQ ID NO: 1053 - protein, 232 aa, Myceliophthora thermophilia
QTYPPDVVDQLAKDSLPKLKEWLERNPQEGCTYETAVKRREWFAAPSRPRRDLTVEERKAYTDAVLCLQSKPALTSDQAPGAKSRFDDYARQIIEYTLLTALHQSRHPYPTNTEEPWLGKPATSLLPQRPTTPPSNIQQTFFLPWHRYYVWHYENALRTECGYKGYQPYWNWDRYAKDPANSPLFDGSEGSMGSNGAKEEHQGIPIPGAPPPYNMIPPGDGGGCVTSGPFKK

SEQ ID NO: 1054 - DNA, 909 bp, Myceliophthora thermophilia
atgggtcgcttcctgacgacgacggcgttggctcttctcgcaacgggtggggcagctaccgcgagacctatcagggcttgtgacgtctctaccaagtaccttatcactttcggcgactcgtactcccagaccggtttcgacgtcacgggcaccaagccgtcggcgagcaacccgctcggcaaccctctgctacccgggtggacggccagcggcgggctgaactgggtcggcttcctggtctccgagttcaacacgtcgacgacgctgtcgtacaactttgcctacggcggcgccacgaccaacgccaccatcgtgccgccctaccagccgacggtgctcagcttcatcgaccaggttgcccagttcagcggcagcatcgcgaggaagccagactatgcgccgtggaacgccgacaatgcactctttggcgtctggatcggtgtcaacgatgtgggcaacgtctggtgggatcccaactatgactcgctcctcgagcagatcatggagagctacttcggtcagcttcagattctttacgacgccggagccaggaactttgtccttctcagcgtgccgcccatccagcggacgccggcggtgctgctcaacaactcgcccgagaaccagaaggccgaggcgctcgcggtcgataagtacaacgaagccctcgcggccaacctcgaggccttcacggacaagaacggcggcatcacggccaagattgtcgacacgggtgtgcccttcaacactgccctcgacaaccctaccgactacggcgcccccgacgccacctgctacaacagcgacggcaagtcctgcctatggttcaacgactaccaccccggcatcgagatcaacaggctggtcgcccaggcggtcgccgatgcctggaagggcagctttttctga

SEQ ID NO: 1055 - protein, 302 aa, Myceliophthora thermophilia
MGRFLTTTALALLATGGAATARPIRACDVSTKYLITFGDSYSQTGFDVTGTKPSASNPLGNPLLPGWTASGGLNWVGFLVSEFNTSTTLSYNFAYGGATTNATIVPPYQPTVLSFIDQVAQFSGSIARKPDYAPWNADNALFGVWIGVNDVGNVWWDPNYDSLLEQIMESYFGQLQILYDAGARNFVLLSVPPIQRTPAVLLNNSPENQKAEALAVDKYNEALAANLEAFTDKNGGITAKIVDTGVPFNTALDNPTDYGAPDATCYNSDGKSCLWFNDYHPGIEINRLVAQAVADAWKGSFF

SEQ ID NO: 1056 - protein, 281 aa, Myceliophthora thermophilia
RPIRACDVSTKYLITFGDSYSQTGFDVTGTKPSASNPLGNPLLPGWTASGGLNWVGFLVSEFNTSTTLSYNFAYGGATTNATIVPPYQPTVLSFIDQVAQFSGSIARKPDYAPWNADNALFGVWIGVNDVGNVWWDPNYDSLLEQIMESYFGQLQILYDAGARNFVLLSVPPIQRTPAVLLNNSPENQKAEALAVDKYNEALAANLEAFTDKNGGITAKIVDTGVPFNTALDNPTDYGAPDATCYNSDGKSCLWFNDYHPGIEINRLVAQAVADAWKGSFF

SEQ ID NO: 1057 - DNA, 2364 bp, Myceliophthora thermophilia
atgatcgaccatttgctggggcggccgtcagtcaagtcgcgcagattgcaagtccttgccgttctggccttctggtccgcttacttggccagaggacacaagcatggccctcccgttctgcgtttcatgtcgcgcctgttgtcgaaacggctcacggcatggcagatcgttgtgaccaccatgttatacctctacgccgcccgcaacttcagcaccctcgtcggcctcgcgtgccccgaccccctgagcaatatgtacgacgccgcctacttccgggctacctgggtactcaccgctctggacgccgggttctggactgccatggggatccgcaatcaaaagctgcgcgacctggctagtgttgtcttctcgctcttttacctgatcgccgccgagcaggccgatgagaaggtgcgcaaggtgcgcggcaacatcacggtggagcacatgcgcatcagctggaacaagggcagtcagtcaccctacttgcggtttgcgcagcgtttgatgcgcccgaggcttatgaagtggccaccgcgcgagatgcgcatcgcgcgacctcccgccagcgattacaaagagcccgtctcggcatggctctatttcaacggacccttgtcgaagctgaaggatcataaccgcatcatcctggatgttcccgggggcggcttcgtggccatgaatcccagatgcaacgacgacaagctgctggcctgggcgaccaagacgggcttgccggtgctgagtctagactacaagaaggcgcccgagtatccgtacccctacgcacttaacgagtgctatgacgtctataccatgatcatacaaacccgcggtaaatgtgtcggcttgtctggagaggaggttcccaagatcgtgttgacgggggacagcgccggtgggacgctggcaacttcgacaacgctaatgatcatcgagagcggctcatcacccgtgcgccgctttcagggccaggtagatcttcctgtcccggatgggctgatcctgttctatcccgcgctggacatgaacatcggtagttggatgtcagacgaacagatggcactgatcaaggatcgccgcatgcgcgggaccaacaagcgcatcgtccagcgcaagaagttccagtacgacagcctggtcggcacgccccacgcgtccgacgacgaggacgacgttgtgccgtcatccaaatctcggtccggccccgagagagaggactcgagggtcgagggcaagtcaagcgaacacgtccgcgacccggctcccgagtacgccaacttgggcccaaccacctggagccaagtgcatcagggcccgccagcgccgagctccccggccgccgccaccaaatccgggtccggcaataccacaaccgctaccgcgacccctggagcctcccaccgccccgagcccatgcgcacccgcctcgccatgtcgtccatgatttcgtactttaacgaccgggtactaaccccggagatgatgcgtgccatgatcatcctttacgtcggcccacacaaccgacccgatttctcccaggattacctcctctcgcccatcctggcgccggacgtccttctctcccgtttcccgaaaacctactttgtcacgggcgagcgcgatccgctcgttgacgacaccatcatctttgcggggcgcctgcggcgcgtgaaggccgcgcagctcgccagcggcgggactaggctcgagtaccgcgacagcgatgccctgacggagggattcgatgagaaggccgtggccgaggtggcactcattcccggcatcagtcacggatttgtccagttcccaaccctgtacccgcccgcgtggaagctgatcgaccgggcggcggggtgggctgaggagttgtttgccggggccgagaggagggagcaagagagggacttggctcgtaggggcttgttggggagaaggaaacgacagggtggaaatatggacaatggggaagacggagagaacggggatgaggattcgccgctggagatgatgagtatagcaaaggcgaaggcgaaggatgcgaagaaggcggcggctgatatggaaaggaagggaacaactggcggcgaagatattggggcactgaccggagaggggaccgacggacacggccaaggaacccgcgctgcctatgaggatgaggatggcgacgccggcccatatgtggcgccccagctcgaaaccagcagttcccgcgagaagaagaaagcggggaagcgtgttcgaacgcgagatgaggacgataagagtctggtcaagctggcgagcacggatgatttgctgggaaggagaatgcatggtctggccgggggcctaacaggaacgcaccatgacccagtttga

SEQ ID NO: 1058 - protein, 787 aa, Myceliophthora thermophilia
MIDHLLGRPSVKSRRLQVLAVLAFWSAYLARGHKHGPPVLRFMSRLLSKRLTAWQIVVTTMLYLYAARNFSTLVGLACPDPLSNMYDAAYFRATWVLTALDAGFWTAMGIRNQKLRDLASVVFSLFYLIAAEQADEKVRKVRGNITVEHMRISWNKGSQSPYLRFAQRLMRPRLMKWPPREMRIARPPASDYKEPVSAWLYFNGPLSKLKDHNRIILDVPGGGFVAMNPRCNDDKLLAWATKTGLPVLSLDYKKAPEYPYPYALNECYDVYTMIIQTRGKCVGLSGEEVPKIVLTGDSAGGTLATSTTLMIIESGSSPVRRFQGQVDLPVPDGLILFYPALDMNIGSWMSDEQMALIKDRRMRGTNKRIVQRKKFQYDSLVGTPHASDDEDDVVPSSKSRSGPEREDSRVEGKSSEHVRDPAPEYANLGPTTWSQVHQGPPAPSSPAAATKSGSGNTTTATATPGASHRPEPMRTRLAMSSMISYFNDRVLTPEMMRAMIILYVGPHNRPDFSQDYLLSPILAPDVLLSRFPKTYFVTGERDPLVDDTIIFAGRLRRVKAAQLASGGTRLEYRDSDALTEGFDEKAVAEVALIPGISHGFVQFPTLYPPAWKLIDRAAGWAEELFAGAERREQERDLARRGLLGRRKRQGGNMDNGEDGENGDEDSPLEMMSIAKAKAKDAKKAAADMERKGTTGGEDIGALTGEGTDGHGQGTRAAYEDEDGDAGPYVAPQLETSSSREKKKAGKRVRTRDEDDKSLVKLASTDDLLGRRMHGLAGGLTGTHHDPV

SEQ ID NO: 1059 - protein, 755 aa, Myceliophthora thermophilia
HKHGPPVLRFMSRLLSKRLTAWQIVVTTMLYLYAARNFSTLVGLACPDPLSNMYDAAYFRATWVLTALDAGFWTAMGIRNQKLRDLASVVFSLFYLIAAEQADEKVRKVRGNITVEHMRISWNKGSQSPYLRFAQRLMRPRLMKWPPREMRIARPPASDYKEPVSAWLYFNGPLSKLKDHNRIILDVPGGGFVAMNPRCNDDKLLAWATKTGLPVLSLDYKKAPEYPYPYALNECYDVYTMIIQTRGKCVGLSGEEVPKIVLTGDSAGGTLATSTTLMIIESGSSPVRRFQGQVDLPVPDGLILFYPALDMNIGSWMSDEQMALIKDRRMRGTNKRIVQRKKFQYDSLVGTPHASDDEDDVVPSSKSRSGPEREDSRVEGKSSEHVRDPAPEYANLGPTTWSQVHQGPPAPSSPAAATKSGSGNTTTATATPGASHRPEPMRTRLAMSSMISYFNDRVLTPEMMRAMIILYVGPHNRPDFSQDYLLSPILAPDVLLSRFPKTYFVTGERDPLVDDTIIFAGRLRRVKAAQLASGGTRLEYRDSDALTEGFDEKAVAEVALIPGISHGFVQFPTLYPPAWKLIDRAAGWAEELFAGAERREQERDLARRGLLGRRKRQGGNMDNGEDGENGDEDSPLEMMSIAKAKAKDAKKAAADMERKGTTGGEDIGALTGEGTDGHGQGTRAAYEDEDGDAGPYVAPQLETSSSREKKKAGKRVRTRDEDDKSLVKLASTDDLLGRRMHGLAGGLTGTHHDPV

SEQ ID NO: 1060 - DNA, 1818 bp, Myceliophthora thermophilia
atggccgtcatgagtatccggaagttcctgcgcctcgctctggcggcggcagtcttccttgcttcctacgtgttcctgagccaaacggactttgtttacgtcgtctacaagggccggcaatggcgctcctggaagtacgtcccgagcagcttcgactggggaaagcggccagaagctcatcctgtcgaggaggacatcatggtccgcctgcccgagggaaacccgctccagctgccccgggtgcagcacgatttctccgcagacgagctgagcagctcccacaacgagacgcagagggcacgccgagacgccgttcggaaggcggccaagaggtcctggagggcctacagcaagcacgcctggggccgtgaccaggttgcgcctcagtcgctgatcggccaggacaccttcgccggatggggggccacgctggtggactctctcgacaccctctggatcatgggcatggagaaggagttccgggatgcggtcgggcacgtcgccaccatcgactgggacaacgcgacctcgggccactgcagcctgttcgagaccaacatcaggtacctgggcggcttgctgtccgcctacgacctgagccaggagcagatcctgctcgacaaggccgtcgagctcggcaacatgctctatgccgcgttcgacacgcccaaccacatgcctgccaacagcttcagcttcgacctggccaaggagggcaagctgaccgccagcgaccacgaggcctcggccgcggtcggctccctctcgctcgagttcacccggctctcgcagctgaccggcgacccgaaatactaccacgcgatcgacggggtcaagaggcatctagagaggacccaggactcgaccagcctgcccggcatgtggcccatctttgtcgacctcgagaacgacttcctcaccccgggcacgtcctactcgctcggcgcctcggccgactcggcctacgagtacctgtccaagatgtacgccctcctcggcggcctggacccgacctacgagaagctccacaccaaggccatggccacggccgagaaacacgtcctcttccggcccatgctgcccgacccggccccggacgtcctgttccccggcacggtcctctccaacgggcgcatcgtcgagctctccccggagatccagcacctcgcctgcttcgccggcggcatgttcgccctcggcggccggctcttccggaacgaggagcacgtcgaggtgggcaagcggctcgcgcgcggctgcgcctgggcgtacgatgccttcccgacgggcatcatgcccgagaaggcggagctgatcccctgccgcgtcgaagagaaggaggggaggaagaaggaggaggaggggggagagggagacagcaacctcgcgccgtgtgcgtggaacgagacccggtggagggagagggcccgggagcgccgggcgggcgagctgccgccccgggggttcgcggcgctgctcgacccgcagtaccagctccggcccgaggccatcgagagcatcttcgtcctctaccgcgtcacgggcaaggcggacctgctggacgtggcctggcgcatgttcgagtccgtcacggccgcgacgcgcacccggttcgcctactcggccatcgacgacgtgcgcgccaccggggagacgggcaagctcgattccatggagagcttctggatcgccgagacgctcaagtacttttaccttattttctcggagccagacctcataaatctggacgactacgtgtttaacacggaggcgcatccgttcaaacggccaagaccgaacaacggcgatgaggagtga

SEQ ID NO: 1061 - protein, 605 aa, Myceliophthora thermophilia
MAVMSIRKFLRLALAAAVFLASYVFLSQTDFVYVVYKGRQWRSWKYVPSSFDWGKRPEAHPVEEDIMVRLPEGNPLQLPRVQHDFSADELSSSHNETQRARRDAVRKAAKRSWRAYSKHAWGRDQVAPQSLIGQDTFAGWGATLVDSLDTLWIMGMEKEFRDAVGHVATIDWDNATSGHCSLFETNIRYLGGLLSAYDLSQEQILLDKAVELGNMLYAAFDTPNHMPANSFSFDLAKEGKLTASDHEASAAVGSLSLEFTRLSQLTGDPKYYHAIDGVKRHLERTQDSTSLPGMWPIFVDLENDFLTPGTSYSLGASADSAYEYLSKMYALLGGLDPTYEKLHTKAMATAEKHVLFRPMLPDPAPDVLFPGTVLSNGRIVELSPEIQHLACFAGGMFALGGRLFRNEEHVEVGKRLARGCAWAYDAFPTGIMPEKAELIPCRVEEKEGRKKEEEGGEGDSNLAPCAWNETRWRERARERRAGELPPRGFAALLDPQYQLRPEAIESIFVLYRVTGKADLLDVAWRMFESVTAATRTRFAYSAIDDVRATGETGKLDSMESFWIAETLKYFYLIFSEPDLINLDDYVFNTEAHPFKRPRPNNGDEE

SEQ ID NO: 1062 - protein, 576 aa, Myceliophthora thermophilia
DFVYVVYKGRQWRSWKYVPSSFDWGKRPEAHPVEEDIMVRLPEGNPLQLPRVQHDFSADELSSSHNETQRARRDAVRKAAKRSWRAYSKHAWGRDQVAPQSLIGQDTFAGWGATLVDSLDTLWIMGMEKEFRDAVGHVATIDWDNATSGHCSLFETNIRYLGGLLSAYDLSQEQILLDKAVELGNMLYAAFDTPNHMPANSFSFDLAKEGKLTASDHEASAAVGSLSLEFTRLSQLTGDPKYYHAIDGVKRHLERTQDSTSLPGMWPIFVDLENDFLTPGTSYSLGASADSAYEYLSKMYALLGGLDPTYEKLHTKAMATAEKHVLFRPMLPDPAPDVLFPGTVLSNGRIVELSPEIQHLACFAGGMFALGGRLFRNEEHVEVGKRLARGCAWAYDAFPTGIMPEKAELIPCRVEEKEGRKKEEEGGEGDSNLAPCAWNETRWRERARERRAGELPPRGFAALLDPQYQLRPEAIESIFVLYRVTGKADLLDVAWRMFESVTAATRTRFAYSAIDDVRATGETGKLDSMESFWIAETLKYFYLIFSEPDLINLDDYVFNTEAHPFKRPRPNNGDEE

SEQ ID NO: 1063 - DNA, 1566 bp, Myceliophthora thermophilia
atgcgtggtctttctgttgctggggcaagtgctgccgccagtccccttttgcttggcctagctgctgctgcacctcacaaacagcgcgctccgcagtatgtcgttaacaagcaacgcgccgacgaggttaaggaagctttccaggtgtcttgggatggttattacaaatacgctttccctcacgactcgttacggcccgtgtccaacacattcgcggatgacagaaatggatggggtgcgagcgctgtcgacgcgctcagcacggcgctggtcatggagaactgggatgtcgtgaaccagatattggagtacatcccaaccatcaacttcgacaacaccaccaccgaagtgtccctgttcgagaccacgattcgatatctcggtggactggtgtccgcctacgacatcataaccaacagcctcagtctgggcatccaaaaacagccggacgtagaagccatcctgactcaggcgaagcggctggccgacaaccttaaagttgccttcgacacgcccagcggcgttccggacaacagcctctacttcaacccaccacggaagggcggatcaacgacgaacggcctcgccaccaccggcaccttgatccttgagtggacacgcctcagcgacctgaccggggactctgaatatgcggagctgacgcaaaaggcggagtcctacctgctgcaccccgagccggcgctgggcgagccatttcccggcctgctggggactaacattcgaatcgaggacgggaagtttgaagacggcaacggcagctggggcggcggaaccgacagcttctatgagtatctcatcaagatgtatatttacgaccccgagcggtttgccgagtaccgcgaccgctggatcgccgcggccgactcgtccattaagtacctcgtctcgcacccgaccacgaggccggagctgacgttcctcgctctgtggcggggcaaggagctgcggttctcatctcagcatttggcctgcttccacggcggcaacttcatacttggcggcctcacgctcggcgaacaggcgtacacggatctcgggctcgcgctcgtcgaaggctgccacgcgacgtacgtgggcacggcgacgggaatcgggccggaagtcttcgcttggcaggactcgcagctgccgctcaacgcgagcaataaccagccgcctccagaggaccagaccgctttctacgagaagtcgggtttctggatcaccaacggccattacgtgctgcggcccgaggtcatcgaaagctactactacgcctaccgcgcaaccggcgacaccaagtaccaggactgggcctgggacgcattccagaggatcaacaagacatgccgcgtggggagcggattctcgagcatcaaggacgtgaatgctccagacgggggcggattcgacgacttccaggagagcttctggtttgccgaggtgctcaagtatagctatctgatccatgccgaggatgctccgtggcaggtcaaggccgataacacgaacgagtacgtgtggaacaccgaggcgcatccgatacgggtggctggagggaaataa

SEQ ID NO: 1064 - protein, 521 aa, Myceliophthora thermophilia
MRGLSVAGASAAASPLLLGLAAAAPHKQRAPQYVVNKQRADEVKEAFQVSWDGYYKYAFPHDSLRPVSNTFADDRNGWGASAVDALSTALVMENWDVVNQILEYIPTINFDNTTTEVSLFETTIRYLGGLVSAYDIITNSLSLGIQKQPDVEAILTQAKRLADNLKVAFDTPSGVPDNSLYFNPPRKGGSTTNGLATTGTLILEWTRLSDLTGDSEYAELTQKAESYLLHPEPALGEPFPGLLGTNIRIEDGKFEDGNGSWGGGTDSFYEYLIKMYIYDPERFAEYRDRWIAAADSSIKYLVSHPTTRPELTFLALWRGKELRFSSQHLACFHGGNFILGGLTLGEQAYTDLGLALVEGCHATYVGTATGIGPEVFAWQDSQLPLNASNNQPPPEDQTAFYEKSGFWITNGHYVLRPEVIESYYYAYRATGDTKYQDWAWDAFQRINKTCRVGSGFSSIKDVNAPDGGGFDDFQESFWFAEVLKYSYLIHAEDAPWQVKADNTNEYVWNTEAHPIRVAGGK

SEQ ID NO: 1065 - protein, 498 aa, Myceliophthora thermophilia
APHKQRAPQYVVNKQRADEVKEAFQVSWDGYYKYAFPHDSLRPVSNTFADDRNGWGASAVDALSTALVMENWDVVNQILEYIPTINFDNTTTEVSLFETTIRYLGGLVSAYDIITNSLSLGIQKQPDVEAILTQAKRLADNLKVAFDTPSGVPDNSLYFNPPRKGGSTTNGLATTGTLILEWTRLSDLTGDSEYAELTQKAESYLLHPEPALGEPFPGLLGTNIRIEDGKFEDGNGSWGGGTDSFYEYLIKMYIYDPERFAEYRDRWIAAADSSIKYLVSHPTTRPELTFLALWRGKELRFSSQHLACFHGGNFILGGLTLGEQAYTDLGLALVEGCHATYVGTATGIGPEVFAWQDSQLPLNASNNQPPPEDQTAFYEKSGFWITNGHYVLRPEVIESYYYAYRATGDTKYQDWAWDAFQRINKTCRVGSGFSSIKDVNAPDGGGFDDFQESFWFAEVLKYSYLIHAEDAPWQVKADNTNEYVWNTEAHPIRVAGGK

SEQ ID NO: 1066 - DNA, 1899 bp, Myceliophthora thermophilia
atggcgtacctcagaagaggctggccgttctgcttccttccgccaaagctgcggcgcagcctggccctcgatcgccgcctcggccgagtgctcttcgctgcgaccctgttcgtgaccctcacgctgctgctccggccctctcgaccgcacttgcaccaccaccaccaccaccaccatccgcatccgcacgccgacgagacccgacagtcgcacttttcggccaacgaccgtcccgagatccgcttccgacccagcagcttcgactggacatccgtggtccagcgctaccccgtctcgtccatccggccgctgcccacgggcagtccgcagccgcagcgtcccatccagcacccctttcccggctacgtgcacgatgccaccacccgggcccggcagcaagctgtccgcgccgccttcgtcaagagctggaggagctacaagacgcacgcctggctgcgagacgagctcgcgcccgtgagcggcggcggcaggaccacattcggcggctgggcggctaccctcgtcgacgcgctggacaccctctggatcatgggcctgaccgacgacttctacgaggccgccgccgccgccgcccggctggactgggccgacacccccgacagcgcggccaacctcttcgagaccaccatccgccacctcgccggcctcctcgccgcctacgacctgagcggcgagcccgccctgctggccaaggcgagagagctcggcgacatgctgtacctggccttcgacacccccaaccgcctgcccgccttctggttccgcttcgaggacgccaggcagggccgccaggtcgccggcaccgacgacccgtccgcgaacccctgctcgctctcgctcgagttcacccgcctgtcgctcctgaccggcgaccccaagtactacgacgccgtcgcccgcgtcaccgacttcctcgagcgctcccagaaccagtcgaggctgcccggcctctggcccaggtccatcaacttccgcgacgagtcggtggaccagcaggccgccttcaccctcggcggccaggccgactcgctgtacgagtacctggccaagatgccggccctgctgggccgcggccgcgcccccgcgagctacgagaacatgtaccgcgccgccatggacgcgtcggcccgccacatcctcttccgccccatggtgcccgacgacgacccggagggccgcgacgtgctcttcgccggcgacgcctacgcctaccgcgaccgccgcgtcgagcgcatcccccagggccagcacctggcctgcttcgccggcggcatgttcgccctcggcggcaggctgttcggcatccccgaccacgtcgccctcggcgagcgcctcgcccgcggctgcgcctgggcctaccacgccttccccaccggcctgatgcccgaggtcttcaccatgctggcctgcgactcgctcgaccgcccctgtccctgggacgaggaccggtggcggcgcgagcgcggcgccgtccgcctgcccagggggttcaagagcgcccgcgacaagcgctacatgctccgcccggaggccatcgagagcctcttcttgctgtacaggatgacgggcaaggaagacctgcgcgagctggcctggcgcatgttccggtccgtcatggaggccaccgagacacccctcgccaactcggccatcgccgacgtcacggtcgagggcaagaccaccaagatggattccatggagagtttctggctggccgaaacgctcaagtacttctacctcatcttctccccgcccgatctcatcagcctggacgactttgtcttcaacaccgaggcccacccgttccggcgagagaaggcggcgtcgattcgcgacacaatagcgcctgtagaaaccgccaaggagggggaagcatag

SEQ ID NO: 1067 - protein, 632 aa, Myceliophthora thermophilia
MAYLRRGWPFCFLPPKLRRSLALDRRLGRVLFAATLFVTLTLLLRPSRPHLHHHHHHHHPHPHADETRQSHFSANDRPEIRFRPSSFDWTSVVQRYPVSSIRPLPTGSPQPQRPIQHPFPGYVHDATTRARQQAVRAAFVKSWRSYKTHAWLRDELAPVSGGGRTTFGGWAATLVDALDTLWIMGLTDDFYEAAAAAARLDWADTPDSAANLFETTIRHLAGLLAAYDLSGEPALLAKARELGDMLYLAFDTPNRLPAFWFRFEDARQGRQVAGTDDPSANPCSLSLEFTRLSLLTGDPKYYDAVARVTDFLERSQNQSRLPGLWPRSINFRDESVDQQAAFTLGGQADSLYEYLAKMPALLGRGRAPASYENMYRAAMDASARHILFRPMVPDDDPEGRDVLFAGDAYAYRDRRVERIPQGQHLACFAGGMFALGGRLFGIPDHVALGERLARGCAWAYHAFPTGLMPEVFTMLACDSLDRPCPWDEDRWRRERGAVRLPRGFKSARDKRYMLRPEAIESLFLLYRMTGKEDLRELAWRMFRSVMEATETPLANSAIADVTVEGKTTKMDSMESFWLAETLKYFYLIFSPPDLISLDDFVFNTEAHPFRREKAASIRDTIAPVETAKEGEA

SEQ ID NO: 1068 - protein, 583 aa, Myceliophthora thermophilia
HLHHHHHHHHPHPHADETRQSHFSANDRPEIRFRPSSFDWTSVVQRYPVSSIRPLPTGSPQPQRPIQHPFPGYVHDATTRARQQAVRAAFVKSWRSYKTHAWLRDELAPVSGGGRTTFGGWAATLVDALDTLWIMGLTDDFYEAAAAAARLDWADTPDSAANLFETTIRHLAGLLAAYDLSGEPALLAKARELGDMLYLAFDTPNRLPAFWFRFEDARQGRQVAGTDDPSANPCSLSLEFTRLSLLTGDPKYYDAVARVTDFLERSQNQSRLPGLWPRSINFRDESVDQQAAFTLGGQADSLYEYLAKMPALLGRGRAPASYENMYRAAMDASARHILFRPMVPDDDPEGRDVLFAGDAYAYRDRRVERIPQGQHLACFAGGMFALGGRLFGIPDHVALGERLARGCAWAYHAFPTGLMPEVFTMLACDSLDRPCPWDEDRWRRERGAVRLPRGFKSARDKRYMLRPEAIESLFLLYRMTGKEDLRELAWRMFRSVMEATETPLANSAIADVTVEGKTTKMDSMESFWLAETLKYFYLIFSPPDLISLDDFVFNTEAHPFRREKAASIRDTIAPVETAKEGEA

SEQ ID NO: 1069 - DNA, 645 bp, Myceliophthora thermophilia
atgaagctcgccacgctcctcgccgccctcaccctcgggctcagcgtcgggtccagaaagtttggcgtgtacgagcacattcgcaagaacacgaactacaactcgcccgttaccgacctgtcggacaccaacctgcgctgcaacgtcggcgggggctcgggcaccagcaccaccgtgctcgacgtcaaggccggagactcgttcaccttcttcagcgacgttgccgtctaccaccaggggcccatctcgctgtgcgtggaccggaccagtgcagagagcatggatggacgggaaccggacatgcgctgccgaactggctcacaagctggctacctggcggtgactgtgatgactgtgactgactacgacgggtccggtgactgtttcaagatctatgactggggaccgacgttcaacgggggccaggcgtcgtggccgacgaggaattcgtacgagtacagcatcctcaagtgcatcagggacggcgaatacctactgcggattcagtccctggccatccataacccaggtgcccttccgcagttctacatcagctgcgcccaggtgaatgtgacgggcggaggcaccatctatttcaacttccactcgtatatcgtccctgggccggcagtgttcaagtgctag

SEQ ID NO: 1070 - protein, 214 aa, Myceliophthora thermophilia
MKLATLLAALTLGLSVGSRKFGVYEHIRKNTNYNSPVTDLSDTNLRCNVGGGSGTSTTVLDVKAGDSFTFFSDVAVYHQGPISLCVDRTSAESMDGREPDMRCRTGSQAGYLAVTVMTVTDYDGSGDCFKIYDWGPTFNGGQASWPTRNSYEYSILKCIRDGEYLLRIQSLAIHNPGALPQFYISCAQVNVTGGGTIYFNFHSYIVPGPAVFKC

SEQ ID NO: 1071 - protein, 196 aa, Myceliophthora thermophilia
RKFGVYEHIRKNTNYNSPVTDLSDTNLRCNVGGGSGTSTTVLDVKAGDSFTFFSDVAVYHQGPISLCVDRTSAESMDGREPDMRCRTGSQAGYLAVTVMTVTDYDGSGDCFKIYDWGPTFNGGQASWPTRNSYEYSILKCIRDGEYLLRIQSLAIHNPGALPQFYISCAQVNVTGGGTIYFNFHSYIVPGPAVFKC

SEQ ID NO: 1072 - DNA, 699 bp, Myceliophthora thermophilia
atgaagctcacctcgtccctcgctgtcctggccgctgccggcgcccaggctcactataccttccctagggccggcactggtggttcgctctctggcgagtgggaggtggtccgcatgaccgagaaccattactcgcacggcccggtcaccgatgtcaccagccccgagatgacctgctatcagtccggcgtgcagggtgcgccccagaccgtccaggtcaaggcgggctcccaattcaccttcagcgtggatccctccatcggccaccccggccctctccagttctacatggctaaggtgccgtcgggccagacggccgccacctttgacggcacgggagccgtgtggttcaagatctaccaagacggcccgaacggcctcggcaccgacagcattacctggcccagcgccggcaaaaccgaggtctcggtcaccatccccagctgcatcgaggatggcgagtacctgctccgggtcgagcacatcgcgctccacagcgccagcagcgtgggcggcgcccagttctacatcgcctgcgcccagctctccgtcaccggcggctccggcaccctcaacacgggctcgctcgtctccctgcccggcgcctacaaggccaccgacccgggcatcctcttccagctctactggcccatcccgaccgagtacatcaaccccggcccggcccccgtctcttgctaa

SEQ ID NO: 1073 - protein, 232 aa, Myceliophthora thermophilia
MKLTSSLAVLAAAGAQAHYTFPRAGTGGSLSGEWEVVRMTENHYSHGPVTDVTSPEMTCYQSGVQGAPQTVQVKAGSQFTFSVDPSIGHPGPLQFYMAKVPSGQTAATFDGTGAVWFKIYQDGPNGLGTDSITWPSAGKTEVSVTIPSCIEDGEYLLRVEHIALHSASSVGGAQFYIACAQLSVTGGSGTLNTGSLVSLPGAYKATDPGILFQLYWPIPTEYINPGPAPVSC

SEQ ID NO: 1074 - protein, 215 aa, Myceliophthora thermophilia
HYTFPRAGTGGSLSGEWEVVRMTENHYSHGPVTDVTSPEMTCYQSGVQGAPQTVQVKAGSQFTFSVDPSIGHPGPLQFYMAKVPSGQTAATFDGTGAVWFKIYQDGPNGLGTDSITWPSAGKTEVSVTIPSCIEDGEYLLRVEHIALHSASSVGGAQFYIACAQLSVTGGSGTLNTGSLVSLPGAYKATDPGILFQLYWPIPTEYINPGPAPVSC

SEQ ID NO: 1075 - DNA, 840 bp, Myceliophthora thermophilia
atgaggtcgacattggccggtgccctggcagccatcgctgctcagaaagtagccggccacgccacgtttcagcagctctggcacggctcctcctgtgtccgccttccggctagcaactcacccgtcaccaatgtgggaagcagagacttcgtctgcaacgctggcacccgccccgtcagtggcaagtgccccgtgaaggctggcggcaccgtcaccatcgagatgcaccagcaacccggcgaccgcagctgcaacaacgaagccatcggaggggcgcattggggccccgtccaggtgtacctgaccaaggttcaggacgccgcgacggccgacggctcgacgggctggttcaagatcttctccgactcgtggtccaagaagcccgggggcaactcgggcgacgacgacaactggggcacgcgcgacctgaacgcctgctgcgggaagatggacgtggccatcccggccgacatcgcgtcgggcgactacctgctgcgggccgaggcgctggccctgcacacggccggacaggccggcggcgcccagttctacatgagctgctaccagatgacggtcgagggcggctccgggaccgccaacccgcccaccgtcaagttcccgggcgcctacagcgccaacgacccgggcatcctcgtcaacatccacgcccccctttccagctacaccgcgcccggcccggccgtctacgcgggcggcaccatccgcgaggccggctccgcctgcaccggctgcgcgcagacctgcaaggtcgggtcgtccccgagcgccgttgcccccggcagcggcgcgggcaacggcggcgggttccaaccccgatag

SEQ ID NO: 1076 - protein, 279 aa, Myceliophthora thermophilia
MRSTLAGALAAIAAQKVAGHATFQQLWHGSSCVRLPASNSPVTNVGSRDFVCNAGTRPVSGKCPVKAGGTVTIEMHQQPGDRSCNNEAIGGAHWGPVQVYLTKVQDAATADGSTGWFKIFSDSWSKKPGGNSGDDDNWGTRDLNACCGKMDVAIPADIASGDYLLRAEALALHTAGQAGGAQFYMSCYQMTVEGGSGTANPPTVKFPGAYSANDPGILVNIHAPLSSYTAPGPAVYAGGTIREAGSACTGCAQTCKVGSSPSAVAPGSGAGNGGGFQPR

SEQ ID NO: 1077 - protein, 260 aa, Myceliophthora thermophilia
HATFQQLWHGSSCVRLPASNSPVTNVGSRDFVCNAGTRPVSGKCPVKAGGTVTIEMHQQPGDRSCNNEAIGGAHWGPVQVYLTKVQDAATADGSTGWFKIFSDSWSKKPGGNSGDDDNWGTRDLNACCGKMDVAIPADIASGDYLLRAEALALHTAGQAGGAQFYMSCYQMTVEGGSGTANPPTVKFPGAYSANDPGILVNIHAPLSSYTAPGPAVYAGGTIREAGSACTGCAQTCKVGSSPSAVAPGSGAGNGGGFQPR

SEQ ID NO: 1078 - DNA, 726 bp, Myceliophthora thermophilia
atgaagacgctcgccgccctcgtggtctcggccgccctcgtggccgcgcacggctatgttgaccacgccacgatcggtggcaaggattatcagttctaccagccgtaccaggacccttacatgggcgacaacaagcccgatagggtttcccgctccatcccgggcaacggccccgtggaggacgtcaactccatcgacctccagtgccacgccggtgccgaaccggccaagctccacgcccccgccgccgccggctcgaccgtgacgctctactggaccctctggcccgactcccacgtcggccccgtcatcacctacatggctcgctgccccgacaccggctgccaggactggtccccgggaactaagcccgtttggttcaagatcaaggaaggcggccgtgagggcacctccaatgtctgggctgctaccccgctcatgacggccccctccgcctacacctacacgatcccgtcctgcctcaagagcggctactacctcgtccgccacgagatcatcgccctgcactcggcctggcagtaccccggcgcccagttctacccgggctgccaccagctccaggtcaccggcggcggctccaccgtgccctctaccaacctggtctccttccccggcgcctacaaggggagcgaccccggcatcacctacgacgcttacaaggcgcaaccttacaccatccctggcccggccgtgtttacctgctga

SEQ ID NO: 1079 - protein, 241 aa, Myceliophthora thermophilia
MKTLAALVVSAALVAAHGYVDHATIGGKDYQFYQPYQDPYMGDNKPDRVSRSIPGNGPVEDVNSIDLQCHAGAEPAKLHAPAAAGSTVTLYWTLWPDSHVGPVITYMARCPDTGCQDWSPGTKPVWFKIKEGGREGTSNVWAATPLMTAPSAYTYTIPSCLKSGYYLVRHEIIALHSAWQYPGAQFYPGCHQLQVTGGGSTVPSTNLVSFPGAYKGSDPGITYDAYKAQPYTIPGPAVFTC

SEQ ID NO: 1080 - protein, 223 aa, Myceliophthora thermophilia
YVDHATIGGKDYQFYQPYQDPYMGDNKPDRVSRSIPGNGPVEDVNSIDLQCHAGAEPAKLHAPAAAGSTVTLYWTLWPDSHVGPVITYMARCPDTGCQDWSPGTKPVWFKIKEGGREGTSNVWAATPLMTAPSAYTYTIPSCLKSGYYLVRHEIIALHSAWQYPGAQFYPGCHQLQVTGGGSTVPSTNLVSFPGAYKGSDPGITYDAYKAQPYTIPGPAVFTC

SEQ ID NO: 1081 - DNA, 729 bp, Myceliophthora thermophilia
atgaagtcgtctaccccggccttgttcgccgctgggctccttgctcagcatgctgcggcccactccatcttccagcaggcgagcagcggctcgaccgactttgatacgctgtgcacccggatgccgcccaacaatagccccgtcactagtgtgaccagcggcgacatgacctgcaacgtcggcggcaccaagggggtgtcgggcttctgcgaggtgaacgccggcgacgagttcacggttgagatgcacgcgcagcccggcgaccgctcgtgcgccaacgaggccatcggcgggaaccacttcggcccggtcctcatctacatgagcaaggtcgacgacgcctccactgccgacgggtccggcgactggttcaaggtggacgagttcggctacgacgcaagcaccaagacctggggcaccgacaagctcaacgagaactgcggcaagcgcaccttcaacatccccagccacatccccgcgggcgactatctcgtccgggccgaggctatcgcgctacacactgccaaccagccaggcggcgcgcagttctacatgagctgctatcaagtcaggatttccggcggcgaagggggccagctgcctgccggagtcaagatcccgggcgcgtacagtgccaacgaccccggcatccttgtcgacatctggggtaacgatttcaacgagtacgttattccgggccccccggtcatcgacagcagctacttctga

SEQ ID NO: 1082 - protein, 242 aa, Myceliophthora thermophilia
MKSSTPALFAAGLLAQHAAAHSIFQQASSGSTDFDTLCTRMPPNNSPVTSVTSGDMTCNVGGTKGVSGFCEVNAGDEFTVEMHAQPGDRSCANEAIGGNHFGPVLIYMSKVDDASTADGSGDWFKVDEFGYDASTKTWGTDKLNENCGKRTFNIPSHIPAGDYLVRAEAIALHTANQPGGAQFYMSCYQVRISGGEGGQLPAGVKIPGAYSANDPGILVDIWGNDFNEYVIPGPPVIDSSYF

SEQ ID NO: 1083 - protein, 222 aa, Myceliophthora thermophilia
HSIFQQASSGSTDFDTLCTRMPPNNSPVTSVTSGDMTCNVGGTKGVSGFCEVNAGDEFTVEMHAQPGDRSCANEAIGGNHFGPVLIYMSKVDDASTADGSGDWFKVDEFGYDASTKTWGTDKLNENCGKRTFNIPSHIPAGDYLVRAEAIALHTANQPGGAQFYMSCYQVRISGGEGGQLPAGVKIPGAYSANDPGILVDIWGNDFNEYVIPGPPVIDSSYF

SEQ ID NO: 1084 - DNA, 912 bp, Myceliophthora thermophilia
atgaagggactcctcggcgccgccgccctctcgctggccgtcagcgatgtctcggcccactacatctttcagcagctgacgacgggcggcgtcaagcacgctgtgtaccagtacatccgcaagaacaccaactataactcgcccgtgaccgatctgacgtccaacgacctccgctgcaatgtgggtgctaccggtgcgggcaccgataccgtcacggtgcgcgccggcgattcgttcaccttcacgaccgatacgcccgtttaccaccagggcccgacctcgatctacatgtccaaggcccccggcagcgcgtccgactacgacggcagcggcggctggttcaagatcaaggactggggtgccgactttagcagcggccaggccacctggaccttggcgtctgactacaccgccacgattccggaatgtattccccccggcgactacctgcttcgcatccagcaactcggcatccacaacccttggcccgcgggcatcccccagttctacatctcttgtgcccagatcaccgtgactggtggcggcagtgccaaccccggcccgaccgtctccatcccaggcgccttcaaggagaccgacccgggctacactgtcaacatctacaacaacttccacaactacaccgtccctggcccagccgtcttcacctgcaacggtagcggcggcaacaacggcggcggctccaacccagtcaccaccaccaccaccaccaccaccaggccgtccaccagcaccgcccagtcccagccgtcgtcgagcccgaccagcccctccagctgcaccgtcgcgaagtggggccagtgcggaggacagggttacagcggctgcaccgtgtgcgcggccgggtcgacctgccagaagaccaacgactactacagccagtgcttgtag

SEQ ID NO: 1085 - protein, 303 aa, Myceliophthora thermophilia
MKGLLGAAALSLAVSDVSAHYIFQQLTTGGVKHAVYQYIRKNTNYNSPVTDLTSNDLRCNVGATGAGTDTVTVRAGDSFTFTTDTPVYHQGPTSIYMSKAPGSASDYDGSGGWFKIKDWGADFSSGQATWTLASDYTATIPECIPPGDYLLRIQQLGIHNPWPAGIPQFYISCAQITVTGGGSANPGPTVSIPGAFKETDPGYTVNIYNNFHNYTVPGPAVFTCNGSGGNNGGGSNPVTTTTTTTTRPSTSTAQSQPSSSPTSPSSCTVAKWGQCGGQGYSGCTVCAAGSTCQKTNDYYSQCL

SEQ ID NO: 1086 - protein, 284 aa, Myceliophthora thermophilia
HYIFQQLTTGGVKHAVYQYIRKNTNYNSPVTDLTSNDLRCNVGATGAGTDTVTVRAGDSFTFTTDTPVYHQGPTSIYMSKAPGSASDYDGSGGWFKIKDWGADFSSGQATWTLASDYTATIPECIPPGDYLLRIQQLGIHNPWPAGIPQFYISCAQITVTGGGSANPGPTVSIPGAFKETDPGYTVNIYNNFHNYTVPGPAVFTCNGSGGNNGGGSNPVTTTTTTTTRPSTSTAQSQPSSSPTSPSSCTVAKWGQCGGQGYSGCTVCAAGSTCQKTNDYYSQCL

SEQ ID NO: 1087 - DNA, 342 bp, Myceliophthora thermophilia
atggcaaggctaaagaccgcccttacaagcctatacgctataatgctaatcgaccacgccaattcggctacagatacgacaagtctcccaaatacgactagcacgaccacgaatttgaacgtaaccgcggatttgactataatcgctagtttaatcgtgatcgcggatttaactgtaaccacgaccaagatcgccgtgaccaggattgctataattaggatcgctataagcagggtaatcgtggccaaaagtaggtcagatttagtaaagataaccactagcgaaaggaatatcgtgactatacccactttgctaaagaagctaatgatggctctaagctag

SEQ ID NO: 1088 - protein, 113 aa, Myceliophthora thermophilia
MARLKTALTSLYAIMLIDHANSATDTTSLPNTTSTTTNLNVTADLTIIASLIVIADLTVTTTKIAVTRIAIIRIAISRVIVAKSRSDLVKITTSERNIVTIPTLLKKLMMALS

SEQ ID NO: 1089 - protein, 91 aa, Myceliophthora thermophilia
ATDTTSLPNTTSTTTNLNVTADLTIIASLIVIADLTVTTTKIAVTRIAIIRIAISRVIVAKSRSDLVKITTSERNIVTIPTLLKKLMMALS

SEQ ID NO: 1090 - DNA, 756 bp, Myceliophthora thermophilia
atggtctgggtgcgtcgccagacgtacatacagggccccatcacggggcttttccgtcctagttcccgctcccgctcccgtatccggcgctggcacagttaccttgcattgctggccagggcagtgactggggcgtttaacgctcgacgcagtcctcaccgaccgttcgctgccccgatcgcggcatggaactccttccacgcttctgcttgttgcatgaaacacggtttcaagggccgcatcgacgatccttccgtcctgtcagcaacccgccgctcgcaaattggccctcgaaacgataagcagtcagttgaccggcagaaagttgtggagcgcgccatccaacttggtacggcttactgtagccgggagggagccaagctgccccggtgtacccgcgaaaagtcggcacagtgcacaccaggcaggcagcactggctggcggccgatgcgtgggagacaatttgggtgctcgggcttgttcttccatttctctccactgacacttcactactgccgctgaacggagtactgcagtggtttgcccagccacctgcgcctcgcgcctcttcttcatacaacactgtcgccaaccgcatagtgccaagtgaacgcgcggcgccatcagccagccatgttcctcttggttgtcgcaccgggcgggatgacaaggaaccagcccacgtcgtccagaccgtcggcgatcacgaagagattcccaaagccactggggtgttccagtgctcaatttggtga

SEQ ID NO: 1091 - protein, 251 aa, Myceliophthora thermophilia
MVWVRRQTYIQGPITGLFRPSSRSRSRIRRWHSYLALLARAVTGAFNARRSPHRPFAAPIAAWNSFHASACCMKHGFKGRIDDPSVLSATRRSQIGPRNDKQSVDRQKVVERAIQLGTAYCSREGAKLPRCTREKSAQCTPGRQHWLAADAWETIWVLGLVLPFLSTDTSLLPLNGVLQWFAQPPAPRASSSYNTVANRIVPSERAAPSASHVPLGCRTGRDDKEPAHVVQTVGDHEEIPKATGVFQCSIW

SEQ ID NO: 1092 - protein, 207 aa, Myceliophthora thermophilia
AFNARRSPHRPFAAPIAAWNSFHASACCMKHGFKGRIDDPSVLSATRRSQIGPRNDKQSVDRQKVVERAIQLGTAYCSREGAKLPRCTREKSAQCTPGRQHWLAADAWETIWVLGLVLPFLSTDTSLLPLNGVLQWFAQPPAPRASSSYNTVANRIVPSERAAPSASHVPLGCRTGRDDKEPAHVVQTVGDHEEIPKATGVFQCSIW

SEQ ID NO: 1093 - DNA, 294 bp, Myceliophthora thermophilia
atgcctaagttctctatactaatatggcatatgaataagaatatattaactttggtcgacactaatgccgcccttattacctacgtcttaggtatactattacctacctcctatgcccattcgcgtgcctctacgtgccttatacccgtaccaattaactttagccgctctcgtacctactactcttccttgcctaccgaccgtacggcgcgcctgatccgcgactataaggagcctactaacatctcggaggaggaggaggaggaggagtttaaggaggaactcgtagagtaa

SEQ ID NO: 1094 - protein, 97 aa, Myceliophthora thermophilia
MPKFSILIWHMNKNILTLVDTNAALITYVLGILLPTSYAHSRASTCLIPVPINFSRSRTYYSSLPTDRTARLIRDYKEPTNISEEEEEEEFKEELVE

SEQ ID NO: 1095 - protein, 58 aa, Myceliophthora thermophilia
HSRASTCLIPVPINFSRSRTYYSSLPTDRTARLIRDYKEPTNISEEEEEEEFKEELVE

SEQ ID NO: 1096 - DNA, 1965 bp, Myceliophthora thermophilia
atgcatatcctgtcgactctgagcctcgcagctctgtcggcgcctctggcgtctgcctcatttgatgggaacatcaactacctcagcccttcccggcgccatgtcaaccttggcatcgacgtcccggcagtcgcccgccgcagcatgaagcgcggcgccgtgccgtataagccatccgagttgaacttcactcacggtatcgcgtctggcgacccctatccggacagcgtcattctctggacccgcgtcgcgccgtccctggcttcagataacagcaatgtgaccgtcgagggaatcgttgacctgtacaatcacgagaccgaaaagtacgtcaaggcggatcctaacccaatttgcgtcgaatggaaggtctgggaagcccaggagaaaggctcgaaacgtcctggtcacggcggatccgggaagcacattgtttcgcagggtactgcctacaccactagcgatattgactacactgtcaaggtcgaggccaagggcctgaagccattcaccacctacaactaccaattcaacgtttgcaagtccgataattcattgaggctgacgacacgtaggatgaggccaagggccctgaagccattcaccacctacaactaccaattcaacgtttgcaagtccgataacgccagcccggtgggaaggacaaaaacggctccaagggagaatgctaagctggacgagatcaaccttgcggtgttctcgtgcagcaatttccccaatggctatttcaatgcctacggcaacgcggcgcggaaggacaagcacgactacgtggtccacctaggtgactacatatacgaaggagctcaggggggcgagcgtgcacacaacccgccacgcatcatctttagcctgtgggactataggacccgtcacggacagtaccgcactgatcccgatttgcagctcctgtctcagaactatgcttggatgccgacgtgggatgatcatgaaattgccaacaacggttacagggacggattcagcgcgctgaacaacaccgaagactccttccgcaaggacggcccgtccatcagcgtcgatcagcgtaagatgaacgccgtgcgggcctacttcgagtggatgcctatccgccaagtcgacctcgacgacaatcttcggatctggcggtccttcaaactgggccggctgctggacctgatcatccttgatacgcgcaactacgaccggagcatcactagcctgggctggaacgaccactacatcgacctgatccgtgacgacgcctcgcggtcgctgatgggctcgcgccaggagcactggttctacaaccagctggccgagtcgtcgcggcggggggccgcctggcgcgtcgtcggcagccaggtcatcttctcggacatcaacaacagcggcgacacgtggtcggggtacacggccaaccgcaaccgcacgctcaagcacctgtacgataacaagatcggcaacaacgtcttcctcgccggcgacagccaccagaactgggtctcggacctggcctggctcggcgagaagccgtacgactcccagaccggcgagggcgccgtgggcgtcgagttcgccggcaccgccgtcagctcgtccggccagagcggccccatcctggccgcgcgcgagaaggcccgccagcaggtcgaggccaacgagctgatgcagtggcaggaggggtactaccgcggttacttcatcctcaggatccgcgaggaagcggtaacggcgcagtattttggctcgcccagcgtggccacccccaatgcgtgggatctcccgctggccaacttcacgatcgcttcgggaaagaatcacctgacgcgtccagtggccggcggcaacgtcgaggccgggttcgtccgcggcggcacgacgacgggcacgaacctgacgctcaacacggagaccgggaagtgggacgttgttgggttcgagaagatgtacatcaaataa

SEQ ID NO: 1097 - protein, 654 aa, Myceliophthora thermophilia
MHILSTLSLAALSAPLASASFDGNINYLSPSRRHVNLGIDVPAVARRSMKRGAVPYKPSELNFTHGIASGDPYPDSVILWTRVAPSLASDNSNVTVEGIVDLYNHETEKYVKADPNPICVEWKVWEAQEKGSKRPGHGGSGKHIVSQGTAYTTSDIDYTVKVEAKGLKPFTTYNYQFNVCKSDNSLRLTTRRMRPRALKPFTTYNYQFNVCKSDNASPVGRTKTAPRENAKLDEINLAVFSCSNFPNGYFNAYGNAARKDKHDYVVHLGDYIYEGAQGGERAHNPPRIIFSLWDYRTRHGQYRTDPDLQLLSQNYAWMPTWDDHEIANNGYRDGFSALNNTEDSFRKDGPSISVDQRKMNAVRAYFEWMPIRQVDLDDNLRIWRSFKLGRLLDLIILDTRNYDRSITSLGWNDHYIDLIRDDASRSLMGSRQEHWFYNQLAESSRRGAAWRVVGSQVIFSDINNSGDTWSGYTANRNRTLKHLYDNKIGNNVFLAGDSHQNWVSDLAWLGEKPYDSQTGEGAVGVEFAGTAVSSSGQSGPILAAREKARQQVEANELMQWQEGYYRGYFILRIREEAVTAQYFGSPSVATPNAWDLPLANFTIASGKNHLTRPVAGGNVEAGFVRGGTTTGTNLTLNTETGKWDVVGFEKMYIK

SEQ ID NO: 1098 - protein, 635 aa, Myceliophthora thermophilia
SFDGNINYLSPSRRHVNLGIDVPAVARRSMKRGAVPYKPSELNFTHGIASGDPYPDSVILWTRVAPSLASDNSNVTVEGIVDLYNHETEKYVKADPNPICVEWKVWEAQEKGSKRPGHGGSGKHIVSQGTAYTTSDIDYTVKVEAKGLKPFTTYNYQFNVCKSDNSLRLTTRRMRPRALKPFTTYNYQFNVCKSDNASPVGRTKTAPRENAKLDEINLAVFSCSNFPNGYFNAYGNAARKDKHDYVVHLGDYIYEGAQGGERAHNPPRIIFSLWDYRTRHGQYRTDPDLQLLSQNYAWMPTWDDHEIANNGYRDGFSALNNTEDSFRKDGPSISVDQRKMNAVRAYFEWMPIRQVDLDDNLRIWRSFKLGRLLDLIILDTRNYDRSITSLGWNDHYIDLIRDDASRSLMGSRQEHWFYNQLAESSRRGAAWRVVGSQVIFSDINNSGDTWSGYTANRNRTLKHLYDNKIGNNVFLAGDSHQNWVSDLAWLGEKPYDSQTGEGAVGVEFAGTAVSSSGQSGPILAAREKARQQVEANELMQWQEGYYRGYFILRIREEAVTAQYFGSPSVATPNAWDLPLANFTIASGKNHLTRPVAGGNVEAGFVRGGTTTGTNLTLNTETGKWDVVGFEKMYIK

SEQ ID NO: 1099 - DNA, 444 bp, Myceliophthora thermophilia
atgcggccgcctctctgttctctgattttcgcagtatatattctctttggttgctacttaaggtacctgttcgccgccgggctacgacggctggcggcccaagctgcagatcttccacggcaccgaggacgagacggtcagctacgtcaaccacaaagaggccgtcaagatgtggaccagcgtcttgggcctgagcgggaagcccgcccgagtggtgcaggacatacccccttgcccggctggaccaagagcgtctacggaccgaccggctggttcgaggcctacagcgccgccggcgtcagccacaacatttcggtccaggagaacaccgcgttggtcttcttccggctgaactgcaccgtcgactgcttctcccgggccagggcggcccctctggccagggttcgaccgcagggatctgatcatatgcgagaccggatctga

SEQ ID NO: 1100 - protein, 147 aa, Myceliophthora thermophilia
MRPPLCSLIFAVYILFGCYLRYLFAAGLRRLAAQAADLPRHRGRDGQLRQPQRGRQDVDQRLGPEREARPSGAGHTPLPGWTKSVYGPTGWFEAYSAAGVSHNISVQENTALVFFRLNCTVDCFSRARAAPLARVRPQGSDHMRDRI

SEQ ID NO: 1101 - protein, 122 aa, Myceliophthora thermophilia
AGLRRLAAQAADLPRHRGRDGQLRQPQRGRQDVDQRLGPEREARPSGAGHTPLPGWTKSVYGPTGWFEAYSAAGVSHNISVQENTALVFFRLNCTVDCFSRARAAPLARVRPQGSDHMRDRI

SEQ ID NO: 1102 - DNA, 936 bp, Myceliophthora thermophilia
atgaagttctctatctctctcgttctcccgctccttcggcttgcgggcctcgcctgggctgggtgccaggacaacgcggacggttttgctgcgctgaacggcggtaccactggcggcaacggtggcactgtagtgactgtcaacaatcaagcagacctcgagaagtacgccaaagcgagtggaaagtatgtgatcaaagtgtcgggcaagatcaacatctcgcccaaagggaccgaggttgatgtagccaacgacaagaccatcgtcggtattggcgcgactgctcagatttctgggggaggcttccggatcatcaacaggcgcaacgttattattcgcaacctgcgaattggcaacaccgatggtggcgaggaactggactgggacggaatccaggttgatacctctaccaacatctggatcgaccactgcatcttcgaaaccatcggcgacggaggcatcgacctgcgcaaggattcggactactggaccgtatccaactcgtggatcaagggcgtcaacaaggcattcggtatcggctggaccgacaacgtcgtgaccaaggggacgatccaccacgtctacttcgacggaacaacgcagcggaatcccagcgcggacaacatgctttacgcccacatgtacaacaattacctgcggggctgcaagagttacggccactatgcccgcggtgcgaccaacgcgcgcatcgagaacgtatattttgaggactgcaagaatccgctcaccgcagattcggaggccacgctgacggctatcggcaacatttacgacggcaccagcggcaccattgccaaagacatcggcgtctcgttcgacccggccaacttctattcgtacaagctcaacgctaccgccgacgtgcctagcatcgttctcgcaaacgctggtcccaaggctgatgtatgcacctag

SEQ ID NO: 1103 - protein, 311 aa, Myceliophthora thermophilia
MKFSISLVLPLLRLAGLAWAGCQDNADGFAALNGGTTGGNGGTVVTVNNQADLEKYAKASGKYVIKVSGKINISPKGTEVDVANDKTIVGIGATAQISGGGFRIINRRNVIIRNLRIGNTDGGEELDWDGIQVDTSTNIWIDHCIFETIGDGGIDLRKDSDYWTVSNSWIKGVNKAFGIGWTDNVVTKGTIHHVYFDGTTQRNPSADNMLYAHMYNNYLRGCKSYGHYARGATNARIENVYFEDCKNPLTADSEATLTAIGNIYDGTSGTIAKDIGVSFDPANFYSYKLNATADVPSIVLANAGPKADVCT

SEQ ID NO: 1104 - protein, 291 aa, Myceliophthora thermophilia
GCQDNADGFAALNGGTTGGNGGTVVTVNNQADLEKYAKASGKYVIKVSGKINISPKGTEVDVANDKTIVGIGATAQISGGGFRIINRRNVIIRNLRIGNTDGGEELDWDGIQVDTSTNIWIDHCIFETIGDGGIDLRKDSDYWTVSNSWIKGVNKAFGIGWTDNVVTKGTIHHVYFDGTTQRNPSADNMLYAHMYNNYLRGCKSYGHYARGATNARIENVYFEDCKNPLTADSEATLTAIGNIYDGTSGTIAKDIGVSFDPANFYSYKLNATADVPSIVLANAGPKADVCT

SEQ ID NO: 1105 - DNA, 891 bp, Myceliophthora thermophilia
atgttcggcctaacactcaacaccttgatcatggcgctggcctcgcctctcgccgtccaaggcgttcccattgacaccaccggcatcgcggcgcgtgcgtccgccccgctgggcaacggcgtgcccctgcgcatcatgccactgggcgcgtccatcacgttcggcctcaagtcgagcgacggcaacgggtaccgggccgcgctccgggacatgatcgtcaacccgcccgcggacagctactgcggcggcgcggcggcgccgggcaggggcagcgcgcaggacgaaatgttcaagagcgtgcgcggcaagagcaccgcccgcgtctcgtccggcccgaacaaggtcaacatggtcggatcccggatgcagcaccatgtcgacgtcgagggctggtcgggctaccgcatcgagcaggtccacgacaaggccatggcggccgagtcggcgcccaagtacaagcccaacgtggtgctcgtcaacgcgggcaccaacgacgccgcgcagaacttccaggtcgccaccgcgggcgagcgcatggaggccatgctccgggacctctgggccgtctcgccgcgcgccgtcgtcgtgctgagcaccctgctcgtcaaccaggacgaggcgacggagcgcaacgtggtcgccatcaacaagcagctgcgcgccctcgtcgcccgcctgagggacgaggagaagaagaacatcgtcctcgccgagatgcacggccgccgcggcccgcgcctcgccgacctcgccgacggcacccaccccaccgacgagggctaccgcaagatggctaacatatggtacgccagcctgcgcgtcgccagcgaccggggctggttgcaagccccagagccggtcccgggcgtgcccgacgacggagcggcgtaa

SEQ ID NO: 1106 - protein, 296 aa, Myceliophthora thermophilia
MFGLTLNTLIMALASPLAVQGVPIDTTGIAARASAPLGNGVPLRIMPLGASITFGLKSSDGNGYRAALRDMIVNPPADSYCGGAAAPGRGSAQDEMFKSVRGKSTARVSSGPNKVNMVGSRMQHHVDVEGWSGYRIEQVHDKAMAAESAPKYKPNVVLVNAGTNDAAQNFQVATAGERMEAMLRDLWAVSPRAVVVLSTLLVNQDEATERNVVAINKQLRALVARLRDEEKKNIVLAEMHGRRGPRLADLADGTHPTDEGYRKMANIWYASLRVASDRGWLQAPEPVPGVPDDGAA

SEQ ID NO: 1107 - protein, 275 aa, Myceliophthora thermophilia
VPIDTTGIAARASAPLGNGVPLRIMPLGASITFGLKSSDGNGYRAALRDMIVNPPADSYCGGAAAPGRGSAQDEMFKSVRGKSTARVSSGPNKVNMVGSRMQHHVDVEGWSGYRIEQVHDKAMAAESAPKYKPNVVLVNAGTNDAAQNFQVATAGERMEAMLRDLWAVSPRAVVVLSTLLVNQDEATERNVVAINKQLRALVARLRDEEKKNIVLAEMHGRRGPRLADLADGTHPTDEGYRKMANIWYASLRVASDRGWLQAPEPVPGVPDDGAA

SEQ ID NO: 1108 - DNA, 933 bp, Myceliophthora thermophilia
atgaagagcctcctcaccttcctcccgctggcttccgtcgccctcggagcaccaagcttgtggggaagacaagctgccatcaccgaggagcagctgaacgagctcgagctgtacgtccaatgggccgcagccgccgcctgcaacggaaaccaggccccgaaccagcccgtcatctgcaatccgaccctgtgctccaggttcgcgtcccacaacgccaccgttgtcgcctcgttcatcggtcccgagacagatatctggggcttcataggcctggaccctgttgacgagaggattgtcgtctccttcaggggctccagctcgatccagaactggattaccgacttcgacatcatccagcgtccgtgcaacctcaccgacgactgcctcgtacataccggtttcgacagagcctgggaagaggtggccaacgaggtactgaacggcctgaccgccgccgcggccgcccacccgagctacaggatcgccgtgacgggccactcgctgggcggcgccgtcgcgaccgtcacggccgcccacgtccgccgcgccggcttccaggcggacctgtacacgcagccgggggccgagtaccgcgtcacgcacgccgacgaccccgtcccgcggctgcccccgttgtgcctcaactacaggcacacgagccccgagtactggatcgacccggacgacaaggacgtcgtgtcgatcgacgaaatcagatactgccccggttactccaacaccgactgcaacggcgggaccgcgggcttagacacgtccgctcacggctggtacttccagaacctgagtggctgcgcccaagagatctcgttgttcgacggcttcgacgatccggaactcgagcgcaccctgagccggtacgccgaaatggacgtcaagttggcggccaacctgaacgcccagggacagccatag

SEQ ID NO: 1109 - protein, 310 aa, Myceliophthora thermophilia
MKSLLTFLPLASVALGAPSLWGRQAAITEEQLNELELYVQWAAAAACNGNQAPNQPVICNPTLCSRFASHNATVVASFIGPETDIWGFIGLDPVDERIVVSFRGSSSIQNWITDFDIIQRPCNLTDDCLVHTGFDRAWEEVANEVLNGLTAAAAAHPSYRIAVTGHSLGGAVATVTAAHVRRAGFQADLYTQPGAEYRVTHADDPVPRLPPLCLNYRHTSPEYWIDPDDKDVVSIDEIRYCPGYSNTDCNGGTAGLDTSAHGWYFQNLSGCAQEISLFDGFDDPELERTLSRYAEMDVKLAANLNAQGQP

SEQ ID NO: 1110 - protein, 294 aa, Myceliophthora thermophilia
APSLWGRQAAITEEQLNELELYVQWAAAAACNGNQAPNQPVICNPTLCSRFASHNATVVASFIGPETDIWGFIGLDPVDERIVVSFRGSSSIQNWITDFDIIQRPCNLTDDCLVHTGFDRAWEEVANEVLNGLTAAAAAHPSYRIAVTGHSLGGAVATVTAAHVRRAGFQADLYTQPGAEYRVTHADDPVPRLPPLCLNYRHTSPEYWIDPDDKDVVSIDEIRYCPGYSNTDCNGGTAGLDTSAHGWYFQNLSGCAQEISLFDGFDDPELERTLSRYAEMDVKLAANLNAQGQP

SEQ ID NO: 1111 - DNA, 639 bp, Myceliophthora thermophilia
atgggcctgttcgacttaatgcacaggcagaataaaaccaaattcgtcgccgttgccaacaactacaggtcagtgctccttctcctcctccttctcctcctcctgctgctcctcttcctctgtggcacggtcccgtatctgagaaatgggaataccggggttacctgggccgacggggaggatctcgacggcaacgtcgggatgctggactgtctcgcggcagccgagtggacggcggcgcacatccacaagtgtggaggcgataggaagcgcgtcacgatcctggggcagagcgccggtgccggcattatctactacctgactgtgctcgacggcggtagggtgaagcccttgcccttccagcatgccttgccttcaaatcgtcgccggcggcggcgcagcggcgcgacgtcaagagccgggcagacgtcggtcagcaacccggagctggcttttgccttcgaagcgaagctgctggcattggtgctgggcgaggacatggcgtggccgacgtacggtaaggacaagcgtatgtacaacatcacgaacacgttcgaggcgacgaccatgccgcccaaactgcgccaccggtgcgaactcctcagccggtttgtgctcgacccagccaacggcgcatga

SEQ ID NO: 1112 - protein, 212 aa, Myceliophthora thermophilia
MGLFDLMHRQNKTKFVAVANNYRSVLLLLLLLLLLLLLFLCGTVPYLRNGNTGVTWADGEDLDGNVGMLDCLAAAEWTAAHIHKCGGDRKRVTILGQSAGAGIIYYLTVLDGGRVKPLPFQHALPSNRRRRRRSGATSRAGQTSVSNPELAFAFEAKLLALVLGEDMAWPTYGKDKRMYNITNTFEATTMPPKLRHRCELLSRFVLDPANGA

SEQ ID NO: 1113 - protein, 169 aa, Myceliophthora thermophilia
VPYLRNGNTGVTWADGEDLDGNVGMLDCLAAAEWTAAHIHKCGGDRKRVTILGQSAGAGIIYYLTVLDGGRVKPLPFQHALPSNRRRRRRSGATSRAGQTSVSNPELAFAFEAKLLALVLGEDMAWPTYGKDKRMYNITNTFEATTMPPKLRHRCELLSRFVLDPANGA

SEQ ID NO: 1114 - DNA, 909 bp, Myceliophthora thermophilia
atgtcccggtaccttctcggtcgactaatagtggccacagtggccatcacggtggcctctctccgcggcgtgacggccgccacgccgtcgccgggatgcgggaagacgccgacgctgatcacggacgggtccgccacgactcccctgacgctgacctccaacggcaagacgcggcggttctacgtcaagcttcccgacgactacgacaacagccacccgtaccggctcatcttcgcgctgcacgccctcggcgggaccgcccagcaggtcaccaccgggacgggcggctacctgccgtggtacgggatccccgacctcgcggccaacgacacggtgggcgccgtctacgtggcgcccgacgggctcaacaacggctgggccaaccaggggggcgaggacgtggccttcctggaggccgtgatggagacggtggagcaggacgtgtgcgtcgaccgggacctgcgcttctcgaccggcttcagctacggcgccgccatgtcgtacacgctcgcgtgcgcgctcggccgccgcatccgggccgtcgccgtgctctcgggcagccccgtcatcagcggcggctgcgccggcgccggctccggcgcctccgagcccgtcgcctactacggccagcacggcatctccgacccggtcctccccgtcgccggcggccgcgagatgcgcgaccacttcgtccgcaccaacggctgcgacgccggccggggccccccccgggagcccgcccgcggcagcggcacccacgtcaagacggtctacgacggctgcgacccggactaccccgtcgtgtggaacgcgttcgacggcgaccacaccccgcagcccgtcgaccggggcgccaccaccactttctcggccgtcgagacctgggagttcttctcgcagttcaagtaa

SEQ ID NO: 1115 - protein, 302 aa, Myceliophthora thermophilia
MSRYLLGRLIVATVAITVASLRGVTAATPSPGCGKTPTLITDGSATTPLTLTSNGKTRRFYVKLPDDYDNSHPYRLIFALHALGGTAQQVTTGTGGYLPWYGIPDLAANDTVGAVYVAPDGLNNGWANQGGEDVAFLEAVMETVEQDVCVDRDLRFSTGFSYGAAMSYTLACALGRRIRAVAVLSGSPVISGGCAGAGSGASEPVAYYGQHGISDPVLPVAGGREMRDHFVRTNGCDAGRGPPREPARGSGTHVKTVYDGCDPDYPVVWNAFDGDHTPQPVDRGATTTFSAVETWEFFSQFK

SEQ ID NO: 1116 - protein, 276 aa, Myceliophthora thermophilia
ATPSPGCGKTPTLITDGSATTPLTLTSNGKTRRFYVKLPDDYDNSHPYRLIFALHALGGTAQQVTTGTGGYLPWYGIPDLAANDTVGAVYVAPDGLNNGWANQGGEDVAFLEAVMETVEQDVCVDRDLRFSTGFSYGAAMSYTLACALGRRIRAVAVLSGSPVISGGCAGAGSGASEPVAYYGQHGISDPVLPVAGGREMRDHFVRTNGCDAGRGPPREPARGSGTHVKTVYDGCDPDYPVVWNAFDGDHTPQPVDRGATTTFSAVETWEFFSQFK

SEQ ID NO: 1117 - DNA, 1290 bp, Myceliophthora thermophilia
atggtcgtgcttcgttcactgatatggtcggtcttggtaattccaagccttcaagccccccaggggcatgatggctttggttcgggccagggaaagggcaaggttgctcccgttaagcggatctcactcggtcctcggccgtactggcttgttgacaacatggacgacggcccgctgaagcagaagctcgcttcgtgctccgagaaggagatgaagaggagcgactggagcatatcgcaccgcggcggcgggacgttgcagtttccggagcatacctactcgtccatcatggctgggacaagaatgggggccggaatccaagagtgcgacgtcaccttcaccaaagacaagcagcttgtgtgccgccattcccagtgcgacctccacaccaccaccaatgtggtgaccatccccgagctgaacgccaaatgcaccgtcccgttccagccggcctccaacggcaccgcggccaaggccaagtgctgcacctccgacttcaccgtggacgagctcaagcagatgtgcgccaagatggactcctcgaacccggccgccgccacgccggctgagttcgtgggcggcaccccggcctacaggacggacctgtacgccaagacgacgtgcgagcggatcctgacggtgcgcgagtacatcgacctcgtcgacggcctggggctcaagttcaccgccgagctcaagacgcccgaggtgcccatgcccttcccgccgggcggcgactacacgcaggcccggttcgcgcagcagctggtggacgagttcaaggcggccaagatccgcccggagcgcgtctggctccagtccttcctctacgacgacctcctctactggatcaaggccgagcccgaatgggcccggcaggccatcctgctcgacgagagcgccaccacgccggaggccatgccgcaggcggtggcgcggctcgaggagtacgcccgggcgggagtccggatcatcgggccgccgctgccgtacctggtcaccgtcggggacgacggcgagaagatcgtcccgagcgcgtacgcgcggagggccaaggagctcgggctcgacatcatcacctggaccctggagcgcagcggctggctgggcgacgggtcccatggcggctactactacctcagcatcgccaacgtcacggacagcgagggggacgtgtacaacctgctgcacgtgctggcccaggacgtcggcgtgcgcggcgtcttttcggactggagcgccaccgtcacctactatgccaactgcttcggtctcatgttgagtcgatga

SEQ ID NO: 1118 - protein, 429 aa, Myceliophthora thermophilia
MVVLRSLIWSVLVIPSLQAPQGHDGFGSGQGKGKVAPVKRISLGPRPYWLVDNMDDGPLKQKLASCSEKEMKRSDWSISHRGGGTLQFPEHTYSSIMAGTRMGAGIQECDVTFTKDKQLVCRHSQCDLHTTTNVVTIPELNAKCTVPFQPASNGTAAKAKCCTSDFTVDELKQMCAKMDSSNPAAATPAEFVGGTPAYRTDLYAKTTCERILTVREYIDLVDGLGLKFTAELKTPEVPMPFPPGGDYTQARFAQQLVDEFKAAKIRPERVWLQSFLYDDLLYWIKAEPEWARQAILLDESATTPEAMPQAVARLEEYARAGVRIIGPPLPYLVTVGDDGEKIVPSAYARRAKELGLDIITWTLERSGWLGDGSHGGYYYLSIANVTDSEGDVYNLLHVLAQDVGVRGVFSDWSATVTYYANCFGLMLSR

SEQ ID NO: 1119 - protein, 411 aa, Myceliophthora thermophilia
APQGHDGFGSGQGKGKVAPVKRISLGPRPYWLVDNMDDGPLKQKLASCSEKEMKRSDWSISHRGGGTLQFPEHTYSSIMAGTRMGAGIQECDVTFTKDKQLVCRHSQCDLHTTTNVVTIPELNAKCTVPFQPASNGTAAKAKCCTSDFTVDELKQMCAKMDSSNPAAATPAEFVGGTPAYRTDLYAKTTCERILTVREYIDLVDGLGLKFTAELKTPEVPMPFPPGGDYTQARFAQQLVDEFKAAKIRPERVWLQSFLYDDLLYWIKAEPEWARQAILLDESATTPEAMPQAVARLEEYARAGVRIIGPPLPYLVTVGDDGEKIVPSAYARRAKELGLDIITWTLERSGWLGDGSHGGYYYLSIANVTDSEGDVYNLLHVLAQDVGVRGVFSDWSATVTYYANCFGLMLSR

SEQ ID NO: 1120 - DNA, 1002 bp, Myceliophthora thermophilia
atgctctccaaggtactcggcttcgtctcgctcgcggcggcggcggcggcggcggcggctgcgcctctccagagccgggccgcgcgcacgtcgccgcccggggggttgcctgacggtgggcagctcggggacgtacaagacggtccagtcggcggtggacgcgctgagcagtgcatcttcatctacgggggcacgtaccaggagcaggtctacatcccggcgctgcggtcggcgctggtggtgtacggcgagaccgaggacacgagcaggttcgcggccaacaaggtgaccatcacgcagtcgcggagccaggacgactcggccgacaacgacgcgacggcgacgctgcgggcgcacacggccaacctgcgcgtctacaacgtcaacctggtcaacacgcgcggcaaggggtcgcaggcgctggcactgagcgcacaggcggaccggcagggctactacgcctgccagttccgcggctaccaggacacggtgctggccaacgagggggcgcaggtgtacgcgcgcagctacgtcgagggcgccaccgacttcatcttcggccagcgcgcccgcgcctggttcgacgccgccgacatccgcgtcctggccgcctccaagggctacatcaccgccaacggccgcgactcggccgacaacccgtcctactacgtcatccacaactcggccgtctcggcccgcagcggcgactccgtccccgccggcgcctactacctcggccggccgtggcgcaactacgcccgcgtcgtcttccagaagaccagcctgtccggggtcgtcaacgccgccggctggagcgtctggaacacgggagacgagcggacggacgaggtcgagtttggcgagtacggaaacacgggcgccggcgccggcgcgtccgggtcccgtgccgccttcgccaagcagctgtccgcccccgtgagcatcgagaccgtgctgggcagcgactacgcaagctgggtcgacacgtcgtacctgtcgtag

SEQ ID NO: 1121 - protein, 333 aa, Myceliophthora thermophilia
MLSKVLGFVSLAAAAAAAAAAPLQSRAARTSPPGGLPDGGQLGDVQDGPVGGGRAEQCIFIYGGTYQEQVYIPALRSALVVYGETEDTSRFAANKVTITQSRSQDDSADNDATATLRAHTANLRVYNVNLVNTRGKGSQALALSAQADRQGYYACQFRGYQDTVLANEGAQVYARSYVEGATDFIFGQRARAWFDAADIRVLAASKGYITANGRDSADNPSYYVIHNSAVSARSGDSVPAGAYYLGRPWRNYARVVFQKTSLSGVVNAAGWSVWNTGDERTDEVEFGEYGNTGAGAGASGSRAAFAKQLSAPVSIETVLGSDYASWVDTSYLS

SEQ ID NO: 1122 - protein, 313 aa, Myceliophthora thermophilia
APLQSRAARTSPPGGLPDGGQLGDVQDGPVGGGRAEQCIFIYGGTYQEQVYIPALRSALVVYGETEDTSRFAANKVTITQSRSQDDSADNDATATLRAHTANLRVYNVNLVNTRGKGSQALALSAQADRQGYYACQFRGYQDTVLANEGAQVYARSYVEGATDFIFGQRARAWFDAADIRVLAASKGYITANGRDSADNPSYYVIHNSAVSARSGDSVPAGAYYLGRPWRNYARVVFQKTSLSGVVNAAGWSVWNTGDERTDEVEFGEYGNTGAGAGASGSRAAFAKQLSAPVSIETVLGSDYASWVDTSYLS

SEQ ID NO: 1123 - DNA, 1878 bp, Myceliophthora thermophilia
atgaagtccaccgtcgcctcggccacggcactgctcttggccctgtcaggtagcccgggcgcggccaaaccggtcgtcgacacggcgtacccctacacgggccccgacgtgccggtgggtgactgggtgaatccaacggtcaagggctatgggaaggggttcccgcgcctgatcgagccacctgcggtcaagccggcgagcgcgaatcccagcaacaacatcaatgtcatatcactctcgtacctgcccggtggcatcaacatccacttccagaccccgtttgggcttggcgaggccccgagcgtgctctgggggacccggccggataggttgtatagaagagccacggggacgagccatacatacgaccggacaccgccctgctcggccgcggcggtcacccagtgcagccagttcttccacgaagtgcagctgcgccacctgaggcccggcaccaggtactactatcagatccaggcggccaacggcaccacggagtccggggtgctgagcttcgatacggcacgggccgccggcgatccgactccctacagcatggccgtgctggccgacatgggctacaccaacgcgggtggcacgtacaagcaggtgctccgtacggtcgatgacgacgatgtcgcctttgtgtggcacggcggcgacctctcgtacgcggacgactggttctcgggcatcctgccgtgcgccgacgactggcccgtctgctacaacggcacgtcgacccatcttcccggcgcgggtccggtgccggacgagtacaagacgcccctgccggccggcgagatccctaaccagggcgggccgctggggggcgacatgagtgtgctgtacgagtccaactgggacctgtggcagcagtggatgaacaagatcaccaagcgggtgccgtacatggtcatgccgggtaaccacgaggcctcgtgcgccgagtttgacgggcccggcaacgtcctgacggcctatctcaaccacaacaaggcgaacgcgacagcgccccggacgaacctgacatactacagctgtcccgagtcacagcgcaacttcacagcgttccagcaccgcttccacatgccaggcgccgagacgggtggcgttggcaacttctggtactcgttcgactacggcctcgtgcactttatcgccctggacggcgagacggactacgcaaacagtccgcaaaagccgttcgcgcgggatctgaagcctggcgagacgcatccgaccccgggagagacgtctgtgacggatagcgggccattcggcaccgtgaagggcagctacgacgacaacaaggcgtaccagcagtacaagtggctagccgccgacctggcaaaggtggaccgcagtaagacgccctggatcattgccatgagccatcggcccatgtacagctccgaggtatcgtcgtaccagcctcggatccgtgccgccttcgaggacctgctgttgcagcacggcgtggatgtctttctggcgggccacatccattggtacgagcggctgtggccaatggggagaaacggcaccatcgaccgcaaggcgatcgtggatgaccacacctacatgaccaacccgggcaagtcgatgacgcacctcatcaacggcatggcgggcaacatcgagagccacagcacgctatccgaagacgagatcctcgacatcaccgccgtcgtagaccaggagaactacggcttcaacaagctgacggttcacaatgccaccgcgctcacctggacgtttgtccgcggcgacggcggcatcggggacgagctgaccttgatcaagaagaagcctggccggaggggaggaggtgactcgaagcatcgctacggcggccccggcgtgcttttccagtag

SEQ ID NO: 1124 - protein, 625 aa, Myceliophthora thermophilia
MKSTVASATALLLALSGSPGAAKPVVDTAYPYTGPDVPVGDWVNPTVKGYGKGFPRLIEPPAVKPASANPSNNINVISLSYLPGGINIHFQTPFGLGEAPSVLWGTRPDRLYRRATGTSHTYDRTPPCSAAAVTQCSQFFHEVQLRHLRPGTRYYYQIQAANGTTESGVLSFDTARAAGDPTPYSMAVLADMGYTNAGGTYKQVLRTVDDDDVAFVWHGGDLSYADDWFSGILPCADDWPVCYNGTSTHLPGAGPVPDEYKTPLPAGEIPNQGGPLGGDMSVLYESNWDLWQQWMNKITKRVPYMVMPGNHEASCAEFDGPGNVLTAYLNHNKANATAPRTNLTYYSCPESQRNFTAFQHRFHMPGAETGGVGNFWYSFDYGLVHFIALDGETDYANSPQKPFARDLKPGETHPTPGETSVTDSGPFGTVKGSYDDNKAYQQYKWLAADLAKVDRSKTPWIIAMSHRPMYSSEVSSYQPRIRAAFEDLLLQHGVDVFLAGHIHWYERLWPMGRNGTIDRKAIVDDHTYMTNPGKSMTHLINGMAGNIESHSTLSEDEILDITAVVDQENYGFNKLTVHNATALTWTFVRGDGGIGDELTLIKKKPGRRGGGDSKHRYGGPGVLFQ

SEQ ID NO: 1125 - protein, 603 aa, Myceliophthora thermophilia
KPVVDTAYPYTGPDVPVGDWVNPTVKGYGKGFPRLIEPPAVKPASANPSNNINVISLSYLPGGINIHFQTPFGLGEAPSVLWGTRPDRLYRRATGTSHTYDRTPPCSAAAVTQCSQFFHEVQLRHLRPGTRYYYQIQAANGTTESGVLSFDTARAAGDPTPYSMAVLADMGYTNAGGTYKQVLRTVDDDDVAFVWHGGDLSYADDWFSGILPCADDWPVCYNGTSTHLPGAGPVPDEYKTPLPAGEIPNQGGPLGGDMSVLYESNWDLWQQWMNKITKRVPYMVMPGNHEASCAEFDGPGNVLTAYLNHNKANATAPRTNLTYYSCPESQRNFTAFQHRFHMPGAETGGVGNFWYSFDYGLVHFIALDGETDYANSPQKPFARDLKPGETHPTPGETSVTDSGPFGTVKGSYDDNKAYQQYKWLAADLAKVDRSKTPWIIAMSHRPMYSSEVSSYQPRIRAAFEDLLLQHGVDVFLAGHIHWYERLWPMGRNGTIDRKAIVDDHTYMTNPGKSMTHLINGMAGNIESHSTLSEDEILDITAVVDQENYGFNKLTVHNATALTWTFVRGDGGIGDELTLIKKKPGRRGGGDSKHRYGGPGVLFQ

SEQ ID NO: 1126 - DNA, 996 bp, Myceliophthora thermophilia
atgaggctatccctttgcaggttggcatcggcggtgctatccctgacctttgtgggcgatgctttgcctggtgcttctgcgcaggccgcgagccggaccactccgccgagcggatgtctgtcagtaggaagcggcaggcagtacagcaccatcacggaagcgataactgccttgggttctggcacttcagctgcctgcattttcatctacccgggaacctacaacgttgctgatggtgtttcgatcaagtacaagggcccgctgacactgtatgggtcaacctcggataccagcaagcagagcgccaaccaggtgacctttaccaggaacaagggttcggccgatgctgggagcctggacgcgtctgccacgttcaacatcgtgagcagcaacttccgggcgtacaacatcaactttcgtaacacatacggcacgcagggccaggccgtggccgtggccgccaacggcgacaagcaggcctactatgcgtgcggtttctacggctaccaggacacgctgtacgccaagagcggtcgccagtactactccaactgctacatcgagggcgccgtcgacttcatctttggcgccgcggctgcctggtttggcgagtgtaccgttgcctccaacggcggcgggtacatcaccgctaactctcgctccactacggctgatactacctggtatgcttttgatcacagtactatccgggcggctgccggaattagcttggccggcaaagtgttcctcggccgaccgtggcgcgtacttgcccgcgttatcttccaaaattccgagttgaccgacgtcgtgcaccctgagggctggaccagaatggctgcaggagctactcccgagttccgggagttccaaaacactggtgcaggatctaacacatcccagagaaagtggctcactttcccaacgactgctggtgtcactaagacccagctctggggcagtgactggaagacttggatagatactgcatggtga

SEQ ID NO: 1127 - protein, 331 aa, Myceliophthora thermophilia
MRLSLCRLASAVLSLTFVGDALPGASAQAASRTTPPSGCLSVGSGRQYSTITEAITALGSGTSAACIFIYPGTYNVADGVSIKYKGPLTLYGSTSDTSKQSANQVTFTRNKGSADAGSLDASATFNIVSSNFRAYNINFRNTYGTQGQAVAVAANGDKQAYYACGFYGYQDTLYAKSGRQYYSNCYIEGAVDFIFGAAAAWFGECTVASNGGGYITANSRSTTADTTWYAFDHSTIRAAAGISLAGKVFLGRPWRVLARVIFQNSELTDVVHPEGWTRMAAGATPEFREFQNTGAGSNTSQRKWLTFPTTAGVTKTQLWGSDWKTWIDTAW

SEQ ID NO: 1128 - protein, 304 aa, Myceliophthora thermophilia
QAASRTTPPSGCLSVGSGRQYSTITEAITALGSGTSAACIFIYPGTYNVADGVSIKYKGPLTLYGSTSDTSKQSANQVTFTRNKGSADAGSLDASATFNIVSSNFRAYNINFRNTYGTQGQAVAVAANGDKQAYYACGFYGYQDTLYAKSGRQYYSNCYIEGAVDFIFGAAAAWFGECTVASNGGGYITANSRSTTADTTWYAFDHSTIRAAAGISLAGKVFLGRPWRVLARVIFQNSELTDVVHPEGWTRMAAGATPEFREFQNTGAGSNTSQRKWLTFPTTAGVTKTQLWGSDWKTWIDTAW

SEQ ID NO: 1129 - DNA, 1014 bp, Myceliophthora thermophilia
atgaaataccccggcggcggagggccatttcatgagaaggccttcaaaatttccctcgttgtgaccagcttcatttccgtgctgttgacggccatagtcctgtcagctgggacggatgctggccgcctagagcagctccacatcttatacatcgacacctccaagattggcaaagaagttgtgtccaacgccggatcaaaagtcagcgacgcctgtgacagcattcccgacgtcgatcctcccaagttacctaagatacctatattcggccgcgacagtgccagagacgtgcttgaagttcgaagcttgagtgatgcctgcaagaatgcagtgaaggaaggagagaaaaaggtcggcgaggtcacggagagcgccgccgcttccatcggcctcaagcaatactattcggtgcacataggggcgctctgcgagggtgatatcgaggacgaaaaacccaaggtcaagacctgtacgcggaaatttcacgccgggtcgaccgaaatcagcaacagtgtcgagccactgaagaaaatcccaggggccgaagacatcggggaaaaaatcagcgagattcccaacaagatcgcgcgcacggcctaccctttcctggtcattgtactgttacttgccctggcatttctcttcgccatcggcgtagcttgcttggagggcgattctaagctccaaaatatcctccaggagatttcgctttggggcgcaatcatttgcgtcaccctcagctcgttgggcttgttcgtctgcgcgacgctcatcacggccgttgcagaggagattaaggacaagatcaacaagttcaacaatgtgggtatatttgcaggcaccagcccggccctgtacgccctcatgtgggtgtcgcttgtgttcacctggatttctctcggcatgctcatctacctttggatactggcgcacaaggggacgagaacgagcaaggacaggtcccaaacaaccacgccgggggggtcaacatccggattcatgatgcccaagtag

SEQ ID NO: 1130 - protein, 337 aa, Myceliophthora thermophilia
MKYPGGGGPFHEKAFKISLVVTSFISVLLTAIVLSAGTDAGRLEQLHILYIDTSKIGKEVVSNAGSKVSDACDSIPDVDPPKLPKIPIFGRDSARDVLEVRSLSDACKNAVKEGEKKVGEVTESAAASIGLKQYYSVHIGALCEGDIEDEKPKVKTCTRKFHAGSTEISNSVEPLKKIPGAEDIGEKISEIPNKIARTAYPFLVIVLLLALAFLFAIGVACLEGDSKLQNILQEISLWGAIICVTLSSLGLFVCATLITAVAEEIKDKINKFNNVGIFAGTSPALYALMWVSLVFTWISLGMLIYLWILAHKGTRTSKDRSQTTTPGGSTSGFMMPK

SEQ ID NO: 1131 - protein, 297 aa, Myceliophthora thermophilia
GRLEQLHILYIDTSKIGKEVVSNAGSKVSDACDSIPDVDPPKLPKIPIFGRDSARDVLEVRSLSDACKNAVKEGEKKVGEVTESAAASIGLKQYYSVHIGALCEGDIEDEKPKVKTCTRKFHAGSTEISNSVEPLKKIPGAEDIGEKISEIPNKIARTAYPFLVIVLLLALAFLFAIGVACLEGDSKLQNILQEISLWGAIICVTLSSLGLFVCATLITAVAEEIKDKINKFNNVGIFAGTSPALYALMWVSLVFTWISLGMLIYLWILAHKGTRTSKDRSQTTTPGGSTSGFMMPK

SEQ ID NO: 1132 - DNA, 219 bp, Myceliophthora thermophilia
atggtcaggcgcgctcttgtggggagcccttggccgtttccctggttggaaagcacctcagacgcggcgagggtacagcagctacaaccaccaacaccaccaccaccaccacccacacagttcaagcacgtggctcttctggcaactcatttcggcggcgccatcgcgggcctgtcgccaacgacgggtagccgatccctccccgttcgagatagatga

SEQ ID NO: 1133 - protein, 72 aa, Myceliophthora thermophilia
MVRRALVGSPWPFPWLESTSDAARVQQLQPPTPPPPPPTQFKHVALLATHFGGAIAGLSPTTGSRSLPVRDR

SEQ ID NO: 1134 - protein, 50 aa, Myceliophthora thermophilia
ARVQQLQPPTPPPPPPTQFKHVALLATHFGGAIAGLSPTTGSRSLPVRDR

SEQ ID NO: 1135 - DNA, 609 bp, Myceliophthora thermophilia
atgaagccctcttttgatattcacgaaaaggagagacagccgcacccggcagagaggcgacggcggcggcggctcactccgagggtgcgcgtcatcgtcgtgttcctcgccgccgtctatgccctgtattgctacttcatctccaagccgctccttgcgcacccgcttccccagcacacgggtccgtatgccgtcggggacatcaccatccccgccgccgtggacgctcccctgaccgattcaggcctcccgacttcgcaggacggaggagagggcgcgagcgagcgggagcgggggagcccgccgggcggcgaggatggtcgtcccggccccgaccccgagggcggttttcccgtcatcatcttctcgcacggcaccgtgtcctcccggacggattactcacacttcgcgggcgagctggcggcgcgcggccacgtggtcgttatgatggagcaccgcgaaggttcgtgcctgggcaagcccggccagggaggagggagtgacaaggggtttgtcgaggacctgaggcagggcggacgggccgattggaggcggtattactggaagattcacgtcttgcctgcggggagcgtgggcgaaaagcagtaa

SEQ ID NO: 1136 - protein, 202 aa, Myceliophthora thermophilia
MKPSFDIHEKERQPHPAERRRRRRLTPRVRVIVVFLAAVYALYCYFISKPLLAHPLPQHTGPYAVGDITIPAAVDAPLTDSGLPTSQDGGEGASERERGSPPGGEDGRPGPDPEGGFPVIIFSHGTVSSRTDYSHFAGELAARGHVVVMMEHREGSCLGKPGQGGGSDKGFVEDLRQGGRADWRRYYWKIHVLPAGSVGEKQ

SEQ ID NO: 1137 - protein, 161 aa, Myceliophthora thermophilia
LYCYFISKPLLAHPLPQHTGPYAVGDITIPAAVDAPLTDSGLPTSQDGGEGASERERGSPPGGEDGRPGPDPEGGFPVIIFSHGTVSSRTDYSHFAGELAARGHVVVMMEHREGSCLGKPGQGGGSDKGFVEDLRQGGRADWRRYYWKIHVLPAGSVGEKQ

SEQ ID NO: 1138 - DNA, 1527 bp, Myceliophthora thermophilia
atgtcagctccaacagcagttcacggcggcaccacgccgctcgctgcgctgacagcctatccgccctttccaacaacgggctcggcatggtgcgacccgcctccgtggaggaccaacatcgcaaacgctggcttccattactactcgcccgccatctgtccccgaggctttgttgttggtcccagctgtggcatcatcaccaaagagcggacagacgaaggcttccccgccatcgcgacgggagagacagccgtgtactgcgtgcccagcggtttgacctgcaccaccgagcttaccgattatcgtggtggtgtccggggatttgcgcgtgacgccactgcactcggagcgctcttcacctttggagcagccatacagattcgatgggtggcggcagacctgaccaaactcgagacacatccactcacgccgggcctacgacttgcaacaaccggttcccaggagacgacacgaggccccgtgatggggcctactattaccatagacccagccaccttgacgaccggcgaaccaggtaggcaaccggcaccggaccagggagacaccgacacggtcctgtacacggatgcgaacccgagcagcccggtgtctctcacactaatatatgacgacccggagccgacgagcagcctcggaccagcaagcagtgctgcgagcggctcgggcggaggaggactcgggtcgttggaccggccaacgagcatcgtcgtcattgtcctggtcacggttatcgcaggcattgctctctggataggtgcattccttctggttcggcagcagagaaaaaaggctgctcggcgcaaaggttcgcgctcgaccagggagggaggagatgatgagacctgcctggagaacgggcgtcgacaaaggggacccgcgagacccgcgggacctgcgggaagcgcgaaacacgcgaggaagccttcgggggcgacaaagtcaatagggagtcctgtgtccgagctggatgctactgggacgccggcgatcggcagcacaccgaacccggccgagctcgaaggcgacctgctcatccagcctcccgaaagaacgacgtgggtgcaccagaggctgtggctcaagagcccagcgctgctgcagccgccgcaatcctcgccgcggtctctgctgtccacccggtcgacgcgtcggacaattcgagagtcgtttggcgagaaggtcaacgacccagccgcagcattggggaggctcaagataccaaacccgctcgccatcgggcggtcgtcgccgacctcggcaagcccgagcacccgcagcttctggaggatgccgcgcagcctgaaaacaacaaccaccaccaccaccaccaccccgccagcgggaacgactgcagcggcgagacggagtgctcaattgcccaagccatcaccaaggtcggcccacagcgtcagcgtcagggcgtcgagagccagcacgccgggccgaggaaaaccgggatggcgggaggacgggcctagcagcactcagagcgatgcaacattgtga

SEQ ID NO: 1139 - protein, 508 aa, Myceliophthora thermophilia
MSAPTAVHGGTTPLAALTAYPPFPTTGSAWCDPPPWRTNIANAGFHYYSPAICPRGFVVGPSCGIITKERTDEGFPAIATGETAVYCVPSGLTCTTELTDYRGGVRGFARDATALGALFTFGAAIQIRWVAADLTKLETHPLTPGLRLATTGSQETTRGPVMGPTITIDPATLTTGEPGRQPAPDQGDTDTVLYTDANPSSPVSLTLIYDDPEPTSSLGPASSAASGSGGGGLGSLDRPTSIVVIVLVTVIAGIALWIGAFLLVRQQRKKAARRKGSRSTREGGDDETCLENGRRQRGPARPAGPAGSAKHARKPSGATKSIGSPVSELDATGTPAIGSTPNPAELEGDLLIQPPERTTWVHQRLWLKSPALLQPPQSSPRSLLSTRSTRRTIRESFGEKVNDPAAALGRLKIPNPLAIGRSSPTSASPSTRSFWRMPRSLKTTTTTTTTTPPAGTTAAARRSAQLPKPSPRSAHSVSVRASRASTPGRGKPGWREDGPSSTQSDATL

SEQ ID NO: 1140 - protein, 479 aa, Myceliophthora thermophilia
WCDPPPWRTNIANAGFHYYSPAICPRGFVVGPSCGIITKERTDEGFPAIATGETAVYCVPSGLTCTTELTDYRGGVRGFARDATALGALFTFGAAIQIRWVAADLTKLETHPLTPGLRLATTGSQETTRGPVMGPTITIDPATLTTGEPGRQPAPDQGDTDTVLYTDANPSSPVSLTLIYDDPEPTSSLGPASSAASGSGGGGLGSLDRPTSIVVIVLVTVIAGIALWIGAFLLVRQQRKKAARRKGSRSTREGGDDETCLENGRRQRGPARPAGPAGSAKHARKPSGATKSIGSPVSELDATGTPAIGSTPNPAELEGDLLIQPPERTTWVHQRLWLKSPALLQPPQSSPRSLLSTRSTRRTIRESFGEKVNDPAAALGRLKIPNPLAIGRSSPTSASPSTRSFWRMPRSLKTTTTTTTTTPPAGTTAAARRSAQLPKPSPRSAHSVSVRASRASTPGRGKPGWREDGPSSTQSDATL

SEQ ID NO: 1141 - DNA, 1293 bp, Myceliophthora thermophilia
atggcggctcgccgaacgcgactgctccccaagatccgctcggctctccagaagctcctgttcgtatacctcgtctggacgattatcgaggctcaccgatgttactaccgcatctcccgcgccgagagagaggccattgcgcgaaccgacctgatcgagccgacacgggtctacattgcgagcctgcactggaacaacgaggacatcctgcggtccgagtggaacaaagcggtcctggatctggtcaagacgtttggggcgaataatgtctttgtgagcgtctacgagagcgggagctgggacgacaccaagggggctctgcgcgagctcgacaaggagctggagacgatgggcgtcgcaaggaagatcattctggatcaggagacgcataaggatctgatcacccagccgccggcggatgaagggtggatcacgatacctgacgggacgaggatgcctaggagaatcccttacctctccaagttacggaacctctctctgcggccgctgttggagcttgcagagaacggaacgacgttcgatcaggtcctcttcctgggagacgttgtttttaccgtctctgatgtcctaaacctcctcaaaaccaataacggccgctacgccgccgcctgctccctcgactttagcaaacctcccaacttctacgacaccttcgccctccgcgacgcgcgcggccaccaatatgccacacagacatggccctacttccgtgcctcccaatcccgaaaagcgatgatcaacgcaaagcctgtccccgtatcaagctgctggaacggcatagtcgccatgccggcgtcgaccttcgcgggcatccgcggcctccggttccgcggcatcccggacgacctcgccacctcgcacctcgaggcctccgagtgctgcctcatccacgccgacaacccggcctcgcgctcccgcggcgtctttgtcaacccggccgtgcgcgtcggctacgacaggaaggcgtacgacgcggtgcaccggaacgctcctcgtcgccgtgatgatgatgatgatgatgatgagaatggccacagcgacaccggcggcggcggtggcggtagctggctctcgctctcagaagtgtactttggcctgtggaagaacaggctcgcccggtggctcaccacgccctggttcgaggagcaagaggtcagaaggcggatcgagcgatgggcgagggccggcgagggcagggaagagaagggcgagttctgcgtcgtggacgagatgcagattgtggtgcacaacgggtggaagcatctacgatga

SEQ ID NO: 1142 - protein, 430 aa, Myceliophthora thermophilia
MAARRTRLLPKIRSALQKLLFVYLVWTIIEAHRCYYRISRAEREAIARTDLIEPTRVYIASLHWNNEDILRSEWNKAVLDLVKTFGANNVFVSVYESGSWDDTKGALRELDKELETMGVARKIILDQETHKDLITQPPADEGWITIPDGTRMPRRIPYLSKLRNLSLRPLLELAENGTTFDQVLFLGDVVFTVSDVLNLLKTNNGRYAAACSLDFSKPPNFYDTFALRDARGHQYATQTWPYFRASQSRKAMINAKPVPVSSCWNGIVAMPASTFAGIRGLRFRGIPDDLATSHLEASECCLIHADNPASRSRGVFVNPAVRVGYDRKAYDAVHRNAPRRRDDDDDDDENGHSDTGGGGGGSWLSLSEVYFGLWKNRLARWLTTPWFEEQEVRRRIERWARAGEGREEKGEFCVVDEMQIVVHNGWKHLR

SEQ ID NO: 1143 - protein, 399 aa, Myceliophthora thermophilia
HRCYYRISRAEREAIARTDLIEPTRVYIASLHWNNEDILRSEWNKAVLDLVKTFGANNVFVSVYESGSWDDTKGALRELDKELETMGVARKIILDQETHKDLITQPPADEGWITIPDGTRMPRRIPYLSKLRNLSLRPLLELAENGTTFDQVLFLGDVVFTVSDVLNLLKTNNGRYAAACSLDFSKPPNFYDTFALRDARGHQYATQTWPYFRASQSRKAMINAKPVPVSSCWNGIVAMPASTFAGIRGLRFRGIPDDLATSHLEASECCLIHADNPASRSRGVFVNPAVRVGYDRKAYDAVHRNAPRRRDDDDDDDENGHSDTGGGGGGSWLSLSEVYFGLWKNRLARWLTTPWFEEQEVRRRIERWARAGEGREEKGEFCVVDEMQIVVHNGWKHLR

SEQ ID NO: 1144 - DNA, 1176 bp, Myceliophthora thermophilia
atgcgcaaccaggtgctcctgtccgccctcgtcggcgcggccggtgtcgcggcccgcgatgtcccctccaacgtccagagcttctatgactcgctcaaggctaagggcgcttgctccaacaagctggccacgggcttctacgccaatgacgacggccccaacaccttcgcctactgcggtgaccacctgtccgactacaacgtcatctacctcaagggctcgggcagcgcattcgccgacatggacattgactgcgacggcgagcagaacggcaagggcgacgacggccggtgcggcaacagccaagacacccaggccatcacctcgttccaggacatcgtcgagggctacaagaagggcgtcaaggacctcaacgcctacgtgcacccgtacgtcgtctttggcaacacgggctccaagagcggctggaagacgttcgacccgcagaagtacggcatcaagcccctgtcggtcatggccgtcgtctgcaacaacaagctgatctacggcgtctggggcgacgagaacggcgacgacggcgacaagcccatggtgggcgaggcgtccatctcgctggccacggcctgcttcggcaccagcatgacgggcaacaacgggcacgacgagaccgacgtgctctacattgccttccccggcgacgacgccgtgccgggcgccgacggcgccaactggggcgccgacagctggcaggccttcgagtcgtccatcgaggggctcggcaacaagctcatccagcggatcggcggcggcgacccaggaaatggcggcggcgacgacccgggcaatggcggcgacggttccgacgactgcgagtggcccggccactgcgagggggcgagctgttcgaccgacgacgactgctcggacccgtgggcctgcatcaatggcaaatgcgggaccgacccaggtacggattcaggcagcggcacctctcccagctacgtgtgcgagtgggccggtcactgcgagggcgccaagtgctcgactgacgatgactgctccggacagctctactgtgactcgtctgagaaggtgtgcacggcggggtgcgagtggcccggccactgcctcggggccaagtgcacgaccgacgatgactgctcggatccctatgagtgcaacgcgagtgcggggtactgctggcgtacacagtaa

SEQ ID NO: 1145 - protein, 391 aa, Myceliophthora thermophilia
MRNQVLLSALVGAAGVAARDVPSNVQSFYDSLKAKGACSNKLATGFYANDDGPNTFAYCGDHLSDYNVIYLKGSGSAFADMDIDCDGEQNGKGDDGRCGNSQDTQAITSFQDIVEGYKKGVKDLNAYVHPYVVFGNTGSKSGWKTFDPQKYGIKPLSVMAVVCNNKLIYGVWGDENGDDGDKPMVGEASISLATACFGTSMTGNNGHDETDVLYIAFPGDDAVPGADGANWGADSWQAFESSIEGLGNKLIQRIGGGDPGNGGGDDPGNGGDGSDDCEWPGHCEGASCSTDDDCSDPWACINGKCGTDPGTDSGSGTSPSYVCEWAGHCEGAKCSTDDDCSGQLYCDSSEKVCTAGCEWPGHCLGAKCTTDDDCSDPYECNASAGYCWRTQ

SEQ ID NO: 1146 - protein, 373 aa, Myceliophthora thermophilia
RDVPSNVQSFYDSLKAKGACSNKLATGFYANDDGPNTFAYCGDHLSDYNVIYLKGSGSAFADMDIDCDGEQNGKGDDGRCGNSQDTQAITSFQDIVEGYKKGVKDLNAYVHPYVVFGNTGSKSGWKTFDPQKYGIKPLSVMAVVCNNKLIYGVWGDENGDDGDKPMVGEASISLATACFGTSMTGNNGHDETDVLYIAFPGDDAVPGADGANWGADSWQAFESSIEGLGNKLIQRIGGGDPGNGGGDDPGNGGDGSDDCEWPGHCEGASCSTDDDCSDPWACINGKCGTDPGTDSGSGTSPSYVCEWAGHCEGAKCSTDDDCSGQLYCDSSEKVCTAGCEWPGHCLGAKCTTDDDCSDPYECNASAGYCWRTQ

SEQ ID NO: 1147 - DNA, 2418 bp, Myceliophthora thermophilia
atgctgctaaaccgccgtcatcttgtagccggcgtggctggcctcttggccgccaccggtgttcatgccgcgtgctcgtctgatctagtcattgacgacttcacaacatggctgactggcctcaacaaccttggttcagaaaacggggacgatggaaccatgacggccatcgcggcgtcccccggacaggtcgtcttcgtcccaaaagatgacggctcgtacttttacgagtcgttcccgtgccagcaagccaacaccgagggctataacgcaatccagttctccgtcctggggcccgagggcggctcctttgcatttgagctgcaaaccacgtccagctgcgacgacgaagtgggggtctacaacagttcttggactgaagtgggcgacctgactggcgagcggcacaccatcactctccctctcgaagggtgggacgactcgccaaactacgacggaatcgtcggcctgacctggtccaccttctcagagaacgggatccagtggtcggttggcaacgtcagtctcgtctgtggaggtggaggagatgaaggggacggcggcggctctgcttcccagagctcaacggttgccaccaagccgaccgcaacaactgcgacgtcatcccagggtagtacaacttcctcgcctgccgtgtcctctccgccggcaacgtgttccaacctgctgattgacgactgggcgtcccagtcccgcctgaccttcctcggctacaacgccatggagcagacctcgagcgacgacgagtccatgtcgtcggtcgtcgtcagcgacaacagggtcacgctgacgcccagggacgacgactcgtacttttacagccagttcggctgcctggacgccagcgagcagtatggcggcatatccttctccgtccaggcaaagagggggaccagtttctccgtgacgctggcgtacgtgacgaagtgcgggtcccaaaacgagcagagcgtcacgcagtcgaccgacgagctgggatggacctttgacggcaccgagaagctgtactcggtccccttctccgcctttgccgacgtcgacactaccaggctcaccatgatctactttggcgacttctccggtcccgtcacgttcgggcccatgtccttctactgcggctcgaccccgtccgagtacgagctgccgtcggggatcccgacggctccgcccatcacggtcacgacgacggcagccccggccccgaccaaggcgatggtgatcgacaccttcggtgatccggagaccaacgacctgggccagtggcacggcgccgacgaggaggggctcaccaccaccttcggcaacaacgtcatgaccattcgcaccaacgactcggacctggcctggaacacgcagctgaccgacaagtgcttggacctcggcggctacgcgggcggctacctccacatcgcctactccggcagcaacaagttcagcgtcgccctgcagcagcacaacgccgtctgcgacccggacgtcaagccgtacccggagacgtgggactcgctcgaggcggcgcgctacgccaccgccagcgacatgtacatccccatcaaccacttcgccgtcgacctcacgcgcgtcatcgggttcgccctcaagggcttctacggcaccgagccgaccaggctgaccaagatggagatcgtcgacgagctgcccgaggactggccgggcgtcccgcccaagctggcctcgggccggctcgtcttctcgtgcacgcggcccgactcgtttgccttcgccatcgacgacggcgacccggcgctggccccgcgcgtcatggagatcgtccagcaggccgacatccccgtcaccttcttcaccgtcggcctgcccctgctcgaccggaccaacgggctggccgacatgtacaagaccatggccgcccgcgggcaccagatcgccctgcactcgtacacacacccgccgctcgagggcctcccgagcgacgcggccatcgactgggagtacgccaacgacatcggcgccgtccgccaggtctttggcgacggctctcccaacaacaacaacaacaacaacccggtccacaccaactacttccgcccgcccttcggcaccgagggcgcccgcatgcgccagcgcctggccgccaacctggaagacgccaacccgtacctggtccagtggagcgtcgacgtggaggactggctgtgggccgagtcggacacgcccgagaagcagctcgacgccttcaagcgcgacgtcgccgccggcggcaacctggtcgtcatgcactacctctacaactcgaccgtcgagctgctgcccgagttcatcgaggtggccaaggccaccggcaagcggctgatgagggtcgatcagtgcatggaggatcccaacgcgccgcctctggaggacgaggaggaagggtga

SEQ ID NO: 1148 - protein, 805 aa, Myceliophthora thermophilia
MLLNRRHLVAGVAGLLAATGVHAACSSDLVIDDFTTWLTGLNNLGSENGDDGTMTAIAASPGQVVFVPKDDGSYFYESFPCQQANTEGYNAIQFSVLGPEGGSFAFELQTTSSCDDEVGVYNSSWTEVGDLTGERHTITLPLEGWDDSPNYDGIVGLTWSTFSENGIQWSVGNVSLVCGGGGDEGDGGGSASQSSTVATKPTATTATSSQGSTTSSPAVSSPPATCSNLLIDDWASQSRLTFLGYNAMEQTSSDDESMSSVVVSDNRVTLTPRDDDSYFYSQFGCLDASEQYGGISFSVQAKRGTSFSVTLAYVTKCGSQNEQSVTQSTDELGWTFDGTEKLYSVPFSAFADVDTTRLTMIYFGDFSGPVTFGPMSFYCGSTPSEYELPSGIPTAPPITVTTTAAPAPTKAMVIDTFGDPETNDLGQWHGADEEGLTTTFGNNVMTIRTNDSDLAWNTQLTDKCLDLGGYAGGYLHIAYSGSNKFSVALQQHNAVCDPDVKPYPETWDSLEAARYATASDMYIPINHFAVDLTRVIGFALKGFYGTEPTRLTKMEIVDELPEDWPGVPPKLASGRLVFSCTRPDSFAFAIDDGDPALAPRVMEIVQQADIPVTFFTVGLPLLDRTNGLADMYKTMAARGHQIALHSYTHPPLEGLPSDAAIDWEYANDIGAVRQVFGDGSPNNNNNNNPVHTNYFRPPFGTEGARMRQRLAANLEDANPYLVQWSVDVEDWLWAESDTPEKQLDAFKRDVAAGGNLVVMHYLYNSTVELLPEFIEVAKATGKRLMRVDQCMEDPNAPPLEDEEEG

SEQ ID NO: 1149 - protein, 782 aa, Myceliophthora thermophilia
ACSSDLVIDDFTTWLTGLNNLGSENGDDGTMTAIAASPGQVVFVPKDDGSYFYESFPCQQANTEGYNAIQFSVLGPEGGSFAFELQTTSSCDDEVGVYNSSWTEVGDLTGERHTITLPLEGWDDSPNYDGIVGLTWSTFSENGIQWSVGNVSLVCGGGGDEGDGGGSASQSSTVATKPTATTATSSQGSTTSSPAVSSPPATCSNLLIDDWASQSRLTFLGYNAMEQTSSDDESMSSVVVSDNRVTLTPRDDDSYFYSQFGCLDASEQYGGISFSVQAKRGTSFSVTLAYVTKCGSQNEQSVTQSTDELGWTFDGTEKLYSVPFSAFADVDTTRLTMIYFGDFSGPVTFGPMSFYCGSTPSEYELPSGIPTAPPITVTTTAAPAPTKAMVIDTFGDPETNDLGQWHGADEEGLTTTFGNNVMTIRTNDSDLAWNTQLTDKCLDLGGYAGGYLHIAYSGSNKFSVALQQHNAVCDPDVKPYPETWDSLEAARYATASDMYIPINHFAVDLTRVIGFALKGFYGTEPTRLTKMEIVDELPEDWPGVPPKLASGRLVFSCTRPDSFAFAIDDGDPALAPRVMEIVQQADIPVTFFTVGLPLLDRTNGLADMYKTMAARGHQIALHSYTHPPLEGLPSDAAIDWEYANDIGAVRQVFGDGSPNNNNNNNPVHTNYFRPPFGTEGARMRQRLAANLEDANPYLVQWSVDVEDWLWAESDTPEKQLDAFKRDVAAGGNLVVMHYLYNSTVELLPEFIEVAKATGKRLMRVDQCMEDPNAPPLEDEEEG

SEQ ID NO: 1150 - DNA, 495 bp, Myceliophthora thermophilia
atgaaccgtgtaccagtttggtggtttgaagtctacctgctggaacccgtcgccggcgccctcaaagcaaaccatgtcgtccaccctgtttgtccggcgccgacagccatctgcgacacggatgcgaaatcccccccttgcagggtccggccacggcttgcttgtttgcaatgggcccagctccatgggacggggtccaacacgggcttgggcgccatgtccctgcacatctccactcgttcttctgatctcgccactggcctcagtgacgaggtgcgcgaacggccggttccgcgagtagctttcgttattagactcggtcacgagtcattgccgtcttgggccccacggttgataattcggccctatgttaaagagcaggaccgtctctctcgagacaccgtcatcctgcatctctggctcgtcaggcatcgaggcaagccgctcctactacatggctaccacgccttgcttgctccttgtcattcggcgtag

SEQ ID NO: 1151 - protein, 164 aa, Myceliophthora thermophilia
MNRVPVWWFEVYLLEPVAGALKANHVVHPVCPAPTAICDTDAKSPPCRVRPRLACLQWAQLHGTGSNTGLGAMSLHISTRSSDLATGLSDEVRERPVPRVAFVIRLGHESLPSWAPRLIIRPYVKEQDRLSRDTVILHLWLVRHRGKPLLLHGYHALLAPCHSA

SEQ ID NO: 1152 - protein, 145 aa, Myceliophthora thermophilia
ALKANHVVHPVCPAPTAICDTDAKSPPCRVRPRLACLQWAQLHGTGSNTGLGAMSLHISTRSSDLATGLSDEVRERPVPRVAFVIRLGHESLPSWAPRLIIRPYVKEQDRLSRDTVILHLWLVRHRGKPLLLHGYHALLAPCHSA

SEQ ID NO: 1153 - DNA, 1344 bp, Myceliophthora thermophilia
atggaacggcttgctgcaagactcggccgcttattcgcatcgcgaccgaaaccgccgaccggcaccgttctgcgcgcatccgccctatctgtctccactgctgctgctgccaccgctgccgccagcgccgccgccgccgccgcgtccatggctgtatactcaagtgcagtctcgaagctggacctggccgccgacgtccccgatgaggcccgccaggctacgcatcacgtaaagggctccgacgggaagctcatcaagttccgcaacccccatccgtcggccggtgatccgcctcgatctgtgattctcgtgaccgccaggattttctggtccatgatcacgggcgagtggtccacccccgacacgtccaacgtcaacatcccggccgtcaagcccgccttcagggagaggcgggctggattatccaacctgcgcgccacctggctcggacatgcctgctacttggtcgagttccccagcgggctgcgagtcttgttcgacccggtcttcgaggaccgctgtgcgccggtgcaatggctcgggcccaagcggtacacgccgccgccgtgctccctctccgacctcccccccgtcgacgccgtggtcatcagccattcccattacgaccacctctcgcacaccagcgtccgggagctcgcccgccggaaccccggcgcgcacttcttcgtcggcctcggcctggaacggtggttccgcgacagcggcatcgacaacgtgaccgagatggactggtggcaggatgccgacctcgtcctgacgaggaggcaggacgcccacgtccaagacccggacccggacaagaccgatcccgagaccatctcggcccgcatcacctgccttccctgccagcacgcctccggacggtcgcacagagaccagaaccacaccctgtgggcgtcgtgggccgtcaggtcgggcggcaagtccgtctggttcggcggcgacacgggctaccggcgggtgcccaagctgccggccggcgtggacgactacgggcccgagtacgactcgctgccgcgctgcccccagttcgcccagatcggcgccctgcgcgggcccttcgacctcggcctgatccccatcggcgcctacaagccgcgctggatgtggagctggatgcacgccaacccttacgacgccgtcgagatcttcaaggagacccgctgcaagcgcgccatgggcatccactggggcacctgggccctgacgatagaagatgtcgaagagccgccgaagctgctgaagcaggcactcgcggcgagcggcattcccgagacgggtgtttttgatgtctgcgcgattggtgaggcgagagagttttga

SEQ ID NO: 1154 - protein, 447 aa, Myceliophthora thermophilia
MERLAARLGRLFASRPKPPTGTVLRASALSVSTAAAATAAASAAAAAASMAVYSSAVSKLDLAADVPDEARQATHHVKGSDGKLIKFRNPHPSAGDPPRSVILVTARIFWSMITGEWSTPDTSNVNIPAVKPAFRERRAGLSNLRATWLGHACYLVEFPSGLRVLFDPVFEDRCAPVQWLGPKRYTPPPCSLSDLPPVDAVVISHSHYDHLSHTSVRELARRNPGAHFFVGLGLERWFRDSGIDNVTEMDWWQDADLVLTRRQDAHVQDPDPDKTDPETISARITCLPCQHASGRSHRDQNHTLWASWAVRSGGKSVWFGGDTGYRRVPKLPAGVDDYGPEYDSLPRCPQFAQIGALRGPFDLGLIPIGAYKPRWMWSWMHANPYDAVEIFKETRCKRAMGIHWGTWALTIEDVEEPPKLLKQALAASGIPETGVFDVCAIGEAREF

SEQ ID NO: 1155 - protein, 400 aa, Myceliophthora thermophilia
ASMAVYSSAVSKLDLAADVPDEARQATHHVKGSDGKLIKFRNPHPSAGDPPRSVILVTARIFWSMITGEWSTPDTSNVNIPAVKPAFRERRAGLSNLRATWLGHACYLVEFPSGLRVLFDPVFEDRCAPVQWLGPKRYTPPPCSLSDLPPVDAVVISHSHYDHLSHTSVRELARRNPGAHFFVGLGLERWFRDSGIDNVTEMDWWQDADLVLTRRQDAHVQDPDPDKTDPETISARITCLPCQHASGRSHRDQNHTLWASWAVRSGGKSVWFGGDTGYRRVPKLPAGVDDYGPEYDSLPRCPQFAQIGALRGPFDLGLIPIGAYKPRWMWSWMHANPYDAVEIFKETRCKRAMGIHWGTWALTIEDVEEPPKLLKQALAASGIPETGVFDVCAIGEAREF

SEQ ID NO: 1156 - DNA, 414 bp, Myceliophthora thermophilia
atgctcggctcgttctttgagcaaagggagttttcccgtttccgcgccctgctcctgcttggggtcgccgaaggtgccgccctatcccgccgatggaacggtatgcccgcccacagtgcgaacccccggcatccacttgttctcagtcctttgatttcaggcgctggagatctcggcaccaagctgctggcccatgcgtcatcaacagccgaggcagacaaggggttggggacgagctcgcgtcgcggctcgtttcgcccgaaggtcttgactcgcgggcgctgcacatcatcgccccaagactgttgtcaggatcctgcagtcgccgagcggagggatgtgcgcgtcgcgatttccgtggattaccaacccacagcggccccgccgcccctggaacacggaatcaaatcttga

SEQ ID NO: 1157 - protein, 137 aa, Myceliophthora thermophilia
MLGSFFEQREFSRFRALLLLGVAEGAALSRRWNGMPAHSANPRHPLVLSPLISGAGDLGTKLLAHASSTAEADKGLGTSSRRGSFRPKVLTRGRCTSSPQDCCQDPAVAERRDVRVAISVDYQPTAAPPPLEHGIKS

SEQ ID NO: 1158 - protein, 112 aa, Myceliophthora thermophilia
AALSRRWNGMPAHSANPRHPLVLSPLISGAGDLGTKLLAHASSTAEADKGLGTSSRRGSFRPKVLTRGRCTSSPQDCCQDPAVAERRDVRVAISVDYQPTAAPPPLEHGIKS

SEQ ID NO: 1159 - DNA, 1137 bp, Myceliophthora thermophilia
atgaagtggtccacgctcatcccctctgtccttgttccccttgtctcggctgctcccaaggagcgggaggagaagcccgagaccttctcgcagcgcgttatcttcacgccgcccgacaactacaccgacccgcgcgtgctgtacgcccgcaccgcccagttccgggacggcaccctgctcgcgacctgggagaattacagcccggagccccctccggtctacttccccatctaccgctccactgacggcggctacaactggaaggaaatctcgcgtgtcgaggacacggccaacggattgggcctccgataccagccgttcctctacatcctggatgagtcctttgccggcttccccaaggacacggtcctgctggccgggagctcgatccccacggacctctcaagcacccagatcgacctgtatgcctcgacggaccgcggcgtgacgtgggagtttgtctcgcacatcgcggccggcggcgtggccatccccaacaacggcgagacccctgtctgggagccgttcctgatgcgcaacggagacacgctcatctgctactactcggaccagcgcgagaacacgacgtacggccagaagatggtgcaccagaccacctcggacctgcgcacctggggccccgtcgtcaacgacgtcacgtcgcccgtctacgaggagcgcccgggcatgccgatcgtcgccaagctgcccaacggcaagtacatcatgacgtacgagcacggcggcagccccgtgctgagcggctaccagttccccgtccactacaaggtcgtgtcggatcccgagcggttcggccccgccaccggcgtgccgctccggaccaccgacggctacatcccgaccggctcgccctacgtcgtctggagccccgtcggcggggagaacggcacggtgatcgccagcgcccacagctcggccgacatctacatcaacacgggcctcgccgagcccgggagcacctggaggcgcgtcgccacgcccgagaagaacgcctacacgcgccatctccgcgtcctcaacgaccctaccaagctgctcatcatgggcgccggccagttgccgccaagcaccaccaaccaggtggagctgagcgtgattgacatcagcaacctgtaa

SEQ ID NO: 1160 - protein, 378 aa, Myceliophthora thermophilia
MKWSTLIPSVLVPLVSAAPKEREEKPETFSQRVIFTPPDNYTDPRVLYARTAQFRDGTLLATWENYSPEPPPVYFPIYRSTDGGYNWKEISRVEDTANGLGLRYQPFLYILDESFAGFPKDTVLLAGSSIPTDLSSTQIDLYASTDRGVTWEFVSHIAAGGVAIPNNGETPVWEPFLMRNGDTLICYYSDQRENTTYGQKMVHQTTSDLRTWGPVVNDVTSPVYEERPGMPIVAKLPNGKYIMTYEHGGSPVLSGYQFPVHYKVVSDPERFGPATGVPLRTTDGYIPTGSPYVVWSPVGGENGTVIASAHSSADIYINTGLAEPGSTWRRVATPEKNAYTRHLRVLNDPTKLLIMGAGQLPPSTTNQVELSVIDISNL

SEQ ID NO: 1161 - protein, 361 aa, Myceliophthora thermophilia
APKEREEKPETFSQRVIFTPPDNYTDPRVLYARTAQFRDGTLLATWENYSPEPPPVYFPIYRSTDGGYNWKEISRVEDTANGLGLRYQPFLYILDESFAGFPKDTVLLAGSSIPTDLSSTQIDLYASTDRGVTWEFVSHIAAGGVAIPNNGETPVWEPFLMRNGDTLICYYSDQRENTTYGQKMVHQTTSDLRTWGPVVNDVTSPVYEERPGMPIVAKLPNGKYIMTYEHGGSPVLSGYQFPVHYKVVSDPERFGPATGVPLRTTDGYIPTGSPYVVWSPVGGENGTVIASAHSSADIYINTGLAEPGSTWRRVATPEKNAYTRHLRVLNDPTKLLIMGAGQLPPSTTNQVELSVIDISNL

SEQ ID NO: 1162 - DNA, 996 bp, Myceliophthora thermophilia
atggctctcgccgccctgctcgcatccctcaacagccctctcaatgggggcgacacgctctccgacagccgtacctacaccctcgacggcgtcctgccgcgcgacaagtacaacgcgcggggtttccaagggaggctgtacggcgtcggcaccatcctgcggaccgactttgtgcgccgccatgtcgcccgcgtccgcgaggtcgactgggatctcgagggacgcgtgagcatcgtcgagctgaagccgccaccgcccgaagcgagcactaccaccaccaccaccaccgacagcaacaacaacaacaacaacaaccacctcgtgccggcgacaaccataccggaggaaggccaggaagaggacgaaagacaccgagcggcccaccagaacaagaaacaggagaagcagccgctggccgtagtcaacgtttacgcggtgaacggcacggcggcgccctaccgctgccccaagaccggcgccgtggcaggcacgcggcacgaccgcaagctcgccttccacgcggccctgcgcgacgagtgcctggccctcgagcggcgggggttccgcgtcgtcgtcgcgggggacttcaacgtcgcgcgcgggccgcccgacggccacccgagcctgcggatcttcccgcgccagcactgcgccaaccgcgccgacttcaacgccaaattcttcgccccggaggagaaccgccgggccggggcgtacgtggccgccgccgcagaggagcaggaggagggggagcaggagcaggagcccttctttgacggggtcgacgtcttccgggccctgcacggcttgaagcggcggtacacgtactaccctcgcacgcgcgcctggggcagcagctccgatagggtcgacatgatcatcgtgtcgcgccggctgtgggacgaggggagggtcagggcgaccgggatcctggacacgccgcaggaacgcgggaggagcgatcatgtgccgttgtgggtggaggttgtcgtctga

SEQ ID NO: 1163 - protein, 331 aa, Myceliophthora thermophilia
MALAALLASLNSPLNGGDTLSDSRTYTLDGVLPRDKYNARGFQGRLYGVGTILRTDFVRRHVARVREVDWDLEGRVSIVELKPPPPEASTTTTTTTDSNNNNNNNHLVPATTIPEEGQEEDERHRAAHQNKKQEKQPLAVVNVYAVNGTAAPYRCPKTGAVAGTRHDRKLAFHAALRDECLALERRGFRVVVAGDFNVARGPPDGHPSLRIFPRQHCANRADFNAKFFAPEENRRAGAYVAAAAEEQEEGEQEQEPFFDGVDVFRALHGLKRRYTYYPRTRAWGSSSDRVDMIIVSRRLWDEGRVRATGILDTPQERGRSDHVPLWVEVVV

SEQ ID NO: 1164 - protein, 315 aa, Myceliophthora thermophilia
GDTLSDSRTYTLDGVLPRDKYNARGFQGRLYGVGTILRTDFVRRHVARVREVDWDLEGRVSIVELKPPPPEASTTTTTTTDSNNNNNNNHLVPATTIPEEGQEEDERHRAAHQNKKQEKQPLAVVNVYAVNGTAAPYRCPKTGAVAGTRHDRKLAFHAALRDECLALERRGFRVVVAGDFNVARGPPDGHPSLRIFPRQHCANRADFNAKFFAPEENRRAGAYVAAAAEEQEEGEQEQEPFFDGVDVFRALHGLKRRYTYYPRTRAWGSSSDRVDMIIVSRRLWDEGRVRATGILDTPQERGRSDHVPLWVEVVV

SEQ ID NO: 1165 - DNA, 1056 bp, Myceliophthora thermophilia
atgcgcgacgccgccgtcctctcgtctcttctcctggcctcggccaccaccgccctcgcatccgccgccagccgcctcgagtgcctccacacgcgcagtcgggacctcgcagccgccgcgtcgtgcggccacgaggcttctctgaacgactgcttctcgaacctccccgtcaccccggagccggacctcctctcttcggcgctcgagagctgcttcgtcaacgcaggctgcacggccgccgaatcccggatcgaagccctccacgtcctcgagcaatgcgacaagcagctggccgacctccgccaccgccgccgtcgccatgacggcccggtggcccctgccgccgccgccgccgccgccgccgccagggagcctctcctcgaggaccgcgccgccgagcctctgcccgcggggatcacggccatgaacctcccgcgcgaaacgtacgccgccatggcggccaggcaagacgacgccacgaccaccgtcggcaccgaatccccgagctctccctccccctgcttcaccgacgtcaccagccacaccaccacctgcacgatcaagaccgacggcccctcgggcaaggagatgtcctgctacgccaccgccatcgccaccccgaggtgccgcgacgggctcatctgcacgtcggacgcgcgcggcaacccgtcgtgcatgtacaagcactcgcgcctcgagacggacggcatcatcatcgccatcgtcttcgcgagcgtcatcgtcatctccgtcgtctccatctgcttcctctgctgccgcgagcgcgccgagcaccgccgcctcgagcgcgccgccgaggccgcccgcatcgcgaaggaggccaagacgcaggccaccgtcgccgccaagcgacccggcccgtccgtcaccggccccgtgtcgggcgccgccgtcgagggccagccgctcatgtaccagaccggaggcgccgccccgtcgtccccaggcgcccatcagcagcagttcccccagcagcagtatgccgctggcaaccccttcaccgatgctggccccgacgggcaccctctcaggtga

SEQ ID NO: 1166 - protein, 351 aa, Myceliophthora thermophilia
MRDAAVLSSLLLASATTALASAASRLECLHTRSRDLAAAASCGHEASLNDCFSNLPVTPEPDLLSSALESCFVNAGCTAAESRIEALHVLEQCDKQLADLRHRRRRHDGPVAPAAAAAAAAAREPLLEDRAAEPLPAGITAMNLPRETYAAMAARQDDATTTVGTESPSSPSPCFTDVTSHTTTCTIKTDGPSGKEMSCYATAIATPRCRDGLICTSDARGNPSCMYKHSRLETDGIIIAIVFASVIVISVVSICFLCCRERAEHRRLERAAEAARIAKEAKTQATVAAKRPGPSVTGPVSGAAVEGQPLMYQTGGAAPSSPGAHQQQFPQQQYAAGNPFTDAGPDGHPLR

SEQ ID NO: 1167 - protein, 329 aa, Myceliophthora thermophilia
ASRLECLHTRSRDLAAAASCGHEASLNDCFSNLPVTPEPDLLSSALESCFVNAGCTAAESRIEALHVLEQCDKQLADLRHRRRRHDGPVAPAAAAAAAAAREPLLEDRAAEPLPAGITAMNLPRETYAAMAARQDDATTTVGTESPSSPSPCFTDVTSHTTTCTIKTDGPSGKEMSCYATAIATPRCRDGLICTSDARGNPSCMYKHSRLETDGIIIAIVFASVIVISVVSICFLCCRERAEHRRLERAAEAARIAKEAKTQATVAAKRPGPSVTGPVSGAAVEGQPLMYQTGGAAPSSPGAHQQQFPQQQYAAGNPFTDAGPDGHPLR

SEQ ID NO: 1168 - DNA, 1041 bp, Myceliophthora thermophilia
atgagcacaacaccaaagcagcgccttgcgctggctatctgcgacttcctgtcgacgtcgttgaccgatggcaccctgacttccgaagagaaggactcgattgacatcgccatcaactgcattagcgagtccttcggcgtggacttctcggacaaggccgctgtctcgcaggctatcggctcgcagaacctcttccagatctactcggtctacgagaagctcaagaatgccgtcccacccaagccaacgggttccgaggcctcaacctcctcttcaccacctccttccaccgccaccccgaccgaagagcaaaagaagcaggccgaggctctgaagtccaagggcaacgcggccatggctcaaaaggattacaacgccgccatcgattactacactcaggccctggctttgcacccaggcaacgccatcttcctgtccaaccgtgcggctgcgtacagcgcggcccgggaccacgaggctgccaaggccgacgccgaggccgccgtcgccattgaccccacgtacaccaagggctggagccggctgggcctggcgcgcttcgcactgggtgatgctaagggctcgatggaggcgtaccagaagggcatcgagtatgaggggaacggtggcagcgaggcgatgaagaagggctacgagacggccaagcggagagtcgaggagattgaggcggaggaagcggcggccgctaacaattcatcgacccggaatgctggtagttcaggctcgccgggcctggctgacctggctggaatgtttggcggcggcggcggcggcggcggcatgcctgattttgcctccatcatgaacaaccccatgtttgcatccatggcccagaacctgatgagcaatccggagatgatggccaatctgatgaacaacccccgcctgcgcgagttggccgactcctttggccgcggtggcggcatgcctgacatcagctcgctcatgtcagacccgagcgttgccgagatggcccggaatttgatgggcggtgctggacggggtggtgctggaaggtga

SEQ ID NO: 1169 - protein, 346 aa, Myceliophthora thermophilia
MSTTPKQRLALAICDFLSTSLTDGTLTSEEKDSIDIAINCISESFGVDFSDKAAVSQAIGSQNLFQIYSVYEKLKNAVPPKPTGSEASTSSSPPPSTATPTEEQKKQAEALKSKGNAAMAQKDYNAAIDYYTQALALHPGNAIFLSNRAAAYSAARDHEAAKADAEAAVAIDPTYTKGWSRLGLARFALGDAKGSMEAYQKGIEYEGNGGSEAMKKGYETAKRRVEEIEAEEAAAANNSSTRNAGSSGSPGLADLAGMFGGGGGGGGMPDFASIMNNPMFASMAQNLMSNPEMMANLMNNPRLRELADSFGRGGGMPDISSLMSDPSVAEMARNLMGGAGRGGAGR

SEQ ID NO: 1170 - protein, 324 aa, Myceliophthora thermophilia
DGTLTSEEKDSIDIAINCISESFGVDFSDKAAVSQAIGSQNLFQIYSVYEKLKNAVPPKPTGSEASTSSSPPPSTATPTEEQKKQAEALKSKGNAAMAQKDYNAAIDYYTQALALHPGNAIFLSNRAAAYSAARDHEAAKADAEAAVAIDPTYTKGWSRLGLARFALGDAKGSMEAYQKGIEYEGNGGSEAMKKGYETAKRRVEEIEAEEAAAANNSSTRNAGSSGSPGLADLAGMFGGGGGGGGMPDFASIMNNPMFASMAQNLMSNPEMMANLMNNPRLRELADSFGRGGGMPDISSLMSDPSVAEMARNLMGGAGRGGAGR

SEQ ID NO: 1171 - DNA, 1068 bp, Myceliophthora thermophilia
atgaacaacgttctcacgggcgcggcgatgggcgctgccctgaccaccgctggcgtctacgcccccgacattattctctcccagttcaagtttaccgacttcaccatgctccaaacctttctcaccgccgcggcgggtagcacactactcgtgacagccgcgcaggccttacacctgacagacctaccaccgcgcgggccctccagcctcggcttgtgcggccgctacgacggcaacctagtcggcggcgccctgctcggcgcgggcatggcgatctcgggcgcctgtcccggcactgtcctcgcccagctgggcgtgggcgtctcgtctgggcggtacgcgctcggcggcgccgtggccgccggcgtcgcgtggagctggatccggaggcggcgggctccgggcagcggctgccccggctctgctcctgctcctgctcctccttcggcggtggcggacggcaaggaggaagggggggtggtcagcagcggaaagggagaccaccgccaccagacgggggccgcgaggaaggacgggcgcggagagacggtgtatgagctgctggggatcagccggggggcgctgctggtcgggctggaggccgggctggtgctggcagtcgccgcggcggtgcggtatacgcgcgccgacgccgccgaggcgaggggcctgccgccctactacgcgggcttggcgatcgccgcggcgcagctggtgtcgatcgtcctgagagggtcgctgctcggggcgtcggcggcgtttgaggagctcggcgggtggctctggggggtgcgcgagtattcgaacgtgctcttctcggccggcgtggtcggcggcgcgtggctcgtctcgcgcgccgtgccggcgctgagacccgtgaccgaggtggccatcccgcccctgcggtctgccctgggcgggttcatgatcgtgttcgggtcgcggatggccggcgggtgcacgtctgggcatggcatcagcgggctgtcgctgatgtccaactctagctttctgacggcagctgcaatctttggcgccggcggcctgacggggctcttgctgggctga

SEQ ID NO: 1172 - protein, 355 aa, Myceliophthora thermophilia
MNNVLTGAAMGAALTTAGVYAPDIILSQFKFTDFTMLQTFLTAAAGSTLLVTAAQALHLTDLPPRGPSSLGLCGRYDGNLVGGALLGAGMAISGACPGTVLAQLGVGVSSGRYALGGAVAAGVAWSWIRRRRAPGSGCPGSAPAPAPPSAVADGKEEGGVVSSGKGDHRHQTGAARKDGRGETVYELLGISRGALLVGLEAGLVLAVAAAVRYTRADAAEARGLPPYYAGLAIAAAQLVSIVLRGSLLGASAAFEELGGWLWGVREYSNVLFSAGVVGGAWLVSRAVPALRPVTEVAIPPLRSALGGFMIVFGSRMAGGCTSGHGISGLSLMSNSSFLTAAAIFGAGGLTGLLLG

SEQ ID NO: 1173 - protein, 334 aa, Myceliophthora thermophilia
PDIILSQFKFTDFTMLQTFLTAAAGSTLLVTAAQALHLTDLPPRGPSSLGLCGRYDGNLVGGALLGAGMAISGACPGTVLAQLGVGVSSGRYALGGAVAAGVAWSWIRRRRAPGSGCPGSAPAPAPPSAVADGKEEGGVVSSGKGDHRHQTGAARKDGRGETVYELLGISRGALLVGLEAGLVLAVAAAVRYTRADAAEARGLPPYYAGLAIAAAQLVSIVLRGSLLGASAAFEELGGWLWGVREYSNVLFSAGVVGGAWLVSRAVPALRPVTEVAIPPLRSALGGFMIVFGSRMAGGCTSGHGISGLSLMSNSSFLTAAAIFGAGGLTGLLLG

SEQ ID NO: 1174 - DNA, 888 bp, Myceliophthora thermophilia
atgcggggtctcttaattctcggccccgcttccgcctcttgtgccctcccaattgcgcgccactgcccttcttggggagggtttcaccaacgactcattgtcttaccaagaagaaaaaactggcgctggaaagaaactaccgccgacaagctcgcccatcactcccgccgattctttagccctccaggacactcggcccgtcacgccatcatcatcatcagcagcagcagcaacaacagcggcgccaagatgaccaagaagatccaggagcccaccatcacatcggtcacggacctccccaccgacgaggccaagtggatcgcgctccaaaagatctcgtacgtggaccagacgggcacggcgcggacgtgggaggcggcgtcgcgcaagacgcgggccaagagctcggggggtgtcgatgccgtgaccatgggcaacgtgctgctgcacccgtcgcggccgccggcgacgctgctggtggtgcagtaccggccgccgctggacgcgtacacggtcgagtggccggccgggctggtggacgagggggagacgcccgagcaggcggccgtgcgcgagttccgcgaggagacggggtacgagtgcgaggtggtcagcatcagccccgtccaggccgccgacccgggcctgagcagcgccaccctgcgcatgaccatggtggaggtgcggcttcgcgaggacgagcccctgcccgagcagcgcctcgaggacggcgagcacatccagcgcgtcgtggtccccctcgacgagctctacgaccggctcgtcgagtttagccagagggagaggaccatcgtcgcggccaagctgtttcactttgcggccggtatgcattttgccaaggggaaggcaaaagagtatggattgtga

SEQ ID NO: 1175 - protein, 295 aa, Myceliophthora thermophilia
MRGLLILGPASASCALPIARHCPSWGGFHQRLIVLPRRKNWRWKETTADKLAHHSRRFFSPPGHSARHAIIIISSSSNNSGAKMTKKIQEPTITSVTDLPTDEAKWIALQKISYVDQTGTARTWEAASRKTRAKSSGGVDAVTMGNVLLHPSRPPATLLVVQYRPPLDAYTVEWPAGLVDEGETPEQAAVREFREETGYECEVVSISPVQAADPGLSSATLRMTMVEVRLREDEPLPEQRLEDGEHIQRVVVPLDELYDRLVEFSQRERTIVAAKLFHFAAGMHFAKGKAKEYGL

SEQ ID NO: 1176 - protein, 280 aa, Myceliophthora thermophilia
LPIARHCPSWGGFHQRLIVLPRRKNWRWKETTADKLAHHSRRFFSPPGHSARHAIIIISSSSNNSGAKMTKKIQEPTITSVTDLPTDEAKWIALQKISYVDQTGTARTWEAASRKTRAKSSGGVDAVTMGNVLLHPSRPPATLLVVQYRPPLDAYTVEWPAGLVDEGETPEQAAVREFREETGYECEVVSISPVQAADPGLSSATLRMTMVEVRLREDEPLPEQRLEDGEHIQRVVVPLDELYDRLVEFSQRERTIVAAKLFHFAAGMHFAKGKAKEYGL

SEQ ID NO: 1177 - DNA, 2715 bp, Myceliophthora thermophilia
atgcgtcgtctctcgctccggtcgctccttgccgtctcgacgctggtctcgggcatcgcggccagtgtggacctggatcaccaaggatccgatgcctcgacgttgaccgggagccccaaagttgtcaccaccgtggtcatcaccaagacgctcactacctgtccgtcttcctcggctgtctgctccgactcgaccgggtccgcatcactgcctccgagctcgacagccggctcgcgcaccgaatcgtcagcgtcgtccatcagctctccatcctccagctccaccagcagcgccccgtccagcgcgtcgtccggctcgtcgtccggctcgtcgtccagcacaagcagcagcagcgctggcgtccccgcctgcaccgacttctggctcgaaaatatcaagcaccagggcgtggcgcccttcgccggctcgggctacgaggtcttccgcaacgtcaaggactacggggccaagggagacggcgtctcggacgacaccgaggccatcaaccgggccatcagcgatggcaagcggtgcggtcccggctgcaccggcagcaccaagacgcccggcctcgtctacttcccacccggcacgtacatggtgtcgggccccatcatcgacttctactacacccagctgatcggcaacccggggtgcatgcccgtgctcaaggcgacatccgactttgagggacgcttcctcctcgacaccaacccgtacggggactcgggtagcctggcctggggcgccaccaacgttttctggcgccaggtcgccaacctgatcatcgacacgaccgacgtgcccgccgagacgctcatcgcgggcattcactggcccagctcgcaggccacgtcgctgtccaacatcgtcttcaggtcgtccgccgccgaggggacgcagcaccagggcctgttcgtcgaggagggctcgggcggcttcatgggcgacctcgtcttcttcggcggcgcccaggccatgtccatcggcaaccagcagttcaccatgcgcaacatcaccgtccgcggggccaagacggccgtccagcagctgtggtcgtgggggtggacgtaccagggcgtgagcatccgcgactgcgaggtcggcttcgacttcaccgccgtcgaccagggcgacctcaaagtcgggtccgtcaccatcctcgacagcgagatcagcaacacgccgatcggcatcaagtacggcgccgccgacaccatcaccaccaccagccccgacgtgcccaacaacttcgtctttgagaacctgcgactcgacgatgtgccgacggcgatccgcgggccctcgggcaccgtcctggccggctcgtccggccagaccgtcatcgaggcctggggccgcggccacgcgtacacgccctcgtcgtcgggcccgacctccttcgagggccccgtcgcgcccaacgcgcgcccggcctcgctcgtggcggccgcggaaccgggcggggatgctgctgcctccttctcctcctcctcctcctcctcctcctcctcctccttctaccagcggtccaagccgcagtacgaggacgtgccagcgtccgagttcgtcagcgcccgggccgccggcgcgcggggcgacggcgccaccgacgacacggacgcgctcaacgacctgttcgcctcggccgcggcggccggcaagatcgtcttcctcgacgccggcatgtacgtggtcacccggacggtgcggatcccgcccggctcccgcatcgtcggcgaggccttccccgtcatcctctcgtccggcgacttcttcgcctccgcctcggcccccaagccggtcgtgcaggtgggcgcccccggcggcgaggccggccgtgtcgagtggtccaacacgatcgtgtcgacgcgcggctcgcagccgggcgccatcctgatcgaatacaacctcgactcctcatcctcctcctcctcttcctcctcctccgagccctcggggctctgggacgtgcacgcgcgcgtgggcgggttcgccgggtcggagctgcagctggcgcagtgcgccaagacgcccgagacggccatcacggccgacaacctgccgagcgggtgcgtggcggcgttcctgacgatgcacgtcacgcggtcggcggcgggcctgtacatggagaactgctggctgtgggtggcggaccacgacctcgaggagggcgccgacaaccggcagatctcggtgtacgccgggcgcggcctgctcgtcgagggcacccgcggcccgctgtggctggtcggcaccagcgtcgagcaccaccagctgtacgagtaccagctcgtcgaggccgccgacgtctacatgggccagatccagaccgagacggcctactaccagcccaacccggacggccgcctgcccttcccggcgctcgaggcctaccacgacccggtcctggccgagggcgagtccggctggggcctgcgcgtcgtcgacagcgaaggggtgctggtgtacggcgccggcctgtacagcttcttcgacaactacgacgtcaactgcatccagatcggccagggcgcccgctgtcagaggcgcatcttcagcctcgagggcgccaaccggaacgtgcgcgtgtacaacctcaacacggtcggcaccaacaagatgatcactgtggacggggtggacgtggccaactatgaggacaacatcgacggcttcgtccactcgatcgcgctgttcggcctggacgcttga

SEQ ID NO: 1178 - protein, 904 aa, Myceliophthora thermophilia
MRRLSLRSLLAVSTLVSGIAASVDLDHQGSDASTLTGSPKVVTTVVITKTLTTCPSSSAVCSDSTGSASLPPSSTAGSRTESSASSISSPSSSSTSSAPSSASSGSSSGSSSSTSSSSAGVPACTDFWLENIKHQGVAPFAGSGYEVFRNVKDYGAKGDGVSDDTEAINRAISDGKRCGPGCTGSTKTPGLVYFPPGTYMVSGPIIDFYYTQLIGNPGCMPVLKATSDFEGRFLLDTNPYGDSGSLAWGATNVFWRQVANLIIDTTDVPAETLIAGIHWPSSQATSLSNIVFRSSAAEGTQHQGLFVEEGSGGFMGDLVFFGGAQAMSIGNQQFTMRNITVRGAKTAVQQLWSWGWTYQGVSIRDCEVGFDFTAVDQGDLKVGSVTILDSEISNTPIGIKYGAADTITTTSPDVPNNFVFENLRLDDVPTAIRGPSGTVLAGSSGQTVIEAWGRGHAYTPSSSGPTSFEGPVAPNARPASLVAAAEPGGDAAASFSSSSSSSSSSSFYQRSKPQYEDVPASEFVSARAAGARGDGATDDTDALNDLFASAAAAGKIVFLDAGMYVVTRTVRIPPGSRIVGEAFPVILSSGDFFASASAPKPVVQVGAPGGEAGRVEWSNTIVSTRGSQPGAILIEYNLDSSSSSSSSSSSEPSGLWDVHARVGGFAGSELQLAQCAKTPETAITADNLPSGCVAAFLTMHVTRSAAGLYMENCWLWVADHDLEEGADNRQISVYAGRGLLVEGTRGPLWLVGTSVEHHQLYEYQLVEAADVYMGQIQTETAYYQPNPDGRLPFPALEAYHDPVLAEGESGWGLRVVDSEGVLVYGAGLYSFFDNYDVNCIQIGQGARCQRRIFSLEGANRNVRVYNLNTVGTNKMITVDGVDVANYEDNIDGFVHSIALFGLDA

SEQ ID NO: 1179 - protein, 883 aa, Myceliophthora thermophilia
SVDLDHQGSDASTLTGSPKVVTTVVITKTLTTCPSSSAVCSDSTGSASLPPSSTAGSRTESSASSISSPSSSSTSSAPSSASSGSSSGSSSSTSSSSAGVPACTDFWLENIKHQGVAPFAGSGYEVFRNVKDYGAKGDGVSDDTEAINRAISDGKRCGPGCTGSTKTPGLVYFPPGTYMVSGPIIDFYYTQLIGNPGCMPVLKATSDFEGRFLLDTNPYGDSGSLAWGATNVFWRQVANLIIDTTDVPAETLIAGIHWPSSQATSLSNIVFRSSAAEGTQHQGLFVEEGSGGFMGDLVFFGGAQAMSIGNQQFTMRNITVRGAKTAVQQLWSWGWTYQGVSIRDCEVGFDFTAVDQGDLKVGSVTILDSEISNTPIGIKYGAADTITTTSPDVPNNFVFENLRLDDVPTAIRGPSGTVLAGSSGQTVIEAWGRGHAYTPSSSGPTSFEGPVAPNARPASLVAAAEPGGDAAASFSSSSSSSSSSSFYQRSKPQYEDVPASEFVSARAAGARGDGATDDTDALNDLFASAAAAGKIVFLDAGMYVVTRTVRIPPGSRIVGEAFPVILSSGDFFASASAPKPVVQVGAPGGEAGRVEWSNTIVSTRGSQPGAILIEYNLDSSSSSSSSSSSEPSGLWDVHARVGGFAGSELQLAQCAKTPETAITADNLPSGCVAAFLTMHVTRSAAGLYMENCWLWVADHDLEEGADNRQISVYAGRGLLVEGTRGPLWLVGTSVEHHQLYEYQLVEAADVYMGQIQTETAYYQPNPDGRLPFPALEAYHDPVLAEGESGWGLRVVDSEGVLVYGAGLYSFFDNYDVNCIQIGQGARCQRRIFSLEGANRNVRVYNLNTVGTNKMITVDGVDVANYEDNIDGFVHSIALFGLDA

SEQ ID NO: 1180 - DNA, 2334 bp, Myceliophthora thermophilia
atgatcggcctaatctccctgggcctgtccgccatcgcaggcgccgctgttactcgaacacacctacatctgccgcaagcggacgttccgttgatcacggtgcaagatggaccgatcgtcctatcgtcaaccacgacagagagcgccaccctcgtcctcgattatggggctaatgtagagggcatcccgtcctttgaggtcgtaggcgctacaggcgacacgaccgttttcgagatcacgtactctgaaagcaaagccggcttggatttgtatatgggcgacgggccgatccctctagcggcggccatggacacgtaccgagtcaaccggtataacattgttggcccggagcagttcaccaatcgccatgtccaaggggcctttcgataccagaagctgaatctatcctcacccggcgagctgacgttgcagaatgtcggcgtgattcccactacccgcacgacttcgatcgacaaactgcccgggtcgttcaagagctccgacagctccattacagacatctgggcagtcggtgctagaaccattcagctgaccgaaatacccaaagattctatccccgagttttgggaaatcaccagcgagggtgccgtgatcgacagtcttgcaccccaagcaaacggggccccagatgccgtcactattgatgctggagcgaggacaattgcggcctacgtcggatcgactaccgaggatacggagctcaccagggccacggtgccgtcgaatgtgaccatggctcttggcagctggcactccgttcacgtcgaggtcgctatgaccgacatcgccataagcatcaacggcgagcgagtgctcaagtttacccagtactccaagttctatggctcctatggccttggtgcttcctttggccacaaggctgtcttcagagacctcgtcgcgaccgatcccgtgggcaccgtcacctaccagcaccccttgaacgacaagagctgcctgaaagattttcttttaggcaccaaccctctcgatgtatccgttgacggttcgcgccgagatcgtatcgcatacgctggcgacctagacatcgccgcctctgccgccctggtctccacccatggactggagtttgtcgaaggtgcgcttaaccttttggcatcgatgcaggccacgcccggcttttttatacccacagtcaagatacagcaaaggccgctttcgactcccttggacgtcaacatcacaggcctgataggatactcgtggaacttgctcacagctgtctctcacacgtacatgcatacgggtgatctcgccctggccttggagtgggcacctagaattgtgcgaatgcttgactggtcgcactcgcaaacgctgtcgaacggcctcttcaatctcagcgacgccaccttcggcggagactggaactactacgaccctgcccagtctggagtcgtcaccaagttcaatgtcctctacgcctacgcgctccaagagacggtcgggctcttggccgatgtcggtgtcgacatctctgtgtaccaagaccgtctcgctgctctacgggcagccattgataagcacctctggagtgacgagctaggcgcgtacgtctacgccgacggtatccgggacgggttcggccaagactccaatgccatcgctattcttgccggcgtcaacttggacccatcccactcgtccgaaaccatcttgtctaccctgtctagggaactttccacgcccaagggcccactatccttctcctccggcgtcctacagcacggattccagcggtacatcagcccttacgcctctgcataccatctccgcgccgccttcacatcgcagaactctaccgctgcccgggagttgcttgactcgctgtgggcgccgatgactgataccaacaacgccaactactccggctgtttctgggagaccctggacgagaccggccgccccgctttcggagtccatacgagtttgtgccacggatggagcgcgggcccgacggctgagctgagccgtttcgtgctcggtgcgcaacccaccaagcccggctgggccgagtgggcagtctctccgcagactcttggtcttacctccgcccggggtgaggtgcccacacctctcggtcctcttactgtaagctgggagttctgtggaaccctcctcaacatgtcggtcgaggctcctgccggcaccacagggttggtcaatgtcccgtacccgctgttggttccggtaacccagtccaagttcattatgaatggttctgttgtcaacggcaccactctgagggttaaagggggctcaaaggtcaccattatgcagttaaggaaatga

SEQ ID NO: 1181 - protein, 777 aa, Myceliophthora thermophilia
MIGLISLGLSAIAGAAVTRTHLHLPQADVPLITVQDGPIVLSSTTTESATLVLDYGANVEGIPSFEVVGATGDTTVFEITYSESKAGLDLYMGDGPIPLAAAMDTYRVNRYNIVGPEQFTNRHVQGAFRYQKLNLSSPGELTLQNVGVIPTTRTTSIDKLPGSFKSSDSSITDIWAVGARTIQLTEIPKDSIPEFWEITSEGAVIDSLAPQANGAPDAVTIDAGARTIAAYVGSTTEDTELTRATVPSNVTMALGSWHSVHVEVAMTDIAISINGERVLKFTQYSKFYGSYGLGASFGHKAVFRDLVATDPVGTVTYQHPLNDKSCLKDFLLGTNPLDVSVDGSRRDRIAYAGDLDIAASAALVSTHGLEFVEGALNLLASMQATPGFFIPTVKIQQRPLSTPLDVNITGLIGYSWNLLTAVSHTYMHTGDLALALEWAPRIVRMLDWSHSQTLSNGLFNLSDATFGGDWNYYDPAQSGVVTKFNVLYAYALQETVGLLADVGVDISVYQDRLAALRAAIDKHLWSDELGAYVYADGIRDGFGQDSNAIAILAGVNLDPSHSSETILSTLSRELSTPKGPLSFSSGVLQHGFQRYISPYASAYHLRAAFTSQNSTAARELLDSLWAPMTDTNNANYSGCFWETLDETGRPAFGVHTSLCHGWSAGPTAELSRFVLGAQPTKPGWAEWAVSPQTLGLTSARGEVPTPLGPLTVSWEFCGTLLNMSVEAPAGTTGLVNVPYPLLVPVTQSKFIMNGSVVNGTTLRVKGGSKVTIMQLRK

SEQ ID NO: 1182 - protein, 762 aa, Myceliophthora thermophilia
AVTRTHLHLPQADVPLITVQDGPIVLSSTTTESATLVLDYGANVEGIPSFEVVGATGDTTVFEITYSESKAGLDLYMGDGPIPLAAAMDTYRVNRYNIVGPEQFTNRHVQGAFRYQKLNLSSPGELTLQNVGVIPTTRTTSIDKLPGSFKSSDSSITDIWAVGARTIQLTEIPKDSIPEFWEITSEGAVIDSLAPQANGAPDAVTIDAGARTIAAYVGSTTEDTELTRATVPSNVTMALGSWHSVHVEVAMTDIAISINGERVLKFTQYSKFYGSYGLGASFGHKAVFRDLVATDPVGTVTYQHPLNDKSCLKDFLLGTNPLDVSVDGSRRDRIAYAGDLDIAASAALVSTHGLEFVEGALNLLASMQATPGFFIPTVKIQQRPLSTPLDVNITGLIGYSWNLLTAVSHTYMHTGDLALALEWAPRIVRMLDWSHSQTLSNGLFNLSDATFGGDWNYYDPAQSGVVTKFNVLYAYALQETVGLLADVGVDISVYQDRLAALRAAIDKHLWSDELGAYVYADGIRDGFGQDSNAIAILAGVNLDPSHSSETILSTLSRELSTPKGPLSFSSGVLQHGFQRYISPYASAYHLRAAFTSQNSTAARELLDSLWAPMTDTNNANYSGCFWETLDETGRPAFGVHTSLCHGWSAGPTAELSRFVLGAQPTKPGWAEWAVSPQTLGLTSARGEVPTPLGPLTVSWEFCGTLLNMSVEAPAGTTGLVNVPYPLLVPVTQSKFIMNGSVVNGTTLRVKGGSKVTIMQLRK

SEQ ID NO: 1183 - DNA, 165 bp, Myceliophthora thermophilia
atggttcttctttcttttaaggatattactatcgctagcttcgcccctatcgtcgttgccgtccagatggtcagacttgcctactatgaccgcgaatactcagacgccctagacattttaagccgaagctcctccccatctgaccagacggaggtttggttctag

SEQ ID NO: 1184 - protein, 54 aa, Myceliophthora thermophilia
MVLLSFKDITIASFAPIVVAVQMVRLAYYDREYSDALDILSRSSSPSDQTEVWF

SEQ ID NO: 1185 - protein, 34 aa, Myceliophthora thermophilia
VQMVRLAYYDREYSDALDILSRSSSPSDQTEVWF

SEQ ID NO: 1186 - DNA, 435 bp, Myceliophthora thermophilia
atgggcctgacagctacgccgagcattttgacgactagcaactcagccacgacgtacggaaccccgagtaccagttcatgcgcgcgaaccgcggaaaagacgaacgtacgtgggaaaactactggaagaaacactcctacctcagcattagagtacccacggcccacgtacagtgggaaggatttggaaaagagttccaataccttccaggcgacgccacgcgactgcactcgcgacacgaggcacatgcacaagtgccctagttccagtgtatggcacacgaatgccgataccactttcgcgacaaattcgaaagcaatcactggccgacccgacaaggaaatgaggacggaagcctccgccctgtggaatgggtctatgatgcaggaaacagagcggccgaattgctctggaagatcgaagcccgcgatctag

SEQ ID NO: 1187 - protein, 144 aa, Myceliophthora thermophilia
MGLTATPSILTTSNSATTYGTPSTSSCARTAEKTNVRGKTTGRNTPTSALEYPRPTYSGKDLEKSSNTFQATPRDCTRDTRHMHKCPSSSVWHTNADTTFATNSKAITGRPDKEMRTEASALWNGSMMQETERPNCSGRSKPAI

SEQ ID NO: 1188 - protein, 129 aa, Myceliophthora thermophilia
ATTYGTPSTSSCARTAEKTNVRGKTTGRNTPTSALEYPRPTYSGKDLEKSSNTFQATPRDCTRDTRHMHKCPSSSVWHTNADTTFATNSKAITGRPDKEMRTEASALWNGSMMQETERPNCSGRSKPAI

SEQ ID NO: 1189 - DNA, 1461 bp, Myceliophthora thermophilia
atgacgtcgctcagaacaggcccggccactgcgggcctgcaccgcctctacattcccgccgtgtgcgcgctgatcgccttcctcggctactactcgcaatacctgttcaacaccgacccggatctggccccgggcccgctcacccgccgcgagaccctgaccttcaacggcctcattgcctgcgtctggctaacctactaccgcgcctgcaccgtcgacccgggccgataccgcttcccgcgatcggaacagcagcaacaacaacaacatcatcatcatcatcaacctacccccgaggccgacccccgaggcccgcaccctctcctccgcccgacccgcttctgcaagaagtgcgatgcccccaagcccctccgcgcccaccactgccgccactgcggccgctgcatccccaagatggaccaccactgcccctggacgggcacctgcgtgtcgctgcagacgttcccctacttcttgcgcttccagctctacgccaacgtcgcgctgtggtacctgggcgcgctgctctggcgccgcgccgccgccgtctgggccgaccgccgcctgcccgcctacctgggcccgtcgctggccagcctggccggcctgaccgtcctgaccctcgccgacgccgccaccgccctgcccctcggcctgctcctcgtcaccaccgtccgcggctgggtcttcaacaccaccctgatcgaggactgggaggtggagcgccacgaggccctcgtgtcgcgcatggtggccgccgcctccgacggggacaccgaccccgcctcctcctcctcctcctcctccctctccttctgggccgacgacgacgccgccgtgcgcgacgccctcgcccgcgtcgagttcccctacgacctgggcgtgtttgccaacatggcccaggccatgggcacccgcaacgtgctgaggtggttcttgcccgtctttgggggcgggcccgtcgtcaacaacgagacccccggcaagggcgtcggctgggagtgggaggagaacgggttcaacgacctccccggcctgtggccgccccccgatccggaaaagatgaggcaggcgaggcgcggcccctggccgggcgcggccgcccaagaccgggatcggcgggccgaggcctgggatgcgtatcagacgccggaggagatcaaggcggcctttgcgagacggcagcgggaggaccagctgaggagagagcgcgcccgggcgctgcaggccggacagcgctccggcatcattgccgagctggaagagctgggcggcggggtggttggccagccgtcgtggacaaacgccgagggcgaccggctgtgggactacggcgtggatgaggaggtcgaggaggacatcatgccctcgcgggcagacgacgagaacgtgcccctggctgagctgatccgcaggcgcaaggtccggactcgggagggtggtgatgatgatgatggctga

SEQ ID NO: 1190 - protein, 486 aa, Myceliophthora thermophilia
MTSLRTGPATAGLHRLYIPAVCALIAFLGYYSQYLFNTDPDLAPGPLTRRETLTFNGLIACVWLTYYRACTVDPGRYRFPRSEQQQQQQHHHHHQPTPEADPRGPHPLLRPTRFCKKCDAPKPLRAHHCRHCGRCIPKMDHHCPWTGTCVSLQTFPYFLRFQLYANVALWYLGALLWRRAAAVWADRRLPAYLGPSLASLAGLTVLTLADAATALPLGLLLVTTVRGWVFNTTLIEDWEVERHEALVSRMVAAASDGDTDPASSSSSSSLSFWADDDAAVRDALARVEFPYDLGVFANMAQAMGTRNVLRWFLPVFGGGPVVNNETPGKGVGWEWEENGFNDLPGLWPPPDPEKMRQARRGPWPGAAAQDRDRRAEAWDAYQTPEEIKAAFARRQREDQLRRERARALQAGQRSGIIAELEELGGGVVGQPSWTNAEGDRLWDYGVDEEVEEDIMPSRADDENVPLAELIRRRKVRTREGGDDDDG

SEQ ID NO: 1191 - protein, 463 aa, Myceliophthora thermophilia
LIAFLGYYSQYLFNTDPDLAPGPLTRRETLTFNGLIACVWLTYYRACTVDPGRYRFPRSEQQQQQQHHHHHQPTPEADPRGPHPLLRPTRFCKKCDAPKPLRAHHCRHCGRCIPKMDHHCPWTGTCVSLQTFPYFLRFQLYANVALWYLGALLWRRAAAVWADRRLPAYLGPSLASLAGLTVLTLADAATALPLGLLLVTTVRGWVFNTTLIEDWEVERHEALVSRMVAAASDGDTDPASSSSSSSLSFWADDDAAVRDALARVEFPYDLGVFANMAQAMGTRNVLRWFLPVFGGGPVVNNETPGKGVGWEWEENGFNDLPGLWPPPDPEKMRQARRGPWPGAAAQDRDRRAEAWDAYQTPEEIKAAFARRQREDQLRRERARALQAGQRSGIIAELEELGGGVVGQPSWTNAEGDRLWDYGVDEEVEEDIMPSRADDENVPLAELIRRRKVRTREGGDDDDG

SEQ ID NO: 1192 - DNA, 1506 bp, Myceliophthora thermophilia
atggctacattaatggacctcatgtttccccgcctagattttctctggtctacgagattttgggccatttttcatacggtactctggctttggcgctacgttcgactgattgttcactgcatcagccattgggcttacaaatcgaaggagccaaactgggaaaacccgaggtacacatcccaggatgtcacggtggtcatccctaccatccataaccgccccgaagagctgcgcccctcactcgagagcatcctggcctgtaagccggcgaaattggttctcgtgacgacgtggaacaagcacgaggcgctgagccgggtggcggcgaccctgcgcatgccggatcctgcttctccggtcgagatcgaagtgctgcatgtcgataaggcgaacaagcgcctacaggtctgcaaagcgctggaagatgaccacgtcaggacgtcaatcacggtcatggccgatgacgacgtggagtggccgtcgaccttgatgccctggctcctcgcaccgttcgaggacgaccggatgggcggggtgggaacttgccaacgggtgaagcgcgtcgtcgatggagatatcatgacgcgcatcttcaactggctgggggcggcctacatcgagcgacgcaatttcgagatctcagcgacgcataacatcgacggcgggacgtcgtgcatgtccgggcgcacgggtgcttaccggaccgagatcttaaaaagctacagtttcttggacaacttcaagaatgaaaagtggggaaggtacatcctcaacgccgacgacgacaactttgtgactcggtggctggtcgctcaccagtgggagacttggatccagtataattctgagtgtgagatcgagacgacgctcgaaaacagcaccaagttcctctaccagtgctcccgctgggcaaggagcaactggagaagcaactggaccagtctggtgcgcgagagatacgtgtggacccagcagccgtggtgcacctacgcgctacatcttacgaccttcacctctctggctttcgtggtcgaccctctcttgctcttctcttgctggtggggcacggagaattgggagcctaggaatcgacacattctgctctgggcggaaatcgcattcatgtttggttttaccaaggtagtgaagctggttggtttatttcgaaagaatccgagagacatcgtctttcttccggtgtccattgtgtttggctacttccacggcctgatcaagttgtgggcactcttcacgctcaagaagacatcctggggcagccgagaggatggtgatgagcacaacactttccgcttgcaggagaagcctcgtcccagtcagagcatggcgacgccgccttacggaccagacttgccaaaggcgatcaaatacccgagattgtcgcaaccccgccgcgtggctgcgtgctcagaaaagcggaagcctattggttgcatgtctccggcggaagctccctaccagcaaacggccaaacttccagtgcactga

SEQ ID NO: 1193 - protein, 501 aa, Myceliophthora thermophilia
MATLMDLMFPRLDFLWSTRFWAIFHTVLWLWRYVRLIVHCISHWAYKSKEPNWENPRYTSQDVTVVIPTIHNRPEELRPSLESILACKPAKLVLVTTWNKHEALSRVAATLRMPDPASPVEIEVLHVDKANKRLQVCKALEDDHVRTSITVMADDDVEWPSTLMPWLLAPFEDDRMGGVGTCQRVKRVVDGDIMTRIFNWLGAAYIERRNFEISATHNIDGGTSCMSGRTGAYRTEILKSYSFLDNFKNEKWGRYILNADDDNFVTRWLVAHQWETWIQYNSECEIETTLENSTKFLYQCSRWARSNWRSNWTSLVRERYVWTQQPWCTYALHLTTFTSLAFVVDPLLLFSCWWGTENWEPRNRHILLWAEIAFMFGFTKVVKLVGLFRKNPRDIVFLPVSIVFGYFHGLIKLWALFTLKKTSWGSREDGDEHNTFRLQEKPRPSQSMATPPYGPDLPKAIKYPRLSQPRRVAACSEKRKPIGCMSPAEAPYQQTAKLPVH

SEQ ID NO: 1194 - protein, 465 aa, Myceliophthora thermophilia
IVHCISHWAYKSKEPNWENPRYTSQDVTVVIPTIHNRPEELRPSLESILACKPAKLVLVTTWNKHEALSRVAATLRMPDPASPVEIEVLHVDKANKRLQVCKALEDDHVRTSITVMADDDVEWPSTLMPWLLAPFEDDRMGGVGTCQRVKRVVDGDIMTRIFNWLGAAYIERRNFEISATHNIDGGTSCMSGRTGAYRTEILKSYSFLDNFKNEKWGRYILNADDDNFVTRWLVAHQWETWIQYNSECEIETTLENSTKFLYQCSRWARSNWRSNWTSLVRERYVWTQQPWCTYALHLTTFTSLAFVVDPLLLFSCWWGTENWEPRNRHILLWAEIAFMFGFTKVVKLVGLFRKNPRDIVFLPVSIVFGYFHGLIKLWALFTLKKTSWGSREDGDEHNTFRLQEKPRPSQSMATPPYGPDLPKAIKYPRLSQPRRVAACSEKRKPIGCMSPAEAPYQQTAKLPVH

SEQ ID NO: 1195 - DNA, 1698 bp, Myceliophthora thermophilia
atgtggtcgccgtcactctcttcgttttctgttttattggctgctctgcagcccgtcgcggcaatctggccggcaccccaaagcttgacgacgggcagctcggttctatacttgaaccagaacatcaagattccgtacacgtacggatatgtgtctcgcgagttgaccagcaaggaggtcgttcaggcaggcatttcccggacgctcgcgggcatttttgagagcaagttcgtcccttggaagctgcacaagcgcgggtccaagtgggagcccgacctgtcgcagggccagcagtggatcaagacgctggagatcgtccagaagggcaaggacgagcccagcaccttcaagcccctcgccggccaggtggacgagtcgtacaacctgacggtgagcgccaagggcgaagccaagctcgcagccgtttcgtccatcggcgtgctccgcggcctcgagaccttctcgcagctgttctaccagcactcggccggcaccttctggtacaccccgttcgcgcccgtgtcggtgcaggacgcgcccaagttcccccaccgaaccgacctgatcgacacggcgcgcaacttcctccccgtcgccgacatcctgcgcaccatcgacgccatggcctggagcaagctgaaccggctgcacgtccacgtgaccgactcccagtcgtggccgctcgtgatcccctcattgcccgaggtctcggagaagggcgcctaccacccgagccagacgtactcgcccgaggatgtcgagaagatccagacgtacggcgccgagcggggcgtcgaggtgtactttgagatcgacatgccgggccacatcggggtggtgtcgctgtcgcacccggagctgatcgtggcctacaatctgcagccctaccagtggtggtgccaggagccgccgtgcggcgccttcaagctcaacaataccgcggtcgacgcgttcctggacaagctgttcgacgacctcctgccgcggctggcgccgtactcggcctacttccacacgggcggcgacgagctcaaccggaacgactcgatgctggacgagggcatccggtccaacgacaccgaggtgctgcggccgctgctgcaaaagttcatcgacaagcagcacgcgcgcgtccgcgcggccggcctgaccccgatcacctgggaggagatcccgctcgagtgggaagtcgacatggccaaggacacggtcgtgcaatcgtggctgggcggcgacgcggtcaagacgctgaccagcaagggctatcaggtgattgacagcaactacaacttctggtacctcgactgcggccgaggccagtggctgacgtgggggaacggggcggcgttcgcccagggctacccgttcaacgactggtgcgggccgaccaagtcatggcagctagtgtaccagcacgacccgacggccgggctgacggccgaggaggccaagctcgtgctgggcggcgaggtggcactctgggccgagaccatcgacccggtcaacctggacacgctcgccttggccgcgcgccagcgccgtcggcgaggccctctgaaccggagcctggtcgaggccgccccgcggctcaacgagttccgcgagaggctggtcgccaggggagtcggggcctcgcccatccagatgaccttctgcacccagggaagggccgaggagtgcgagtttatcgtcgcttga

SEQ ID NO: 1196 - protein, 565 aa, Myceliophthora thermophilia
MWSPSLSSFSVLLAALQPVAAIWPAPQSLTTGSSVLYLNQNIKIPYTYGYVSRELTSKEVVQAGISRTLAGIFESKFVPWKLHKRGSKWEPDLSQGQQWIKTLEIVQKGKDEPSTFKPLAGQVDESYNLTVSAKGEAKLAAVSSIGVLRGLETFSQLFYQHSAGTFWYTPFAPVSVQDAPKFPHRTDLIDTARNFLPVADILRTIDAMAWSKLNRLHVHVTDSQSWPLVIPSLPEVSEKGAYHPSQTYSPEDVEKIQTYGAERGVEVYFEIDMPGHIGVVSLSHPELIVAYNLQPYQWWCQEPPCGAFKLNNTAVDAFLDKLFDDLLPRLAPYSAYFHTGGDELNRNDSMLDEGIRSNDTEVLRPLLQKFIDKQHARVRAAGLTPITWEEIPLEWEVDMAKDTVVQSWLGGDAVKTLTSKGYQVIDSNYNFWYLDCGRGQWLTWGNGAAFAQGYPFNDWCGPTKSWQLVYQHDPTAGLTAEEAKLVLGGEVALWAETIDPVNLDTLALAARQRRRRGPLNRSLVEAAPRLNEFRERLVARGVGASPIQMTFCTQGRAEECEFIVA

SEQ ID NO: 1197 - protein, 544 aa, Myceliophthora thermophilia
IWPAPQSLTTGSSVLYLNQNIKIPYTYGYVSRELTSKEVVQAGISRTLAGIFESKFVPWKLHKRGSKWEPDLSQGQQWIKTLEIVQKGKDEPSTFKPLAGQVDESYNLTVSAKGEAKLAAVSSIGVLRGLETFSQLFYQHSAGTFWYTPFAPVSVQDAPKFPHRTDLIDTARNFLPVADILRTIDAMAWSKLNRLHVHVTDSQSWPLVIPSLPEVSEKGAYHPSQTYSPEDVEKIQTYGAERGVEVYFEIDMPGHIGVVSLSHPELIVAYNLQPYQWWCQEPPCGAFKLNNTAVDAFLDKLFDDLLPRLAPYSAYFHTGGDELNRNDSMLDEGIRSNDTEVLRPLLQKFIDKQHARVRAAGLTPITWEEIPLEWEVDMAKDTVVQSWLGGDAVKTLTSKGYQVIDSNYNFWYLDCGRGQWLTWGNGAAFAQGYPFNDWCGPTKSWQLVYQHDPTAGLTAEEAKLVLGGEVALWAETIDPVNLDTLALAARQRRRRGPLNRSLVEAAPRLNEFRERLVARGVGASPIQMTFCTQGRAEECEFIVA

SEQ ID NO: 1198 - DNA, 2022 bp, Myceliophthora thermophilia
atgtcgtttctcatagctctctggcacacgctctgggacgtcgtgtggttctggcaggcgaggaccgtctcgtacttgttcgagcgctccaaactacaagagtacgcccatgacctccgtaccgcgtcgacctacgaacaatgggccgaggcggcacagaacctcgatctcggcctcggtcttgacctgtggcgccacgacccgacgagcaaggactacgacttccggctgatcaacgaacggctgcggcttatcgccaacgcccgcaaggccggagacgtctacgagctcatcaacacgctgcgcacgggactcgtccgcaacctgggcaacatcaccagccctaagcttttcaattgcgcctttgccggcaccaagcacctcattgaggaatatgtccagcagtttgtcgaggcgatccaggagatcgtcatgctgccgccgccgccacaggacgagaggcagccgacagtggaatggtttgccccggagtgggaagacggcgagctgggcgggagcggtagcagcggcgccggtagcggattcgagggtggcggtgacgagaagagcgccatcagcgctgccgccgccgcgcgtctcagcaagggcggcatggccaaggcgacactcccgacgcagcacttgctcgactttgtccacgacaccagacagggtttcggccggactgcactcgtgctgcagggcggtgccatattcggcctctgccatctcggcgtagtcaaggccctgtacttacggggcttgctgccgcgcatcatcatcggcacggcgactggagccatgatggccgccttggtcggggtccatcccgaggaggaactcccccggatactgacgggcgacggcattgatctttcggcgtttgcggccaacggtagggacccggagggccacaacaagcgggtcatgcagtccctgtggacgaagtgggctactcttatcaggagggtgcgccggttccagagggagggctactttctggatgtcaaggtcctcgaggagtgtgtccgggcgaatgtgggcgaccttaccttcgaagaggcctacaatcgcagtaagcgggtcctcaacatcaccgtcgtcacggccgggcaggagggcattccgaccctcctcaattacatcaccgcccccaatgtgctggtctggacggccgcggtggcttccaacgcctcctcgaccaccttctatggccaccggcagacgaagatcctctgcaaggacgcccacggtaacatcaccccttgggcgcccgccgacacggtcgattttcgccactggacattcgcgtcgtacactgaccgcaacgcgcccctccagcgcgtcgccggcctattcaacgtcaaccactacattgtcagccaggcgcgtccctacctgattcccttccttcagtcggacatgcacgggccgtcgacgtcgcagcaatacggcagcatagggtgggacccgcggcagcacggaagcatgttcgcggcggcgcggaccttcatcacgcgcattatcggcctggagacgcgccatcgcctgcgacagctcgaccgtctccacctcctgccgccgttgatccgccgattcctcgtcgacgagcacctgcccgggcccagcgtcacgctggtgccgcaggtcggcctgaccgactttgtgcggctgctggagacgcccacgaaggagacgctcgagtactggatcctgcgtggcgagcgcagcgtgtggccggccgtggccgcgctatgggtgcggtgtgccgtcgaaatggagctggaccgtgcgtaccaggaggtcagtaggtacaaggcgggcgacctgaggaggaaggcaagcgagattgagcagctagggagggaggtaatgggggcgaacggggagcggttggccggtgctgcaggtgagaacatggggggtcggaggagggcagcagctggtcatgacggtgcaacggccgagggcgtggagcataagcgcgaggtgcccgccgagcgcgaagacggcaaggcttag

SEQ ID NO: 1199 - protein, 673 aa, Myceliophthora thermophilia
MSFLIALWHTLWDVVWFWQARTVSYLFERSKLQEYAHDLRTASTYEQWAEAAQNLDLGLGLDLWRHDPTSKDYDFRLINERLRLIANARKAGDVYELINTLRTGLVRNLGNITSPKLFNCAFAGTKHLIEEYVQQFVEAIQEIVMLPPPPQDERQPTVEWFAPEWEDGELGGSGSSGAGSGFEGGGDEKSAISAAAAARLSKGGMAKATLPTQHLLDFVHDTRQGFGRTALVLQGGAIFGLCHLGVVKALYLRGLLPRIIIGTATGAMMAALVGVHPEEELPRILTGDGIDLSAFAANGRDPEGHNKRVMQSLWTKWATLIRRVRRFQREGYFLDVKVLEECVRANVGDLTFEEAYNRSKRVLNITVVTAGQEGIPTLLNYITAPNVLVWTAAVASNASSTTFYGHRQTKILCKDAHGNITPWAPADTVDFRHWTFASYTDRNAPLQRVAGLFNVNHYIVSQARPYLIPFLQSDMHGPSTSQQYGSIGWDPRQHGSMFAAARTFITRIIGLETRHRLRQLDRLHLLPPLIRRFLVDEHLPGPSVTLVPQVGLTDFVRLLETPTKETLEYWILRGERSVWPAVAALWVRCAVEMELDRAYQEVSRYKAGDLRRKASEIEQLGREVMGANGERLAGAAGENMGGRRRAAAGHDGATAEGVEHKREVPAEREDGKA

SEQ ID NO: 1200 - protein, 648 aa, Myceliophthora thermophilia
LFERSKLQEYAHDLRTASTYEQWAEAAQNLDLGLGLDLWRHDPTSKDYDFRLINERLRLIANARKAGDVYELINTLRTGLVRNLGNITSPKLFNCAFAGTKHLIEEYVQQFVEAIQEIVMLPPPPQDERQPTVEWFAPEWEDGELGGSGSSGAGSGFEGGGDEKSAISAAAAARLSKGGMAKATLPTQHLLDFVHDTRQGFGRTALVLQGGAIFGLCHLGVVKALYLRGLLPRIIIGTATGAMMAALVGVHPEEELPRILTGDGIDLSAFAANGRDPEGHNKRVMQSLWTKWATLIRRVRRFQREGYFLDVKVLEECVRANVGDLTFEEAYNRSKRVLNITVVTAGQEGIPTLLNYITAPNVLVWTAAVASNASSTTFYGHRQTKILCKDAHGNITPWAPADTVDFRHWTFASYTDRNAPLQRVAGLFNVNHYIVSQARPYLIPFLQSDMHGPSTSQQYGSIGWDPRQHGSMFAAARTFITRIIGLETRHRLRQLDRLHLLPPLIRRFLVDEHLPGPSVTLVPQVGLTDFVRLLETPTKETLEYWILRGERSVWPAVAALWVRCAVEMELDRAYQEVSRYKAGDLRRKASEIEQLGREVMGANGERLAGAAGENMGGRRRAAAGHDGATAEGVEHKREVPAEREDGKA

SEQ ID NO: 1201 - DNA, 435 bp, Myceliophthora thermophilia
atgggcaggctgatcaagaaccactgggcaaggctcattgtcctctcggcagcaatgtatcaggttgctgccgcggtggaatcgtacttctggcccaaaatcttttgggatttcctcacgaagacgcttgatccggcggtgagaccgataccggtccttcaaacgatcaatctcatcttcggcatgatcctcctcgcatgggagtggccgctcagcttcatcgccggctcaagtatccaccgcagcctcgaagcccgccttgctttcctcccattgaccgccctcgccgcggcgatgatataccaaggcacgaacgcggccatctactacgtgactgggctgggagtctacttctgggcgtacagtgaaggagagatgatatgcgcgaagccgtggactcttcctcaaaggaccccgcggggtccgcgtgtctag

SEQ ID NO: 1202 - protein, 144 aa, Myceliophthora thermophilia
MGRLIKNHWARLIVLSAAMYQVAAAVESYFWPKIFWDFLTKTLDPAVRPIPVLQTINLIFGMILLAWEWPLSFIAGSSIHRSLEARLAFLPLTALAAAMIYQGTNAAIYYVTGLGVYFWAYSEGEMICAKPWTLPQRTPRGPRV

SEQ ID NO: 1203 - protein, 119 aa, Myceliophthora thermophilia
VESYFWPKIFWDFLTKTLDPAVRPIPVLQTINLIFGMILLAWEWPLSFIAGSSIHRSLEARLAFLPLTALAAAMIYQGTNAAIYYVTGLGVYFWAYSEGEMICAKPWTLPQRTPRGPRV

SEQ ID NO: 1204 - DNA, 621 bp, Myceliophthora thermophilia
atgcgtgtcgcctcgatcctcctcgccgctggcctcgccgccttcgtgaacgcgcagagcaccaccagcggcggtaacgcccccagcaccacgcaggacgccgcccaggctgccgccagctcggcccaggccgaggtccttcgctgcctggaggcgtgcaaggctggcgacgttgattgccagtctcactgcattacggtcccctcgccgaacgatgcacaggtcaacgccaccaacacctgcgtcgctgcctgtccccagggcaagggcagcgaggctgacaccgaggcgtatcgccagtgcgtcggccgctgcatcggcgagaactactacacctcgtcggccggcaccccgcggccgacgggcagcaccggtggcggtagcagcagcggcaatggcaacagcggcagcgacaacgacaacgacaatgacaacgacaatgacaacggcggcgacaacgatagcgacagcaacagcccgtccggcaccagcggcaacggggcttcccggacctcgactggctccgcggcggcgacttcgagcggtgccgctgccatgattggtgcttcgtccggtgtgattggagctgtcggcttcatggctgctgttctcgctctctaa

SEQ ID NO: 1205 - protein, 206 aa, Myceliophthora thermophilia
MRVASILLAAGLAAFVNAQSTTSGGNAPSTTQDAAQAAASSAQAEVLRCLEACKAGDVDCQSHCITVPSPNDAQVNATNTCVAACPQGKGSEADTEAYRQCVGRCIGENYYTSSAGTPRPTGSTGGGSSSGNGNSGSDNDNDNDNDNDNGGDNDSDSNSPSGTSGNGASRTSTGSAAATSSGAAAMIGASSGVIGAVGFMAAVLAL

SEQ ID NO: 1206 - protein, 188 aa, Myceliophthora thermophilia
QSTTSGGNAPSTTQDAAQAAASSAQAEVLRCLEACKAGDVDCQSHCITVPSPNDAQVNATNTCVAACPQGKGSEADTEAYRQCVGRCIGENYYTSSAGTPRPTGSTGGGSSSGNGNSGSDNDNDNDNDNDNGGDNDSDSNSPSGTSGNGASRTSTGSAAATSSGAAAMIGASSGVIGAVGFMAAVLAL

SEQ ID NO: 1207 - DNA, 1755 bp, Myceliophthora thermophilia
atgatttccgtctggggcggaatggccactgcggtggccctttgtctggcgtttgctgccttgcaagcgtcgtcgtcctccttctcgacgccgatacagagacgtagatccgagacaaggctgtctctctggcgggatgcaaccacccggtgccacgagacctggctggacccggtccgcgggacccaacctctgtctggcttgctcgcccgccctctgagcgtggtgggtaagagggactgtctcgccaatgggtccaactactgcttcggaaacgacgtcgacttctgccccgactgtgggaactgctgcgtcgacagcaagatctgttgtgggcatgggaaaaccgtcacgcgggttgcaacgcagcgagcgaccattgtcatagttgagctcgagacatccaccttcgtctcttccaccgaagtcacaatatcggccgctgcgacgcagaccgtcgttgtctgggtgacggcaaccgctgttgagaagagggccgctgccgatgcggccaaacttgggctcggaaagggacagtatttgttgccagcgccgagccattctggaacacgcattccgagacggtcacccatccttgaagacgactttgcccctattccaccgatacaagcgcggcaaggtaccgccgcaactgttaccgactatgtcaccaagaccgtcgacgtgacgagcatttcctctgttctagtcaccgtccatacaacctcgacagacgtcacaaccatatatcagaccaacacccggtgcgtcccgtccaaaagggaatgggtaggaatgaagaccattcctgtccacgaagcctttaaacgttgctccgtggacatgctaacgcttcccagcgtcctcaaagcagaggcgacgaccaccgtgacgcttaccgtcactcttgtatcccatccgcccgaggtaattaccttcactaaaacagccggccttattcctcctccgccaactgcgtcccaagacgattcgcccaccgcatcgtcctccgccgaatcgcgcgctctctcaaacccagccatagctggcatcgcagctggcagcagcgtcctcgctctcttcttggtaggctttgtcgtcctgtcaatccgtcgccggtgtcggtggcgcaccgcccacccaccagcagactccgtcaagttcggctatgaccgcggcaacaacatgatcgactatcgccgtcgctccggtgaggacgatacgatgccgcccaaatcaagacggagccggagcagtaccacaactaccgcgcccaggtccgacaccataccgccacgataccagcagcccactctgccgcgcatcctcccgcacttcaccacaaccgccgcccaccatgacaccgagtacaagctccccgcttctcttttgtccgccagcgtcgcgtataacggggaagaatcgaggggagcaggagggaacggctacaacacgggagcgggccagccttgcaatcagcggccaggcaatgactgtggtggtggccggcacgagagaagtgcatcggggtatacgacgctggcgggcacgccgtcgcccacaagtcctgcttttgctacggtgcagccgcaacaccagcagcaccagcagcaccagcagacgcagaggcgggcgttttgcgagatccctccggagagtcccgggaggacgcactgggccgataccccggcggccaaaagggggtcggaggcggagcatggccgaggcggtcgtgaccggtggagctcatggtga

SEQ ID NO: 1208 - protein, 584 aa, Myceliophthora thermophilia
MISVWGGMATAVALCLAFAALQASSSSFSTPIQRRRSETRLSLWRDATTRCHETWLDPVRGTQPLSGLLARPLSVVGKRDCLANGSNYCFGNDVDFCPDCGNCCVDSKICCGHGKTVTRVATQRATIVIVELETSTFVSSTEVTISAAATQTVVVWVTATAVEKRAAADAAKLGLGKGQYLLPAPSHSGTRIPRRSPILEDDFAPIPPIQARQGTAATVTDYVTKTVDVTSISSVLVTVHTTSTDVTTIYQTNTRCVPSKREWVGMKTIPVHEAFKRCSVDMLTLPSVLKAEATTTVTLTVTLVSHPPEVITFTKTAGLIPPPPTASQDDSPTASSSAESRALSNPAIAGIAAGSSVLALFLVGFVVLSIRRRCRWRTAHPPADSVKFGYDRGNNMIDYRRRSGEDDTMPPKSRRSRSSTTTTAPRSDTIPPRYQQPTLPRILPHFTTTAAHHDTEYKLPASLLSASVAYNGEESRGAGGNGYNTGAGQPCNQRPGNDCGGGRHERSASGYTTLAGTPSPTSPAFATVQPQHQQHQQHQQTQRRAFCEIPPESPGRTHWADTPAAKRGSEAEHGRGGRDRWSSW

SEQ ID NO: 1209 - protein, 561 aa, Myceliophthora thermophilia
SSSSFSTPIQRRRSETRLSLWRDATTRCHETWLDPVRGTQPLSGLLARPLSVVGKRDCLANGSNYCFGNDVDFCPDCGNCCVDSKICCGHGKTVTRVATQRATIVIVELETSTFVSSTEVTISAAATQTVVVWVTATAVEKRAAADAAKLGLGKGQYLLPAPSHSGTRIPRRSPILEDDFAPIPPIQARQGTAATVTDYVTKTVDVTSISSVLVTVHTTSTDVTTIYQTNTRCVPSKREWVGMKTIPVHEAFKRCSVDMLTLPSVLKAEATTTVTLTVTLVSHPPEVITFTKTAGLIPPPPTASQDDSPTASSSAESRALSNPAIAGIAAGSSVLALFLVGFVVLSIRRRCRWRTAHPPADSVKFGYDRGNNMIDYRRRSGEDDTMPPKSRRSRSSTTTTAPRSDTIPPRYQQPTLPRILPHFTTTAAHHDTEYKLPASLLSASVAYNGEESRGAGGNGYNTGAGQPCNQRPGNDCGGGRHERSASGYTTLAGTPSPTSPAFATVQPQHQQHQQHQQTQRRAFCEIPPESPGRTHWADTPAAKRGSEAEHGRGGRDRWSSW

SEQ ID NO: 1210 - DNA, 1965 bp, Myceliophthora thermophilia
atggcatctctctcactccgggctctcctcgggtttgttggcgccacggcagcggtgaccgtgaccgtggccagctctggcggacatgccacttctccgtacatgtacggtatcatgtttgaggacattaaccagagtggcgatggtggcttgtacgccgagttgatctcgaaccgggcctttcaaaacgagtcgctaaagtcctggagcgccgtgggcgacagcacgctggcgctcgacaccaccacgccgctgtcgtgggccctgcctcgctcggtccgggtcaaggggggaaagggcaaggccggcctgaggaactcgggctactggggcatcgacgtcaagcacaccgacacgtacaccggcagcttctactcgtacggcgagtacaggggtagcttcaccgcctccctcgtgtccgacatcaccaacgagacgctggccatcaccaagatcaagtccaagtcggtcgccaatgcctggacgaagcacgagttcaagttgcacccgaccaagagcgcggcgaacagcaacaacagcttcgtcctcgagttccgccccagccatgagacggagctcaagttcaacctgatcagcctcttccccccaacatacaacaacaggccgaacggtatgcgccgggacttgatggagaagctccgtgacctcaagccgagtttccttcggatacctggcggcaacaacctcgagggcaactttgccggcaaccactggaactggtccgccacgatcggcccgctgattgagcggcccggccgcatgggcgtgtgggggtacgagaacacggatgggctcggcctggtcgagtacatgcactgggcggaggacttgggcgtcgacgtcgtgctcggggtggccgcgggtctctacctgaacggcgacgtcgttcccgaggaggagctggacttcttcgtgcaggacgcgctcaacgagctcgagttcctgatgggcgacgtctcgactccgtacggcgccctgcgcgccaagctcggctaccccaggccgtggaagatcaagttcgtcgagatcggcaacgaagacaacctctggggcggcctcgactcgtacaagagctaccgactgagggccttctacgacgccatcaaggccaagtacccggacatcttcatcttctcatcgaccgacgaggtcgtctacaagaagtcgggccgcgattaccacaagtacacgcgtccggactactccgtctcccagttccacctgtttgacaactggactgcggagcaccccgtcctcatcggcgagtacgccaccatccagaacaacacgggcaagctcgaggacacggactgggacgcgcccaagaacgcgtggtccaactggatcggctccgtcgccgaggccgtcttcctgctcggcgccgagcgcaacgccgacaagatctggggcaccgccttcgcgccgctgttccagaacctcaacaactaccagtgggcccccgacctgatctccttcaccgccgacccggccgacaccaccgtcagcgtgtcgtaccccatcatccagctcttctcggagcaccgcatcacccacaccctcccggccgcgtccccggacgggttcggcccgctgtactgggccgccggtcgcggcggcctcggcggcggcggcggcggcggcggcggcggcggcggtcacgtgtcctcctcctcctcctcctacatcctcaaggtggccgtttacaacagcaccgggtccgaggacgtgccggtgagcgtgcgcttcgagggcctcccgaagggcagccccgcaaccctgacggtgctgacggcggccggcagcgacccctgggccaagaacacgcctggccgtcccgacgccgtcaacaagaccatccagcacctgcgggctggcaagcacggcgagatcgacttcagcctgcccgacctgtcggtcgccgtcttggttgcgcgggggaagtga

SEQ ID NO: 1211 - protein, 654 aa, Myceliophthora thermophilia
MASLSLRALLGFVGATAAVTVTVASSGGHATSPYMYGIMFEDINQSGDGGLYAELISNRAFQNESLKSWSAVGDSTLALDTTTPLSWALPRSVRVKGGKGKAGLRNSGYWGIDVKHTDTYTGSFYSYGEYRGSFTASLVSDITNETLAITKIKSKSVANAWTKHEFKLHPTKSAANSNNSFVLEFRPSHETELKFNLISLFPPTYNNRPNGMRRDLMEKLRDLKPSFLRIPGGNNLEGNFAGNHWNWSATIGPLIERPGRMGVWGYENTDGLGLVEYMHWAEDLGVDVVLGVAAGLYLNGDVVPEEELDFFVQDALNELEFLMGDVSTPYGALRAKLGYPRPWKIKFVEIGNEDNLWGGLDSYKSYRLRAFYDAIKAKYPDIFIFSSTDEVVYKKSGRDYHKYTRPDYSVSQFHLFDNWTAEHPVLIGEYATIQNNTGKLEDTDWDAPKNAWSNWIGSVAEAVFLLGAERNADKIWGTAFAPLFQNLNNYQWAPDLISFTADPADTTVSVSYPIIQLFSEHRITHTLPAASPDGFGPLYWAAGRGGLGGGGGGGGGGGGHVSSSSSSYILKVAVYNSTGSEDVPVSVRFEGLPKGSPATLTVLTAAGSDPWAKNTPGRPDAVNKTIQHLRAGKHGEIDFSLPDLSVAVLVARGK

SEQ ID NO: 1212 - protein, 636 aa, Myceliophthora thermophilia
VTVTVASSGGHATSPYMYGIMFEDINQSGDGGLYAELISNRAFQNESLKSWSAVGDSTLALDTTTPLSWALPRSVRVKGGKGKAGLRNSGYWGIDVKHTDTYTGSFYSYGEYRGSFTASLVSDITNETLAITKIKSKSVANAWTKHEFKLHPTKSAANSNNSFVLEFRPSHETELKFNLISLFPPTYNNRPNGMRRDLMEKLRDLKPSFLRIPGGNNLEGNFAGNHWNWSATIGPLIERPGRMGVWGYENTDGLGLVEYMHWAEDLGVDVVLGVAAGLYLNGDVVPEEELDFFVQDALNELEFLMGDVSTPYGALRAKLGYPRPWKIKFVEIGNEDNLWGGLDSYKSYRLRAFYDAIKAKYPDIFIFSSTDEVVYKKSGRDYHKYTRPDYSVSQFHLFDNWTAEHPVLIGEYATIQNNTGKLEDTDWDAPKNAWSNWIGSVAEAVFLLGAERNADKIWGTAFAPLFQNLNNYQWAPDLISFTADPADTTVSVSYPIIQLFSEHRITHTLPAASPDGFGPLYWAAGRGGLGGGGGGGGGGGGHVSSSSSSYILKVAVYNSTGSEDVPVSVRFEGLPKGSPATLTVLTAAGSDPWAKNTPGRPDAVNKTIQHLRAGKHGEIDFSLPDLSVAVLVARGK

SEQ ID NO: 1213 - DNA, 813 bp, Myceliophthora thermophilia
atgctcgcatcgacagcgacgaccatgctccgcgcgggcgccggccgctccgccggtgccctccagccaactctccttcgcaccgccgcctgcccgtactccgcgggcctctccgtctccccgatctcgatggtcgcgagccccacgaaagagacccagaaccgccgcgtgtcgacgacgacgacgacgaggccgaccgcctcgttcctcctcatcaagcgcggcgtcgcccagcaaccgccgcgccgcgccgcctccacccaccaccaccagcacgcgcccaccccggacgccgaggccgacgcccgcgccgccgatgcggcggccaaggcggcggcggcggcgcacccggagcaggtggtgctcgactggaacaccttcttccagctgcgcaaggcgcggcggcggtggcagtcggcgttcagcgtgctcgggtcgctggcggccgggtcgggcggcgcggtggcgctcagctcgggcgcggccgacagcgtggtcggccagatcccgctcgaccccctcatcacgctcggcctcatgaccatgagctgcgccgcgctcggctggctggtcggccccatcctgggcacgaccgtgttcaacgcgctcaagagcaagtacaagggccccatggccgtcaaggagagcgagttcttcgccaggatcaagaagcaccgggtggatccgagtgcgagttcggtgcggaatccagtgcccgacttctacggtgaaaagatctcgagtgtggctggctaccggcaatggctgagggaccagagggcgttcaatcggaagaagacgggcgcgatataa

SEQ ID NO: 1214 - protein, 270 aa, Myceliophthora thermophilia
MLASTATTMLRAGAGRSAGALQPTLLRTAACPYSAGLSVSPISMVASPTKETQNRRVSTTTTTRPTASFLLIKRGVAQQPPRRAASTHHHQHAPTPDAEADARAADAAAKAAAAAHPEQVVLDWNTFFQLRKARRRWQSAFSVLGSLAAGSGGAVALSSGAADSVVGQIPLDPLITLGLMTMSCAALGWLVGPILGTTVFNALKSKYKGPMAVKESEFFARIKKHRVDPSASSVRNPVPDFYGEKISSVAGYRQWLRDQRAFNRKKTGAI

SEQ ID NO: 1215 - protein, 240 aa, Myceliophthora thermophilia
CPYSAGLSVSPISMVASPTKETQNRRVSTTTTTRPTASFLLIKRGVAQQPPRRAASTHHHQHAPTPDAEADARAADAAAKAAAAAHPEQVVLDWNTFFQLRKARRRWQSAFSVLGSLAAGSGGAVALSSGAADSVVGQIPLDPLITLGLMTMSCAALGWLVGPILGTTVFNALKSKYKGPMAVKESEFFARIKKHRVDPSASSVRNPVPDFYGEKISSVAGYRQWLRDQRAFNRKKTGAI

SEQ ID NO: 1216 - DNA, 429 bp, Myceliophthora thermophilia
atgccaacagagtcgccactgagtttgtcgacggcaaggctcagcacggccgctcagacaacggccgcccacaacaccgtgagaatcaacaccgacttctacagagtaggcgttcttgcatttgctgatcgatctattatccgtccccggtatgctgagctcgcgagacagggctgtgacacggccgcgtccgattgtggccgccggggcttttgccggagcagcgcctcgcgcgaggggaagctgttgtccagcagctacgctggcttctctcataccgtggcgtcgctttcctgtgattgcggcgaagtctctgtcgaggtgttcggctccagagtgccgggcccatccctcccaatcacagctcggctgttagccgccggccccttggggcggccgagttggccatggccccccctgttgcattga

SEQ ID NO: 1217 - protein, 142 aa, Myceliophthora thermophilia
MPTESPLSLSTARLSTAAQTTAAHNTVRINTDFYRVGVLAFADRSIIRPRYAELARQGCDTAASDCGRRGFCRSSASREGKLLSSSYAGFSHTVASLSCDCGEVSVEVFGSRVPGPSLPITARLLAAGPLGRPSWPWPPLLH

SEQ ID NO: 1218 - protein, 119 aa, Myceliophthora thermophilia
HNTVRINTDFYRVGVLAFADRSIIRPRYAELARQGCDTAASDCGRRGFCRSSASREGKLLSSSYAGFSHTVASLSCDCGEVSVEVFGSRVPGPSLPITARLLAAGPLGRPSWPWPPLLH

SEQ ID NO: 1219 - DNA, 1656 bp, Myceliophthora thermophilia
atgttccggaacgccctccgacagagcacacgcgccgtcggcgccctctctgccacgagcagagtcgccgcacgaaatgccgcacccgccgtcgctgccctccaaacccgcacatacgccgaagccagggcctcgccgaccgaggtctcgtccattctcgagcagagaatccgcggcgtccaggaggagtccggccttgccgagactggtcgcgtcctgtctgtcggtgatggtatcgcccgtgtgcacggcttggccaacgtgcaggccgaggagctcgtcgagttcgcctccggcgtcaagggcatgtgcatgaacctcgaggccggccaggtcggtgtcgtgcttttcggttctgaccgtctcgtcaaggagggcgagaccgtcaagcgtaccggtgctatcgtcgatgtccccgtcggccccgagcttctcggccgtgtcatcgatgccctcggtaaccccatcgatggcaagggccccatcaacgccaaggagaggcgccgtgcccagctcaaggctcccggcattctcccccgcaagtcggtcaaccagcccgtgcagaccggtctcaagtctgtcgacgccatggttcccatcggccgtggccagcgtgagttgatcattggtgatcgtcagaccggcaagactgccgtcgccctcgacaccatcctcaaccagaagcggtggaacaacggcaccgacgagtcgaagaagctctactgcatctacgccgccgtcggccagaagcgctccaccgtcgcccagctcgtcaagacgctcgaggagaacgatgccatgaagtactcgattgtcatcgccgccactgcctccgaggccgcccctctgcagtaccttgctcctttcaccgctgctgctgtcggggagcactttcgtgaccatggaaagcactcgcttgtgattttcgacgatctctccaagcaggctgttgcgtaccgtcagatgtctctgctgcttcgccgtcctcccggacgtgaggcgtaccccggtgacgttttctacctccactcccgtctgctggagcgtgcggccaagatgaacgacaagcacggtggtggttccatgactgcccttcccatcattgagacccagggtggtgatgtgtctgcctacattcccaccaacgtcatttccatcaccgatggccagatcttcctggagtctgagctcttctacaagggtgtgcgtccggccatcaacgtcggtctctccgtctctcgtgtcggttccgctgcccagctcaaggccatgaagcaagtcgccggctcgctcaagcttttcttggcccaataccgtgaagtcgctgccttcgcccagttcggctcggatctcgatgccgctaccaagcagaccctcgcccgtggtgagcggttgaccgagctcctcaagcagaagcagtactcgccctacgccgtcaacgagatggttcccgtcatcttcgccggtgtcaacggctacctcgactccgtccctgttaacaagatccagcagtgggagactgacttccttgcccacctcaagaccaacgaggccgagcttatggccacgatcgaaaaggagggtgccatcagccaggagctggagaagaagttgagggaaatcatccctgccttcgtcaagagcttcctgggttaa

SEQ ID NO: 1220 - protein, 551 aa, Myceliophthora thermophilia
MFRNALRQSTRAVGALSATSRVAARNAAPAVAALQTRTYAEARASPTEVSSILEQRIRGVQEESGLAETGRVLSVGDGIARVHGLANVQAEELVEFASGVKGMCMNLEAGQVGVVLFGSDRLVKEGETVKRTGAIVDVPVGPELLGRVIDALGNPIDGKGPINAKERRRAQLKAPGILPRKSVNQPVQTGLKSVDAMVPIGRGQRELIIGDRQTGKTAVALDTILNQKRWNNGTDESKKLYCIYAAVGQKRSTVAQLVKTLEENDAMKYSIVIAATASEAAPLQYLAPFTAAAVGEHFRDHGKHSLVIFDDLSKQAVAYRQMSLLLRRPPGREAYPGDVFYLHSRLLERAAKMNDKHGGGSMTALPIIETQGGDVSAYIPTNVISITDGQIFLESELFYKGVRPAINVGLSVSRVGSAAQLKAMKQVAGSLKLFLAQYREVAAFAQFGSDLDAATKQTLARGERLTELLKQKQYSPYAVNEMVPVIFAGVNGYLDSVPVNKIQQWETDFLAHLKTNEAELMATIEKEGAISQELEKKLREIIPAFVKSFLG

SEQ ID NO: 1221 - protein, 527 aa, Myceliophthora thermophilia
RNAAPAVAALQTRTYAEARASPTEVSSILEQRIRGVQEESGLAETGRVLSVGDGIARVHGLANVQAEELVEFASGVKGMCMNLEAGQVGVVLFGSDRLVKEGETVKRTGAIVDVPVGPELLGRVIDALGNPIDGKGPINAKERRRAQLKAPGILPRKSVNQPVQTGLKSVDAMVPIGRGQRELIIGDRQTGKTAVALDTILNQKRWNNGTDESKKLYCIYAAVGQKRSTVAQLVKTLEENDAMKYSIVIAATASEAAPLQYLAPFTAAAVGEHFRDHGKHSLVIFDDLSKQAVAYRQMSLLLRRPPGREAYPGDVFYLHSRLLERAAKMNDKHGGGSMTALPIIETQGGDVSAYIPTNVISITDGQIFLESELFYKGVRPAINVGLSVSRVGSAAQLKAMKQVAGSLKLFLAQYREVAAFAQFGSDLDAATKQTLARGERLTELLKQKQYSPYAVNEMVPVIFAGVNGYLDSVPVNKIQQWETDFLAHLKTNEAELMATIEKEGAISQELEKKLREIIPAFVKSFLG

SEQ ID NO: 1222 - DNA, 243 bp, Myceliophthora thermophilia
atggattcatcactgcatgaggtctggcaggcagcagctggctcgccctttgtcccaaccgtcggcaaggacagccaattcatcgtcgccttcgttctgctgctgaccggcctctccctcggcggcgcatttactctgaaccgatcagtcctgaacatacctcttctcgccgtcccagcatccctagctcttgcgtatgtcgactttcccctgctcctccatcctcagcaagactcgaattaa

SEQ ID NO: 1223 - protein, 80 aa, Myceliophthora thermophilia
MDSSLHEVWQAAAGSPFVPTVGKDSQFIVAFVLLLTGLSLGGAFTLNRSVLNIPLLAVPASLALAYVDFPLLLHPQQDSN

SEQ ID NO: 1224 - protein, 37 aa, Myceliophthora thermophilia
FTLNRSVLNIPLLAVPASLALAYVDFPLLLHPQQDSN

SEQ ID NO: 1225 - DNA, 384 bp, Myceliophthora thermophilia
atgccccgagtccaagtttggtgggtgattgtgcagcaaacggtgggcaaggaaccatctggccttcgaccagctccgtttgggcggcagagagatcaggatttgtcgctggcgaatcttgagctgcaagatatccaagatttccaggccaggacaggccagagaggggagggaacgtcgaccatggcggccgcgctctgcccgggcgcgatctggccctccgcaacgctcttgcacaagttgtctctcaagtatcaagatgccacccagacaagtaaagaaagctgtattcgagtgaaacaaaaccggcgggcttgcttcgggcccgacgggaatgccagaaaacccgtccaggacgggtttactactccgtatagagcgtag

SEQ ID NO: 1226 - protein, 127 aa, Myceliophthora thermophilia
MPRVQVWWVIVQQTVGKEPSGLRPAPFGRQRDQDLSLANLELQDIQDFQARTGQRGEGTSTMAAALCPGAIWPSATLLHKLSLKYQDATQTSKESCIRVKQNRRACFGPDGNARKPVQDGFTTPYRA

SEQ ID NO: 1227 - protein, 111 aa, Myceliophthora thermophilia
KEPSGLRPAPFGRQRDQDLSLANLELQDIQDFQARTGQRGEGTSTMAAALCPGAIWPSATLLHKLSLKYQDATQTSKESCIRVKQNRRACFGPDGNARKPVQDGFTTPYRA

SEQ ID NO: 1228 - DNA, 2085 bp, Myceliophthora thermophilia
atggcgctacgacatgccgcgacggcggcgctcgccggcctttcctcaagcgctgcagccttgtacatcaatggttcggtcacggcgccctgcgactcgccaatctactgccatggcgaactgctcaaaggcgtcgaattggcgcatcccttcgtcgacagcaagacatttgtggacatgcccacgctcaagccggtagacgaagtgcttgcagcgttcagcaagttgcgccagccgctgtctaacaactcggagctcaacaacttcctggccgaatactttgccccggctggacacgagctcgaagaggtgcccaagggcgagttgcagatcgaccccaagttcctcaacaagctcgaggatcgcaccatcaaagaattcgtcagcaaggtgatcgacatctggcccgaccttaccaggcgctatgccggcccgggcgactgctccggatgcgccaacagcttcatccccgtgaaccgcacgttcgtcgtggctggcggccgcttccgggagccctactactgggactcgtactggattctcgagggcctcttgcgcaccggcggtgccttcacccagatctccaagaacatcatcgagaacttcctcgactttatcgacacgatcggcttcatccccaacggcgccaggatctactacttgaacaggtctcagccccctctcctgacgcggatggtgaagagctacgtcgactacaccaacgacacgagcatcctggagagggccctaccgctgttgatcaaggagcacgacttcttcaccaacaaccggagcgtgtccgtcacggcgtcgaacggcaagacgtatactctgcacaggtaccacgttgaaaacaaccagccgcgcccggagtcgtaccgggaggactacattaccgctaataacgggtcctactacgcggcctcgggcataatatacccggtcaagacaccccttaacgagacggaaaaggccgtgttgtactccaacctagccagcggcgccgagtccggctgggattacaccgcgcgatggcttcgggttcccgacgacgctgcgagggacgtctacttcccgctccgctcgctgaatgttcgcgagatggtccccgttgacctcaactccatcctctacgagaacgaggttatcatcgccgagtacctcgaaaaggccggcaactcctcggaagccaagcggttcgcctcggctgccaagcagcgcagcgaagccatgtacaatctcatgtggaacgccacgcactggtcctactttgactacaatctgacctccaacgcgcaaaacattttcgttccggccgacgaggacaccgcctccttcgaccgatatgcggctccgccaggtcagcaggtcttgttccacgtcgcccagctctaccccttctggaccggcgcggcccccgcccacctcaagtctaaccccctcgcggtgcaaaaagcctatgcccgcgtgtcgcgcaggctcgacaccaagaagggcgctatcgccgcgaccaactaccgcaccggccagcagtgggaccagcccaacgtctggcctccgctgcagcacgtcctgatgcagggcctgcttaacaccccggccacctttggcgagtctgacccggcttaccagggcgtgcagaagctggccttgcgcctcgcccagcgctacttggactccaccttttgcacttggtatgccacgggcggctcgaccagcgacttcccacagctacagggcgtcagcccggacgctacgggcatcatgtttgagaagtacgccgacagcgctaccaacgtggccggcggcggcggcgagtatgaggtcgtcgagggtttcgggtggaccaacggcgtgctgatctgggccgctgatgtcttcggtaacaagctcaagcgcccagactgcggcaacatcacggccgcgcacactcactctgaggctaagaggagcctgggagatggcgggctggcgagaagggcggtggagcttgatccgtgggatgccgcgtggaccaagatgtttgggcggagcaagctccggaggagagaggcggaggacgtgcggaagcggtggtcgagttga

SEQ ID NO: 1229 - protein, 694 aa, Myceliophthora thermophilia
MALRHAATAALAGLSSSAAALYINGSVTAPCDSPIYCHGELLKGVELAHPFVDSKTFVDMPTLKPVDEVLAAFSKLRQPLSNNSELNNFLAEYFAPAGHELEEVPKGELQIDPKFLNKLEDRTIKEFVSKVIDIWPDLTRRYAGPGDCSGCANSFIPVNRTFVVAGGRFREPYYWDSYWILEGLLRTGGAFTQISKNIIENFLDFIDTIGFIPNGARIYYLNRSQPPLLTRMVKSYVDYTNDTSILERALPLLIKEHDFFTNNRSVSVTASNGKTYTLHRYHVENNQPRPESYREDYITANNGSYYAASGIIYPVKTPLNETEKAVLYSNLASGAESGWDYTARWLRVPDDAARDVYFPLRSLNVREMVPVDLNSILYENEVIIAEYLEKAGNSSEAKRFASAAKQRSEAMYNLMWNATHWSYFDYNLTSNAQNIFVPADEDTASFDRYAAPPGQQVLFHVAQLYPFWTGAAPAHLKSNPLAVQKAYARVSRRLDTKKGAIAATNYRTGQQWDQPNVWPPLQHVLMQGLLNTPATFGESDPAYQGVQKLALRLAQRYLDSTFCTWYATGGSTSDFPQLQGVSPDATGIMFEKYADSATNVAGGGGEYEVVEGFGWTNGVLIWAADVFGNKLKRPDCGNITAAHTHSEAKRSLGDGGLARRAVELDPWDAAWTKMFGRSKLRRREAEDVRKRWSS

SEQ ID NO: 1230 - protein, 674 aa, Myceliophthora thermophilia
LYINGSVTAPCDSPIYCHGELLKGVELAHPFVDSKTFVDMPTLKPVDEVLAAFSKLRQPLSNNSELNNFLAEYFAPAGHELEEVPKGELQIDPKFLNKLEDRTIKEFVSKVIDIWPDLTRRYAGPGDCSGCANSFIPVNRTFVVAGGRFREPYYWDSYWILEGLLRTGGAFTQISKNIIENFLDFIDTIGFIPNGARIYYLNRSQPPLLTRMVKSYVDYTNDTSILERALPLLIKEHDFFTNNRSVSVTASNGKTYTLHRYHVENNQPRPESYREDYITANNGSYYAASGIIYPVKTPLNETEKAVLYSNLASGAESGWDYTARWLRVPDDAARDVYFPLRSLNVREMVPVDLNSILYENEVIIAEYLEKAGNSSEAKRFASAAKQRSEAMYNLMWNATHWSYFDYNLTSNAQNIFVPADEDTASFDRYAAPPGQQVLFHVAQLYPFWTGAAPAHLKSNPLAVQKAYARVSRRLDTKKGAIAATNYRTGQQWDQPNVWPPLQHVLMQGLLNTPATFGESDPAYQGVQKLALRLAQRYLDSTFCTWYATGGSTSDFPQLQGVSPDATGIMFEKYADSATNVAGGGGEYEVVEGFGWTNGVLIWAADVFGNKLKRPDCGNITAAHTHSEAKRSLGDGGLARRAVELDPWDAAWTKMFGRSKLRRREAEDVRKRWSS

SEQ ID NO: 1231 - DNA, 1992 bp, Myceliophthora thermophilia
atgcgtctgagcgaccttctcccgctcgctctcctcccccactgcacatccgctgccgccggggagcccgttattaagaggacagcagtacgcaatgatgacgtgaccatcagcgcacgggcgcgccccgacgcgcccgacggctatgcgccggccgtcgtgccgtgcccgcaggacaagccgaccatccggagcgccagctcgctctccaagagcgagagcgactggctggctaagcgccgcccgctcaccgtcgaacccatgatccagctcctcaagcgggccaacatcgaagggttcgacgccgaggcctacatcaaccgggtcgccgatgacgtcaaggacctgcccaacatcggcatcgccgtctcgggcggcggctaccgcgccctcatgaacggcgccggcttcatcgccgccgccgacagccgcaccccgggctcgaccgacaagggcggcatcggcggcctgctccaggcgagcacctacctgtccggcctgtcgggcggcggctggctggtcagcagcatctatgccaacaacttcaccaccgtcaccgccctgcgcgacggcagcgaggacagcagcgtctggaagttcgacagctccatcttcacggggcccgacctgccgggcatcctcgacaccgcgaggtactgggccaaggtggccagccaggtcgcctccaagaaggacgccggcttcgagacctccatcaccgactactggggccgcgccctgtcctggcagctcatcgacgcccccgacggcgggccctcgtacaccttctccagcatcgccgacgacgacgacttctccaacgcccgcacccccttccccatcctggtcgccgacgagagggcccccggccagaagatcatctcgctcaacgccaccgtcttcgagttcaacccgtacgagatgggctcctgggaccccaccaccttcggcttcgcccccatccgctacctggcctccaacttctcggccggcgtcgtcccgcgcgacggcaactgcgtccgcggcttcgactcgatcagctacatcttcggcaccagcagctccctcttcaacgccttcctgctccagaacatcacctcggtcgacggcgtgcccgacttcctcgtcgacgccgccaccgccgtcctcgagggcatcagcgcggaagagaacgacatcgcccagtacgtgcccaacccgttcctgggctggaaccgccaggccaacccggccgccgagtccgactcgctcgacctcgtcgacggcggcatggacctccagaacatccccctgcaccccttaatccagcccctccgcgccgtcgacgtcatcttcgccgtcgactcctccgccgacaccacctactcgtggcccaacggcaccgccatgcgcgccagctacgaccgctcccacggcgacatcgccaacggcaccctgttcccccctgtcccggacgaccgcacctttatcgcccacggcctcaacaaccgccccaccttcttcggctgcgacgtcgacaacttcaccctctcctcctcttccaccgctccccccttgatcgtctacctgcccaacgccccttacacggcctggtccaacgtgacgaccttcacgccctcgtactcgctcgccgagcgcaacgccatcatccgcaacggctacaacgccgcgacccagggcaacggcaccctggacgagcagtggcccgtctgcgtcgcctgcgccgtcctgagccgctcgctcgcccgcaccggcaccgccgtccccgacgcctgccgcgcctgcttcgaccgctactgctggaacggcacggtggccgacgcgaccgcgaacgtcgccagcggcgccggcggcgaggagtaccagcccaccttcaagatcgacaacgggtccgacgacgacacgtccgccggcgccaaggtcgccctcgcggggagccccgcctgggctgccctgttcgttggcttggtcgccgccgtcgtcatgctgtga

SEQ ID NO: 1232 - protein, 663 aa, Myceliophthora thermophilia
MRLSDLLPLALLPHCTSAAAGEPVIKRTAVRNDDVTISARARPDAPDGYAPAVVPCPQDKPTIRSASSLSKSESDWLAKRRPLTVEPMIQLLKRANIEGFDAEAYINRVADDVKDLPNIGIAVSGGGYRALMNGAGFIAAADSRTPGSTDKGGIGGLLQASTYLSGLSGGGWLVSSIYANNFTTVTALRDGSEDSSVWKFDSSIFTGPDLPGILDTARYWAKVASQVASKKDAGFETSITDYWGRALSWQLIDAPDGGPSYTFSSIADDDDFSNARTPFPILVADERAPGQKIISLNATVFEFNPYEMGSWDPTTFGFAPIRYLASNFSAGVVPRDGNCVRGFDSISYIFGTSSSLFNAFLLQNITSVDGVPDFLVDAATAVLEGISAEENDIAQYVPNPFLGWNRQANPAAESDSLDLVDGGMDLQNIPLHPLIQPLRAVDVIFAVDSSADTTYSWPNGTAMRASYDRSHGDIANGTLFPPVPDDRTFIAHGLNNRPTFFGCDVDNFTLSSSSTAPPLIVYLPNAPYTAWSNVTTFTPSYSLAERNAIIRNGYNAATQGNGTLDEQWPVCVACAVLSRSLARTGTAVPDACRACFDRYCWNGTVADATANVASGAGGEEYQPTFKIDNGSDDDTSAGAKVALAGSPAWAALFVGLVAAVVML

SEQ ID NO: 1233 - protein, 645 aa, Myceliophthora thermophilia
AAGEPVIKRTAVRNDDVTISARARPDAPDGYAPAVVPCPQDKPTIRSASSLSKSESDWLAKRRPLTVEPMIQLLKRANIEGFDAEAYINRVADDVKDLPNIGIAVSGGGYRALMNGAGFIAAADSRTPGSTDKGGIGGLLQASTYLSGLSGGGWLVSSIYANNFTTVTALRDGSEDSSVWKFDSSIFTGPDLPGILDTARYWAKVASQVASKKDAGFETSITDYWGRALSWQLIDAPDGGPSYTFSSIADDDDFSNARTPFPILVADERAPGQKIISLNATVFEFNPYEMGSWDPTTFGFAPIRYLASNFSAGVVPRDGNCVRGFDSISYIFGTSSSLFNAFLLQNITSVDGVPDFLVDAATAVLEGISAEENDIAQYVPNPFLGWNRQANPAAESDSLDLVDGGMDLQNIPLHPLIQPLRAVDVIFAVDSSADTTYSWPNGTAMRASYDRSHGDIANGTLFPPVPDDRTFIAHGLNNRPTFFGCDVDNFTLSSSSTAPPLIVYLPNAPYTAWSNVTTFTPSYSLAERNAIIRNGYNAATQGNGTLDEQWPVCVACAVLSRSLARTGTAVPDACRACFDRYCWNGTVADATANVASGAGGEEYQPTFKIDNGSDDDTSAGAKVALAGSPAWAALFVGLVAAVVML

SEQ ID NO: 1234 - DNA, 4944 bp, Myceliophthora thermophilia
atgccggaccccgatttcttacgacggcttgtcggcctcgttgcagtagccgcggtggtcctactcacggtgcctgccattatatacacctacaagacgagcacacgcatcgggcgagggtatgctcgtgtaggtggagacgacgacagctatgaagactgtgacggtatcgccaccgaggactcgatccgagccttttcggacacgcgacccagagtcaccgtatggctaggggcgctcattggtctgggagcgtccgttgctactaggattgtgaggctgaaggcgaatgagcacacggagatgcttgccgagttgtttgcatgggcggagccggcgtgctggtttcggcttgccgtccatggcatgctgtcatcgctgtccctcactatctcggtcgccctttgccacggccatgaagcacttacatttctctccagcgcaggggcagatactgccacatttgtcttgggactgctctatctgctccaactgaccgcagcagcggtgacggcatgcggcttcgcaggttttccgcgccgtccggacgtcttcgacgagaccgggctcgtggatcaacaatatactctttcgctcttgtccaggttcacattttcttggaatcgagccatcttcaatgtcgcgagggagcggcagatacaaatccaagacatccccaacctcggctatgccactcgatctaggcatcttgagttgaagtttcgcgagaagcgcttcaagggacccctttggaaacagttgatcaaggcacacgccggcgagctcgccctgcagtggttcttaacccttatcatcgccggcctctctcttttccctcaggtcgtcctatacaacttcctgtccaggattgagcggagtcggcagcacactgctgcagatcctaccgtgttcctctgggtttttggcctccttctcagccagcttctccaagtcggagtcaacaactggctcaagtggatcacgaccagtcgcctcgagattccagtaagctcactgttgcagtcgctcgttttctctaaagcccttaagctgtacgagacagccccaccgggtcacaatgctgtcaaggacagcggtcacaagaacagtaatttttccggggaccaggatggcccccggggctcgggtgggaagaataagagcaagatctcggaaacccgccagtctgtgatcaatcacatgaagctcgacagcggccgcgtcacaatcttctgtacctacaacaataacttcccaatggccgtgttcaaacttatcctggctggcggctttgccgtgagtctaatgggctggcttccggtactgtgcggcttgggtgccggttctctgatggtcccgttgagctcgatgctatcgagaaggtatacggcactgcattttggcctgatgaagtaccgcgatgggaaggcccatctgttgacggaggctttacaaggcatgcgtcagatcaggtatgcagcacttgaacaacactgggaggccaagattctggcgtctcgcgacgaagagctcaggcaatactggagggttgctctctggcagtgcctagtcgttttcatggtcaatcttggtccgctgctccttgcaagcgtcaccttctccatctacgtttggcagaacggcacgcacattcgggcttccattatcttcacgtccctcggcctgttcgatcagctcgatgaggctgtggctctgttaccgctgctgcagatgtacctgctcgaggcatggaccagcgcagtgaggctggagaagtacttcaaccagtcggacatgatgtctgtagctgagcagggggagacaatctctttcgagaatgccactgtggcctggccgagggttcaggataccgatattcctcaaggaggggcggaagatcagcgggatgctcactctatcctccgagatgcaactctggacttccccattggaaagcttagcgttatcacaggcaagaccggttcaggcaagagcctcttgctcgcggcgctcctcggcgaagtgaagctcttgtccggcacgatccgcatgcccgctgttcccgatattaacgatagcaccgggtatattcccgaaactgaatggattatccctcagttaaccgcgtttgtttcccagaccccatgggtcgagggcggtactgtcaaggaaaacatcacgttcggcctccctttcgttgagggtcgctatcgcagggtcctcgcagcttgcgctcttgagaaagatatcgagcttctcgtagacggcgacgagacagaagttggccctaagggtgtcactctttccggtggtcagcgttggcgtgtagcgctcgcccgagcactttattctcgtgccggcattctcgtgctcgacgatgttctcagcgcggtagacgctcatgtcggcaagctgatcgtcgaccaagctctcactggcgggcttgctcatgggaggactcgcattctcgctacgcaccacgccgagttggttctgccctacgcgagttacgtggtacgtcttcgcagcggtgaggttgagtcggcagaacctctttcaccgtcaggagtggaagctgctacgactggggagccagtgccgaagacggcatcggcatcatcagaaagagcgttagagaatgcctccagcggacaagatggccacgacagccacagcgggaacggaggttacaacaatgtccatccttctccagcggccatgaaaaagtcaaggaaagaggaggaacagagagagattggtcgcgttaagtgggacgtgtacaaagcctactacaaagccagcggtggcgcggtttactggctgtttggcgtttcaatcctcctcctgggccactccctgactgtcgcccggaactggagcttgaaggagctctcgcagcaggcagcaattgagaaagtccatctcacatcgcaaacggcacgactgattgcctcgttagccaatcccagcgattttgcctcgcgaaggctggcaggaacagagcgtgacatctttttttggctgaccgcctacattattatcgagttcatcacgctcctggtccagttactccgagtgatcgtcttctttttcgtcggcttaaaggcatccagaatcctctttcaccgaatgacgcatgccattctccgagcgcccttgcgctggctagatacgattccggccggtcgcatcctcaaccgctttacatcggacacttttgtggtggacaggcggctctccaatcaggcttttgcccttattcggaacgttctgtttctggccgtcgtcatcgccaccagtctgtctgtgtctgcctacgtgatcctctttggcatcttgctcttcgttctctacgcggcagttgcgcgcgagtacatcactgccgctcgtgaagtgaaacggatcaactcagtttctcactcgccgatttacgatcagttcagctcggtgctctcaggtctctccaccgttcgcgcatttcaccgtacgagatcctatatggaccgcatgtacgctctcattgacaacagctccaaggcgacttggatgctgcagttgtctacccgttggatggcttttcggatgggcgtgcttggtgctctgttcgtcagcgttgtcgccaacgccgtggcatttagtcgcgtcgacgctgccttggccggtttcagcctggcatttgcgttgcggtatacaaacgccttgacgtcgcttcttcaatcgctgacgtcggtggaattgggattcaacgcttgtgagagggttttagaatatgccgagctcgaaactgaggccgaaggtggtaatgacgcccccgccgcatggccggccgaagggaagatcgaggtcaacaacttgacagtcagctacaccaaggacctgccgccagtcctgaggaacctcaactttaccgtcggcgctggcgagaggatcggcatcgttggccgaacgggcgctgggaagtcgacattggccgcggttctcttccgtctcattgagccgctcaagggttcggtttatatagacaacgtggacatctcgacgctgaagttatcccacttgcgcagccgtctcgcgatcatcccacaagacccattcctgttctcgggtacattacgctcgaaccttgacatggagggtgttttggacgacgccgagctgctggagtcgctcaagcgcgttcacctgattgagatggacgaggaacctaagaactcggtcgtgaaaccagacgttgacactgtcgttgcaagcagctcggcatcgcccattccacccacggtggactccgaaacatccacgcaggcatcagtcgcgatggggccggagacgacaatggtcgatgcccagccagagctccaaccagtccaagacaaatctaatatcttcaccgacttatccatgccgataagcacgggcggtgccaatctttcccagggtcaacgccagcttgtctgcctcgcccgggccttgctcaagcggcccaagattgtggtactggacgaagccacaagcgcggtggaccgcggcacggacagcaaaattcaagagtctctgcgtaaggatttcgcagcggccgggtgcacggtgcttgttattgcccatcgcctgtcgactgtcgtcgacttcgaccggattctggtgctggagaaggggcgtgtggttgagatgggcactcccagggagttgttgttggccggtatacaacgttcggctgctgaggcggcgaagtctggagaagaagccaaagaggaccgcgacgagggagacacgagcactcttcaggatcaggataatgacgagatcgatggtaccggtgctttctgggagctggtgcagaagagtgccgaaaaggagaagctgttggaggtaattttgggtcaggagaaggaccggctgatgggggagattttgtgtggttttcgctcgggtgaaggagcaagatga

SEQ ID NO: 1235 - protein, 1647 aa, Myceliophthora thermophilia
MPDPDFLRRLVGLVAVAAVVLLTVPAIIYTYKTSTRIGRGYARVGGDDDSYEDCDGIATEDSIRAFSDTRPRVTVWLGALIGLGASVATRIVRLKANEHTEMLAELFAWAEPACWFRLAVHGMLSSLSLTISVALCHGHEALTFLSSAGADTATFVLGLLYLLQLTAAAVTACGFAGFPRRPDVFDETGLVDQQYTLSLLSRFTFSWNRAIFNVARERQIQIQDIPNLGYATRSRHLELKFREKRFKGPLWKQLIKAHAGELALQWFLTLIIAGLSLFPQVVLYNFLSRIERSRQHTAADPTVFLWVFGLLLSQLLQVGVNNWLKWITTSRLEIPVSSLLQSLVFSKALKLYETAPPGHNAVKDSGHKNSNFSGDQDGPRGSGGKNKSKISETRQSVINHMKLDSGRVTIFCTYNNNFPMAVFKLILAGGFAVSLMGWLPVLCGLGAGSLMVPLSSMLSRRYTALHFGLMKYRDGKAHLLTEALQGMRQIRYAALEQHWEAKILASRDEELRQYWRVALWQCLVVFMVNLGPLLLASVTFSIYVWQNGTHIRASIIFTSLGLFDQLDEAVALLPLLQMYLLEAWTSAVRLEKYFNQSDMMSVAEQGETISFENATVAWPRVQDTDIPQGGAEDQRDAHSILRDATLDFPIGKLSVITGKTGSGKSLLLAALLGEVKLLSGTIRMPAVPDINDSTGYIPETEWIIPQLTAFVSQTPWVEGGTVKENITFGLPFVEGRYRRVLAACALEKDIELLVDGDETEVGPKGVTLSGGQRWRVALARALYSRAGILVLDDVLSAVDAHVGKLIVDQALTGGLAHGRTRILATHHAELVLPYASYVVRLRSGEVESAEPLSPSGVEAATTGEPVPKTASASSERALENASSGQDGHDSHSGNGGYNNVHPSPAAMKKSRKEEEQREIGRVKWDVYKAYYKASGGAVYWLFGVSILLLGHSLTVARNWSLKELSQQAAIEKVHLTSQTARLIASLANPSDFASRRLAGTERDIFFWLTAYIIIEFITLLVQLLRVIVFFFVGLKASRILFHRMTHAILRAPLRWLDTIPAGRILNRFTSDTFVVDRRLSNQAFALIRNVLFLAVVIATSLSVSAYVILFGILLFVLYAAVAREYITAAREVKRINSVSHSPIYDQFSSVLSGLSTVRAFHRTRSYMDRMYALIDNSSKATWMLQLSTRWMAFRMGVLGALFVSVVANAVAFSRVDAALAGFSLAFALRYTNALTSLLQSLTSVELGFNACERVLEYAELETEAEGGNDAPAAWPAEGKIEVNNLTVSYTKDLPPVLRNLNFTVGAGERIGIVGRTGAGKSTLAAVLFRLIEPLKGSVYIDNVDISTLKLSHLRSRLAIIPQDPFLFSGTLRSNLDMEGVLDDAELLESLKRVHLIEMDEEPKNSVVKPDVDTVVASSSASPIPPTVDSETSTQASVAMGPETTMVDAQPELQPVQDKSNIFTDLSMPISTGGANLSQGQRQLVCLARALLKRPKIVVLDEATSAVDRGTDSKIQESLRKDFAAAGCTVLVIAHRLSTVVDFDRILVLEKGRVVEMGTPRELLLAGIQRSAAEAAKSGEEAKEDRDEGDTSTLQDQDNDEIDGTGAFWELVQKSAEKEKLLEVILGQEKDRLMGEILCGFRSGEGAR

SEQ ID NO: 1236 - protein, 1621 aa, Myceliophthora thermophilia
IIYTYKTSTRIGRGYARVGGDDDSYEDCDGIATEDSIRAFSDTRPRVTVWLGALIGLGASVATRIVRLKANEHTEMLAELFAWAEPACWFRLAVHGMLSSLSLTISVALCHGHEALTFLSSAGADTATFVLGLLYLLQLTAAAVTACGFAGFPRRPDVFDETGLVDQQYTLSLLSRFTFSWNRAIFNVARERQIQIQDIPNLGYATRSRHLELKFREKRFKGPLWKQLIKAHAGELALQWFLTLIIAGLSLFPQVVLYNFLSRIERSRQHTAADPTVFLWVFGLLLSQLLQVGVNNWLKWITTSRLEIPVSSLLQSLVFSKALKLYETAPPGHNAVKDSGHKNSNFSGDQDGPRGSGGKNKSKISETRQSVINHMKLDSGRVTIFCTYNNNFPMAVFKLILAGGFAVSLMGWLPVLCGLGAGSLMVPLSSMLSRRYTALHFGLMKYRDGKAHLLTEALQGMRQIRYAALEQHWEAKILASRDEELRQYWRVALWQCLVVFMVNLGPLLLASVTFSIYVWQNGTHIRASIIFTSLGLFDQLDEAVALLPLLQMYLLEAWTSAVRLEKYFNQSDMMSVAEQGETISFENATVAWPRVQDTDIPQGGAEDQRDAHSILRDATLDFPIGKLSVITGKTGSGKSLLLAALLGEVKLLSGTIRMPAVPDINDSTGYIPETEWIIPQLTAFVSQTPWVEGGTVKENITFGLPFVEGRYRRVLAACALEKDIELLVDGDETEVGPKGVTLSGGQRWRVALARALYSRAGILVLDDVLSAVDAHVGKLIVDQALTGGLAHGRTRILATHHAELVLPYASYVVRLRSGEVESAEPLSPSGVEAATTGEPVPKTASASSERALENASSGQDGHDSHSGNGGYNNVHPSPAAMKKSRKEEEQREIGRVKWDVYKAYYKASGGAVYWLFGVSILLLGHSLTVARNWSLKELSQQAAIEKVHLTSQTARLIASLANPSDFASRRLAGTERDIFFWLTAYIIIEFITLLVQLLRVIVFFFVGLKASRILFHRMTHAILRAPLRWLDTIPAGRILNRFTSDTFVVDRRLSNQAFALIRNVLFLAVVIATSLSVSAYVILFGILLFVLYAAVAREYITAAREVKRINSVSHSPIYDQFSSVLSGLSTVRAFHRTRSYMDRMYALIDNSSKATWMLQLSTRWMAFRMGVLGALFVSVVANAVAFSRVDAALAGFSLAFALRYTNALTSLLQSLTSVELGFNACERVLEYAELETEAEGGNDAPAAWPAEGKIEVNNLTVSYTKDLPPVLRNLNFTVGAGERIGIVGRTGAGKSTLAAVLFRLIEPLKGSVYIDNVDISTLKLSHLRSRLAIIPQDPFLFSGTLRSNLDMEGVLDDAELLESLKRVHLIEMDEEPKNSVVKPDVDTVVASSSASPIPPTVDSETSTQASVAMGPETTMVDAQPELQPVQDKSNIFTDLSMPISTGGANLSQGQRQLVCLARALLKRPKIVVLDEATSAVDRGTDSKIQESLRKDFAAAGCTVLVIAHRLSTVVDFDRILVLEKGRVVEMGTPRELLLAGIQRSAAEAAKSGEEAKEDRDEGDTSTLQDQDNDEIDGTGAFWELVQKSAEKEKLLEVILGQEKDRLMGEILCGFRSGEGAR

SEQ ID NO: 1237 - DNA, 4578 bp, Myceliophthora thermophilia
atgaggttcgggggagctctgcaggcggcagtcgtgctggccacggccctctgggcgacgcccctcgccgcgaagaagaaggatcatccgacattccacgtcaaggcgttcgagaacatacccagaaacgtcaattacttctccgactcggacaccgtcctgttccacgacacagacgccaacaatgtctacctctcccacgaccacggcgtgaagtgggagcgcgtggacgcagttcccgagggcagggcctggctgctgtacatgcacgtgttcgatcccaaccgcgcatacatccttaccgagggcaccacccacttcaagaccagcgaccgcggcaagacatgggacaagttcaagactagcgccgacacgagcgcgttccgcggcgacatcctccagttccacgccacggaccccgaccgcatcctcttcaacggcatgcgctgcgacggcttcctctgccaggaagtcgccttgtatacgaccgacggtttcgagacgcccgccaaggagctgcgcagtaacacaaacgggtgctggtgggccaagtcttcggacctcttcaccacggggtccgaggatctggacaagaaccgcgtgctctgcatcgtgagggacgcgttctcgcccttcaaacaggaccagcgcctcctcatctcggacaatttcttcagcccttcgcacgagagcagcgacatccaagagttcgagccgaacctcgacatggacaagccggtacagggagtcgtcaacgttgccgtcgtaaagaagtacctgcttgcggccacgagctccatgaacacggacgagatggctctctttgtcacggacgataccaagaggtggcaccgcgccgtcttcccggctagccacgatgaccacgaccacagggtcctgcaggaagcctacacggtgctcgagagcaccaactacagcatccagatcgacgtcatgacgacgcggccgtcgaaccccatgggcgtcctgttcacgagcaactccaacggcacctatttcactgagaacataccgcataccaaccgcaactcgaggggccacgtcgatttcgagaagattaccggcattcagggcgtcttcttggtcaacaaggtcgacaactgggaagaggtggcgaagaaagggagcgccaagaagaagctcgtgacggagatcacgtttgacgatggccgcaccttcgagtcggtgacggcggacggcaagaggatccatctccactcggtaaccgagttgagcaacgtggggcgcgtcttctcgagccccgcgccgggcctcctcatgggtatcggcaacaagggtgagcacctcaaggattactgggaggacggcgacctctacgtctcggacgatgcgggcgtgacgtggaagaaggcgctggacgggcctcacaagtacgagtttggcgaccagggttccattctcgtcgcgatacgggactcccaggaggccgacgtcggcgagatcagctactcgctcgatcacgggctcacctggaccaagcaggccctgcccgacggtctcaagatcaggccgtacattctcacgacgacgcaggagtcagctagcctcaagttcctcctcatcggcatgacggagacgtcgccgcgctggcgggtcatctcgatcgattttgagggtctccacgaggccacctgcggcaaggacgacatggaggagtggttcgcgcgcgtagacaaggacggaaagccgacctgcctgatgggccacacccagagcttccagcgccgcaagaaggaggccaagtgcttcctgaagcaggagttcaagcacgccgtggccaagacggaagactgcgagtgcacagacatggactacgagtgcgacttcaacttcgtgagggaggacggcaagtgcgtccagaagggccccatcatcccgccagagggcgcgtgtcgcaacgccaagccggatgacaccttcaagggcacgtcgggataccgcaagattccggggaacacatgcaagccgaccaaggagatggacgaaaaatacaaagaggtcgacaggaagtgctccgagatcgtcggggcgccgcccacgggccctgcgacggacgagatcgagcagacccgaaacgtcttcgagggtgactgggacgggtgggacaagcactacctggaacggggcgagtcgagctcgaccgagggcgagaccatcatcatgcgcgggcgcacaagcacaaaggtcggccccgtctacgtcacggaggaccacggcaagacgtggaaggccccgaaggaactggaggaggaaaagatccagtacatcatcccgcacgcctacttcaaggatatggtcttcttcatcacctcgggcaagaaggtcatctacacagcggaccgcggacgtaccttccacagcttcaaggcgcccaacgagctcgatccggacgtgtttcctctggcatttcatccggacaagaagaactggctgatctggaacgggaggaagtgcgaggactcgaacgactgctacggagttgcctcctggagcaaggacggcggagaccactggcagacggccgccaagagctcccggcggtgcgagttcaccggctcgagcgcttacaagtacccgaaccgcaagcaggagcagatcatctgcctcaagcaccagaaggagggcaaggccaaggagaacccgatggtgttggtctcgacggacgattggttcgacaacgaggaggtccgcgcagagaacgtcaaggggttcgccaccatggccgagttcatcgtggtcgccacctcgaacccggccaacgagactcttcaagccagcgcgagcctggacggggtcacctttgcggacgcgcggttcccgcacggcttcgacgtgccgcaccagcacatctacactgtgctggacagctcgacgcacgctgtcaacttgtttgtggccacggacatggacggggggtattgcaacttcggcaccgtcctcaagagcaactcgaacgggacgtcgtacgtggtcagcgcgaagaacgtcaactgcaacgaggccgcgtacgtcgactttgagaaagttgcggggctggaaggcgtcgcgctcgtgaacgtggtcgccaaccccaacgagaagacgtcggcgccaaagaagctgcagaccaagatcacgcacaacgacggcgcccagtgggcgtacctggctccgccggccgatgacgagttcgggaagttcccctgccactcggacggcgatgaaaagtgcgcactgcacctgcaaggctatacggagcgcaggctccgtggcgacggcaacacgtactcgtccgagacggccgtcggtatcatgttcgcgtggggcaacgtcggagacaggctgggtccgcggaaggactgggacacgttcatgaccaccgacgcaggcctcacctggaaacgggtcaagcggggacagtggacgtgggccgttggcgaccagggcggcatcattgtgctcgtccagactacggcttcctcatcgccagagaagacgaagaatctcgtctactcgctcgaccagggcaagacttggaaagagcacgagttcgcgtccgaggaggtcgaggtctgggacgtcacgacgctgcgttccggcggctcccgaaacttcctcctctggggcaaggatagcgagggcgccttcactctgaacctcgacttctccggcttcagcgagcgcgtctgcaagtacgacgacgacgcggaaaagtcggactactacctctggtcgcccaagcacccgatgcagcccgacggctgcctcttcggtcacgtctcgcagtacctgcggaaaaaggcagaccgcaagtgctacaacgactttagactgcagcctctatacggcaaacagaactgcacctgcacccgtgccgactttgaatgcgactacaactacgaactggatgcctttggccaatgctcgctcgtcccgggcctgtcgcccaaggacccggtcgagtggtgcaagcagaacccggaagcgatcgagtaccacgagccgacggggtaccggcggatcccgctgacgacgtgcgcgggcggccggcagctcgacaaggagtcgcggacgcactcgtgccccggccacgaggacgagtacgagcgcaggcacggcgcgtcgggcgtcgccgtcttcttcgccgtgacgatccccttcaccctggccgccgcggcgggctggtacgtctggcggcactggaacggcaagtttggccggatccgcctcggcgagcaaggcggcaccgtcttcgaggccgaccagccttgggtgcgctacccggtcatcgcgctgagcgccgtggcggccgtcgtcatgtccctgcccgtcgtcgccggcgccgtctggaggagcgcaaagggaatgttcggagcggtcgggatcggcggcggcgccggcgccggcgacgggaggggccgctggagccggctcggaggtggcggaggtaccaggaggttcacgacgcgggacagctttgccaggggcggggactatacgatcgtggatgacgacgagggcgagctgcttggtgaggatagcgacgaggatgtatga

SEQ ID NO: 1238 - protein, 1525 aa, Myceliophthora thermophilia
MRFGGALQAAVVLATALWATPLAAKKKDHPTFHVKAFENIPRNVNYFSDSDTVLFHDTDANNVYLSHDHGVKWERVDAVPEGRAWLLYMHVFDPNRAYILTEGTTHFKTSDRGKTWDKFKTSADTSAFRGDILQFHATDPDRILFNGMRCDGFLCQEVALYTTDGFETPAKELRSNTNGCWWAKSSDLFTTGSEDLDKNRVLCIVRDAFSPFKQDQRLLISDNFFSPSHESSDIQEFEPNLDMDKPVQGVVNVAVVKKYLLAATSSMNTDEMALFVTDDTKRWHRAVFPASHDDHDHRVLQEAYTVLESTNYSIQIDVMTTRPSNPMGVLFTSNSNGTYFTENIPHTNRNSRGHVDFEKITGIQGVFLVNKVDNWEEVAKKGSAKKKLVTEITFDDGRTFESVTADGKRIHLHSVTELSNVGRVFSSPAPGLLMGIGNKGEHLKDYWEDGDLYVSDDAGVTWKKALDGPHKYEFGDQGSILVAIRDSQEADVGEISYSLDHGLTWTKQALPDGLKIRPYILTTTQESASLKFLLIGMTETSPRWRVISIDFEGLHEATCGKDDMEEWFARVDKDGKPTCLMGHTQSFQRRKKEAKCFLKQEFKHAVAKTEDCECTDMDYECDFNFVREDGKCVQKGPIIPPEGACRNAKPDDTFKGTSGYRKIPGNTCKPTKEMDEKYKEVDRKCSEIVGAPPTGPATDEIEQTRNVFEGDWDGWDKHYLERGESSSTEGETIIMRGRTSTKVGPVYVTEDHGKTWKAPKELEEEKIQYIIPHAYFKDMVFFITSGKKVIYTADRGRTFHSFKAPNELDPDVFPLAFHPDKKNWLIWNGRKCEDSNDCYGVASWSKDGGDHWQTAAKSSRRCEFTGSSAYKYPNRKQEQIICLKHQKEGKAKENPMVLVSTDDWFDNEEVRAENVKGFATMAEFIVVATSNPANETLQASASLDGVTFADARFPHGFDVPHQHIYTVLDSSTHAVNLFVATDMDGGYCNFGTVLKSNSNGTSYVVSAKNVNCNEAAYVDFEKVAGLEGVALVNVVANPNEKTSAPKKLQTKITHNDGAQWAYLAPPADDEFGKFPCHSDGDEKCALHLQGYTERRLRGDGNTYSSETAVGIMFAWGNVGDRLGPRKDWDTFMTTDAGLTWKRVKRGQWTWAVGDQGGIIVLVQTTASSSPEKTKNLVYSLDQGKTWKEHEFASEEVEVWDVTTLRSGGSRNFLLWGKDSEGAFTLNLDFSGFSERVCKYDDDAEKSDYYLWSPKHPMQPDGCLFGHVSQYLRKKADRKCYNDFRLQPLYGKQNCTCTRADFECDYNYELDAFGQCSLVPGLSPKDPVEWCKQNPEAIEYHEPTGYRRIPLTTCAGGRQLDKESRTHSCPGHEDEYERRHGASGVAVFFAVTIPFTLAAAAGWYVWRHWNGKFGRIRLGEQGGTVFEADQPWVRYPVIALSAVAAVVMSLPVVAGAVWRSAKGMFGAVGIGGGAGAGDGRGRWSRLGGGGGTRRFTTRDSFARGGDYTIVDDDEGELLGEDSDEDV

SEQ ID NO: 1239 - protein, 1501 aa, Myceliophthora thermophilia
KKKDHPTFHVKAFENIPRNVNYFSDSDTVLFHDTDANNVYLSHDHGVKWERVDAVPEGRAWLLYMHVFDPNRAYILTEGTTHFKTSDRGKTWDKFKTSADTSAFRGDILQFHATDPDRILFNGMRCDGFLCQEVALYTTDGFETPAKELRSNTNGCWWAKSSDLFTTGSEDLDKNRVLCIVRDAFSPFKQDQRLLISDNFFSPSHESSDIQEFEPNLDMDKPVQGVVNVAVVKKYLLAATSSMNTDEMALFVTDDTKRWHRAVFPASHDDHDHRVLQEAYTVLESTNYSIQIDVMTTRPSNPMGVLFTSNSNGTYFTENIPHTNRNSRGHVDFEKITGIQGVFLVNKVDNWEEVAKKGSAKKKLVTEITFDDGRTFESVTADGKRIHLHSVTELSNVGRVFSSPAPGLLMGIGNKGEHLKDYWEDGDLYVSDDAGVTWKKALDGPHKYEFGDQGSILVAIRDSQEADVGEISYSLDHGLTWTKQALPDGLKIRPYILTTTQESASLKFLLIGMTETSPRWRVISIDFEGLHEATCGKDDMEEWFARVDKDGKPTCLMGHTQSFQRRKKEAKCFLKQEFKHAVAKTEDCECTDMDYECDFNFVREDGKCVQKGPIIPPEGACRNAKPDDTFKGTSGYRKIPGNTCKPTKEMDEKYKEVDRKCSEIVGAPPTGPATDEIEQTRNVFEGDWDGWDKHYLERGESSSTEGETIIMRGRTSTKVGPVYVTEDHGKTWKAPKELEEEKIQYIIPHAYFKDMVFFITSGKKVIYTADRGRTFHSFKAPNELDPDVFPLAFHPDKKNWLIWNGRKCEDSNDCYGVASWSKDGGDHWQTAAKSSRRCEFTGSSAYKYPNRKQEQIICLKHQKEGKAKENPMVLVSTDDWFDNEEVRAENVKGFATMAEFIVVATSNPANETLQASASLDGVTFADARFPHGFDVPHQHIYTVLDSSTHAVNLFVATDMDGGYCNFGTVLKSNSNGTSYVVSAKNVNCNEAAYVDFEKVAGLEGVALVNVVANPNEKTSAPKKLQTKITHNDGAQWAYLAPPADDEFGKFPCHSDGDEKCALHLQGYTERRLRGDGNTYSSETAVGIMFAWGNVGDRLGPRKDWDTFMTTDAGLTWKRVKRGQWTWAVGDQGGIIVLVQTTASSSPEKTKNLVYSLDQGKTWKEHEFASEEVEVWDVTTLRSGGSRNFLLWGKDSEGAFTLNLDFSGFSERVCKYDDDAEKSDYYLWSPKHPMQPDGCLFGHVSQYLRKKADRKCYNDFRLQPLYGKQNCTCTRADFECDYNYELDAFGQCSLVPGLSPKDPVEWCKQNPEAIEYHEPTGYRRIPLTTCAGGRQLDKESRTHSCPGHEDEYERRHGASGVAVFFAVTIPFTLAAAAGWYVWRHWNGKFGRIRLGEQGGTVFEADQPWVRYPVIALSAVAAVVMSLPVVAGAVWRSAKGMFGAVGIGGGAGAGDGRGRWSRLGGGGGTRRFTTRDSFARGGDYTIVDDDEGELLGEDSDEDV

SEQ ID NO: 1240 - DNA, 732 bp, Myceliophthora thermophilia
atggcgtcccgcttggcgagaagtgctgtcggggctgcccgcctgcgaccgagcattgctccgcgcgctcttcctgccatctcgtccctcgtcacggcccggcacaactcgaacgtgccctcgaccgaccccaagaccaaggcccagtcgatcctcgatgccctgcccggcagcagcctgctttccaagacggcgatcctctcgtcggctgccggcctgtccatctatgcgctcagcaacgagtactacgtcatgaacgaggagacggtcgttgccttctgcctcctcagcgtctggaccgcgctcatcaagttcggcggccccgtgtaccgcgagtgggccgagagccagaacgagaagatcaagaacatcctcaacgccgcgcgcgccgaccacacccaggccgtcaagtcgcgcatccaggacgtccagcagatgtcgagcgtcgttgacgtgaccaaggccctgttcgaggtgtccaaggaaaccgccaagctcgaggccgaagcctacgagcttgagcagcgcacggcgctggctgccgaggccaaggccgtgctggactcgtgggtgcgctacgagagccaggttaagcagcgccagcagaaggagctcgcccaggccgtcatcgccaaggtgcagaaggagttggagaaccccaaggtgctgcagcagatcctgcagcagagcgtggcggatgttgagaggatcttctcttccaaggctcaatag

SEQ ID NO: 1241 - protein, 243 aa, Myceliophthora thermophilia
MASRLARSAVGAARLRPSIAPRALPAISSLVTARHNSNVPSTDPKTKAQSILDALPGSSLLSKTAILSSAAGLSIYALSNEYYVMNEETVVAFCLLSVWTALIKFGGPVYREWAESQNEKIKNILNAARADHTQAVKSRIQDVQQMSSVVDVTKALFEVSKETAKLEAEAYELEQRTALAAEAKAVLDSWVRYESQVKQRQQKELAQAVIAKVQKELENPKVLQQILQQSVADVERIFSSKAQ

SEQ ID NO: 1242 - protein, 210 aa, Myceliophthora thermophilia
RHNSNVPSTDPKTKAQSILDALPGSSLLSKTAILSSAAGLSIYALSNEYYVMNEETVVAFCLLSVWTALIKFGGPVYREWAESQNEKIKNILNAARADHTQAVKSRIQDVQQMSSVVDVTKALFEVSKETAKLEAEAYELEQRTALAAEAKAVLDSWVRYESQVKQRQQKELAQAVIAKVQKELENPKVLQQILQQSVADVERIFSSKAQ

SEQ ID NO: 1243 - DNA, 222 bp, Myceliophthora thermophilia
atgaggtacactatccacttcgtcttctttttcctgttggggctggccaccggtttggccctcccgaggcgccagtccgaggagccatttgccgttctaacccacgccagaaacactgcctgccacaccatcctgtcatcctgccgagtagaatccgactgctgcgcgggcctgaaatgcggactctttgacgacgaggcgctgtgcgttcctatcggttaa

SEQ ID NO: 1244 - protein, 73 aa, Myceliophthora thermophilia
MRYTIHFVFFFLLGLATGLALPRRQSEEPFAVLTHARNTACHTILSSCRVESDCCAGLKCGLFDDEALCVPIG

SEQ ID NO: 1245 - protein, 53 aa, Myceliophthora thermophilia
LPRRQSEEPFAVLTHARNTACHTILSSCRVESDCCAGLKCGLFDDEALCVPIG

SEQ ID NO: 1246 - DNA, 1431 bp, Myceliophthora thermophilia
atgtcgctcttctcggcacagctccatcccggccgggcgctgggtttcctggtgctcggagcttcgctgcacgatgtcctgacccgtctcaaagccgagccccagagattcccaaaactcgacctcacgtacaacccggccgacccggtgagggagcccgtcatccttggtctcccagcaaacgggatacggatgcggttcgacgggcccgagcagcggctacggctggttgaggtgattgacttcaccaggaaccatatcttcctcaagcccgccaacgataaggagcgcgatctcgtccggccgcccacgcaagacccccccgcggccgacgcggccccgggcccgacgttccgccacatctaccagcggttcctggggcctacgtacgacggagaatacatcgccgatgccgagacatatgtgctgtcgtacccgggcgtggcgtttgcttttcccatgaagaagaaggactactcggacgccaaggacgttgtctcgctgctgtcgtcgacggcggtcccgaactcgatggccgtcttcagcggcgactcgtgggcacaggcacgcgacaccatgtggaccgaggtcctgcccagcctcaagacattcgcgccgcttgccaagggcaaggacgtgtacccggacgagatctcgttggtcaagatccacgggggcggaaagctgcagctcttccggaagtggaccaacaactcgttctggatcttgctgggcgagacgacgccgcaacaactggtggccgagctggggccgcccgacgccatctatcgcaagaacgaccagcgcatgtacatccataagctgcgcgccgcaagcaacaacacgatggcccggccgaccaacggcaacgagctgaggcggcaggacgagctgacagacacggaccagtcctcgcaccccgcgtcggacgactacgactcgcaggacgaggcggtcgaggacgatatcgtcgccaatgtgtcgggcgagtgcttctacaactacttttatctcggtttcgacgtgctcgtctcgatgccgaccgcgccctcgcgcccgccaccgtcgcaagacggcagcgcctacgccgccgatgccgccgcgcccaaacccgccgcgaccgaccgcctggtcgccaccaaggtggtcctccacggaaacgtcccggggtcgtaccccttcaaccgccaccgccgctgccgctgggagatcagctacctgtcgccgtcgccggactcgccggcacgacgtcggagacgcccttcccgggatggtgctcaaccggggatggggagacagccccgggagcagctgcgagctgctgggagggtggaggagagcggcgggacgaacccggcgtcggcaaggggcggggggaggactcgaccacgaccttgtttgggttccctggcctggtgtttgaagtgctga

SEQ ID NO: 1247 - protein, 476 aa, Myceliophthora thermophilia
MSLFSAQLHPGRALGFLVLGASLHDVLTRLKAEPQRFPKLDLTYNPADPVREPVILGLPANGIRMRFDGPEQRLRLVEVIDFTRNHIFLKPANDKERDLVRPPTQDPPAADAAPGPTFRHIYQRFLGPTYDGEYIADAETYVLSYPGVAFAFPMKKKDYSDAKDVVSLLSSTAVPNSMAVFSGDSWAQARDTMWTEVLPSLKTFAPLAKGKDVYPDEISLVKIHGGGKLQLFRKWTNNSFWILLGETTPQQLVAELGPPDAIYRKNDQRMYIHKLRAASNNTMARPTNGNELRRQDELTDTDQSSHPASDDYDSQDEAVEDDIVANVSGECFYNYFYLGFDVLVSMPTAPSRPPPSQDGSAYAADAAAPKPAATDRLVATKVVLHGNVPGSYPFNRHRRCRWEISYLSPSPDSPARRRRRPSRDGAQPGMGRQPREQLRAAGRVEESGGTNPASARGGGRTRPRPCLGSLAWCLKC

SEQ ID NO: 1248 - protein, 448 aa, Myceliophthora thermophilia
RLKAEPQRFPKLDLTYNPADPVREPVILGLPANGIRMRFDGPEQRLRLVEVIDFTRNHIFLKPANDKERDLVRPPTQDPPAADAAPGPTFRHIYQRFLGPTYDGEYIADAETYVLSYPGVAFAFPMKKKDYSDAKDVVSLLSSTAVPNSMAVFSGDSWAQARDTMWTEVLPSLKTFAPLAKGKDVYPDEISLVKIHGGGKLQLFRKWTNNSFWILLGETTPQQLVAELGPPDAIYRKNDQRMYIHKLRAASNNTMARPTNGNELRRQDELTDTDQSSHPASDDYDSQDEAVEDDIVANVSGECFYNYFYLGFDVLVSMPTAPSRPPPSQDGSAYAADAAAPKPAATDRLVATKVVLHGNVPGSYPFNRHRRCRWEISYLSPSPDSPARRRRRPSRDGAQPGMGRQPREQLRAAGRVEESGGTNPASARGGGRTRPRPCLGSLAWCLKC

SEQ ID NO: 1249 - DNA, 1410 bp, Myceliophthora thermophilia
atgccagcctgggccctcgccctccgttcccagtcgtcggcaggaggtggaggcggatgcgggggggaagccgccttatacctcgccctgggcgcggccttcggcatctcgacgtgcctcctcgccaacaccctcctcggcttctcctttgcttcctcctcctccccgccgccgtcaacgacctctcccgccagccacaaacccgccatcccttcccccctcagaacacacctcccaaccttggccccagccgccgtcgccgccctcccctaccccccggacgtgctcccgggcggccgggccgtcgccaccccgtacggcacgatccaggtgttcgagtggggccccccgcgcggcgagaaggtgctgctgctgcacggcatcagcacgccgtgcgtggcgctgggcggcctggccgaggcgctcgtcgcgcgcgggtaccgcgtcatgctgttcgacctcttcgggcgcggctactcggacgcgcccgccgacctgccctacgacctgcgcctgtacaccacccaggtcctgctggcgctggcgagctcgccgctggcctggacggggacggggacggggacgagcagcgccgccacagacgatgacgggggggcgagtaatgccggatttcacctggtcgggtactcgctgggcggcgggctcgcagtgtcctttgcgcgctacttcgccggcatgctgaagtcggtcgtcgtgatcgccggaggcgggctcatccgcggcgagcacgtggggtggaggagccgggtgctgtactcggcggcaacggcgaggtgggtgcccgacgggctggtgaggtggttcgtgaggaggcggttgatgccccgtaggactggcgcggagggcgggcaggggcaggggcaggacggcgcggtcacggagacggagatggccaaggaggtggtggaggtaaagggacgccacaagaacagcgacgcgagcgggggccggtcgttcgacaacgcggtgctcctggcgcggcggccggagcacaccgtctcgtcggtcatggagtggcagctacggcatcacgacgggttcatccccgcgttcgtgagcagcatccggcacgcgcccatctacgaccaaaaggaggactggctcgcgctggggcagatgctggccgagaggagggagaagcagggctgggaggacgacgcggccgaccggtcgccggggcccgggctcagcggaggcaagatcctgctggtgctgggggcatccgacccggtcatcgtgaaggaggagctgatccatgacgccaccgccgttctgggcgaggacgggttcgaggcggtggtgctggacgccggtcacgagctcgtcatgaccaaggccgacgaagtggcagccgtgatgacgaatttctgggaaagaactacaaaatga

SEQ ID NO: 1250 - protein, 469 aa, Myceliophthora thermophilia
MPAWALALRSQSSAGGGGGCGGEAALYLALGAAFGISTCLLANTLLGFSFASSSSPPPSTTSPASHKPAIPSPLRTHLPTLAPAAVAALPYPPDVLPGGRAVATPYGTIQVFEWGPPRGEKVLLLHGISTPCVALGGLAEALVARGYRVMLFDLFGRGYSDAPADLPYDLRLYTTQVLLALASSPLAWTGTGTGTSSAATDDDGGASNAGFHLVGYSLGGGLAVSFARYFAGMLKSVVVIAGGGLIRGEHVGWRSRVLYSAATARWVPDGLVRWFVRRRLMPRRTGAEGGQGQGQDGAVTETEMAKEVVEVKGRHKNSDASGGRSFDNAVLLARRPEHTVSSVMEWQLRHHDGFIPAFVSSIRHAPIYDQKEDWLALGQMLAERREKQGWEDDAADRSPGPGLSGGKILLVLGASDPVIVKEELIHDATAVLGEDGFEAVVLDAGHELVMTKADEVAAVMTNFWERTTK

SEQ ID NO: 1251 - protein, 408 aa, Myceliophthora thermophilia
SPASHKPAIPSPLRTHLPTLAPAAVAALPYPPDVLPGGRAVATPYGTIQVFEWGPPRGEKVLLLHGISTPCVALGGLAEALVARGYRVMLFDLFGRGYSDAPADLPYDLRLYTTQVLLALASSPLAWTGTGTGTSSAATDDDGGASNAGFHLVGYSLGGGLAVSFARYFAGMLKSVVVIAGGGLIRGEHVGWRSRVLYSAATARWVPDGLVRWFVRRRLMPRRTGAEGGQGQGQDGAVTETEMAKEVVEVKGRHKNSDASGGRSFDNAVLLARRPEHTVSSVMEWQLRHHDGFIPAFVSSIRHAPIYDQKEDWLALGQMLAERREKQGWEDDAADRSPGPGLSGGKILLVLGASDPVIVKEELIHDATAVLGEDGFEAVVLDAGHELVMTKADEVAAVMTNFWERTTK

SEQ ID NO: 1252 - DNA, 1566 bp, Myceliophthora thermophilia
atggcgccacagtcaatcgcccagctcttccctcgccatcgccggggaccaagtcggcccctaatcttgctcatcgccggcctagcattcctgacactgtgtctcttcgcctcccacttgccggtcttgcgacacttcaccagcgtgcggccgttcggcgcttcgaccgacagaagccggatgacgtctgcgggcccaggtgctgctacatcgccccaccaacaccaccaaggtccctcagaagcccaggtcctgctcgatctgatcgagcgggaaaaggccaaaaagttcggcgagctcgcgatggaatacggcacaaacaagcatccgtccttcagggatgacccgccgctgctcatcgcggatcttccccgagagcacgtcccgtctcacccaccgccgtcgctgggagacggagaggacaggacgaatggaaagaggttggtcatcgttggcgacgtgcatgggcaccgtgcggcgctcgaggcccttctgcgcaagattgggtttgaccacagaaacggggaccaccttatcctcgctggtgacatggtcaccaagggacccgatagcaagggcgtggtcgagctggccatggagatcggagcgagtgctgtgaggggcaaccaggacgacaaggtgctagcgaccgcccgggagattggccggttctcggtcgatggcgagtcgacgccggggccggcgaccgaagaggatgatgaacaagacgaagtgggcgggaaagagggagcggatggcaaggcagagaccaagacccggcgcaaggccaacgctcgccgagtcgcccgttccctaacccgctcccagctcgcctggatccggtcactcccgctgatcctccgcgtcgggaacattccgggcgcgacctcacccccatggaacgccagcacgctagtcgtgatccacggcggtctggttcccggcctgccaccagagaagcaggacccctgggcggtgatgaacatgcggagtctaatatacccgcgcgtgggcaaggggaagaaaaacaaggacaaagacgggagacgccatgctcgtgatgaaccagaatcggaaatcgacgagacggaaaccgacatggacgagactgatcccgccagcgttcgggccgcggtcgccatccccaccgaccgccatggcggcgagccatggagccacgcctggaaccgctatcagaacaacctgccccccacagcccctcgcaccgtagccgtctacggccacgacgccaaagcaggactgcaagttgaccctgtagtcgacatctccccctactccggttccccgtcatcatccaagaagaagaagaagaagaagaacaagaagaacaaacataaggacaagaacgggaaagaccacgtaaacgatgcggccgaagacgaggacaaagcggaagaccagggtgcgaagaaaggcatccggtacgccttcggtctcgactcggggtgcggccacggcaggcagcttaccgcgttggttattgaatccggggccgatggaataaaacacaggattgaacaagtagattgcgcagatgttgtttag

SEQ ID NO: 1253 - protein, 521 aa, Myceliophthora thermophilia
MAPQSIAQLFPRHRRGPSRPLILLIAGLAFLTLCLFASHLPVLRHFTSVRPFGASTDRSRMTSAGPGAATSPHQHHQGPSEAQVLLDLIEREKAKKFGELAMEYGTNKHPSFRDDPPLLIADLPREHVPSHPPPSLGDGEDRTNGKRLVIVGDVHGHRAALEALLRKIGFDHRNGDHLILAGDMVTKGPDSKGVVELAMEIGASAVRGNQDDKVLATAREIGRFSVDGESTPGPATEEDDEQDEVGGKEGADGKAETKTRRKANARRVARSLTRSQLAWIRSLPLILRVGNIPGATSPPWNASTLVVIHGGLVPGLPPEKQDPWAVMNMRSLIYPRVGKGKKNKDKDGRRHARDEPESEIDETETDMDETDPASVRAAVAIPTDRHGGEPWSHAWNRYQNNLPPTAPRTVAVYGHDAKAGLQVDPVVDISPYSGSPSSSKKKKKKKNKKNKHKDKNGKDHVNDAAEDEDKAEDQGAKKGIRYAFGLDSGCGHGRQLTALVIESGADGIKHRIEQVDCADVV

SEQ ID NO: 1254 - protein, 484 aa, Myceliophthora thermophilia
SHLPVLRHFTSVRPFGASTDRSRMTSAGPGAATSPHQHHQGPSEAQVLLDLIEREKAKKFGELAMEYGTNKHPSFRDDPPLLIADLPREHVPSHPPPSLGDGEDRTNGKRLVIVGDVHGHRAALEALLRKIGFDHRNGDHLILAGDMVTKGPDSKGVVELAMEIGASAVRGNQDDKVLATAREIGRFSVDGESTPGPATEEDDEQDEVGGKEGADGKAETKTRRKANARRVARSLTRSQLAWIRSLPLILRVGNIPGATSPPWNASTLVVIHGGLVPGLPPEKQDPWAVMNMRSLIYPRVGKGKKNKDKDGRRHARDEPESEIDETETDMDETDPASVRAAVAIPTDRHGGEPWSHAWNRYQNNLPPTAPRTVAVYGHDAKAGLQVDPVVDISPYSGSPSSSKKKKKKKNKKNKHKDKNGKDHVNDAAEDEDKAEDQGAKKGIRYAFGLDSGCGHGRQLTALVIESGADGIKHRIEQVDCADVV

SEQ ID NO: 1255 - DNA, 7080 bp, Myceliophthora thermophilia
atgtcgcaacccttcggatttttgttcttcttgtcgctccttaattctgccagacagtactccgaaccggtgaaaacgacattcgcaaagctgtcgccgaaaaccccccctcgtgcatcggcacaggaccgacggagggactcttgggaaccagacaaaccgccggctgcgtctcctgcgctctccagtgcctcgaccgccgacggcgaggcctctcccgagctcccgcctctcctagcgcccagactgcccgagcgcgttcttgggctgctgaggacgccgccggacgatcgtgcagagtcggaggacggcagtgctgcagactacggcgccaacccgtgggggtcgccatatcccccacaccttcggaaccggagttcgagcagcccgagcgcgagcagtgagacgtcggaagactcgccggtccatcggctggagcttcagaccccgttcctgcggcccgccccgcccacatccacacaagactcccagccacaggcacgactgccggagatcagtgcagccgcggccgtcctcgctaaccgggcgagacgtatcgcgaacggtatcaccgagggctggatccggcagcacaccgccgggggcgctgtcgagcaggagaggcggcattggttcagcgacggagacagcgagaactcttcactgagcgactccctctccggcgaggaagctgcctggctaggcgacgacaacgtccagacgcccaaggcaagccgcaacggggacagcctcaggatcagacaggtttctcgcggcggactagggaaacagtctagcaacgagacgctccggccgtcgcacccgagccgcagaaaaggagccgcggctgcgacaatggcgtcctcggacgacctggccacgcccgatagcgtagcagaatccaacccaactgccgggccgacccagagacctcacacccctacagccgatcacaatgcagggccgaacccaaccgccgccagcggtcccgatcccgggcccaaccccccgctcacgccgtcgagagcggtcaagcgggcagcaaccgcgacgccgccgcgtgtgaagaagaagatcccctggaagggcaagagcgtgatcgtgctgctccccaaggacgaagagcgtggtcagcccgggaaaccccctattcccctgacagaggccaacgtcatcggcatgctccgaagttggcaggagctcggatacgacattggcggctttgatctgtacgagccggacgaggatgcagaccccagggattcgtcacaaagcaagcgtgcctggccagaccctgcagacatactacaggagctgcaggagcgtgacttcaaggtggttcttccagacttgaatgcgtggaagaggtatgtcgacgagttgaacgaggcgaagctccgcgcacttggggtttcatttgcagacgaagagccccctccgccctcgatttccccggcgtctgcacttagcagacaaccgtccattgcgcaatacccgccgctcccattctctccgcccatcccgacatcgtcggcgtctagtaatcaggcgcttgccgggttccccttccccgcccagctcgtgacgtccgccgctcagagccccggtgtcccagccggagtctcgccggggccgtttggtgccaaattcaatccccgcgcatcgatctcgggatcatcaccacatgcgtggtctccacaattgcttctgcaacaaggtcatcgcggcggttcgccttcccttgctaatctcggggcggtcatgtcgccggcgtcgcccttctctcccgacggaataccgggttctgtgggacatcaacgtcaccagtcactccagttttctacgttgccgcatcaattccagcccccagtgagggcctcgcctcgtcttcaggagctccgcgaggtggacgaggaagcagtggccgacgctcctcccgcgacttctgagcagcagcgctttgtccgccacaacgccagtgacagcctgcaaagagaaattgacgaggcggagtaccacttggaggaacagatgcggtcacagcttgacaatgaccaagattacagtccgcacaacgacaaggacaagccagaggcgggtccgagcagctcggcccttggccatgcgggagaccagcttatgcagttcgcacctcagtctcatcggtttgccagtgacgcggacggcctcgttctacatcatccccggccccatagccgtggacattcgctgtcccagaagtacttcaccgaggacgatgtctccaaacagggagcgttcaggcccacgctgcagcagatcaatgcccagccggccgaagaggacgagatcgagacgaatccgagcaacctggggacgcccgtgcaagcattggagttctccaagctcgtacatcagcgcggtttctccaccgccagcaacccgtggaccgaggagcctagcaaccctcccaagagcagccatcaaccccaccagagccgtggcagtgtttcctccttctcaaagctcaatgtggaggcgcccgagttcaagttcaaccccacgggtactttcagtcccactagtgctttcaaccccacgacgagcaccttcaacccgggcgcgttcagtttcacaagcaactcgttccagcccatggcgttcaacgctggcatgaactcggccacgttgagccaaccccgtttaccgacgactggctcttccaagatcaacgtcaatgctcctgtcttctcgccgggccagagcgagttcagcttctcgaccacgggccccaagttccgaccagatgccccagctttcactccccattcactgtctacgtcgctcacgagccccatcacgtcggggcccgagagtggtagcaacctgggcggctccgtatttggcaccatcgacctcaagggtgccgaccacgccaagcccggcaagaggtccaaggccatcccgattgttgcgccagaccgtcggaaatctcctgcggccagtggcacgcagtatgatgccgacgatcgcccggttgtcgatgagtcccgcatcaagagggctcgggcaaatgccgagaatggcgacgatgtaccgcttttcgccgagcgcgctaaggaggacacgcccgcccctgtgtctcagccggatacatccggtcaagaggatggcgtgccggtggaggagaaatcgtttgatgagtctaatctgggcatgtcgtcaaccatggtctccgagacgacagatacgaaggccacagttagcccgtctgaaccctcgccggaacaagccacggtgaagtgggcacccttcgagttcaacaacaagtcggatgcgcaagccttcaacgatgcgaggccgttcgatcctgaagcgctcaagcctgctcataaaaagtcgttgtctgcaaccgcgaaggagttcgtgccgggtgcggcagtatgggaggcggctgttgaacaggctgaggagcctgttgtggaccagaagtccgttcagcctgttgccggagatgcagacacggcagccgaggacgatgccgtcgctatctccgcgaaggcgcccgaacgctcggagcaagaggaagcggcacaacctcccgaagagcaagccgaagaaggagaagttgcagatgctaccactgcgcccgcggagcccggtccgcaaacgctctcctcggaaaaggggctttccgcttcacgatatgcccaggcttcgccgcctccgccgccgcaacccaaacgaactggcctggccgcctcccgcttcgctgcccctcctccctcaccaccctcggaggatgcgccggttgccgccgaccacaccgtctcacctctgtctgctgaggaacagcctgccatgccaaatggcgagcaggcagcaggcgagccgtccatggctgatatagatgaagtgatgcgtcttatgaacgagaacccggatatgggcgtgaacaggacgtacgatgatcattcaccgtggcatgagcacagtccgttgcctcagtctcccattgctcgtgccgtggagtcgtcaccttctcgcctgcccccgagctactctcgcagcgacgctccgagcccgagccaggcggatggtctccaatcagcggctgtggagctggaagatccctttgttgaaccccctcgcagcggccagtccgtcgagggcgctattcaccgtctcaatggaagcgagagcttgcctgctagtgactgggaaggcgtcttcggtgaagaggagcagaacgagctcgagtcacgggttggcttcttcgacggccgtgtcaaccagcttgtcggtggcttgcttgacgcgcgcctcggccctcttgagcggactctggatagtatcaaccgggctctgtcgaggcggactcgatccagccgtcgcgagggaggcagcatttctgtcgacaaccgtgacagcgacgccgatgatgaggatgatgaggtgcctggtccgccgcggtccctcagtccacgccgcgaccgcaagatggagcaaattcgcgccgctgttctggacgcatttgccgtgcaacgccgaaaccagtcagcagagctccggccttctacctcacaggcatcggataactcttttgtcctgaaggcactggaggagatgagggagcagatgaaggaggagctcggccgctcagtccagcctgcaatccgcagcgaagaaatcaggagcatcctggaggatgttgtggagcgccgcattccgcctccacagccggccgcggataaggatgagcaactcaacgagcttcaagcccgcgttgctgagctagaacaacaacttgttgccgaacgaaccaaggccgaggccgaggtatcggcgaggcgggccgccgaggaccgggccgccgaggccaatcgtgaactccactctgctgctaccaggattgaggtcgagatgatgaacaagagcgcgttgaaccggcggattgccgacctcgaagagcgactgcagcatgcggagggccaggcggaagaggaagtcaagggccgaagagcagcggaggatcgcctctctgaagtccaacgcctgcttcggatatcgtccgaggaagagacgcggctccgggagcttgtcgacgagaaggaccagaggatcaagttaatcgaggccgtcaatagcaagaatgcgatgcgtctcaccgtcttggaggcaagccaggccaatgtccaccaggcccagagcgaagcccagaaccggatcaactcgcttgaggctgacgcccgcgaggcacgcaaggaagctcagcactggcggtccgagactgatcgcatcgtcgccatcatccaaaggcgtgacaaggatcttgcccaggccctcgacgagaacaaggctatgcacaagcttatcgacactctgggcacccagctgcaggaaaacgagcgcgtgcgtgacacctggcgtgccaagttcatcgcgatgcaagacgaaatggcccaggcaaccaaagccatcaccgaggaaaatgctcgccggatcaagaaggagcaggcgctgctcgccaagcaagaggttctcgaggccagactgcaggctgaggccaggacccgggagcgtatcgagacggagctcgagaggctggagatgggtgagcgccaaggcatgagggctgtcgccgagtgtaagaggcttgagggccttctggccgagttgcgcgccgagaaccacaagctccatcagagcgctctccgctaccaggccgagttccgagaggccagagaatcgggcgcgcgcgaggtccaacgtacgcgcgaggcgatgcaggccgaagtggagaacgcgaatcaccaggtcaacgtcgctcgcgaggagctcgaggcccaggtgtcgcggctccgggccgagctcgaccaagtcaggttggatgcggatacggccaaggcccgccacgatatgctcctcgaggaagcacagaattcgaagcaggccgagatagaggagctggtgcggaagcaccagaacgaggtcgaggacttgcaggcgcgctacgagcgtcagctcagcaacacgacggaggatgcccagagggccgagcagaacctcctggaacgtctcagcatctcgacgtccaagtcggagtacctccaggacaaggtggcgcacctggaggagaagctggagattgccaaggaggctgcccgggcggccgctcaggccgcgaagtctgcttccggctccggaactgcagccgctcaagccgagcccgccgcctcatcgcgtcagcttgaactgccagaaaagatatcgccgcaggccctgcgcgaatccatcatggtattgcaggagcagctgcaggaacgggagcagcggatcgaggagctggagaccaagctctccaagactgacccagaggccgaggtcaagatttcgaagcgcgacgacgagatcatctggcttcgcgaacttctcgccgtgcgccactcggatcttcaagacatcatcactgccctaagccgtgatgactacgacaagaacgccgtcaaggacgctgccatccgtctcaaggcgaacctgcagatggaggagcaggagcgcgagagggcgatgaacgggggctcggccatcaatctgcctaacatcgcggccactatccaggccgcaacccctcgagttgcccaggcagtcggccctctcgccgcagcatggggcaactggcggaaggcgcgggagctcggcagcgtcctgtcgtctcccgccccggccaacggaaaggcctcgacgccctcgcgggctagctctgcctcgggtggtctcttcggtggactcatgacacctccggcatctcgcatgcgcacaacgcccccgaaccaggccaagcagccgaccgcgttctccagcacgggacgccggttcacggcgcaagacctcgccaacaggccgaagccgccgcgttcctcagcctccccttcgctcgcagacgacgcgaagggtaaagcgcccgcggcagccgcgcaagagacgcctcagcggcgcccgctcgccgagcctgtcacgccgcccatgatgagctccaagacgtatgatgatgatgcccaagccgaggactttgatgatgccgggttcttcgaggattaa

SEQ ID NO: 1256 - protein, 2359 aa, Myceliophthora thermophilia
MSQPFGFLFFLSLLNSARQYSEPVKTTFAKLSPKTPPRASAQDRRRDSWEPDKPPAASPALSSASTADGEASPELPPLLAPRLPERVLGLLRTPPDDRAESEDGSAADYGANPWGSPYPPHLRNRSSSSPSASSETSEDSPVHRLELQTPFLRPAPPTSTQDSQPQARLPEISAAAAVLANRARRIANGITEGWIRQHTAGGAVEQERRHWFSDGDSENSSLSDSLSGEEAAWLGDDNVQTPKASRNGDSLRIRQVSRGGLGKQSSNETLRPSHPSRRKGAAAATMASSDDLATPDSVAESNPTAGPTQRPHTPTADHNAGPNPTAASGPDPGPNPPLTPSRAVKRAATATPPRVKKKIPWKGKSVIVLLPKDEERGQPGKPPIPLTEANVIGMLRSWQELGYDIGGFDLYEPDEDADPRDSSQSKRAWPDPADILQELQERDFKVVLPDLNAWKRYVDELNEAKLRALGVSFADEEPPPPSISPASALSRQPSIAQYPPLPFSPPIPTSSASSNQALAGFPFPAQLVTSAAQSPGVPAGVSPGPFGAKFNPRASISGSSPHAWSPQLLLQQGHRGGSPSLANLGAVMSPASPFSPDGIPGSVGHQRHQSLQFSTLPHQFQPPVRASPRLQELREVDEEAVADAPPATSEQQRFVRHNASDSLQREIDEAEYHLEEQMRSQLDNDQDYSPHNDKDKPEAGPSSSALGHAGDQLMQFAPQSHRFASDADGLVLHHPRPHSRGHSLSQKYFTEDDVSKQGAFRPTLQQINAQPAEEDEIETNPSNLGTPVQALEFSKLVHQRGFSTASNPWTEEPSNPPKSSHQPHQSRGSVSSFSKLNVEAPEFKFNPTGTFSPTSAFNPTTSTFNPGAFSFTSNSFQPMAFNAGMNSATLSQPRLPTTGSSKINVNAPVFSPGQSEFSFSTTGPKFRPDAPAFTPHSLSTSLTSPITSGPESGSNLGGSVFGTIDLKGADHAKPGKRSKAIPIVAPDRRKSPAASGTQYDADDRPVVDESRIKRARANAENGDDVPLFAERAKEDTPAPVSQPDTSGQEDGVPVEEKSFDESNLGMSSTMVSETTDTKATVSPSEPSPEQATVKWAPFEFNNKSDAQAFNDARPFDPEALKPAHKKSLSATAKEFVPGAAVWEAAVEQAEEPVVDQKSVQPVAGDADTAAEDDAVAISAKAPERSEQEEAAQPPEEQAEEGEVADATTAPAEPGPQTLSSEKGLSASRYAQASPPPPPQPKRTGLAASRFAAPPPSPPSEDAPVAADHTVSPLSAEEQPAMPNGEQAAGEPSMADIDEVMRLMNENPDMGVNRTYDDHSPWHEHSPLPQSPIARAVESSPSRLPPSYSRSDAPSPSQADGLQSAAVELEDPFVEPPRSGQSVEGAIHRLNGSESLPASDWEGVFGEEEQNELESRVGFFDGRVNQLVGGLLDARLGPLERTLDSINRALSRRTRSSRREGGSISVDNRDSDADDEDDEVPGPPRSLSPRRDRKMEQIRAAVLDAFAVQRRNQSAELRPSTSQASDNSFVLKALEEMREQMKEELGRSVQPAIRSEEIRSILEDVVERRIPPPQPAADKDEQLNELQARVAELEQQLVAERTKAEAEVSARRAAEDRAAEANRELHSAATRIEVEMMNKSALNRRIADLEERLQHAEGQAEEEVKGRRAAEDRLSEVQRLLRISSEEETRLRELVDEKDQRIKLIEAVNSKNAMRLTVLEASQANVHQAQSEAQNRINSLEADAREARKEAQHWRSETDRIVAIIQRRDKDLAQALDENKAMHKLIDTLGTQLQENERVRDTWRAKFIAMQDEMAQATKAITEENARRIKKEQALLAKQEVLEARLQAEARTRERIETELERLEMGERQGMRAVAECKRLEGLLAELRAENHKLHQSALRYQAEFREARESGAREVQRTREAMQAEVENANHQVNVAREELEAQVSRLRAELDQVRLDADTAKARHDMLLEEAQNSKQAEIEELVRKHQNEVEDLQARYERQLSNTTEDAQRAEQNLLERLSISTSKSEYLQDKVAHLEEKLEIAKEAARAAAQAAKSASGSGTAAAQAEPAASSRQLELPEKISPQALRESIMVLQEQLQEREQRIEELETKLSKTDPEAEVKISKRDDEIIWLRELLAVRHSDLQDIITALSRDDYDKNAVKDAAIRLKANLQMEEQERERAMNGGSAINLPNIAATIQAATPRVAQAVGPLAAAWGNWRKARELGSVLSSPAPANGKASTPSRASSASGGLFGGLMTPPASRMRTTPPNQAKQPTAFSSTGRRFTAQDLANRPKPPRSSASPSLADDAKGKAPAAAAQETPQRRPLAEPVTPPMMSSKTYDDDAQAEDFDDAGFFED

SEQ ID NO: 1257 - protein, 2340 aa, Myceliophthora thermophilia
YSEPVKTTFAKLSPKTPPRASAQDRRRDSWEPDKPPAASPALSSASTADGEASPELPPLLAPRLPERVLGLLRTPPDDRAESEDGSAADYGANPWGSPYPPHLRNRSSSSPSASSETSEDSPVHRLELQTPFLRPAPPTSTQDSQPQARLPEISAAAAVLANRARRIANGITEGWIRQHTAGGAVEQERRHWFSDGDSENSSLSDSLSGEEAAWLGDDNVQTPKASRNGDSLRIRQVSRGGLGKQSSNETLRPSHPSRRKGAAAATMASSDDLATPDSVAESNPTAGPTQRPHTPTADHNAGPNPTAASGPDPGPNPPLTPSRAVKRAATATPPRVKKKIPWKGKSVIVLLPKDEERGQPGKPPIPLTEANVIGMLRSWQELGYDIGGFDLYEPDEDADPRDSSQSKRAWPDPADILQELQERDFKVVLPDLNAWKRYVDELNEAKLRALGVSFADEEPPPPSISPASALSRQPSIAQYPPLPFSPPIPTSSASSNQALAGFPFPAQLVTSAAQSPGVPAGVSPGPFGAKFNPRASISGSSPHAWSPQLLLQQGHRGGSPSLANLGAVMSPASPFSPDGIPGSVGHQRHQSLQFSTLPHQFQPPVRASPRLQELREVDEEAVADAPPATSEQQRFVRHNASDSLQREIDEAEYHLEEQMRSQLDNDQDYSPHNDKDKPEAGPSSSALGHAGDQLMQFAPQSHRFASDADGLVLHHPRPHSRGHSLSQKYFTEDDVSKQGAFRPTLQQINAQPAEEDEIETNPSNLGTPVQALEFSKLVHQRGFSTASNPWTEEPSNPPKSSHQPHQSRGSVSSFSKLNVEAPEFKFNPTGTFSPTSAFNPTTSTFNPGAFSFTSNSFQPMAFNAGMNSATLSQPRLPTTGSSKINVNAPVFSPGQSEFSFSTTGPKFRPDAPAFTPHSLSTSLTSPITSGPESGSNLGGSVFGTIDLKGADHAKPGKRSKAIPIVAPDRRKSPAASGTQYDADDRPVVDESRIKRARANAENGDDVPLFAERAKEDTPAPVSQPDTSGQEDGVPVEEKSFDESNLGMSSTMVSETTDTKATVSPSEPSPEQATVKWAPFEFNNKSDAQAFNDARPFDPEALKPAHKKSLSATAKEFVPGAAVWEAAVEQAEEPVVDQKSVQPVAGDADTAAEDDAVAISAKAPERSEQEEAAQPPEEQAEEGEVADATTAPAEPGPQTLSSEKGLSASRYAQASPPPPPQPKRTGLAASRFAAPPPSPPSEDAPVAADHTVSPLSAEEQPAMPNGEQAAGEPSMADIDEVMRLMNENPDMGVNRTYDDHSPWHEHSPLPQSPIARAVESSPSRLPPSYSRSDAPSPSQADGLQSAAVELEDPFVEPPRSGQSVEGAIHRLNGSESLPASDWEGVFGEEEQNELESRVGFFDGRVNQLVGGLLDARLGPLERTLDSINRALSRRTRSSRREGGSISVDNRDSDADDEDDEVPGPPRSLSPRRDRKMEQIRAAVLDAFAVQRRNQSAELRPSTSQASDNSFVLKALEEMREQMKEELGRSVQPAIRSEEIRSILEDVVERRIPPPQPAADKDEQLNELQARVAELEQQLVAERTKAEAEVSARRAAEDRAAEANRELHSAATRIEVEMMNKSALNRRIADLEERLQHAEGQAEEEVKGRRAAEDRLSEVQRLLRISSEEETRLRELVDEKDQRIKLIEAVNSKNAMRLTVLEASQANVHQAQSEAQNRINSLEADAREARKEAQHWRSETDRIVAIIQRRDKDLAQALDENKAMHKLIDTLGTQLQENERVRDTWRAKFIAMQDEMAQATKAITEENARRIKKEQALLAKQEVLEARLQAEARTRERIETELERLEMGERQGMRAVAECKRLEGLLAELRAENHKLHQSALRYQAEFREARESGAREVQRTREAMQAEVENANHQVNVAREELEAQVSRLRAELDQVRLDADTAKARHDMLLEEAQNSKQAEIEELVRKHQNEVEDLQARYERQLSNTTEDAQRAEQNLLERLSISTSKSEYLQDKVAHLEEKLEIAKEAARAAAQAAKSASGSGTAAAQAEPAASSRQLELPEKISPQALRESIMVLQEQLQEREQRIEELETKLSKTDPEAEVKISKRDDEIIWLRELLAVRHSDLQDIITALSRDDYDKNAVKDAAIRLKANLQMEEQERERAMNGGSAINLPNIAATIQAATPRVAQAVGPLAAAWGNWRKARELGSVLSSPAPANGKASTPSRASSASGGLFGGLMTPPASRMRTTPPNQAKQPTAFSSTGRRFTAQDLANRPKPPRSSASPSLADDAKGKAPAAAAQETPQRRPLAEPVTPPMMSSKTYDDDAQAEDFDDAGFFED

SEQ ID NO: 1258 - DNA, 1698 bp, Myceliophthora thermophilia
atggccgtaggaggacgcgtggtccgctggagcatttcactcgtccatggcctgctgctcctctttctacctacgaccctagcgctaggcaccgagttcgatgtttgggaagtcaccatcgacagcctgcacgatgcgctctttagccggagcgtcacatgcagagaggtcgtctcctctttcattgcgcggatcgaggagtacaacccccgaatcaacgcggtcatctcgctgaacccgacggcgctctcggacgcggatggcttggacgcccggattgccgcggggaacgtgacgggcgcactgttctgcgtccccgtgctcctcaaggacaacttcgacgccgtcggcatgagcaccacgggcgggtgtcgggcgctggcccataacaagcctttggaggacgcgccgacggtcagggctctgaaggacgccggcgccgtcatcctcggcaagaccaatctgcacgagatggccctggaagggctgaccgtgtcgtcgttctgcggccagacggtcaacccgtacgacctgacgcggaccccgggcgggagcagcggagggagcggcgcagccgtggcagcaagcttcgccgtcctcgcgacggggaccgacacggtcaactccctccgcagcccggcgagcgcgaacgcgctgttcagcttccggcccacgaggggcctgatctcgagagccggagtcatccccgtcagctacacccaggacgccgtcggggccatggcacgcaaccccagagacctcgcggtggcgctgacggtcatggcgagcgtcgggtacgatccccgggacaatgtcacagccctggccccgccagaggcgaggcagagagactacgctgcgaccctgcaattggaccgcaacggcttggaaggcttgcgcctcggcctgctgaacggcttcttcaaccagacggcctcgcccgagacgacgccagtcaacgacatcatggcgagcatgctgtccaaactcgcggcagccggggccgagattgtaaacatcacggatcgctttcccagtacgctttcggttgcgaagctggacgtacaggcattcgagttccgggaggcgctcgactcctatctcgaggcggccgccctctcgcacccggcaagcttcggagaactgtacggcggcggcggcggcggcggtgaattccttgtcatcccggctcaacaccgcttcatcaacagggcagcctcttcatcgaccactgacgtcgcatatctcgacgccctgcaccgcatccggaacctgaccctcgagctcagagccacgtttgcaacccacaggctagacgctatcatctaccctgagcaacaaaacctcgtcgtcaaggtcggctcgccgtcacagagcggccgcaacggcatcttggccgctctgacggggcacccggtcgtctgcgtgccggcaggcctgtcgcctccctcagacgacgcccctctaggcgttcccgtgggcatggagatcctcggccgaccgtggagcgaagatctgctgctgagcattgcgagtcgtatcagcgagctcgtcccggtccgcaagatgcccccgtttgccaacgggaccgcggagcacagggtgtatgatagcgtgccctcgatcaccccgaatgtagcaaatattcctgaggtgtatccgctgggtgtgtttcaggccacgatgtctcaagtctga

SEQ ID NO: 1259 - protein, 565 aa, Myceliophthora thermophilia
MAVGGRVVRWSISLVHGLLLLFLPTTLALGTEFDVWEVTIDSLHDALFSRSVTCREVVSSFIARIEEYNPRINAVISLNPTALSDADGLDARIAAGNVTGALFCVPVLLKDNFDAVGMSTTGGCRALAHNKPLEDAPTVRALKDAGAVILGKTNLHEMALEGLTVSSFCGQTVNPYDLTRTPGGSSGGSGAAVAASFAVLATGTDTVNSLRSPASANALFSFRPTRGLISRAGVIPVSYTQDAVGAMARNPRDLAVALTVMASVGYDPRDNVTALAPPEARQRDYAATLQLDRNGLEGLRLGLLNGFFNQTASPETTPVNDIMASMLSKLAAAGAEIVNITDRFPSTLSVAKLDVQAFEFREALDSYLEAAALSHPASFGELYGGGGGGGEFLVIPAQHRFINRAASSSTTDVAYLDALHRIRNLTLELRATFATHRLDAIIYPEQQNLVVKVGSPSQSGRNGILAALTGHPVVCVPAGLSPPSDDAPLGVPVGMEILGRPWSEDLLLSIASRISELVPVRKMPPFANGTAEHRVYDSVPSITPNVANIPEVYPLGVFQATMSQV

SEQ ID NO: 1260 - protein, 537 aa, Myceliophthora thermophilia
LGTEFDVWEVTIDSLHDALFSRSVTCREVVSSFIARIEEYNPRINAVISLNPTALSDADGLDARIAAGNVTGALFCVPVLLKDNFDAVGMSTTGGCRALAHNKPLEDAPTVRALKDAGAVILGKTNLHEMALEGLTVSSFCGQTVNPYDLTRTPGGSSGGSGAAVAASFAVLATGTDTVNSLRSPASANALFSFRPTRGLISRAGVIPVSYTQDAVGAMARNPRDLAVALTVMASVGYDPRDNVTALAPPEARQRDYAATLQLDRNGLEGLRLGLLNGFFNQTASPETTPVNDIMASMLSKLAAAGAEIVNITDRFPSTLSVAKLDVQAFEFREALDSYLEAAALSHPASFGELYGGGGGGGEFLVIPAQHRFINRAASSSTTDVAYLDALHRIRNLTLELRATFATHRLDAIIYPEQQNLVVKVGSPSQSGRNGILAALTGHPVVCVPAGLSPPSDDAPLGVPVGMEILGRPWSEDLLLSIASRISELVPVRKMPPFANGTAEHRVYDSVPSITPNVANIPEVYPLGVFQATMSQV

SEQ ID NO: 1261 - DNA, 1599 bp, Myceliophthora thermophilia
atgcccgaacttcttctccaatcagccttgacgacttccagatcccaacaactcgctgccgaagcggccgagatcagatcctcttgccgcgaccgacatggcgaccgcaagtccctggtcacatgtccgcaatgttacgaagctgtccttgacgccttccgaagccgctatcttggctcctctctgaattctggcgccgaggggcccggctcgggtcagaaacaacaagcggctcgacaagaatggttcgcctcccggcccgcctttgtctcggctctcaacctgctggtcgactccgccaaggagtaccagatctcgccgcgcgagattgacgaccgtgtgcgggaggagcgggcgagatggtatgccgagagggtgcgctcgttgttgctgaggttgatggtggaggacccttctgggcgcggggccgtgtttgagaagctcgaggacctgtcttccggggacgcgcttgcgctggcgagggaggtcgccgacatcctgagcaaggggccatttgcgcccgagcaagggaccgcagagggagttgcggaaagattgttggccgcgtcggcgagcaataagacggcggacaaggctgacgtcttccgagaggccttcttcgcagccgaggatggcaccgtgcccggagatcaccaaaagtatctcgacctgttgctccaccaggggttgtcgatggagcaggtcgtagatcgtatccttgaggagcggcaaacggcaacgggcgcaagggaacagacggacaagctcaaccagcggctcgatgagctccggagggcccgggccgcacacgaggcccagaagaccagaaaggcgcagcggagggagagcctggctcagcagaaagtcccagacgagctgtacgagctcccggcctgtgccgtttgcggaggagaaacgagcacggaggagtatttcacttgcagtatatgcaccattctcgcgggggcgggcgtgcaggataagacgactgtattctgctctgagaaatgcgaacaacagagtcatccctcccacgcagcaacacacacctgctcttccggtctgagttgcattcggcttcgcgaaccacaacaacagactcccaagaaggagaccaacacatcccccaacggccagaatcaggaccagcaacaagacacgcgcatgaccgacgcgcctcccttatcaaacaccaccggcgacgacggcagcgacgacgacggaaataacaacaacaacaacaacaaccacaacgatgacaacgataacagcagcagcagcagtgacgccaacgagctccacttctgcaccgagtgcctcacgcgtctaaagcagcccacaacctggtgcagcctcgcctgcgccgatgccagcttcccatcccaccgcgaggaagtgcacctaccgctgcgaaagaagctcggcttgggagaaacggccgacgaggcgcagctggagcctatcgagccaggtgctgctgaagacgatgggagaaggcgttatcgcgtcaagaacatcagggaggtcacgacctcgctgggggatgcggttaaggaatgggagggaaggaataaagtgaggttacagggtttggtttga

SEQ ID NO: 1262 - protein, 532 aa, Myceliophthora thermophilia
MPELLLQSALTTSRSQQLAAEAAEIRSSCRDRHGDRKSLVTCPQCYEAVLDAFRSRYLGSSLNSGAEGPGSGQKQQAARQEWFASRPAFVSALNLLVDSAKEYQISPREIDDRVREERARWYAERVRSLLLRLMVEDPSGRGAVFEKLEDLSSGDALALAREVADILSKGPFAPEQGTAEGVAERLLAASASNKTADKADVFREAFFAAEDGTVPGDHQKYLDLLLHQGLSMEQVVDRILEERQTATGAREQTDKLNQRLDELRRARAAHEAQKTRKAQRRESLAQQKVPDELYELPACAVCGGETSTEEYFTCSICTILAGAGVQDKTTVFCSEKCEQQSHPSHAATHTCSSGLSCIRLREPQQQTPKKETNTSPNGQNQDQQQDTRMTDAPPLSNTTGDDGSDDDGNNNNNNNNHNDDNDNSSSSSDANELHFCTECLTRLKQPTTWCSLACADASFPSHREEVHLPLRKKLGLGETADEAQLEPIEPGAAEDDGRRRYRVKNIREVTTSLGDAVKEWEGRNKVRLQGLV

SEQ ID NO: 1263 - protein, 517 aa, Myceliophthora thermophilia
QQLAAEAAEIRSSCRDRHGDRKSLVTCPQCYEAVLDAFRSRYLGSSLNSGAEGPGSGQKQQAARQEWFASRPAFVSALNLLVDSAKEYQISPREIDDRVREERARWYAERVRSLLLRLMVEDPSGRGAVFEKLEDLSSGDALALAREVADILSKGPFAPEQGTAEGVAERLLAASASNKTADKADVFREAFFAAEDGTVPGDHQKYLDLLLHQGLSMEQVVDRILEERQTATGAREQTDKLNQRLDELRRARAAHEAQKTRKAQRRESLAQQKVPDELYELPACAVCGGETSTEEYFTCSICTILAGAGVQDKTTVFCSEKCEQQSHPSHAATHTCSSGLSCIRLREPQQQTPKKETNTSPNGQNQDQQQDTRMTDAPPLSNTTGDDGSDDDGNNNNNNNNHNDDNDNSSSSSDANELHFCTECLTRLKQPTTWCSLACADASFPSHREEVHLPLRKKLGLGETADEAQLEPIEPGAAEDDGRRRYRVKNIREVTTSLGDAVKEWEGRNKVRLQGLV

SEQ ID NO: 1264 - DNA, 4686 bp, Myceliophthora thermophilia
atgccgttgcgtgatcccaactcgatgttgaaggttctcggagcaggattagccgtcataggactctgctcagtcccggcgctcggcagcaccgtagcccggcttaccaagcgagacgcacagcaagacacgtacgaggatggcgacggtaaggcctcgcccgagtcgctgaaggcctactcggccaggctgcccaaggcactcgccgtggtttcggcgggtgccgggctcgccatctccattgtcctcctggtcatttcagcacacgccaaggggcaggtgttgacaagcagtctcggcactgcttcctgggctctcctcctgttccaggccatcgccattgcttcgagcagaaattcggttcaggcgtatgatctgggactctacaccttcttcgccgccacactcctggccggcatcctcctctcccttggcaccgagattggcgaggatctgtggcactcagcacccttgtcctttgccctccgcgcggccgagttggtctcgagtatatcgcttgccgtctcgactctctgcattcccaggcgccccgatgtcttctaccaaggccagctggtggatcgcatgtggactgcatccgctttcagccgtttcacatggtcttgggcgtcggaccttctcgccctcgcttcgaagaagaaagatctagacctggaggacctcccgcggccgaaccgatttgtccgtgccgcctccgtgtctgctagctggagagcgcaaaagaacactgggaaacgtctctggctggctttgcttctagcccacttcaagcctctggcgctgcagtggttcgtcaccctcatcgcctcgatcctgaatttcgccccgcaatgggtcatcttgcagctgttgaggttccttgaaacccgcgagcccggcggcgggcgggagttggacgcctggatgtgggtggtctggctaggcatcgtcatcattgcacaggggtgggttgagacctacgtctggtggcttgggtatgccgaactccagatccccgttcgtgctcagctgtcggccctcatcttcgagaagtcgatgcgcaggaaagacgtaaagggcgcggatgacgccaagaagaaggcttccgaggaaggaaacgcagagtcttcgtcaactgctccagaccagcccaggttggcggcggaagcggacgactcagaagagcatctcaagaagagtaagcagagtaccgtcaacttgatcggcgtcgacgcaaagcgtgtctcggacttcagcgctttccagaatctgttcccggggagcctcttcaagctcatcgtttcgctcgccttcttgcttgacctcctgggttggaaggcgctcctgggcggcttctctgccatgcttgccattatgcccgtcaacatctacttctccaagaggtactctgacgcccaggatcgcctgatgaaggtcagagatgagaagatggaggttgtcaccgaggcgcttcagggcattcgccagatcaagttctccgccctagagcccgagtggcaggccaagattggcgcggttcgggaacgggaacttagcgccgtttggactgtcttcataaacgataccatgctcatcggctgctgggtgacgagtccgatcctgctagccgccatttctctcgccgtctacgctgtcgtccacggatcgctggcaccgtccgtggcctttgtcagcttgggcgtcttcaagtcgctcgagatgacgctggcggttgttccagagctcacaacggatcttctggatgccttggtctccatcaaccgtatcgaacagtacctaaactctccggaattggaacaggtctcgaagcccgccgatgaaatttctttccaggatgcctcgatcgcctggcccacggacgaagaggttgacgagtcagagaggttcgtcctccgaaacatcaacgtcaccttccccaaaggcgagttgtccgtcatttctggcaagactggcactggcaagagtttgatgctggccgccatcttgggagaagtagatatcctaggcggcactctctacgttccgcgtgcaccaccgctttcggaacgccatgacgataaggcacacaaaggtaactggatcatccccaacgcgattgcctacgtggcgcagatcccctggatcgagaatgccagcatcaaagacaacattctgtttgggctgccctacgacgaggagcgatacaacaagaccattgaagtctgcgccctgaagaaggatctcgaaatgctcgacgacggtgagcacaccgagatcggcgccaatggtatcaatcttagcggcggtcagaaatggcgtgttaccctcgccagggccatctactcacgcgccggcatcctcatcctggacgacatcttcagcgctgtcgacgcacacgtcggccgccacatctttgagaggtgcctcaatggagacttggctgtcggccgaacgaggattctggtcacccatcatgtcgcgctctgcgagagcaaggcgaagtttctgatggagctcggcaacggcggcgtgctgcatgctggcctcctctcagagttgcgcgaggaaggcatgctgcagaagatcaggacccatgagcaaacggccgaggagatagaagcagacgagtctgctaccgctgtaaactccgaagactcctccgttagggagcgggagcaagacagtgcggtcaccagcacccctaagaaccccccggtcatggcatcagaggctcgaaagtttgtcgaggaagagacgcgtgagcgaggcgcggtcaagaagcacgtttacatgacgtacctgaaggacagtggcggattcttcttctgggcgtttgcgctttgcatttacctgctcgtgcaagtgttcaacattggtcgctcgtggtggctcaagatctggacgggcaattacgaggagcagggtaactatcaacagcacgcccttgttggcccagaggattacggatatccctacaccgaggcggtccgtcagtcgattcacgccatgtccgcgcccgccacctcgatccagggcagtctaacctactatctcggcatttacgtcgctctggccctcatatcctccatcatcggtaccttgaaatatctatacgtttacatcggctcgatccgtgctagccggaagctgtttgagaagcttaactttaccattctgcacacccctacccgatggctggacaccgtgccccttggccgcatcctgaatcgctatacagccgactttaacaccatcgactcgcagctagccagcacagtaggcttcggtgcgaattcgtttctgagcctcctggccgttgtcgtcgctgggctttttctgtcaccgtacattgtcctcttcgccattgtcctcctcttggtttgcctctactatgccatcctctacctccacggggctcggcccgtcaaaagactggagagcacgaccaaatcccccgtctttgaacagtttggctccgccctcactggcgtcaccaccattcgtggattcgacaaggcccccgtctacgtcgatcggatgtacaggaagattgacgattattcggcctcatcgtggcatctttggctcttcaacaggtggatgggctggcggatgtcgctcgtgggctcattcttcgcgagctttgtctcaatcttcatcctcctcactcccggtatcgactcggctctagcaggcttcgcgctggcctttgcactcgacttctcgagttcggtcatgtggaccatccggatgtatgccaatatcgagctgaatatgaactcagtggaacgtatcgtcgagtacactgaacttccgacagaaccgcttgacggtcaaaagccccctgccgcgtggcctacggaagggcgcatcgaagtcaacgatctggttgttgcatatgcccctgatcttccgcctgtgttaaaaggcctaaacttcaccgtcaaccggaacgagcgcatcggcgtggttggccgaaccggagcgggcaagtcctctctaactttagcgttgttccgcttcctcgaggcgaggtcgggcagcatctacatagacggcctcgacatctccaagatcaggctccacgacctccgctcgcgtctggccatcatcccgcaggaccctgtcctcttctccggcacgatccgctccaacctcgaccccttcgaccgccacaccgacgaggaactgcgtgattgcctggagcgcgtccatctcgtccccagcggcgcttccgcttcctcatccggctccgcaacacccgtcggttccgccgcgccgaagaacgccaacatcttctccgacctctcctcccccgtctccgagggcggcctcaacctctcccagggccagcgccagctcctctgcctggcgcgcgccatcgtctcgcgcccgcgtgtcatggtgctcgacgaggcgacgtcggccgtcgacatgcacacggacgcgctgatccagcggagcatccgcgaggagttcaccgactccaccctgattgtgattgcgcaccggctgagcacgattgccgacttcgaccgcgcgctcgtgctaagcgacgggcgggtggccgagttcggaacgccgagggagctctgggagaagggagagtccggcatcttcaggggcatgtgcgaggagagcggcgagagggacaagttaaggggtatcattttcggggacgactga

SEQ ID NO: 1265 - protein, 1561 aa, Myceliophthora thermophilia
MPLRDPNSMLKVLGAGLAVIGLCSVPALGSTVARLTKRDAQQDTYEDGDGKASPESLKAYSARLPKALAVVSAGAGLAISIVLLVISAHAKGQVLTSSLGTASWALLLFQAIAIASSRNSVQAYDLGLYTFFAATLLAGILLSLGTEIGEDLWHSAPLSFALRAAELVSSISLAVSTLCIPRRPDVFYQGQLVDRMWTASAFSRFTWSWASDLLALASKKKDLDLEDLPRPNRFVRAASVSASWRAQKNTGKRLWLALLLAHFKPLALQWFVTLIASILNFAPQWVILQLLRFLETREPGGGRELDAWMWVVWLGIVIIAQGWVETYVWWLGYAELQIPVRAQLSALIFEKSMRRKDVKGADDAKKKASEEGNAESSSTAPDQPRLAAEADDSEEHLKKSKQSTVNLIGVDAKRVSDFSAFQNLFPGSLFKLIVSLAFLLDLLGWKALLGGFSAMLAIMPVNIYFSKRYSDAQDRLMKVRDEKMEVVTEALQGIRQIKFSALEPEWQAKIGAVRERELSAVWTVFINDTMLIGCWVTSPILLAAISLAVYAVVHGSLAPSVAFVSLGVFKSLEMTLAVVPELTTDLLDALVSINRIEQYLNSPELEQVSKPADEISFQDASIAWPTDEEVDESERFVLRNINVTFPKGELSVISGKTGTGKSLMLAAILGEVDILGGTLYVPRAPPLSERHDDKAHKGNWIIPNAIAYVAQIPWIENASIKDNILFGLPYDEERYNKTIEVCALKKDLEMLDDGEHTEIGANGINLSGGQKWRVTLARAIYSRAGILILDDIFSAVDAHVGRHIFERCLNGDLAVGRTRILVTHHVALCESKAKFLMELGNGGVLHAGLLSELREEGMLQKIRTHEQTAEEIEADESATAVNSEDSSVREREQDSAVTSTPKNPPVMASEARKFVEEETRERGAVKKHVYMTYLKDSGGFFFWAFALCIYLLVQVFNIGRSWWLKIWTGNYEEQGNYQQHALVGPEDYGYPYTEAVRQSIHAMSAPATSIQGSLTYYLGIYVALALISSIIGTLKYLYVYIGSIRASRKLFEKLNFTILHTPTRWLDTVPLGRILNRYTADFNTIDSQLASTVGFGANSFLSLLAVVVAGLFLSPYIVLFAIVLLLVCLYYAILYLHGARPVKRLESTTKSPVFEQFGSALTGVTTIRGFDKAPVYVDRMYRKIDDYSASSWHLWLFNRWMGWRMSLVGSFFASFVSIFILLTPGIDSALAGFALAFALDFSSSVMWTIRMYANIELNMNSVERIVEYTELPTEPLDGQKPPAAWPTEGRIEVNDLVVAYAPDLPPVLKGLNFTVNRNERIGVVGRTGAGKSSLTLALFRFLEARSGSIYIDGLDISKIRLHDLRSRLAIIPQDPVLFSGTIRSNLDPFDRHTDEELRDCLERVHLVPSGASASSSGSATPVGSAAPKNANIFSDLSSPVSEGGLNLSQGQRQLLCLARAIVSRPRVMVLDEATSAVDMHTDALIQRSIREEFTDSTLIVIAHRLSTIADFDRALVLSDGRVAEFGTPRELWEKGESGIFRGMCEESGERDKLRGIIFGDD

SEQ ID NO: 1266 - protein, 1532 aa, Myceliophthora thermophilia
STVARLTKRDAQQDTYEDGDGKASPESLKAYSARLPKALAVVSAGAGLAISIVLLVISAHAKGQVLTSSLGTASWALLLFQAIAIASSRNSVQAYDLGLYTFFAATLLAGILLSLGTEIGEDLWHSAPLSFALRAAELVSSISLAVSTLCIPRRPDVFYQGQLVDRMWTASAFSRFTWSWASDLLALASKKKDLDLEDLPRPNRFVRAASVSASWRAQKNTGKRLWLALLLAHFKPLALQWFVTLIASILNFAPQWVILQLLRFLETREPGGGRELDAWMWVVWLGIVIIAQGWVETYVWWLGYAELQIPVRAQLSALIFEKSMRRKDVKGADDAKKKASEEGNAESSSTAPDQPRLAAEADDSEEHLKKSKQSTVNLIGVDAKRVSDFSAFQNLFPGSLFKLIVSLAFLLDLLGWKALLGGFSAMLAIMPVNIYFSKRYSDAQDRLMKVRDEKMEVVTEALQGIRQIKFSALEPEWQAKIGAVRERELSAVWTVFINDTMLIGCWVTSPILLAAISLAVYAVVHGSLAPSVAFVSLGVFKSLEMTLAVVPELTTDLLDALVSINRIEQYLNSPELEQVSKPADEISFQDASIAWPTDEEVDESERFVLRNINVTFPKGELSVISGKTGTGKSLMLAAILGEVDILGGTLYVPRAPPLSERHDDKAHKGNWIIPNAIAYVAQIPWIENASIKDNILFGLPYDEERYNKTIEVCALKKDLEMLDDGEHTEIGANGINLSGGQKWRVTLARAIYSRAGILILDDIFSAVDAHVGRHIFERCLNGDLAVGRTRILVTHHVALCESKAKFLMELGNGGVLHAGLLSELREEGMLQKIRTHEQTAEEIEADESATAVNSEDSSVREREQDSAVTSTPKNPPVMASEARKFVEEETRERGAVKKHVYMTYLKDSGGFFFWAFALCIYLLVQVFNIGRSWWLKIWTGNYEEQGNYQQHALVGPEDYGYPYTEAVRQSIHAMSAPATSIQGSLTYYLGIYVALALISSIIGTLKYLYVYIGSIRASRKLFEKLNFTILHTPTRWLDTVPLGRILNRYTADFNTIDSQLASTVGFGANSFLSLLAVVVAGLFLSPYIVLFAIVLLLVCLYYAILYLHGARPVKRLESTTKSPVFEQFGSALTGVTTIRGFDKAPVYVDRMYRKIDDYSASSWHLWLFNRWMGWRMSLVGSFFASFVSIFILLTPGIDSALAGFALAFALDFSSSVMWTIRMYANIELNMNSVERIVEYTELPTEPLDGQKPPAAWPTEGRIEVNDLVVAYAPDLPPVLKGLNFTVNRNERIGVVGRTGAGKSSLTLALFRFLEARSGSIYIDGLDISKIRLHDLRSRLAIIPQDPVLFSGTIRSNLDPFDRHTDEELRDCLERVHLVPSGASASSSGSATPVGSAAPKNANIFSDLSSPVSEGGLNLSQGQRQLLCLARAIVSRPRVMVLDEATSAVDMHTDALIQRSIREEFTDSTLIVIAHRLSTIADFDRALVLSDGRVAEFGTPRELWEKGESGIFRGMCEESGERDKLRGIIFGDD

SEQ ID NO: 1267 - DNA, 660 bp, Myceliophthora thermophilia
atgagggcagtccacgccatgctccggcgtctttgcggtctgcctgtcctcttccgccacgcaggcctcctacgaagcaaccatggccgcccggccccaattccaatccccgagctgaggcgcgccttctccacgacggcagcactcaaaaagaaacagctccctccgcgccccaaacccccgcccgagtccgagatcgaggagtcctttctcaagggcagcggtcccggcggacaaaagattctcaagcacattccgacgggcatcgtggtcaagtcccaagcgacccgctcgcgcgagcagaaccgaaagattgcgcgccagctgctggcgctcaagctcgacgagctcgtcaacggcccgcagtcccgcgccgccatcgtgtccgaggtgaagaagaagcgcgcggcgagcagggccaagaaggcgaggcgcaagtatcgcaagctggctgctgctcaggggaaagagggctcgaaagccgaagaagcgggagaagaggaggagcaagaagcggaggaagaggagtgggaagatatgtctgaggacagggaggaggagaagaaggaggtacaggccgggactcaagcgccgcctgcacctgattcagagaaagggcaagggatagaacgcggtaataccaaagagaacaaggtctga

SEQ ID NO: 1268 - protein, 219 aa, Myceliophthora thermophilia
MRAVHAMLRRLCGLPVLFRHAGLLRSNHGRPAPIPIPELRRAFSTTAALKKKQLPPRPKPPPESEIEESFLKGSGPGGQKILKHIPTGIVVKSQATRSREQNRKIARQLLALKLDELVNGPQSRAAIVSEVKKKRAASRAKKARRKYRKLAAAQGKEGSKAEEAGEEEEQEAEEEEWEDMSEDREEEKKEVQAGTQAPPAPDSEKGQGIERGNTKENKV

SEQ ID NO: 1269 - protein, 193 aa, Myceliophthora thermophilia
NHGRPAPIPIPELRRAFSTTAALKKKQLPPRPKPPPESEIEESFLKGSGPGGQKILKHIPTGIVVKSQATRSREQNRKIARQLLALKLDELVNGPQSRAAIVSEVKKKRAASRAKKARRKYRKLAAAQGKEGSKAEEAGEEEEQEAEEEEWEDMSEDREEEKKEVQAGTQAPPAPDSEKGQGIERGNTKENKV

SEQ ID NO: 1270 - DNA, 2364 bp, Myceliophthora thermophilia
atgacttctgcgacagcgacatccgccggaggcgcatcccggcctctggcgttacccggtaattcgggtcccctgagatacgccaacgcccaagatgtcccgagcttcccatctcctgggttgaaaccgggcggcgctgcggcgagcgctgcagcagctttgggatgggcgaatacggctgcttcggcgggctcgcctggggaagtcccgtctgcgacgcccatgtcgccagatgctctcctcgctgctggctgggcacagcgacacccacaacggtcatccctttcacctccatcccgttcgtccccctgggtatcgacggccgcaaccctagctttcagggcagccaagacaccacctccgacctatgagtttctggatttgtccaggcggaactcgatgcacgcggcaaagggagcgatgggtgcacggccaaggtcaaggtcctcgccccagacagcaagggaaaagaccccgaaggaccagtacggtactggagcatatgcactaagcgccgcgaccactgttcaacgatcgtcaacgggcgcaaaccccctctcgaccggcgaagcgggcgccgtgccttataccacattggacaggaacatgttcacttcgaacccccccgtaaagccagaggttgacgagaagaaccgtgccgatgtcctgcatgcttccgcgctcgccatggccaagaagatgtacaatcagcagcaaaagatgtttgacagttccacaacggcgcacgcccggtcctcatcgtacccccgccttggagatgcgcggaaccaggaacagccctcgacggcgtccaacacgctgcaggaggcagccaacacgctgcaggaggcagcataccggctcgcccaggagcgcctggccaagctccaggaagagcacaacaagcagcggggtctccaagaatactacggatcagggacaccgcagcgggcgcggttcgggtccgtcaagagcaagatgacccggcggcgctcctcgagcgacggagacctgctggacgacaagcggcggtcggggcagatccgcaagcaaatgtcgctcctgaacaacaagttgaccgaggtggacgaggagaagagaacccgggatcgcgacgcgctcctcgcagctgcgcaacggaatgtcaaggcccagatgcaacagatggacgagaaggtgcaatccgacaccggccgtgtaccccaggtcaccatggacgactgggggaggaaagcggatgtggctgcccaagcgagacttgccgctctcagccataacaacgacggaaaagtcgacatcggcggcggcaagttcgtggataagtcggaagtggataaggtcgctgctgaaaaagtgcagcctctgctgaatgagatcaacgagagggccgagatggaggctgcgcggatacaagaggagaagctggaagaggaaaggcgtaaggagaagatggagacggaaaagatgagggagagggagattcaggagattcacaagaagctcagggaccagcaaagggcagacgagaaagcgaggaaggcggagatcaaacggcaggagaaggctcacagggctgaggtgaaagcggtcaaggtcgaccagaagcacgccgccccggagcccaagcaaaatgaggctatgcccgttgcgtctgaaaggacgggaacggacaatcatgatcggccccttgcagagggtggaaacaaacgattgtccacggtcggtcgcgtccgcaccctatccatcaactttggcaaacgccacccgaggcgcaaggcatccgccgaaaaaccgatcagcgcagatgaccacccgagctcgcccacccagaaagtccgcctctggctcctctcccgcttcccaaagtctcgagcgaggacggccagcacagacgcgcccgatgaccgggaatccagcgatagcaagaggagcttcatcggcggcgtcgctctcgcccgcctgcaggaaagcaattcctccgatgcggcgatcggccacaagggaaagggcaaggagatcgacacgggaacggtgcgcccggactcgagcctgcgcgagatcgccatggcgggccgtgccgccgggagcagcagcagccaaccccagccgcccgcgcctgacgagccgggcgaggccagcggcactactgctaccactactactaccattcctcctgccgccgccgcccctgctggccgtgatactaccctcctcgccatcccgtcaccaccaccacgcccggacgaccgttcgccgccgagacaacaacaacaacaacaacaacgccccgtctcgagcgtcgcaggtctcgcaggccagcatccccgcctcggacgtcacgttcacgcggcggcgctcctctag

SEQ ID NO: 1271 - protein, 787 aa, Myceliophthora thermophilia
MTSATATSAGGASRPLALPGNSGPLRYANAQDVPSFPSPGLKPGGAAASAAAALGWANTAASAGSPGEVPSATPMSPDALLAAGWAQRHPQRSSLSPPSRSSPWVSTAATLAFRAAKTPPPTYEFLDLSRRNSMHAAKGAMGARPRSRSSPQTAREKTPKDQYGTGAYALSAATTVQRSSTGANPLSTGEAGAVPYTTLDRNMFTSNPPVKPEVDEKNRADVLHASALAMAKKMYNQQQKMFDSSTTAHARSSSYPRLGDARNQEQPSTASNTLQEAANTLQEAAYRLAQERLAKLQEEHNKQRGLQEYYGSGTPQRARFGSVKSKMTRRRSSSDGDLLDDKRRSGQIRKQMSLLNNKLTEVDEEKRTRDRDALLAAAQRNVKAQMQQMDEKVQSDTGRVPQVTMDDWGRKADVAAQARLAALSHNNDGKVDIGGGKFVDKSEVDKVAAEKVQPLLNEINERAEMEAARIQEEKLEEERRKEKMETEKMREREIQEIHKKLRDQQRADEKARKAEIKRQEKAHRAEVKAVKVDQKHAAPEPKQNEAMPVASERTGTDNHDRPLAEGGNKRLSTVGRVRTLSINFGKRHPRRKASAEKPISADDHPSSPTQKVRLWLLSRFPKSRARTASTDAPDDRESSDSKRSFIGGVALARLQESNSSDAAIGHKGKGKEIDTGTVRPDSSLREIAMAGRAAGSSSSQPQPPAPDEPGEASGTTATTTTTIPPAAAAPAGRDTTLLAIPSPPPRPDDRSPPRQQQQQQQRPVSSVAGLAGQHPRLGRHVHAAALL

SEQ ID NO: 1272 - protein, 724 aa, Myceliophthora thermophilia
GSPGEVPSATPMSPDALLAAGWAQRHPQRSSLSPPSRSSPWVSTAATLAFRAAKTPPPTYEFLDLSRRNSMHAAKGAMGARPRSRSSPQTAREKTPKDQYGTGAYALSAATTVQRSSTGANPLSTGEAGAVPYTTLDRNMFTSNPPVKPEVDEKNRADVLHASALAMAKKMYNQQQKMFDSSTTAHARSSSYPRLGDARNQEQPSTASNTLQEAANTLQEAAYRLAQERLAKLQEEHNKQRGLQEYYGSGTPQRARFGSVKSKMTRRRSSSDGDLLDDKRRSGQIRKQMSLLNNKLTEVDEEKRTRDRDALLAAAQRNVKAQMQQMDEKVQSDTGRVPQVTMDDWGRKADVAAQARLAALSHNNDGKVDIGGGKFVDKSEVDKVAAEKVQPLLNEINERAEMEAARIQEEKLEEERRKEKMETEKMREREIQEIHKKLRDQQRADEKARKAEIKRQEKAHRAEVKAVKVDQKHAAPEPKQNEAMPVASERTGTDNHDRPLAEGGNKRLSTVGRVRTLSINFGKRHPRRKASAEKPISADDHPSSPTQKVRLWLLSRFPKSRARTASTDAPDDRESSDSKRSFIGGVALARLQESNSSDAAIGHKGKGKEIDTGTVRPDSSLREIAMAGRAAGSSSSQPQPPAPDEPGEASGTTATTTTTIPPAAAAPAGRDTTLLAIPSPPPRPDDRSPPRQQQQQQQRPVSSVAGLAGQHPRLGRHVHAAALL

SEQ ID NO: 1273 - DNA, 633 bp, Myceliophthora thermophilia
atgcaactaccgctcttctcgtgcggcctctgggcctttttggccgtacaggcgacggcgacggccttgacatacaagatcggcgccaacgaagaagcctgcttttactctgcaacccaacacaaggacgagaagatcgcgttctattttgccgtgcaatcaggtggctcgttcgacatcaactataaggtaacggggccgaacgggaagcccatcatggaaggcgagaaggaacggcagggcgactttgtgttcacggcgaaggatgtcggtgaatacaagttttgcttcaacaacgagatgagcacctacacggagaagtttgtcgatttcgagatttcggtcgagaacgaggcccgcgtgagcctgcccgcgaagccaggtgcctccccagagcagaccagctccctcgaggagtcgctcttcaagatttcgggccagctgtcgaccatcacccgcaaccagaagtacttccggacccgcgagaaccgcaacttcagcaccgttcggagcacggaaagcaggatcatcaacttcagcttgatccagatcgcgttgatcgtttgcatgggcgctctgcaagtcttcatcgttcggttcttcttccagggcgcaaggaagggctatgtataa

SEQ ID NO: 1274 - protein, 210 aa, Myceliophthora thermophilia
MQLPLFSCGLWAFLAVQATATALTYKIGANEEACFYSATQHKDEKIAFYFAVQSGGSFDINYKVTGPNGKPIMEGEKERQGDFVFTAKDVGEYKFCFNNEMSTYTEKFVDFEISVENEARVSLPAKPGASPEQTSSLEESLFKISGQLSTITRNQKYFRTRENRNFSTVRSTESRIINFSLIQIALIVCMGALQVFIVRFFFQGARKGYV

SEQ ID NO: 1275 - protein, 188 aa, Myceliophthora thermophilia
LTYKIGANEEACFYSATQHKDEKIAFYFAVQSGGSFDINYKVTGPNGKPIMEGEKERQGDFVFTAKDVGEYKFCFNNEMSTYTEKFVDFEISVENEARVSLPAKPGASPEQTSSLEESLFKISGQLSTITRNQKYFRTRENRNFSTVRSTESRIINFSLIQIALIVCMGALQVFIVRFFFQGARKGYV

SEQ ID NO: 1276 - DNA, 2637 bp, Myceliophthora thermophilia
atgcggctcgcgtggtacgcaggggcctccacggctctcgcagccgccgtggttgcgtcggcgttctatcagcgcgccaacttctactctgccatggtgcatctcgcccagagcagcctctcattgatggttcgttcctcccgtttaccaccctcctcctcgatttgctctcagtttctcgtcttccaccgaaccccccagccgctgactcccggcgatttgcaggttcttgtcaacctcatcttcgtcgtctacggctcgttcatgtatggcctccagcgcctctgcttcggcccccttcgcccgaccgagatagaacagctctatgagaaggcatggtttgccgttacggaaacgtgcttggccatgaccatcttccgcgatgagctcggcgccttcttcctcgtcatgttcacggccctggtcacgggcaaggtatggggttggattggagacggacgtgtcgacgtcctcgagcaacaacctcccgcaaatccgcgactctttcacgctcgtctcggtctctcgctatttataagcgttgcttacgacatttggctcctcacatattccgtcaacacagtggtggaagaagctcgcccctcgatgatgctcatgtttctcttcgagttcgccgtcctcgccgtgaactcgctccacactgttgctcggtatattatctcactcgcggagcagcatgttgttaaaacgcagacgcggcagcgcttggaggatagacgccgccgtgttagggagcaaagagccgaaattctgaggcgccgagaggctgagggagctacaggggacaacgaagagcttcctgacgagaatgatattgacgagatggatattgaggtgcctggttgggaagcaaagggtcaatgggtcttatccctcgatttgcttgctgacttcgtcaagtttggcatatacacaacctttttctgcgttctgatgagcttttatggcctcccgattcacattatgcgggattggtttatgacgacgaggtcgtttctcaagaggctccacgccctcatccgctaccgccaagccctcaaacatatggatcagtatccggacgctaccgccgaggagcttggccgagaggacacctgcatcatttgcagggaggaaatgcgtccctgggatcgcaacgacccttcgcaagttgagcgtagccgcgcgaagaagctcccttgcggccatatcctgcacttcggctgtcttaagagctggctggaacggcagcaagtgtgcccaacttgccggcgtccggttgccagggacggaccgcagccggccgctaatgcccccgctggcgttcttgggctcttccctgccgggcagaaccgaccgccgcagcccccggctaacggccagggagctcctggcagagaccagccgcctcagggagccggagccggggcagcggatcgccagcagaataacccagtcgcaaacccgaatccgaacatcaggttgttcaaccttgggcctcttaggttgggctttgcccagggcggagtcgacgacattagggagatggcgcagcgtatgcggctgcctccgggcgccgtgaacttgcccgtaccgacgcctacggtccctgcagctcaagagaacaatgcatcggctcccagccttgagcagatccgcgggcagctcatggcgttggggcaacaagtccggcaagacatcatcaatgcgcacaacgcagcacatgaggtccatgtcctgaaccttttaatgaacgaaatcaatcgcctccgtcaactgcaacaacagcaccagaaccagcagcaaggcgcccaatttgccgccccgggcatagtcctaagtggacaagcgtccttaccacaacaacaacaacaacagcaacaacaacaacaacacggggtaacgcacccgtccacgcatttacccgtgcaggcgtccctccctatcccgcgttctccgaatctcgtggccgaaaggcttcctcccggtgtaacccggcatgttggcacgggttacggagcagccattccggcgggcagtcccgacttgccagaaggggtggtcattccgccgggttggtcgttgctccctctccagcggctggatggcgatgtactgtcgtctgaacaaacacacaacgctcaggcacatgcccaggatatactacgatcggtctttggaaatcatcctcgatccaggggtaccagccccgctcctcccagcaacttgtctacacaactaggacggtccggcgcacaggcagctcgcaacgtacccgaatcatctcgacgaccgggttcgcagggtgacacggccgcacgtaggcagccccctgtcaccgcgcctgtacctttggcgccaaactggggaggttcggcgcagctatttgggggcgatcggaccacgggaccagttttggggtaccaagtggagcagcggccagcgccacacgaagagcccggggaaagcagtggtggtggaccggcggcgagcacatcgacaacggtaaccggaggcgcttccggggagagcagcagtgagcagcaaaccggaggaaccgaagtgaacgggagtaccagccatagaggacctagggctgcgacggttgaggaagcggaggatgaggatgaacaatga

SEQ ID NO: 1277 - protein, 878 aa, Myceliophthora thermophilia
MRLAWYAGASTALAAAVVASAFYQRANFYSAMVHLAQSSLSLMVRSSRLPPSSSICSQFLVFHRTPQPLTPGDLQVLVNLIFVVYGSFMYGLQRLCFGPLRPTEIEQLYEKAWFAVTETCLAMTIFRDELGAFFLVMFTALVTGKVWGWIGDGRVDVLEQQPPANPRLFHARLGLSLFISVAYDIWLLTYSVNTVVEEARPSMMLMFLFEFAVLAVNSLHTVARYIISLAEQHVVKTQTRQRLEDRRRRVREQRAEILRRREAEGATGDNEELPDENDIDEMDIEVPGWEAKGQWVLSLDLLADFVKFGIYTTFFCVLMSFYGLPIHIMRDWFMTTRSFLKRLHALIRYRQALKHMDQYPDATAEELGREDTCIICREEMRPWDRNDPSQVERSRAKKLPCGHILHFGCLKSWLERQQVCPTCRRPVARDGPQPAANAPAGVLGLFPAGQNRPPQPPANGQGAPGRDQPPQGAGAGAADRQQNNPVANPNPNIRLFNLGPLRLGFAQGGVDDIREMAQRMRLPPGAVNLPVPTPTVPAAQENNASAPSLEQIRGQLMALGQQVRQDIINAHNAAHEVHVLNLLMNEINRLRQLQQQHQNQQQGAQFAAPGIVLSGQASLPQQQQQQQQQQQHGVTHPSTHLPVQASLPIPRSPNLVAERLPPGVTRHVGTGYGAAIPAGSPDLPEGVVIPPGWSLLPLQRLDGDVLSSEQTHNAQAHAQDILRSVFGNHPRSRGTSPAPPSNLSTQLGRSGAQAARNVPESSRRPGSQGDTAARRQPPVTAPVPLAPNWGGSAQLFGGDRTTGPVLGYQVEQRPAPHEEPGESSGGGPAASTSTTVTGGASGESSSEQQTGGTEVNGSTSHRGPRAATVEEAEDEDEQ

SEQ ID NO: 1278 - protein, 857 aa, Myceliophthora thermophilia
FYQRANFYSAMVHLAQSSLSLMVRSSRLPPSSSICSQFLVFHRTPQPLTPGDLQVLVNLIFVVYGSFMYGLQRLCFGPLRPTEIEQLYEKAWFAVTETCLAMTIFRDELGAFFLVMFTALVTGKVWGWIGDGRVDVLEQQPPANPRLFHARLGLSLFISVAYDIWLLTYSVNTVVEEARPSMMLMFLFEFAVLAVNSLHTVARYIISLAEQHVVKTQTRQRLEDRRRRVREQRAEILRRREAEGATGDNEELPDENDIDEMDIEVPGWEAKGQWVLSLDLLADFVKFGIYTTFFCVLMSFYGLPIHIMRDWFMTTRSFLKRLHALIRYRQALKHMDQYPDATAEELGREDTCIICREEMRPWDRNDPSQVERSRAKKLPCGHILHFGCLKSWLERQQVCPTCRRPVARDGPQPAANAPAGVLGLFPAGQNRPPQPPANGQGAPGRDQPPQGAGAGAADRQQNNPVANPNPNIRLFNLGPLRLGFAQGGVDDIREMAQRMRLPPGAVNLPVPTPTVPAAQENNASAPSLEQIRGQLMALGQQVRQDIINAHNAAHEVHVLNLLMNEINRLRQLQQQHQNQQQGAQFAAPGIVLSGQASLPQQQQQQQQQQQHGVTHPSTHLPVQASLPIPRSPNLVAERLPPGVTRHVGTGYGAAIPAGSPDLPEGVVIPPGWSLLPLQRLDGDVLSSEQTHNAQAHAQDILRSVFGNHPRSRGTSPAPPSNLSTQLGRSGAQAARNVPESSRRPGSQGDTAARRQPPVTAPVPLAPNWGGSAQLFGGDRTTGPVLGYQVEQRPAPHEEPGESSGGGPAASTSTTVTGGASGESSSEQQTGGTEVNGSTSHRGPRAATVEEAEDEDEQ

SEQ ID NO: 1279 - DNA, 1485 bp, Myceliophthora thermophilia
atgggcttctacgtgggtcggggcgacagtgcccccgtggtacaatcactccgtcttcgattctctcaatcggccgcgacgatagccttgactgctgcattcttacccatggcgctgggacacggaggacatcacacggacaagattccggagggacaggcggtctctctggacccgattgatacaacactatgggtacacattttcgtccagatgctcgcctttggcgttctcttccccatagggatggtttttgggatcattaagagccggtggcatgtaccgctacaagtcctcagtaccgcgctcgccctactcggttatgcccttggccacctccacggcggtcggcagttccacccgaacaacgtgcacgcggaggctgccaatcccctcttcttcctcatggttgcgcaggttgcgtttggcatttatcttaagctgcacctcgagaggggaatccacggccggattcgcccgtttttccgaatcctgcacagcatcaacggcaaggctttcccggtgtatgcgtgggtgcagatggttttcggtggcatcacagctttgggtttctgccagggcgaccatctcggccagtgcctggcacacttcatcatggggggtgctttcatcgcctacggtgtcctcctgacgatcctcttgcttgttggtcagctctggcttcgccggaccggccgtagccaggaattcttcgacagtgccgtcatcgccgcctggggctgcgtcaacaccttcaccgagcaccgctggggaactgcgtgggtcaagaacgactggcagcacacgaccatgggcattatctggtggagcgccgggctggtgggcatctggctcagcagggataggcatggccagccaaaacgcaactttatccccgggtttgtcattttcatcaccggttgggccatgtcggcgcacccgcaagagctgatgattagcgccatgacccaccagatgtttggctacaccctcatggcggccggactgacgcgtatcgttgagatctcgtttgtccttcgggataagcagggtatctctgaggatggcaccgaggttaacagcttccagttcatccccgtctttcttctctacgccgccggcttcctcttcatgggagccaccgaagagcaaatggccctcatcgccggctctggaattgatcacgttgcctacgttctgatcctctacagcctggcctcgctgctcttcctgttcactatggcgttaatcaacatttacgaccgcgccaacccgattccgaagaagccgcttaccaatgggcaggcggtgcgcggggacgatgcacggctgcgagacgcgaatgagtttgagttggacggcttggtcagcgacgaggaggacgaggagcgcgcggcgaggaggaagctgttgacggatgatggtcttggggatggacccgataccccgagcacggtggggaggaacagtgagagagttgcgtaa

SEQ ID NO: 1280 - protein, 494 aa, Myceliophthora thermophilia
MGFYVGRGDSAPVVQSLRLRFSQSAATIALTAAFLPMALGHGGHHTDKIPEGQAVSLDPIDTTLWVHIFVQMLAFGVLFPIGMVFGIIKSRWHVPLQVLSTALALLGYALGHLHGGRQFHPNNVHAEAANPLFFLMVAQVAFGIYLKLHLERGIHGRIRPFFRILHSINGKAFPVYAWVQMVFGGITALGFCQGDHLGQCLAHFIMGGAFIAYGVLLTILLLVGQLWLRRTGRSQEFFDSAVIAAWGCVNTFTEHRWGTAWVKNDWQHTTMGIIWWSAGLVGIWLSRDRHGQPKRNFIPGFVIFITGWAMSAHPQELMISAMTHQMFGYTLMAAGLTRIVEISFVLRDKQGISEDGTEVNSFQFIPVFLLYAAGFLFMGATEEQMALIAGSGIDHVAYVLILYSLASLLFLFTMALINIYDRANPIPKKPLTNGQAVRGDDARLRDANEFELDGLVSDEEDEERAARRKLLTDDGLGDGPDTPSTVGRNSERVA

SEQ ID NO: 1281 - protein, 454 aa, Myceliophthora thermophilia
HGGHHTDKIPEGQAVSLDPIDTTLWVHIFVQMLAFGVLFPIGMVFGIIKSRWHVPLQVLSTALALLGYALGHLHGGRQFHPNNVHAEAANPLFFLMVAQVAFGIYLKLHLERGIHGRIRPFFRILHSINGKAFPVYAWVQMVFGGITALGFCQGDHLGQCLAHFIMGGAFIAYGVLLTILLLVGQLWLRRTGRSQEFFDSAVIAAWGCVNTFTEHRWGTAWVKNDWQHTTMGIIWWSAGLVGIWLSRDRHGQPKRNFIPGFVIFITGWAMSAHPQELMISAMTHQMFGYTLMAAGLTRIVEISFVLRDKQGISEDGTEVNSFQFIPVFLLYAAGFLFMGATEEQMALIAGSGIDHVAYVLILYSLASLLFLFTMALINIYDRANPIPKKPLTNGQAVRGDDARLRDANEFELDGLVSDEEDEERAARRKLLTDDGLGDGPDTPSTVGRNSERVA

SEQ ID NO: 1282 - DNA, 1449 bp, Myceliophthora thermophilia
atgattaattcgtctcctttgttggggttggccttggtgctggccaccagtcccctggcgagcgccgacagcaccacaatcatcaacgctggctcaaactggggcacttgggaaggttggggcacgtctctggcatggtgggccaagcagttcggcaaccgcgatgacctggccgatgccttcttcaccttaaagtcgacgacggtgaattcggagacgctgcccgggcttggcttcaacattgtgcgttacaacgcgggcgcgtcgagctggaacgcggtcggagatgagaggatggtcgagtcccccaacatccggcggtcgcgccagatggaggggttctggctggactggcacgacacggacccgacctcatcgagctgggactggaccgtggacgcgaaccagaggtcggcgctccagaaggcgatcgcgcgcggggccaacaggacggagctcttctccaactcgcccatgtggtggatgtgcaagaaccacaacccgtccgggtccagcgacggcagcgagaacatccagtcgtggaacctggagcagcacgccgtctacatggccaacgttgccatgatgtaccgggaccggtggggcatccggttcgagagcgtcgacccgttcaacgagccgtcggccaactggtggaaggccgacgggacgcaggagggttgtcatatcgacgtctcgacccaggccaccatcgtggggcacctggccaaccacctgtcccagcgggggctgtcgaccgtcattacggcgtcggatgagtcctactacgaccaggccctccacacgctccagacgatcggcagcagcgcgctcagccgcatcagccgcatccacgtgcacgggtaccagtacgggagtggcaaccgggcgggcctgcgcgaggcggcggcggcggcggggaagcgggtgtggaacagcgagtatggcgacggggtggcctcgggcgagaacatggcgcggtatctgctgcaggatctgcggcagctccggccgaccgcctgggtgtactggcaggtgctcgacggcggcggctggggcctgctggacgccgacaacgacgcgggccggctgggaggtcccacgcaaaagtactttgtgctcgcccagttcgcccggcacatccggcccggcatgcgcatcctcgacggcggcgccgacaacgtggtggccgcctacgacgccgccgccgccaagctcataatcgtcgccgtcaattgggatgccccgcagtacatcaactttgacctgtcgcgcttcgccgggcgccctgccgacggcaccgccgtgccccgctggagcacccagatcgggagcggcgaccgctatgtccaccacgagggcgacaccaccattagcggcaccaagttctggtcctactttgaaaggaacatggtgcagacctttgaggtcgccggagtgcgactgtaa

SEQ ID NO: 1283 - protein, 482 aa, Myceliophthora thermophilia
MINSSPLLGLALVLATSPLASADSTTIINAGSNWGTWEGWGTSLAWWAKQFGNRDDLADAFFTLKSTTVNSETLPGLGFNIVRYNAGASSWNAVGDERMVESPNIRRSRQMEGFWLDWHDTDPTSSSWDWTVDANQRSALQKAIARGANRTELFSNSPMWWMCKNHNPSGSSDGSENIQSWNLEQHAVYMANVAMMYRDRWGIRFESVDPFNEPSANWWKADGTQEGCHIDVSTQATIVGHLANHLSQRGLSTVITASDESYYDQALHTLQTIGSSALSRISRIHVHGYQYGSGNRAGLREAAAAAGKRVWNSEYGDGVASGENMARYLLQDLRQLRPTAWVYWQVLDGGGWGLLDADNDAGRLGGPTQKYFVLAQFARHIRPGMRILDGGADNVVAAYDAAAAKLIIVAVNWDAPQYINFDLSRFAGRPADGTAVPRWSTQIGSGDRYVHHEGDTTISGTKFWSYFERNMVQTFEVAGVRL

SEQ ID NO: 1284 - protein, 460 aa, Myceliophthora thermophilia
DSTTIINAGSNWGTWEGWGTSLAWWAKQFGNRDDLADAFFTLKSTTVNSETLPGLGFNIVRYNAGASSWNAVGDERMVESPNIRRSRQMEGFWLDWHDTDPTSSSWDWTVDANQRSALQKAIARGANRTELFSNSPMWWMCKNHNPSGSSDGSENIQSWNLEQHAVYMANVAMMYRDRWGIRFESVDPFNEPSANWWKADGTQEGCHIDVSTQATIVGHLANHLSQRGLSTVITASDESYYDQALHTLQTIGSSALSRISRIHVHGYQYGSGNRAGLREAAAAAGKRVWNSEYGDGVASGENMARYLLQDLRQLRPTAWVYWQVLDGGGWGLLDADNDAGRLGGPTQKYFVLAQFARHIRPGMRILDGGADNVVAAYDAAAAKLIIVAVNWDAPQYINFDLSRFAGRPADGTAVPRWSTQIGSGDRYVHHEGDTTISGTKFWSYFERNMVQTFEVAGVRL

SEQ ID NO: 1285 - DNA, 552 bp, Myceliophthora thermophilia
atgcagttctctaccgtcgtcgttgccgcccttgccgccgtggcgtccgccagccctgccgtcaagcgccaggcagcgtgccccgaggtggaccagattcccaagtgcggttacgactgcatcgtcaacgccgccgccgacctcggctgccaggccgacaactacaagtgcatgtgcgaccagttcgacgccctccggtccggcgcggccacgtgcgtcctcagcaactgcgggctcgatggtgccctcgaggtcatctctgccgctgaggccctccactccctcggtctggatcgattcgaggttgcggcccgatcatgggacccggccaaggaggacgccctctgtgccaagttgcaactgcttggtgccaggtggtggccgagcctggaagaacactccggtgccgagacgaggaagacgatgtaccgggaaatgcactcagacctcgaccagagcaaggcgcgcttcatcggggtggctccgcagggaggggtaatcatgggctttagaagtcgacgaatgcgtgggctcgagaaaggggctgggtag

SEQ ID NO: 1286 - protein, 183 aa, Myceliophthora thermophilia
MQFSTVVVAALAAVASASPAVKRQAACPEVDQIPKCGYDCIVNAAADLGCQADNYKCMCDQFDALRSGAATCVLSNCGLDGALEVISAAEALHSLGLDRFEVAARSWDPAKEDALCAKLQLLGARWWPSLEEHSGAETRKTMYREMHSDLDQSKARFIGVAPQGGVIMGFRSRRMRGLEKGAG

SEQ ID NO: 1287 - protein, 166 aa, Myceliophthora thermophilia
SPAVKRQAACPEVDQIPKCGYDCIVNAAADLGCQADNYKCMCDQFDALRSGAATCVLSNCGLDGALEVISAAEALHSLGLDRFEVAARSWDPAKEDALCAKLQLLGARWWPSLEEHSGAETRKTMYREMHSDLDQSKARFIGVAPQGGVIMGFRSRRMRGLEKGAG

SEQ ID NO: 1288 - DNA, 2283 bp, Myceliophthora thermophilia
atgagtcctcgcctcgtcagatgcgccatatgcggttggtacattgtcggagaagcaggctccgcttcatggatgggtcagtttcgtgggctgtgccacaacattgcaggtgaagagatctttctgaccggagtcggttactactccgacccgcacttcggaggcttcatcgcccctccggatcccagcgctcggtgggacgaccccggctatgataacccactggaacatgaattcggggtcatggccgaaaccgagattaacggcaagcatggcttcgtcattcacgatgcctgctggtctctgcttcaagacgcatgctaccccgatctggtcccctgcacgagattctttgacgttttgaactccgtcccgagggtgttcgcaaggaacatcatcgactggggtcatgattatgggggcctagctctcctctttccggaggatgactattttccatgggagtatttacgctttgccgacagggattttcgtgattcggggctcgacgccgtgtacgacaccaaccctcttgcctcttccgagatccaggagatcctcgccgacactccacagtctccgccaacctgggaccacccatcagagtcatccgctactcccagatcgtccagtggtctggatccattcggcttgcttcccaaggagctatgctctgctatagctgcgtatctgccgacccgagatgtcttgaacgcccggctggcatcgcgctccttttggttcacatttcatagtcagcaattttgggcgtctcgttttcggggtgaaaatgcggagcgctcatggctgttcgaagccgcgcgggatctcaacaccactggcggcatcgggcgcagagactggcgctggctgtaccatcgtacatccggtgcccgcctgggaaggaccgctcagaatcggaaacgtgtttgggctctcatccgacacgtgatggacatattggagctctcttggaacgagctgaaccccgacatggaatccctccgacgatctgctcccctgcgacccctgtcagatgaagaatgctccggcccgccgtgggtctctgtcgagggtagtatccggggggttagcgacaatctcagcggcctgcagacggcctgtgtgctttcaaagactcaacgggtggccattcgagtggatgctatttcccaagtagctgcctcgacagttcgcctgggtagctcggtatacatcgccggcttgtccctggctgctaccaatggggaggtcgtacgcttgggctatacggctgccggcagccaaagttgttgcgttcatctctgcggagcgtctctgactggtttcaacgtggccgtcggccttggcggtatccacgctcttcaattcgtcagcgggcgtggtacggcgagacggctatctgcctggcttgggcatcctgatgacgcaccaaggactgaacggctaagtgacatcgtcacgccagatgaggagacgatggcactcgaattcgggtttgacgtgagacaacttcccttcgcctctcttgatctggtcgtgttgccatgcctgttcatgctaatcgaagccgacgacagtagcctcagacattcggcggtttggtatcctgacgtgccgtccccgacgctgaacttgaatgaagacttcctactagcccccagaacatatgtgtcgggatttaagccgctgttttgggcccggtttggtggccctggcggggttcacttgaaacatcttgtgaagctcaccgtcgttgaccttgacattggccgtattgatttctcctttaacaatccaagtgtgccagctgaatgctggaggttttcacgtatcgaagatcccaagagaaaaaaagacgaggatgaagacgaagacgaggacgaagatgattccgagattgtcgagttcccaattgacgggcctgggggtgaaatgatcaacaaagtcgaggtcggccagcggcttctccggggaaacgttgagaactggctgtataaggagggacatttaacctggctcaaggtacatcctttcccgtttcccgtgctgcgtgtcgtgggaagcacccctgttctaatgttgaaacagatacatacgaatcgtgagcgggcgttagaagttggctcaaaatacacatcgcggagaaacattatagtagaaaaggagttcagagctgctcccgggactgccattactggtctttacggcagtcggtgtcttaatcaaggatgcatcctcatgtcgctcggggtattgactgagccgctcagcaaggcctga

SEQ ID NO: 1289 - protein, 760 aa, Myceliophthora thermophilia
MSPRLVRCAICGWYIVGEAGSASWMGQFRGLCHNIAGEEIFLTGVGYYSDPHFGGFIAPPDPSARWDDPGYDNPLEHEFGVMAETEINGKHGFVIHDACWSLLQDACYPDLVPCTRFFDVLNSVPRVFARNIIDWGHDYGGLALLFPEDDYFPWEYLRFADRDFRDSGLDAVYDTNPLASSEIQEILADTPQSPPTWDHPSESSATPRSSSGLDPFGLLPKELCSAIAAYLPTRDVLNARLASRSFWFTFHSQQFWASRFRGENAERSWLFEAARDLNTTGGIGRRDWRWLYHRTSGARLGRTAQNRKRVWALIRHVMDILELSWNELNPDMESLRRSAPLRPLSDEECSGPPWVSVEGSIRGVSDNLSGLQTACVLSKTQRVAIRVDAISQVAASTVRLGSSVYIAGLSLAATNGEVVRLGYTAAGSQSCCVHLCGASLTGFNVAVGLGGIHALQFVSGRGTARRLSAWLGHPDDAPRTERLSDIVTPDEETMALEFGFDVRQLPFASLDLVVLPCLFMLIEADDSSLRHSAVWYPDVPSPTLNLNEDFLLAPRTYVSGFKPLFWARFGGPGGVHLKHLVKLTVVDLDIGRIDFSFNNPSVPAECWRFSRIEDPKRKKDEDEDEDEDEDDSEIVEFPIDGPGGEMINKVEVGQRLLRGNVENWLYKEGHLTWLKVHPFPFPVLRVVGSTPVLMLKQIHTNRERALEVGSKYTSRRNIIVEKEFRAAPGTAITGLYGSRCLNQGCILMSLGVLTEPLSKA

SEQ ID NO: 1290 - protein, 739 aa, Myceliophthora thermophilia
ASWMGQFRGLCHNIAGEEIFLTGVGYYSDPHFGGFIAPPDPSARWDDPGYDNPLEHEFGVMAETEINGKHGFVIHDACWSLLQDACYPDLVPCTRFFDVLNSVPRVFARNIIDWGHDYGGLALLFPEDDYFPWEYLRFADRDFRDSGLDAVYDTNPLASSEIQEILADTPQSPPTWDHPSESSATPRSSSGLDPFGLLPKELCSAIAAYLPTRDVLNARLASRSFWFTFHSQQFWASRFRGENAERSWLFEAARDLNTTGGIGRRDWRWLYHRTSGARLGRTAQNRKRVWALIRHVMDILELSWNELNPDMESLRRSAPLRPLSDEECSGPPWVSVEGSIRGVSDNLSGLQTACVLSKTQRVAIRVDAISQVAASTVRLGSSVYIAGLSLAATNGEVVRLGYTAAGSQSCCVHLCGASLTGFNVAVGLGGIHALQFVSGRGTARRLSAWLGHPDDAPRTERLSDIVTPDEETMALEFGFDVRQLPFASLDLVVLPCLFMLIEADDSSLRHSAVWYPDVPSPTLNLNEDFLLAPRTYVSGFKPLFWARFGGPGGVHLKHLVKLTVVDLDIGRIDFSFNNPSVPAECWRFSRIEDPKRKKDEDEDEDEDEDDSEIVEFPIDGPGGEMINKVEVGQRLLRGNVENWLYKEGHLTWLKVHPFPFPVLRVVGSTPVLMLKQIHTNRERALEVGSKYTSRRNIIVEKEFRAAPGTAITGLYGSRCLNQGCILMSLGVLTEPLSKA

SEQ ID NO: 1291 - DNA, 513 bp, Myceliophthora thermophilia
atgaccttcttgctcggtcttgttctattattccgtactcttgtctcttactacttgtctcccctgagaggagaggaaccggaaagcgaagacaaaaataataaaagcatcattcagcaaatggccgactccagaaaccgcgagcgcggcctcagggccgccctcaacaacccccgagtgtccgaggaagccaagcagcacgaccgcgagctcctagagagcgagtttggtgagcacatcgagccgtcccagccggcggagccgcatgcccgacggccgtccgccggtgccggcaagaagagctcctcgaccgggccgccctcgcacccgcacgcggctcccgctcaccacgagggcggcccgccgtcgtcgacggggaccgacaaaggccaccccgccagcgggaggaagccaaggagggcctcgatcggggaacccggcggcggcgacacgggcggcgacaccagcggcctgcagcagatggtcgacgacaaagaaaggggaaacgtgtga

SEQ ID NO: 1292 - protein, 170 aa, Myceliophthora thermophilia
MTFLLGLVLLFRTLVSYYLSPLRGEEPESEDKNNKSIIQQMADSRNRERGLRAALNNPRVSEEAKQHDRELLESEFGEHIEPSQPAEPHARRPSAGAGKKSSSTGPPSHPHAAPAHHEGGPPSSTGTDKGHPASGRKPRRASIGEPGGGDTGGDTSGLQQMVDDKERGNV

SEQ ID NO: 1293 - protein, 154 aa, Myceliophthora thermophilia
YYLSPLRGEEPESEDKNNKSIIQQMADSRNRERGLRAALNNPRVSEEAKQHDRELLESEFGEHIEPSQPAEPHARRPSAGAGKKSSSTGPPSHPHAAPAHHEGGPPSSTGTDKGHPASGRKPRRASIGEPGGGDTGGDTSGLQQMVDDKERGNV

SEQ ID NO: 1294 - DNA, 465 bp, Myceliophthora thermophilia
atgctcgccaagctctccgttctcgccctcgcggctgccgctcccctggctgcggccgtcggcaaggcccgcgtcgtcaacaagtgcgacaacgacgtgcacctctgggccgtcggcgccaacgtcgacggccctcacaagctgtccaagggcggcgtgtacgaggaggccttcaccaaggaccccgtcacgggcggccgggcgctcaagatcaccatccccgaggacggcctctactcgggcgccccgcagaccatctacgcctacaacctcgacggcccgagggtctggtacgacctcagcgacgtcttcggcgacgccttcgccggcaagaagctcgtcgtcgccagcgacgagccctcctgcccgtccatcatctggcccaccggcgtcccgcccgccggcagccaggtcaagacctgcacttccgagaagagcgtcacgctcaccctctgcgccccgtaa

SEQ ID NO: 1295 - protein, 154 aa, Myceliophthora thermophilia
MLAKLSVLALAAAAPLAAAVGKARVVNKCDNDVHLWAVGANVDGPHKLSKGGVYEEAFTKDPVTGGRALKITIPEDGLYSGAPQTIYAYNLDGPRVWYDLSDVFGDAFAGKKLVVASDEPSCPSIIWPTGVPPAGSQVKTCTSEKSVTLTLCAP

SEQ ID NO: 1296 - protein, 135 aa, Myceliophthora thermophilia
VGKARVVNKCDNDVHLWAVGANVDGPHKLSKGGVYEEAFTKDPVTGGRALKITIPEDGLYSGAPQTIYAYNLDGPRVWYDLSDVFGDAFAGKKLVVASDEPSCPSIIWPTGVPPAGSQVKTCTSEKSVTLTLCAP

SEQ ID NO: 1297 - DNA, 1848 bp, Myceliophthora thermophilia
atgacctcctcggtcctgctgcgcatctgcttcgtctcggcttgcgccaacactcttttcaacgcaggcgacgcccactcgcccaattcccacaaggctgctgtcgtcgccagaagaacgacccgtcatcacgccgccctcctcacacactgcctaccccgacgctcactcgccaccctcgcaaggcccggtcgccggcgaaggatcctgcccaagacctcacactcctttgacacgattaacactgcaacgaagcgagccaagacagctcgccgtgatccgagggaatccaaagacatggacgaaatggtgctccttcagcgaagtacggatcagactatgcgcgacggtgcctccacccccgaggagcggcatcacccgaatcgtgggggtagccgggacgatagcaagccgcggcggtttcccgacgatcctctatcgtctcccgcttctcaaatgaacgacctcattgaaacacgctccgtgcgctccgcctccacggcatctcggaacacaaacaggctatccctcacgttacccattgtgccagctaccgcctatccctcacggacggctccggtctctgccacatcatccgcgttcccaccaacccccctcgacactcctgctgtgatgtccccggttgatccaaacgactttattaccgcgatagcagcgcaggaacgccgcgttctggaactaaaggaggagctcaaccgtgccgaatctgaccttgcacggctgaaaaggcaatgggcgacccacgaggcgtacaagaagcgggcgaatcggcgaaatgttgagcccttagccggccttgggcccgcagcggaattgcaggatgaaactgcaatccgacgcagcatcgagctggacagaagaaaggcgctcctcactcagcaaaaccagcagccggctcctgaaaagagcagaaggcgagtgttcaccgggagccacacgcggactctgtccctgttgtctccgacgaagccaaccggtaccttctcttccaacgatgacgagcctgggagcaagaagctcgggtccgataaccgctatgccccggccgcacccactcacctcgccaagcgagcaacctgggcggcggcacggtcaacacagacgaccggagtgaagcagctcgcggaggacctcaagactgggctgtggacgttcatggaggaccttcgccaagcaacagtgggtgacgagcccattaccggccagggcacatacatgcgaagccgggacagcaacatgaggtccgcggctaccgggagcagcgatcaggacaccatccgcgcctcagccaactcgcggccgcgagtgcaatccgcctttgacgaggcaacaaaggcgtcagagacaacagagcaactggagaacgacgagcgcggatcctcgcggtccagcgccgtccggcgctctaaaactgacgccaccacgcgccccaccaagcgcttctcctggactcctctgaccatcgactcgtacgacgacaatgactggtccaactgggatagtccaagcacgtcctcgccgcgctggagcggcaccaccgtaaacggtgacatcattccctccgttcccgagaagcgcgccgacgccgacgagaccgagaacgcgactcttaagaagagcttctctaaacctcgtgccgcgcgctctccttcccccccggcagccgccggcccgagcaagctcgaggacctgctgccccaggcgctgaacaagctgtcgccgagcaacatcaagcggtcagcggtggatttcatgaaggaatgggagcgcagcctgtcttctcccgcagagattgcggctgctgcggctcgcgagaagacggcctga

SEQ ID NO: 1298 - protein, 615 aa, Myceliophthora thermophilia
MTSSVLLRICFVSACANTLFNAGDAHSPNSHKAAVVARRTTRHHAALLTHCLPRRSLATLARPGRRRRILPKTSHSFDTINTATKRAKTARRDPRESKDMDEMVLLQRSTDQTMRDGASTPEERHHPNRGGSRDDSKPRRFPDDPLSSPASQMNDLIETRSVRSASTASRNTNRLSLTLPIVPATAYPSRTAPVSATSSAFPPTPLDTPAVMSPVDPNDFITAIAAQERRVLELKEELNRAESDLARLKRQWATHEAYKKRANRRNVEPLAGLGPAAELQDETAIRRSIELDRRKALLTQQNQQPAPEKSRRRVFTGSHTRTLSLLSPTKPTGTFSSNDDEPGSKKLGSDNRYAPAAPTHLAKRATWAAARSTQTTGVKQLAEDLKTGLWTFMEDLRQATVGDEPITGQGTYMRSRDSNMRSAATGSSDQDTIRASANSRPRVQSAFDEATKASETTEQLENDERGSSRSSAVRRSKTDATTRPTKRFSWTPLTIDSYDDNDWSNWDSPSTSSPRWSGTTVNGDIIPSVPEKRADADETENATLKKSFSKPRAARSPSPPAAAGPSKLEDLLPQALNKLSPSNIKRSAVDFMKEWERSLSSPAEIAAAAAREKTA

SEQ ID NO: 1299 - protein, 599 aa, Myceliophthora thermophilia
NTLFNAGDAHSPNSHKAAVVARRTTRHHAALLTHCLPRRSLATLARPGRRRRILPKTSHSFDTINTATKRAKTARRDPRESKDMDEMVLLQRSTDQTMRDGASTPEERHHPNRGGSRDDSKPRRFPDDPLSSPASQMNDLIETRSVRSASTASRNTNRLSLTLPIVPATAYPSRTAPVSATSSAFPPTPLDTPAVMSPVDPNDFITAIAAQERRVLELKEELNRAESDLARLKRQWATHEAYKKRANRRNVEPLAGLGPAAELQDETAIRRSIELDRRKALLTQQNQQPAPEKSRRRVFTGSHTRTLSLLSPTKPTGTFSSNDDEPGSKKLGSDNRYAPAAPTHLAKRATWAAARSTQTTGVKQLAEDLKTGLWTFMEDLRQATVGDEPITGQGTYMRSRDSNMRSAATGSSDQDTIRASANSRPRVQSAFDEATKASETTEQLENDERGSSRSSAVRRSKTDATTRPTKRFSWTPLTIDSYDDNDWSNWDSPSTSSPRWSGTTVNGDIIPSVPEKRADADETENATLKKSFSKPRAARSPSPPAAAGPSKLEDLLPQALNKLSPSNIKRSAVDFMKEWERSLSSPAEIAAAAAREKTA

SEQ ID NO: 1300 - DNA, 612 bp, Myceliophthora thermophilia
atgcagcccaccaacacaaccactaccatttaccgcagagcgagtctggcaaagttcattactctgtacggattacttgcttctattacaagttctaccagttacccactgtatggtccttggatggccgccttttgccctgattcatggctccggaacctccgactaaaaccattttaccgagaactcggaattaacgtgccgaggccgagttacattctcatagaggagcatccaccgacagtacaatttccttacgcttttgtttggccactagacgccctctcggctgtccaccttgctgccgttcacggacccaaaggttctcttctaatccctatggagttatcagcccgggggaaacaaaaagactgttggggaaacagggccgctgatcgcgaccggttgctgcaatggaacggtccgctgtgcaacatctcgatgatctcgctaccgactggagccagcaccaccgaccctgagtccggacagtgggtgccgggtaggtcgagatgcgttcgtcccacaacaacttgtgggtcgctgtgccgatctctgcaaccaggaaccgcgaacggcaacaatgagaccccgcggagccgagacaaatga

SEQ ID NO: 1301 - protein, 203 aa, Myceliophthora thermophilia
MQPTNTTTTIYRRASLAKFITLYGLLASITSSTSYPLYGPWMAAFCPDSWLRNLRLKPFYRELGINVPRPSYILIEEHPPTVQFPYAFVWPLDALSAVHLAAVHGPKGSLLIPMELSARGKQKDCWGNRAADRDRLLQWNGPLCNISMISLPTGASTTDPESGQWVPGRSRCVRPTTTCGSLCRSLQPGTANGNNETPRSRDK

SEQ ID NO: 1302 - protein, 169 aa, Myceliophthora thermophilia
YPLYGPWMAAFCPDSWLRNLRLKPFYRELGINVPRPSYILIEEHPPTVQFPYAFVWPLDALSAVHLAAVHGPKGSLLIPMELSARGKQKDCWGNRAADRDRLLQWNGPLCNISMISLPTGASTTDPESGQWVPGRSRCVRPTTTCGSLCRSLQPGTANGNNETPRSRDK

SEQ ID NO: 1303 - DNA, 483 bp, Myceliophthora thermophilia
atgtctgccgagaccaatcagggagagcatcaacagcaacagcggcagcccccgctcataaacttcgtcctctccttcctcctcgtcggcctggcctggggcttcacgacgcccttcatccggcgcgcggccaaggaccaccgcccgggcgcccacccgctcctggacttgcccgccgtgcgtcggagccccctgcgccgccgcgcctgcgccgcctttttcgccgtcgtcgacctcctccgcaacccgcgctatgccgtgccgttactgctgaacctgacgggcagcgtctggttcttcttgttggttgggagagctgaattgagcttgacggtgccgattgtgaacacggtcgccttcttgttcacggtgatcggtgaatggtgggttgaaggaaaggttatcagtcgagaaaccatgattggaatgttgctgtcggtgggcggtattgcgttgtgcgtgcagagcaagaatgcttcctga

SEQ ID NO: 1304 - protein, 160 aa, Myceliophthora thermophilia
MSAETNQGEHQQQQRQPPLINFVLSFLLVGLAWGFTTPFIRRAAKDHRPGAHPLLDLPAVRRSPLRRRACAAFFAVVDLLRNPRYAVPLLLNLTGSVWFFLLVGRAELSLTVPIVNTVAFLFTVIGEWWVEGKVISRETMIGMLLSVGGIALCVQSKNAS

SEQ ID NO: 1305 - protein, 126 aa, Myceliophthora thermophilia
FTTPFIRRAAKDHRPGAHPLLDLPAVRRSPLRRRACAAFFAVVDLLRNPRYAVPLLLNLTGSVWFFLLVGRAELSLTVPIVNTVAFLFTVIGEWWVEGKVISRETMIGMLLSVGGIALCVQSKNAS

SEQ ID NO: 1306 - DNA, 2253 bp, Myceliophthora thermophilia
atgccctctgcggccttgtcgctcaccgttgcttcggcccagtccttcgaccgggattctgtgcgcaagcgtcgagatcgcacctgttactcaaccaacaccgccgctgtctgggcttcctggcaagcatcgaccaacccgcagaaaccgacgccgcttaccgggctgggaacatcaccatctcggctctattggcctggaatgggattgcccgcccgagagccgacgtcgccgatacaagttcgatccccggcaccgatcgcgaccgcgcctcctcgactcgacagcgccttcgatcgcatctcccagccctatccctcacctacacacgagcgggtgcctattggcatcgcatcgcacgttgttgccgacatgtctgcaatgtcccccaacggaacgggacctatgcctgcgggatcgcacagcggaagtgtgtcacctcgcaccgttacagcagccgcccccaaggcggttcaattcgttctcgtccttcaacattcgccgtaccaggcccgcctgcccctgcgcgtctctatctacccgcatgattccaccgattccatcatcacaaccgtcaagaatttctatggcctttactcgggcccgggtatctccaagggagtcagtttcgaagacgagaatggcaataccatgattgcccggtatgaaaacttcacgaacaatatgatagttcgcgtgcgcgtcatcgatgagccgcttggacccgatttccacgctgctctcggtggcgcccactaccacgccaatggctacccgacccaaggctctcaacacctagacgcacacgcttcccgctccacgtctaggacgccgcgcatgcgaagcccctctcccaacggtggacgtgggcgccgcagcacctcgacgggcggtaaccccgcttctgggaagaaggggcgctcccgctcttccaaaaaccgctcccgggtgaatggtgacgggcacggcgatagcttcaatggttacagcagcagcgacggcaccgctggcccatctagccgagccaaggagcagctgggcaacactgatatcagcgtcgagaacattgtcgaaggtggccgtcgcaagcgtaccaaattcgagagctcggagctacccctctttgctcctccccagatgccggcgacaacgtcgaacccgtccctctcgcccgctcgtcggctggaccctcaccgaagctccttgccattgattccctccggacaaaaccctttcagtaatccgcatctcctccactctccgcgggcgttgtccaacggttacgcacaccccggggcgtattctacacctagcagcgacaatcgtcgtagccgcgaaggcttagggttcctgccaggacctggtgacggctcagtcatgccgacgcccgaaccgactgtgcgaagcgctatgtccgaggaagacaaggacgttgccatgcagctgatgaggatgtcaacacacggtcgggcctctgggtcgacccaggacgatgccttcagcgggagagccgacgcatcttcatcagcgggcgcaacgagcgacgccgacagctgcgacgaggatgagagacttgccacgcggagacagaggctggatgtgtccggtaaccacaagaatgttttcgacacctcggaaggccaccttgccgttcccagagacagtgccgagacgagcggcgaagaggcttacagctcggatggccctgatgacagcacaacggctgcctccgccggtaagggtgtcaagcccaaggtgaccagcgtggtcgccgccaaaccaccttcgcagtcgtcaaacaagaccaagtcctacaaagcccccaagcccaaggcgaagaagccaacgagcatcgcgggcccaatgacgccggcgtccctccctgcctctcggaaacagtcgatcgcctccaatccgacctttccctcggcttcggcagaggaggagcagcccgacctttcgacaaagccccgatgccagcgctgccgcaagagtaagaagggatgcgataggcagcgcccttgtggcagatgccgggatgccgggattcccgcggagctctgcattagcgaagacgaaggcaatggtcgcaaaggccgatacggtcggcatatgggcgtgcctatcaagaaggacgatatgccacctccggctatgaacttgctacccgccgcgccaatcgcctctgatgcgctcggcttatcaatgccctcgtccagcatcatggacaagaacaagaagcgcaagaggtag

SEQ ID NO: 1307 - protein, 750 aa, Myceliophthora thermophilia
MPSAALSLTVASAQSFDRDSVRKRRDRTCYSTNTAAVWASWQASTNPQKPTPLTGLGTSPSRLYWPGMGLPAREPTSPIQVRSPAPIATAPPRLDSAFDRISQPYPSPTHERVPIGIASHVVADMSAMSPNGTGPMPAGSHSGSVSPRTVTAAAPKAVQFVLVLQHSPYQARLPLRVSIYPHDSTDSIITTVKNFYGLYSGPGISKGVSFEDENGNTMIARYENFTNNMIVRVRVIDEPLGPDFHAALGGAHYHANGYPTQGSQHLDAHASRSTSRTPRMRSPSPNGGRGRRSTSTGGNPASGKKGRSRSSKNRSRVNGDGHGDSFNGYSSSDGTAGPSSRAKEQLGNTDISVENIVEGGRRKRTKFESSELPLFAPPQMPATTSNPSLSPARRLDPHRSSLPLIPSGQNPFSNPHLLHSPRALSNGYAHPGAYSTPSSDNRRSREGLGFLPGPGDGSVMPTPEPTVRSAMSEEDKDVAMQLMRMSTHGRASGSTQDDAFSGRADASSSAGATSDADSCDEDERLATRRQRLDVSGNHKNVFDTSEGHLAVPRDSAETSGEEAYSSDGPDDSTTAASAGKGVKPKVTSVVAAKPPSQSSNKTKSYKAPKPKAKKPTSIAGPMTPASLPASRKQSIASNPTFPSASAEEEQPDLSTKPRCQRCRKSKKGCDRQRPCGRCRDAGIPAELCISEDEGNGRKGRYGRHMGVPIKKDDMPPPAMNLLPAAPIASDALGLSMPSSSIMDKNKKRKR

SEQ ID NO: 1308 - protein, 735 aa, Myceliophthora thermophilia
FDRDSVRKRRDRTCYSTNTAAVWASWQASTNPQKPTPLTGLGTSPSRLYWPGMGLPAREPTSPIQVRSPAPIATAPPRLDSAFDRISQPYPSPTHERVPIGIASHVVADMSAMSPNGTGPMPAGSHSGSVSPRTVTAAAPKAVQFVLVLQHSPYQARLPLRVSIYPHDSTDSIITTVKNFYGLYSGPGISKGVSFEDENGNTMIARYENFTNNMIVRVRVIDEPLGPDFHAALGGAHYHANGYPTQGSQHLDAHASRSTSRTPRMRSPSPNGGRGRRSTSTGGNPASGKKGRSRSSKNRSRVNGDGHGDSFNGYSSSDGTAGPSSRAKEQLGNTDISVENIVEGGRRKRTKFESSELPLFAPPQMPATTSNPSLSPARRLDPHRSSLPLIPSGQNPFSNPHLLHSPRALSNGYAHPGAYSTPSSDNRRSREGLGFLPGPGDGSVMPTPEPTVRSAMSEEDKDVAMQLMRMSTHGRASGSTQDDAFSGRADASSSAGATSDADSCDEDERLATRRQRLDVSGNHKNVFDTSEGHLAVPRDSAETSGEEAYSSDGPDDSTTAASAGKGVKPKVTSVVAAKPPSQSSNKTKSYKAPKPKAKKPTSIAGPMTPASLPASRKQSIASNPTFPSASAEEEQPDLSTKPRCQRCRKSKKGCDRQRPCGRCRDAGIPAELCISEDEGNGRKGRYGRHMGVPIKKDDMPPPAMNLLPAAPIASDALGLSMPSSSIMDKNKKRKR

SEQ ID NO: 1309 - DNA, 789 bp, Myceliophthora thermophilia
atgaagtcaactgttttcgtcgctagcctcttggcctcgctcgctgccgcgcagccccacggccacggccacgcccaccagcaccgcaggaaggagcacagccacaacaagcggggcgtggtcacgacctgggtgaccgagacggtttacgagacggtcaccgcctacgttgacgacaccaccaccgagctggtcatgccgagcaccaagccggccagcaccaccttcttgacctcgaccacgcccgcggccagcccgggagtcttcatccaggaacctgagacaagctcgacgacctcgaccagggtgcaagctcccccgacgtcgcaggcgccgccgccgcctccgcagtccccatcgcccagccccgagccaagccccagcactaccagcgttgcggcgccgcctgcgtcatcgtccgcaccgcccactgaagctcctggcggtgacggatctagtggatcaggcggccaggacacccgcagtggtgagatcacttattacgccctcggcatgggctcctgcggcgtcgatgacagcggcaaggacaactccgacaacatcgtcgctgtctcctcgtccctgatgggtgcccagtccaacggtaaccccatgtgcggcaagaccatcaccgtcaaggccaacggaaagacggcccaggccgtcgtccacgacaagtgcccgagctgcgcccccaacgacatcgatgtttccgagaagctcttcctcgagctcttcggctcgcttgatcttggtcggggccaggttgagtggtacttcaacgaataa

SEQ ID NO: 1310 - protein, 262 aa, Myceliophthora thermophilia
MKSTVFVASLLASLAAAQPHGHGHAHQHRRKEHSHNKRGVVTTWVTETVYETVTAYVDDTTTELVMPSTKPASTTFLTSTTPAASPGVFIQEPETSSTTSTRVQAPPTSQAPPPPPQSPSPSPEPSPSTTSVAAPPASSSAPPTEAPGGDGSSGSGGQDTRSGEITYYALGMGSCGVDDSGKDNSDNIVAVSSSLMGAQSNGNPMCGKTITVKANGKTAQAVVHDKCPSCAPNDIDVSEKLFLELFGSLDLGRGQVEWYFNE

SEQ ID NO: 1311 - protein, 245 aa, Myceliophthora thermophilia
QPHGHGHAHQHRRKEHSHNKRGVVTTWVTETVYETVTAYVDDTTTELVMPSTKPASTTFLTSTTPAASPGVFIQEPETSSTTSTRVQAPPTSQAPPPPPQSPSPSPEPSPSTTSVAAPPASSSAPPTEAPGGDGSSGSGGQDTRSGEITYYALGMGSCGVDDSGKDNSDNIVAVSSSLMGAQSNGNPMCGKTITVKANGKTAQAVVHDKCPSCAPNDIDVSEKLFLELFGSLDLGRGQVEWYFNE

SEQ ID NO: 1312 - DNA, 3447 bp, Myceliophthora thermophilia
atgaggattgccataagagagcagctcgcaacggttgtgatactcgcggtcggagttgcccttgccgtcgtgtcaatcccaacatggatattcgtcaacaacttcacgctcggcgtcgagtccgacggcttgtcattgactgcgtcgctcaaggctgcgaggatagcgtccgaaatcaagctgattcagacggcctgtcagagcatcgcgacacgcctgctgttgcaggacgccttcaggaggttctacgcgtcgcaagccaacaatacaaccgatgacgacacctgggcggacgctcaagacgacattcagagtgctctcgacaagaccggattttccgccctgctgcaggctcgcctgtactcgcggaacacgacgggtaaccctaagggcctcccccccaacggctctgatgttcatctgggggatcccgagtacggctttccgccgtctctttttcccaacatcacctaccgggacctcggccgcccaagcaatgtgatgcccaacacgaatgcctttaccgccgtcgtgtttcccggggtctcgcttggaaatggcagtgaaaaggccggtgtccttcttggaccattggtcgtcaactccacatacgcgctcatttcacttaccatcccgatccgcgacaccggaaacaacgactatgttctcggctacatgacgctggttgcaaacacgaggacactggtcgaggtgcagacgtccagggaaggcttgggaaacaccgggagggtactgttcgtgggctctaccaacccatggaaccacttcagcgccccggtggccgcaagcaattcaacctggaccccgcctctcgaagagtttggagagcaggaagtgcggttcctgctgccgccccaacctccagatggccagccggaccggcatagtctgcgaagcttcggatctggtaaatatggcgaaccattccggctacgtgagtacccagcagtcttggatgttttgcgcgaccagaatccgtcccctaataacgctacaagcaagctctccacgacgaatgagcaggggtactcggtagccgtaggggtcgcccggccgcaaaccccgctggtgtcttgggctatcgtggtggagaaggaccggaccgaggcgtaccagccgatcaggacgctccgcagcatcctcctgggatgtgtgtttggcacattgggcttggttctgctgctcgttttcccatttgcccattggagcgtcatgccgatcaggcgccttaaaatggccacggagaattcgatcgattctccgggctacgaggatgacgaggacgatgtcttcggcgaggagaacccgagctcgggtgggacgacgtcaggcagatcgtcggaaaagggaatgctagccaatattcgccgcaagatacgcaaacaccaaagggccaagctgaggcaagccgtgacggtcgagccggggcgccgccggttcaagattcccgccaaggtcgagagcgggaagcacttcatcacagacgagctgacggaactcacccagaccttcaacgagatgaccgaagaattgctcaagcaatacacgtctctcgacgagaaggtggcagaacggacgagggagttggagatcagcaagaaggcggccgaggcagcaaacgagagcaaaactctcttcatcgccaatatctcgcacgaactgaagacacctctcaatggcatcatgggcatgtgcgccgtttgcatggaagatgacgacctgcagcggatcaagcagtccctcaagacggtctataagtcgggcgatctcctgctccatctcctcgaggacctgctcagtttctccaagaatcagatcggacagcaggtcagtctcgaagaacgcgagtttcggctgggcgacgtccgctcgcaggttttggccatctttgacaagcaggttcgcgagagcaggagcgggctaacggtcacctttgtctccgacaccccggcccccggtccggacggccgatccagcacggacaagcgactcccggctctgggtcctccgggcgtaggcaggttaaaggacatgtgcctctggggcgaccagcaccggatactgcaggttatcatcaacctcgtcagcaacagcctgaagttcaccccacccgggggcacggtcagcctcaggatacgctgcgtcggcgaggttgagcaaccgagcgacgagagcaggacttcgtcgttctccaagacaggctcttccaatagggcgggccgcacccggcaccgggtgggttcggggtcgacaaactcggcaagctccaagggaccgcatctgcctctctcctcggtcaatggcgggaccgctctcgccatcaatcccgcggacccaaaggccacgccgcagatccacatccgggaacgttcaccgacccccccgccgccaaacgccaagacatacctgttcgaattcgaagttgaggatacagggcccggaatccccgagcatatgcagcaaaagatctttgagccgttcgtccaaggcgatctgggattgagcaaaaagtatggcggcactggcctcggattgagcatttgctctcagctggctactctcatgggcggccacatctcgctcaagagtacgccgggtgtggggacgacgtttacgatgcagatacctctcaaatacgtcaaggaacgtgcctcgagcaccgcctccagcagcgtgaaatcacgaccgccaagcgtaggctcgatggaaggcgattcgcggagtctagccccgcggaattcgacagaagttcaacgtcaaccggccgctgctcctgtactcgaccagcaaccgcgccttgttggcctcagccagccgttcttcgcgtcgaccaccccaaaccggatcagcaaggaggaccagatggctgctatcgaccgggcgatggcgaccaagtccggtcagggaaaactccgtgttttggtggccgacgacaactcgaccaacatcgaggttgtcagcaggcttctgaaactggaggacgtctatgacgtgaccattgcaaaggacggtcaagaggcgtatgagctggtcaaggccaacatggagaaaaaccagctctttgatgtcatcttcatggacgttcagatgcctaacctggacgggctccagtcaacgcgcctgattcggaagatgggctattcggctcccatcgtcgctttgaccgctttttccgaagagagcaacgtcagggagtgcatggagtcgggcatgaacgagttcttgagcaaaccaattcggaggccggcattgaagaaagtcctggccaagtttgcgaccataccggaggaaccggaaacgtcgagcttgacgcgcaggacaacgcccgacaagactcctgtggcgacgcccgagttggaggtcaaggaccctctcgcgaatggcacgggtatctcggcgagtgtccctcctactgaggtacaatga

SEQ ID NO: 1313 - protein, 1148 aa, Myceliophthora thermophilia
MRIAIREQLATVVILAVGVALAVVSIPTWIFVNNFTLGVESDGLSLTASLKAARIASEIKLIQTACQSIATRLLLQDAFRRFYASQANNTTDDDTWADAQDDIQSALDKTGFSALLQARLYSRNTTGNPKGLPPNGSDVHLGDPEYGFPPSLFPNITYRDLGRPSNVMPNTNAFTAVVFPGVSLGNGSEKAGVLLGPLVVNSTYALISLTIPIRDTGNNDYVLGYMTLVANTRTLVEVQTSREGLGNTGRVLFVGSTNPWNHFSAPVAASNSTWTPPLEEFGEQEVRFLLPPQPPDGQPDRHSLRSFGSGKYGEPFRLREYPAVLDVLRDQNPSPNNATSKLSTTNEQGYSVAVGVARPQTPLVSWAIVVEKDRTEAYQPIRTLRSILLGCVFGTLGLVLLLVFPFAHWSVMPIRRLKMATENSIDSPGYEDDEDDVFGEENPSSGGTTSGRSSEKGMLANIRRKIRKHQRAKLRQAVTVEPGRRRFKIPAKVESGKHFITDELTELTQTFNEMTEELLKQYTSLDEKVAERTRELEISKKAAEAANESKTLFIANISHELKTPLNGIMGMCAVCMEDDDLQRIKQSLKTVYKSGDLLLHLLEDLLSFSKNQIGQQVSLEEREFRLGDVRSQVLAIFDKQVRESRSGLTVTFVSDTPAPGPDGRSSTDKRLPALGPPGVGRLKDMCLWGDQHRILQVIINLVSNSLKFTPPGGTVSLRIRCVGEVEQPSDESRTSSFSKTGSSNRAGRTRHRVGSGSTNSASSKGPHLPLSSVNGGTALAINPADPKATPQIHIRERSPTPPPPNAKTYLFEFEVEDTGPGIPEHMQQKIFEPFVQGDLGLSKKYGGTGLGLSICSQLATLMGGHISLKSTPGVGTTFTMQIPLKYVKERASSTASSSVKSRPPSVGSMEGDSRSLAPRNSTEVQRQPAAAPVLDQQPRLVGLSQPFFASTTPNRISKEDQMAAIDRAMATKSGQGKLRVLVADDNSTNIEVVSRLLKLEDVYDVTIAKDGQEAYELVKANMEKNQLFDVIFMDVQMPNLDGLQSTRLIRKMGYSAPIVALTAFSEESNVRECMESGMNEFLSKPIRRPALKKVLAKFATIPEEPETSSLTRRTTPDKTPVATPELEVKDPLANGTGISASVPPTEVQ

SEQ ID NO: 1314 - protein, 1126 aa, Myceliophthora thermophilia
VVSIPTWIFVNNFTLGVESDGLSLTASLKAARIASEIKLIQTACQSIATRLLLQDAFRRFYASQANNTTDDDTWADAQDDIQSALDKTGFSALLQARLYSRNTTGNPKGLPPNGSDVHLGDPEYGFPPSLFPNITYRDLGRPSNVMPNTNAFTAVVFPGVSLGNGSEKAGVLLGPLVVNSTYALISLTIPIRDTGNNDYVLGYMTLVANTRTLVEVQTSREGLGNTGRVLFVGSTNPWNHFSAPVAASNSTWTPPLEEFGEQEVRFLLPPQPPDGQPDRHSLRSFGSGKYGEPFRLREYPAVLDVLRDQNPSPNNATSKLSTTNEQGYSVAVGVARPQTPLVSWAIVVEKDRTEAYQPIRTLRSILLGCVFGTLGLVLLLVFPFAHWSVMPIRRLKMATENSIDSPGYEDDEDDVFGEENPSSGGTTSGRSSEKGMLANIRRKIRKHQRAKLRQAVTVEPGRRRFKIPAKVESGKHFITDELTELTQTFNEMTEELLKQYTSLDEKVAERTRELEISKKAAEAANESKTLFIANISHELKTPLNGIMGMCAVCMEDDDLQRIKQSLKTVYKSGDLLLHLLEDLLSFSKNQIGQQVSLEEREFRLGDVRSQVLAIFDKQVRESRSGLTVTFVSDTPAPGPDGRSSTDKRLPALGPPGVGRLKDMCLWGDQHRILQVIINLVSNSLKFTPPGGTVSLRIRCVGEVEQPSDESRTSSFSKTGSSNRAGRTRHRVGSGSTNSASSKGPHLPLSSVNGGTALAINPADPKATPQIHIRERSPTPPPPNAKTYLFEFEVEDTGPGIPEHMQQKIFEPFVQGDLGLSKKYGGTGLGLSICSQLATLMGGHISLKSTPGVGTTFTMQIPLKYVKERASSTASSSVKSRPPSVGSMEGDSRSLAPRNSTEVQRQPAAAPVLDQQPRLVGLSQPFFASTTPNRISKEDQMAAIDRAMATKSGQGKLRVLVADDNSTNIEVVSRLLKLEDVYDVTIAKDGQEAYELVKANMEKNQLFDVIFMDVQMPNLDGLQSTRLIRKMGYSAPIVALTAFSEESNVRECMESGMNEFLSKPIRRPALKKVLAKFATIPEEPETSSLTRRTTPDKTPVATPELEVKDPLANGTGISASVPPTEVQ

SEQ ID NO: 1315 - DNA, 1107 bp, Myceliophthora thermophilia
atgcggacaccaccactaccctggaggacattccgtgtcctctcaagcacgctcagccgggcatcaacccgccattccctcgcaacacaacctctcccaccatcatcagcgtccctcttcttccgcacgatggcgtcatccgccccgcgctcacccgttctcaagcagcccgtcaagatcgcgtgcgtgcaactcgccgcgggcccggacaaggcggccaacctggcccacgccgccgtcaaggtccgcgaagccgccgcgacgggcgccaagattgtcgtccttccggagtgcttcaactccccctacggatgcgaccacttcccgacctacgccgagcgcctcctcccatccccgcccccgcccgagcagtctccatccttccacgcgctctcggccatggcacgcgacaacggcatctacctgattggcggctccatcccggagctcgtcgtcacgacggaggacggttccggcgcctcgggccaggacaccatcgaggaggaagagaataagaagaagaagaagaagaaggatgagaagacgtactacaacacgtcgctgaccttctcgccgacgggcgagctcctggcgacgtaccgcaagatgcacctgttcgacatctcgatcccgggcaagatcacgttccgcgagtcggacgtgctgtcgcccggcgactcgctcgccctcgtcgacctgcccgagtacggccgcgtcgccatcgccatctgctacgacgtgcgcttccccgagctcgccatgatcgccgcccgccggggctgcttcgcgctcgtgtacccgggcgccttcaacctcacgacggggcccctgcactggcagctgctggcccgcgcccgggccgtggacaaccaggtctacgtggccatgtgcagcccggcccgcgacatgagcgccgggtaccacgcgtggggccacagtctggtggtggatccgatggcgcaggtgctggtagaggccggagaaggggaggaggtggtagtggcggacctggacggggagaagattgaggaggcgaggaaggggatcccgttgagggatcagagacggtttgatgtctatgcagacgtgagtcgcgtaaaaccgtag

SEQ ID NO: 1316 - protein, 368 aa, Myceliophthora thermophilia
MRTPPLPWRTFRVLSSTLSRASTRHSLATQPLPPSSASLFFRTMASSAPRSPVLKQPVKIACVQLAAGPDKAANLAHAAVKVREAAATGAKIVVLPECFNSPYGCDHFPTYAERLLPSPPPPEQSPSFHALSAMARDNGIYLIGGSIPELVVTTEDGSGASGQDTIEEEENKKKKKKKDEKTYYNTSLTFSPTGELLATYRKMHLFDISIPGKITFRESDVLSPGDSLALVDLPEYGRVAIAICYDVRFPELAMIAARRGCFALVYPGAFNLTTGPLHWQLLARARAVDNQVYVAMCSPARDMSAGYHAWGHSLVVDPMAQVLVEAGEGEEVVVADLDGEKIEEARKGIPLRDQRRFDVYADVSRVKP

SEQ ID NO: 1317 - protein, 321 aa, Myceliophthora thermophilia
APRSPVLKQPVKIACVQLAAGPDKAANLAHAAVKVREAAATGAKIVVLPECFNSPYGCDHFPTYAERLLPSPPPPEQSPSFHALSAMARDNGIYLIGGSIPELVVTTEDGSGASGQDTIEEEENKKKKKKKDEKTYYNTSLTFSPTGELLATYRKMHLFDISIPGKITFRESDVLSPGDSLALVDLPEYGRVAIAICYDVRFPELAMIAARRGCFALVYPGAFNLTTGPLHWQLLARARAVDNQVYVAMCSPARDMSAGYHAWGHSLVVDPMAQVLVEAGEGEEVVVADLDGEKIEEARKGIPLRDQRRFDVYADVSRVKP

SEQ ID NO: 1318 - DNA, 1149 bp, Myceliophthora thermophilia
atgcgttcccggcggcttccgcggcgggcttttctcgctctcgccgtactcgccggcgtgtccttcgccgaagaagcgacaaagacgtctaccgaaaccactccggtccacacaccatgcgtcgcgacctccatcaacggcgccttcttcgacctgcgcccggacatagcggttgctgtcgctgagggggagaagccgccaaggggtacaccaaccgaagactacgtagccaggggctgggactacgggtacaactttacgctcaacatctgcgagcctgtcgtgaagaaggtggaagacgtggttggcgtggacaaagcgctgtggccgaacatcagcgcgtactacgaagccgacgggaaaatttactcgctagggcaacaatcaggagagcttatcccgcgcggccgcaagctcgttctccagtacacaggcggttcgccatgtggcccttccgagaagagcgcagacaagcgatccaaggttcatggaggggcgagatccgagcgcttcaattttgacgacgaggacgaggattaccacccaccagaggacgatgaggaagatgatgacaagaaagataaaaagaaaggggaaggggaagagagagggggtggtagggatgacgaagatgatgacagggagaaagacaatggaaagggaggagcgaatcagagacagctccgcaaatccgcgagcatctcgtttctttgcgatcacgacccggacacacccacggccttctccttcgccatggcggatccgtatgagtgcgcgtacttcttcgaggtacgttcacagcacgcctgcgcggccgccgagccccacaagccgggcagcgtcggtccagggagcgtcttcgccatcatcttcttcatcacggtcatggtatacgtggtgggcggcgtcttctaccagcgcacggtggcgcatgcgcggggttggaggcagctgccgaactacagcatgtgggcgggtatctggagcttcatcaaggatttgttgatcatcctgacagcgtcatgcgcccggctcgtcccgaggcggagaggttatcacacactgtcgggctctcccaacgggaggcaccggaaccgtgatgacgagaatcggctgattgaccagcttgacgaagagtgggatgactga

SEQ ID NO: 1319 - protein, 382 aa, Myceliophthora thermophilia
MRSRRLPRRAFLALAVLAGVSFAEEATKTSTETTPVHTPCVATSINGAFFDLRPDIAVAVAEGEKPPRGTPTEDYVARGWDYGYNFTLNICEPVVKKVEDVVGVDKALWPNISAYYEADGKIYSLGQQSGELIPRGRKLVLQYTGGSPCGPSEKSADKRSKVHGGARSERFNFDDEDEDYHPPEDDEEDDDKKDKKKGEGEERGGGRDDEDDDREKDNGKGGANQRQLRKSASISFLCDHDPDTPTAFSFAMADPYECAYFFEVRSQHACAAAEPHKPGSVGPGSVFAIIFFITVMVYVVGGVFYQRTVAHARGWRQLPNYSMWAGIWSFIKDLLIILTASCARLVPRRRGYHTLSGSPNGRHRNRDDENRLIDQLDEEWDD

SEQ ID NO: 1320 - protein, 359 aa, Myceliophthora thermophilia
EEATKTSTETTPVHTPCVATSINGAFFDLRPDIAVAVAEGEKPPRGTPTEDYVARGWDYGYNFTLNICEPVVKKVEDVVGVDKALWPNISAYYEADGKIYSLGQQSGELIPRGRKLVLQYTGGSPCGPSEKSADKRSKVHGGARSERFNFDDEDEDYHPPEDDEEDDDKKDKKKGEGEERGGGRDDEDDDREKDNGKGGANQRQLRKSASISFLCDHDPDTPTAFSFAMADPYECAYFFEVRSQHACAAAEPHKPGSVGPGSVFAIIFFITVMVYVVGGVFYQRTVAHARGWRQLPNYSMWAGIWSFIKDLLIILTASCARLVPRRRGYHTLSGSPNGRHRNRDDENRLIDQLDEEWDD

SEQ ID NO: 1321 - DNA, 567 bp, Myceliophthora thermophilia
atgagcccgccactgccacttcccccgccacgacgtcgccctcccctcgcggacctcctcgccaccaacgtcacccccctcttcttccacctccacctccacctccaccaccttctcgtcctccttctcatcatcattgtcgtcggctacgcgccccggacggcacgcgcagactgcgagtgcggctacctcgccgccgtccacggtggcgacagcagcaaccgccgagccctcttcaccgacctcctcgaaacggactttgcccgcctggcggccggcgcgcgggatgatgatgaccatgatgatggtgatgatgatgatgccgggcccgacgcctccccgatcgaggggtgggcgcgccaggcgttcaacctcacccgggagcgggcccggggcgagtacggcgagctgtttgcggtggagaacgtcgggtttgttgctgctgctgctgcgtcgtcgtcttcttcttcttctcagggaaacgtcgctggcgacgaggggggaggatggaaagaaggggaggaaagaggtgggattgggagcggggggaagaggagcttgaaatga

SEQ ID NO: 1322 - protein, 188 aa, Myceliophthora thermophilia
MSPPLPLPPPRRRPPLADLLATNVTPLFFHLHLHLHHLLVLLLIIIVVGYAPRTARADCECGYLAAVHGGDSSNRRALFTDLLETDFARLAAGARDDDDHDDGDDDDAGPDASPIEGWARQAFNLTRERARGEYGELFAVENVGFVAAAAASSSSSSSQGNVAGDEGGGWKEGEERGGIGSGGKRSLK

SEQ ID NO: 1323 - protein, 131 aa, Myceliophthora thermophilia
DCECGYLAAVHGGDSSNRRALFTDLLETDFARLAAGARDDDDHDDGDDDDAGPDASPIEGWARQAFNLTRERARGEYGELFAVENVGFVAAAAASSSSSSSQGNVAGDEGGGWKEGEERGGIGSGGKRSLK

SEQ ID NO: 1324 - DNA, 1782 bp, Myceliophthora thermophilia
atgtcgagctgcagcgggtcaacatcaacaatcttcgcttctgccctacctgctgctcgcacgctcccgcttccggcgaccgtcctcttcttccgccgccgctggaacccggaacgtttcgagccgccgacgaggctgtccaccgtaatccagcaattccaccacgactttgaccgcctcagccagcatctattcgctacgtctactcgcacgagcctgagcgccggtaggatggcttcgggctccgaccgagacttgcggccaagatttaaccgggatccgcaaccgtcaaacaacccactttcgtcctctgctgcttctccagattctccatcccttccccctctacgctccctcgatcaaagagctcgggggccccacgctgccttctccggatcagggtcccgctctagccgctatcgcccggctggccggtacctcgacaggtttcgctcacatctcggggccactctcgacgacctgaaccggaacatccacgatactgacgcacagctacggacgttgatggatttcggcatggccaccaacataccgcctgcaccacctaccgtttcgcctcccttgcaaggccatgacacggccgaggacacccgacgcaccaagcgacgcaagctcaaccccgataggcacacctcggccttcaagggctttcgctatggcagatatggccaggttgagcccggccagctgaccatggaaattgtgagctgcgatgggggtctgtactccgacgagcactcgtacgctccagaaaacattctcaagaacgatgcgtccgtctactgcaccaagagcaaccgctgtaatattgtcctcaagcaccagggtgggaccgtgtttagcctgcaagagctagtcatcagggcccccggatccaaattttcatgccctgtccgcgaaggcatgatatttgtatcgatggatttggacgacctgctcacccgcaccgcacagtaccagattcagtaccaaccttcccgtatccaccggcgcggcacggtatacttccgccccgaggagggaggccgattcgaatcacggcctctgcgggcatatagttacggtgcagatgatgatgacgacgatgacgacgacgacgatgacgaagagaacagcaggacagcacagataccgccagagttcacgacttcctcgcttccctacaacgtcacgaccgtttgcagcgaggatgagagcgaagacgaagatccatcttcccattctcgacctcctcgtcaacccccacgacgagggaaccgttatagcgttggctcgctaccatttgacagtgacagtgacgatacggatttctcgcgtgccttcggcggtccgtacggccactggcctcccacccccgaggaggccgccgcgcgtagacggtaccgcacctcccgcctccgaggcggcggtgctgcagtccctcccaccgctaccggtgaccgagccggtgctggaagcagcagcagcgggccgagccgcagcgacatgacgctcgaagaggcccaggaggcgtcgcagattgcgactcaagaggcagtgcgggcggtgggcggcgagctgatgaccccgctggcacacttcttcatcgagaaggacaagaacaagtgcacggtgcggttcgacccgccggtgagcggccggttcatcctgcttaagatgtggagcccgcatcaggacccgcagaagaatattgatatccaggccgtcgtggcaaaagggtttgcggggccccggtattgtcctgctattgacctggcttga

SEQ ID NO: 1325 - protein, 593 aa, Myceliophthora thermophilia
MSSCSGSTSTIFASALPAARTLPLPATVLFFRRRWNPERFEPPTRLSTVIQQFHHDFDRLSQHLFATSTRTSLSAGRMASGSDRDLRPRFNRDPQPSNNPLSSSAASPDSPSLPPLRSLDQRARGPHAAFSGSGSRSSRYRPAGRYLDRFRSHLGATLDDLNRNIHDTDAQLRTLMDFGMATNIPPAPPTVSPPLQGHDTAEDTRRTKRRKLNPDRHTSAFKGFRYGRYGQVEPGQLTMEIVSCDGGLYSDEHSYAPENILKNDASVYCTKSNRCNIVLKHQGGTVFSLQELVIRAPGSKFSCPVREGMIFVSMDLDDLLTRTAQYQIQYQPSRIHRRGTVYFRPEEGGRFESRPLRAYSYGADDDDDDDDDDDDEENSRTAQIPPEFTTSSLPYNVTTVCSEDESEDEDPSSHSRPPRQPPRRGNRYSVGSLPFDSDSDDTDFSRAFGGPYGHWPPTPEEAAARRRYRTSRLRGGGAAVPPTATGDRAGAGSSSSGPSRSDMTLEEAQEASQIATQEAVRAVGGELMTPLAHFFIEKDKNKCTVRFDPPVSGRFILLKMWSPHQDPQKNIDIQAVVAKGFAGPRYCPAIDLA

SEQ ID NO: 1326 - protein, 572 aa, Myceliophthora thermophilia
LPLPATVLFFRRRWNPERFEPPTRLSTVIQQFHHDFDRLSQHLFATSTRTSLSAGRMASGSDRDLRPRFNRDPQPSNNPLSSSAASPDSPSLPPLRSLDQRARGPHAAFSGSGSRSSRYRPAGRYLDRFRSHLGATLDDLNRNIHDTDAQLRTLMDFGMATNIPPAPPTVSPPLQGHDTAEDTRRTKRRKLNPDRHTSAFKGFRYGRYGQVEPGQLTMEIVSCDGGLYSDEHSYAPENILKNDASVYCTKSNRCNIVLKHQGGTVFSLQELVIRAPGSKFSCPVREGMIFVSMDLDDLLTRTAQYQIQYQPSRIHRRGTVYFRPEEGGRFESRPLRAYSYGADDDDDDDDDDDDEENSRTAQIPPEFTTSSLPYNVTTVCSEDESEDEDPSSHSRPPRQPPRRGNRYSVGSLPFDSDSDDTDFSRAFGGPYGHWPPTPEEAAARRRYRTSRLRGGGAAVPPTATGDRAGAGSSSSGPSRSDMTLEEAQEASQIATQEAVRAVGGELMTPLAHFFIEKDKNKCTVRFDPPVSGRFILLKMWSPHQDPQKNIDIQAVVAKGFAGPRYCPAIDLA

SEQ ID NO: 1327 - DNA, 3033 bp, Myceliophthora thermophilia
atggcctgggaccatctctccatcaccaagccgcacttggtctacatcatcctcgggggcttcacctccctgttcatgctatgctcgagcgtcatcaaggagcgcatgtacattggcgaggccaccgtggccacgctctgcggtgtcatcttcgggccctatgccgccaacctcatcaacccggaatcatggggcagcgtcgacattgtcaccatcgagttctcccgcctcgtcctggtcgtgcagtgcttcgccgtaggcgtcgaactgcccaagtactatatggagaagcactggaaatccgtcaccttcctgctggtgcccgtcatgacctttggttggctgatcactagtctgtttgtctggtggatggtcgagcccctgaacttcctcgagagtctcgtcgtggccgcatgcgtcaccgccacggaccccgtcctcgcctcgtccgtcgtcggcaagggcaagtttgccaagagggttcccaagcatctccgtgacctgctctcggccgagtcgggttgcaacgacggcatggccttccctttcatctacctctccctgtatctcatccacgacaagcagagcgccagggacgtctcgttccactggatcgtctacaccatcctctacgagtgcgtcttcggtgccgtctacggcttcatcatcggctacctcgcccgccacggcatcaagtacgccgaggagcacgatctgattgacagggagagcttcttggtcttctactttgtgctcgccctgttctgtgccggttcagggagcattctcggcgtggacgacctcctcgtcggattcgccgccggtgtcggcttctcaaatgacggctggttcacccagaagacggaggagtcccacgtctccaacgtcatcgacctgctgctcaacctggcctacttcgtctactttggcaccatcatcccgtggaagtccttcaacgacgctgccatgggcctgcaagcctggcgcctgtccgtcctggccatattcgtcatcctctttcgccgcattcccatcatgatggctctgaagccggtcattcccgatataaagacctggcgcgaggccctcttcgccggccacttcggtcccatcggcgtcggcgccatcttcgttgccatgctggcccggggcgaactcgagtccgaggacccggtccctctctcggagctgccgaaacccggaaccgaaaactatacgctgctctcgcttgtctggcccattgttgcgttcatcgtcgtctcctccattatcgtccacggctcgtcgatcgccgtgttcacgctggggaagcgcatcaacaccctcaccatcaccatgtcgtacacgcaagccaacgaagacggcccgcactggatgaaccgactgcctcgcatatcttcacagtcgcggtcgcaggcgcgcaccatgtcggatactgatgccgaagaactcaagctgcccgagttcccacctgggacgctgccgcctgtcggcttccccgggaacttcttgcgtcgcgtcaaggaagacgacaccagcagacacgggagcaggtcttcctcgctggcaccacgccggcggaagaagaagtgggacgacggcatcggacccggcggtcccattagccagtcggccatctacccccaacgtcgcggccaaggcgaggagccctcacccggtcccccgcgcggtagcaccgaccagtcccgggcggatgatgtcccccagttaccgaccgatgtggagtcccccgtcgttctagaagagaaggattccgatcgattatctctggccgaggcttccgagaagccagccggcgaggaccgccctgcgagctcggaagaacgcagagatgccgttgaggtctacgaagagggtggcaacattgtggttgagaaccgtgctggcgatatgctcgcggtcgaacccatgcacggcgaggaaaacaccgctgatcgagccaagagcttggcaaccgagctcaaggcggaaacagagacctcgggctggacttatgagggtttgaagaagagaatcgtagcctggcgcgaggctgagcttgcgaagaggaaaggcaagggcaagacggttactaagagcgaaccggcccgggcgttccaattcggtaacacgattattgtggaaaatgaagatggtgaagtcatcaaaaagtacgacctccccacgcagaagccgcaggccgacctagtgagtcaaggcctgaaacacatgggcatgggcgtcttcgcgaaggccatagaaaagcccagcgaaggcgcggcaggggcaggcgagtcctccacggggggagagccctctgcgacgcagaaacaacgcaaaaagagcgtggttgcggggcaggaagaggatgacgacaggcacatccggttcaccattggcggcatcggccggcgcatgaccaaggaggacttcattgagcagatgcagaagctggacagatccaccaggcgcgaggttgtggacaagtcggacgcgtcgcggggactcaagacactcgccaaacaggacgcgccggcgcgaccgaccccgcaaatcacggtctccccagcccagcagtcaagcgccagccggaaggactacgcacccgccggtgccaccaaatctacccaacagccgccaggagaggatgaacgtaggcagcgcgagtcgaggtcgtcttctcgggggaaacaggaatcgccatccgacacgtcagacaatggggcagccgaaaccgaggtagagcgcaggaggcgactggcagcgctgaagggcgtcgatgctgaagacggcagtgatgacgaggacgacgttgccgatcgccgcggccgcagcatcaacaagacacgcagggagcatgacgaggatgatgtcgagacggccgcggaacgacgccgtagagaggcagcgctggggatggcgccgcacgcggacaacggggaggacagcgacgatgatgacacgccgcgagtgccaccatctaaaaggtcgattcggtttgcagatgccctggagagggcgaggcgagaatga

SEQ ID NO: 1328 - protein, 1010 aa, Myceliophthora thermophilia
MAWDHLSITKPHLVYIILGGFTSLFMLCSSVIKERMYIGEATVATLCGVIFGPYAANLINPESWGSVDIVTIEFSRLVLVVQCFAVGVELPKYYMEKHWKSVTFLLVPVMTFGWLITSLFVWWMVEPLNFLESLVVAACVTATDPVLASSVVGKGKFAKRVPKHLRDLLSAESGCNDGMAFPFIYLSLYLIHDKQSARDVSFHWIVYTILYECVFGAVYGFIIGYLARHGIKYAEEHDLIDRESFLVFYFVLALFCAGSGSILGVDDLLVGFAAGVGFSNDGWFTQKTEESHVSNVIDLLLNLAYFVYFGTIIPWKSFNDAAMGLQAWRLSVLAIFVILFRRIPIMMALKPVIPDIKTWREALFAGHFGPIGVGAIFVAMLARGELESEDPVPLSELPKPGTENYTLLSLVWPIVAFIVVSSIIVHGSSIAVFTLGKRINTLTITMSYTQANEDGPHWMNRLPRISSQSRSQARTMSDTDAEELKLPEFPPGTLPPVGFPGNFLRRVKEDDTSRHGSRSSSLAPRRRKKKWDDGIGPGGPISQSAIYPQRRGQGEEPSPGPPRGSTDQSRADDVPQLPTDVESPVVLEEKDSDRLSLAEASEKPAGEDRPASSEERRDAVEVYEEGGNIVVENRAGDMLAVEPMHGEENTADRAKSLATELKAETETSGWTYEGLKKRIVAWREAELAKRKGKGKTVTKSEPARAFQFGNTIIVENEDGEVIKKYDLPTQKPQADLVSQGLKHMGMGVFAKAIEKPSEGAAGAGESSTGGEPSATQKQRKKSVVAGQEEDDDRHIRFTIGGIGRRMTKEDFIEQMQKLDRSTRREVVDKSDASRGLKTLAKQDAPARPTPQITVSPAQQSSASRKDYAPAGATKSTQQPPGEDERRQRESRSSSRGKQESPSDTSDNGAAETEVERRRRLAALKGVDAEDGSDDEDDVADRRGRSINKTRREHDEDDVETAAERRRREAALGMAPHADNGEDSDDDDTPRVPPSKRSIRFADALERARRE

SEQ ID NO: 1329 - protein, 986 aa, Myceliophthora thermophilia
FMLCSSVIKERMYIGEATVATLCGVIFGPYAANLINPESWGSVDIVTIEFSRLVLVVQCFAVGVELPKYYMEKHWKSVTFLLVPVMTFGWLITSLFVWWMVEPLNFLESLVVAACVTATDPVLASSVVGKGKFAKRVPKHLRDLLSAESGCNDGMAFPFIYLSLYLIHDKQSARDVSFHWIVYTILYECVFGAVYGFIIGYLARHGIKYAEEHDLIDRESFLVFYFVLALFCAGSGSILGVDDLLVGFAAGVGFSNDGWFTQKTEESHVSNVIDLLLNLAYFVYFGTIIPWKSFNDAAMGLQAWRLSVLAIFVILFRRIPIMMALKPVIPDIKTWREALFAGHFGPIGVGAIFVAMLARGELESEDPVPLSELPKPGTENYTLLSLVWPIVAFIVVSSIIVHGSSIAVFTLGKRINTLTITMSYTQANEDGPHWMNRLPRISSQSRSQARTMSDTDAEELKLPEFPPGTLPPVGFPGNFLRRVKEDDTSRHGSRSSSLAPRRRKKKWDDGIGPGGPISQSAIYPQRRGQGEEPSPGPPRGSTDQSRADDVPQLPTDVESPVVLEEKDSDRLSLAEASEKPAGEDRPASSEERRDAVEVYEEGGNIVVENRAGDMLAVEPMHGEENTADRAKSLATELKAETETSGWTYEGLKKRIVAWREAELAKRKGKGKTVTKSEPARAFQFGNTIIVENEDGEVIKKYDLPTQKPQADLVSQGLKHMGMGVFAKAIEKPSEGAAGAGESSTGGEPSATQKQRKKSVVAGQEEDDDRHIRFTIGGIGRRMTKEDFIEQMQKLDRSTRREVVDKSDASRGLKTLAKQDAPARPTPQITVSPAQQSSASRKDYAPAGATKSTQQPPGEDERRQRESRSSSRGKQESPSDTSDNGAAETEVERRRRLAALKGVDAEDGSDDEDDVADRRGRSINKTRREHDEDDVETAAERRRREAALGMAPHADNGEDSDDDDTPRVPPSKRSIRFADALERARRE

SEQ ID NO: 1330 - DNA, 243 bp, Myceliophthora thermophilia
atggctgccttctccgtggaaaaaccgctttctcacattcttctatcctgggcatttctgggcatttctgggcaaactccaatgtggctttccttttgccaacttaatggcacagatacggcccacccgggccacctctggctgtccacgtgtaggtgtcgagcaaaggagcgcttcaagcgccaatcgactccggtgcaagacgttccatcgctgcggggatggcagcggtcggctctgtga

SEQ ID NO: 1331 - protein, 80 aa, Myceliophthora thermophilia
MAAFSVEKPLSHILLSWAFLGISGQTPMWLSFCQLNGTDTAHPGHLWLSTCRCRAKERFKRQSTPVQDVPSLRGWQRSAL

SEQ ID NO: 1332 - protein, 56 aa, Myceliophthora thermophilia
QTPMWLSFCQLNGTDTAHPGHLWLSTCRCRAKERFKRQSTPVQDVPSLRGWQRSAL

SEQ ID NO: 1333 - DNA, 462 bp, Myceliophthora thermophilia
atggcttctcttattgatttcacctcgggcaactggtcatattacaccatcccggccgccttctttctctgcatgttgccaaacgcctacgccaccaagttggcaggcaggaactatgacattgcgaaccctcgcaagaccgaggaactctgcgccaaagacacctcgctagacaaagtcaccctccagcgcatctcgcgcgccagggcggcgaccgccaacggattcgagacgcttggcctgtacgccgccgccgtcgtggccggcaacgtcgcggggctgcccaccgagcgcatgaacaagctgacgctggcctacctcggctcgcgcgccgcctacaactacgtctatgttgtgctgcaggacaatgcgcggatggccgggctgcggtcgctggcgtggttggtgggaattgtgatcataatgacgctgtttgtgtccgcgggcatgaccttgaactga

SEQ ID NO: 1334 - protein, 153 aa, Myceliophthora thermophilia
MASLIDFTSGNWSYYTIPAAFFLCMLPNAYATKLAGRNYDIANPRKTEELCAKDTSLDKVTLQRISRARAATANGFETLGLYAAAVVAGNVAGLPTERMNKLTLAYLGSRAAYNYVYVVLQDNARMAGLRSLAWLVGIVIIMTLFVSAGMTLN

SEQ ID NO: 1335 - protein, 122 aa, Myceliophthora thermophilia
TKLAGRNYDIANPRKTEELCAKDTSLDKVTLQRISRARAATANGFETLGLYAAAVVAGNVAGLPTERMNKLTLAYLGSRAAYNYVYVVLQDNARMAGLRSLAWLVGIVIIMTLFVSAGMTLN

SEQ ID NO: 1336 - DNA, 984 bp, Myceliophthora thermophilia
atgttccaaccaacatgttgtacctgcgcgtccctgctcccggccacgtctaagttgctgcggtcgtatcatctgcggtgtttgcatacatgtgggattccacacgccggccgtccctcctcccgcttttcagaccgggctaatgattccctccagaacaacccccgcttttctagttactgcccctactgccaaacctcaggcgcacctcttcccctcagcgaccgcttcgaggtccggccgaggcgaagcgaagcggaagcggaattgcagtcagaaagcgatcatccgcctccatattccgccatcgcccagacaatcaaggtcaagctcaacacaaccgagccagcagaccctccaccaccgtactccccctcctcctcctcctcctcctcccccaccatctcctcgtcgacgccccgacccagctctccgaagcaaccacccgcgatagacgagaaagcgaccgcccccgccggctacgcgatccatcaccttcgccatcccccgcacccgcacccggacaccctggcatcgatctccctccgctacggcatcccgctccccgtcctccgccggcacaacaacctgcccagcgacgccgactacctgctggccgctcggaacaccgtgctgatcccggccgcgtacatcatcgccgccgccggcggcggcagcgcccccgacggcacccccgcgagtggcgaggcgagcctgtcgccgcacccggtcgaggacgcggccgagcgggggcgcaagaagatgatccggcgcttcatggtagcctgcaaggaggccgactacgacgcggcggttgtctacctggagcagagcgggtacgactttgaagaggcggtcgcgcggcaccgtgaggatgccgaatgggagcggaggaaccccttacaagccggccagaagaaggggatggggaggtataggaatgggttccaacgaacgcgcaaaacaggtttccagctaatgtga

SEQ ID NO: 1337 - protein, 327 aa, Myceliophthora thermophilia
MFQPTCCTCASLLPATSKLLRSYHLRCLHTCGIPHAGRPSSRFSDRANDSLQNNPRFSSYCPYCQTSGAPLPLSDRFEVRPRRSEAEAELQSESDHPPPYSAIAQTIKVKLNTTEPADPPPPYSPSSSSSSSPTISSSTPRPSSPKQPPAIDEKATAPAGYAIHHLRHPPHPHPDTLASISLRYGIPLPVLRRHNNLPSDADYLLAARNTVLIPAAYIIAAAGGGSAPDGTPASGEASLSPHPVEDAAERGRKKMIRRFMVACKEADYDAAVVYLEQSGYDFEEAVARHREDAEWERRNPLQAGQKKGMGRYRNGFQRTRKTGFQLM

SEQ ID NO: 1338 - protein, 310 aa, Myceliophthora thermophilia
KLLRSYHLRCLHTCGIPHAGRPSSRFSDRANDSLQNNPRFSSYCPYCQTSGAPLPLSDRFEVRPRRSEAEAELQSESDHPPPYSAIAQTIKVKLNTTEPADPPPPYSPSSSSSSSPTISSSTPRPSSPKQPPAIDEKATAPAGYAIHHLRHPPHPHPDTLASISLRYGIPLPVLRRHNNLPSDADYLLAARNTVLIPAAYIIAAAGGGSAPDGTPASGEASLSPHPVEDAAERGRKKMIRRFMVACKEADYDAAVVYLEQSGYDFEEAVARHREDAEWERRNPLQAGQKKGMGRYRNGFQRTRKTGFQLM

SEQ ID NO: 1339 - DNA, 1086 bp, Myceliophthora thermophilia
atgttgttgttattgtccacgacaccggcctctgccgggctatggcatggcgtccccattggcgctgggaaggcgggcttgctaaggagtgtggcgacgggtctctgtggaggccccaacgtcgggggcgcgcggtgtctgagcagtagtagagcgctgtggcagcagagctccttatggcgtccgggatcagctcgcttggtgagggcaagggcaagtcgtcttgggcttctgacaggaatcccatctcctgcaagcgcgcaatggttcgtcgcctcgacccggtcgaggagccgcgatggccagcaaggttccgagagcgagaaacccgagaccggcttgaggacggagagcagcccttcgcctaagcgggatcccgcggccgcaatccgcaacattatacccgccgtatccaatgcgaacctgcgtgagaacatatacaccattcctaacatcctaaccgcctcccgcctcgttgccgcgcccttcatcgggtactgcatcctgcacgactaccatgccgccgccttaagcctgttcgcctacgccggcatcaccgacgcactcgacggctggatcgcccgccgctggaatctcaagacggtcgtcggcaccgtcatcgaccccatggccgacaagacgctgatgacggtgctgacggtcgccctggccatgaagggcgccctgccgctctggcttgccgtcatcatcctcggtcgagacgtcggcctggccatctcggccatctactaccgctggatatccctgccgccccccaagacctttgcacgctactgggacttctcactaccctcggccgaggtgcatccgacccaaatcagcaagtacaacacggcactgcagctgggcctgatgggactcaccaccctcgcccccgtgatcccggccgtggatatgagcatgccgctgggcatcctgcagtacgtcgtcgcgacgacaaccatctggagcggcgctagctatgtctacagcaaggacgccgtcaggatcctgacgccgcaggaggtcgaggagaagaaggctgaggcgaagagagcggaggacaagaagacagatgctcggtga

SEQ ID NO: 1340 - protein, 361 aa, Myceliophthora thermophilia
MLLLLSTTPASAGLWHGVPIGAGKAGLLRSVATGLCGGPNVGGARCLSSSRALWQQSSLWRPGSARLVRARASRLGLLTGIPSPASAQWFVASTRSRSRDGQQGSESEKPETGLRTESSPSPKRDPAAAIRNIIPAVSNANLRENIYTIPNILTASRLVAAPFIGYCILHDYHAAALSLFAYAGITDALDGWIARRWNLKTVVGTVIDPMADKTLMTVLTVALAMKGALPLWLAVIILGRDVGLAISAIYYRWISLPPPKTFARYWDFSLPSAEVHPTQISKYNTALQLGLMGLTTLAPVIPAVDMSMPLGILQYVVATTTIWSGASYVYSKDAVRILTPQEVEEKKAEAKRAEDKKTDAR

SEQ ID NO: 1341 - protein, 349 aa, Myceliophthora thermophilia
GLWHGVPIGAGKAGLLRSVATGLCGGPNVGGARCLSSSRALWQQSSLWRPGSARLVRARASRLGLLTGIPSPASAQWFVASTRSRSRDGQQGSESEKPETGLRTESSPSPKRDPAAAIRNIIPAVSNANLRENIYTIPNILTASRLVAAPFIGYCILHDYHAAALSLFAYAGITDALDGWIARRWNLKTVVGTVIDPMADKTLMTVLTVALAMKGALPLWLAVIILGRDVGLAISAIYYRWISLPPPKTFARYWDFSLPSAEVHPTQISKYNTALQLGLMGLTTLAPVIPAVDMSMPLGILQYVVATTTIWSGASYVYSKDAVRILTPQEVEEKKAEAKRAEDKKTDAR

SEQ ID NO: 1342 - DNA, 426 bp, Myceliophthora thermophilia
atgtcctcagcactcgccatcggcgctggtgtcgccgtcgccgctttcctcgtacggtttcccgtcctcccccaatcctcctacaatccctccaaccacagcaaagcgaagagaagcgcgcgcaaagctaaccactctctcttttcctccgcaaaacagggcagagctggcctggtagcctggcggcgctcgcgcggcggcgtcggcgcgctcggcaaggccttctacaagggcggtttcgagccgcggatgaccaagcgcgaggcggcgctcatcttgtcgctcaatgagagcggcatcaccaaggagaaggtgcgcaaggcgcaccgcacgctcatgctgctcaaccatcccgaccgcggcgggagcccatacctggcgagcaaggtgaacgaggcgaaggagtttctggagaagaacacgtga

SEQ ID NO: 1343 - protein, 141 aa, Myceliophthora thermophilia
MSSALAIGAGVAVAAFLVRFPVLPQSSYNPSNHSKAKRSARKANHSLFSSAKQGRAGLVAWRRSRGGVGALGKAFYKGGFEPRMTKREAALILSLNESGITKEKVRKAHRTLMLLNHPDRGGSPYLASKVNEAKEFLEKNT

SEQ ID NO: 1344 - protein, 117 aa, Myceliophthora thermophilia
QSSYNPSNHSKAKRSARKANHSLFSSAKQGRAGLVAWRRSRGGVGALGKAFYKGGFEPRMTKREAALILSLNESGITKEKVRKAHRTLMLLNHPDRGGSPYLASKVNEAKEFLEKNT

SEQ ID NO: 1345 - DNA, 192 bp, Myceliophthora thermophilia
atgccgttgcatgcatcttctgcgcctggcgtcctggttttcgaagcagttgcggcagctggcgaggtgacgggccggaccagggacgtacctcctttgcagcgaatcggtgcctgcgccggggacgagggcaacataacgacagcggcgaccgacgtgtccgggttccaggatgagcattttgccatataa

SEQ ID NO: 1346 - protein, 63 aa, Myceliophthora thermophilia
MPLHASSAPGVLVFEAVAAAGEVTGRTRDVPPLQRIGACAGDEGNITTAATDVSGFQDEHFAI

SEQ ID NO: 1347 - protein, 44 aa, Myceliophthora thermophilia
AGEVTGRTRDVPPLQRIGACAGDEGNITTAATDVSGFQDEHFAI

SEQ ID NO: 1348 - DNA, 1650 bp, Myceliophthora thermophilia
atgaggcgctgggccagttcactccttttgctgctcttgtcgctctggacagcggcagcattggagatcaagctagaccagacagacaatcaacgatgcgccggaatgtatagcaaaagctcgtggggaggccctgtcgatccctacatccacgtcaagtttaccggcgtcggcaaagaccagggcgacgaccccatggtcagcctgctcatcttcgactggaaggaccaagacttcctcaacgtgctgccggacggcgaggatagggcggccatctgccagcccgagtacgtcgaagccgggttatgcaacgagaccgacattggcaagttcctcgtctcgcctaatgccaccgaccagtcggtcaacgtcatcttgaccaaggctgtccacctcaaggactcggctccgatcaagtatcccatcaccaagacgggctacttctgtgtcgtcaccgagaagtttggcgcgaccacctacgaggccatcgtcgagttccgcaacgcctatggcgagctcccggcgacccagatcccgaagctgccgttttatggggggatcacgatcgcatacgccctggtgctagtgtccgacatattggccgtccaaaattacatcaccgccattcttatcttcttagtggtcgagatgctcatgacctgggggttttatgactatctcaaccgccacggatccaacgtcggctcccaggtgctgctcgttgttgtcgccatcctcaacgcagcccgtaattccttctcgttcttcctcctcctgatcgtctgcatgggctacggcgtcgtcaagcacacgctcggccgcaccatgatctacgtccggtggctcgccatcgcccactttgtcttcggcatcgtatacgctatcaccagcctggtggttaaccctgacaccgcaggacccttggtgctgctcgtcgtgctcccgctcgcgggcacgctcacggctttctatgtctggacgctcaactcgctcaactggaccctcaaggacctgcgcgagcgcaagcagcacgtcaaggagaccatgtaccgcaagttgtggtggtgcatcctcatctccatcatcgtcatcttcgccttcttcttcttcaattccttctccttcgcctcggccagcgacccggactacgtccccttccactggaagacccgctggttcgtgctcgacggctggctcaacctggtctactttgccgacgtggccttcatcgcgtacgtctggcgcccgacggcgaataaccggcgcttcgccatgagcgacgagatcgcccaggaggacgacggcacgttcgagattgccaacctggacattggcaaccccgacgagtcggatgacgaagacgaggaggccaagatcgggagtgggaaacagcagggacaaaacgggggtcaggcccaaagctccgcggctggtgggcaggcgcagcaatccgcccagcaacaacaacaacggtcttcgcaaccgtctggggcggcctcgtcggcggcaaggaaaccgtcccagccggtgtcgagggagtcgctggatggcgagaccatctttgccgtaggcgaggatggcaagttctccgatgaggaggacgacgacaacgaagaggagtccgggcagttggtcaaggggaggaagtga

SEQ ID NO: 1349 - protein, 549 aa, Myceliophthora thermophilia
MRRWASSLLLLLLSLWTAAALEIKLDQTDNQRCAGMYSKSSWGGPVDPYIHVKFTGVGKDQGDDPMVSLLIFDWKDQDFLNVLPDGEDRAAICQPEYVEAGLCNETDIGKFLVSPNATDQSVNVILTKAVHLKDSAPIKYPITKTGYFCVVTEKFGATTYEAIVEFRNAYGELPATQIPKLPFYGGITIAYALVLVSDILAVQNYITAILIFLVVEMLMTWGFYDYLNRHGSNVGSQVLLVVVAILNAARNSFSFFLLLIVCMGYGVVKHTLGRTMIYVRWLAIAHFVFGIVYAITSLVVNPDTAGPLVLLVVLPLAGTLTAFYVWTLNSLNWTLKDLRERKQHVKETMYRKLWWCILISIIVIFAFFFFNSFSFASASDPDYVPFHWKTRWFVLDGWLNLVYFADVAFIAYVWRPTANNRRFAMSDEIAQEDDGTFEIANLDIGNPDESDDEDEEAKIGSGKQQGQNGGQAQSSAAGGQAQQSAQQQQQRSSQPSGAASSAARKPSQPVSRESLDGETIFAVGEDGKFSDEEDDDNEEESGQLVKGRK

SEQ ID NO: 1350 - protein, 529 aa, Myceliophthora thermophilia
LEIKLDQTDNQRCAGMYSKSSWGGPVDPYIHVKFTGVGKDQGDDPMVSLLIFDWKDQDFLNVLPDGEDRAAICQPEYVEAGLCNETDIGKFLVSPNATDQSVNVILTKAVHLKDSAPIKYPITKTGYFCVVTEKFGATTYEAIVEFRNAYGELPATQIPKLPFYGGITIAYALVLVSDILAVQNYITAILIFLVVEMLMTWGFYDYLNRHGSNVGSQVLLVVVAILNAARNSFSFFLLLIVCMGYGVVKHTLGRTMIYVRWLAIAHFVFGIVYAITSLVVNPDTAGPLVLLVVLPLAGTLTAFYVWTLNSLNWTLKDLRERKQHVKETMYRKLWWCILISIIVIFAFFFFNSFSFASASDPDYVPFHWKTRWFVLDGWLNLVYFADVAFIAYVWRPTANNRRFAMSDEIAQEDDGTFEIANLDIGNPDESDDEDEEAKIGSGKQQGQNGGQAQSSAAGGQAQQSAQQQQQRSSQPSGAASSAARKPSQPVSRESLDGETIFAVGEDGKFSDEEDDDNEEESGQLVKGRK

SEQ ID NO: 1351 - DNA, 2316 bp, Myceliophthora thermophilia
atgccggcggcaatcgttgacagccacggcatcttgggagttgctgcagcaggcgccttcctaaacgacctcctcgcgcgcgcagagtccgtcaagaaaacgaactcgattgagccacccctcgaaaagtccgaccttggcgatctcgagcgacagctaagcgatgcgctgggctacgaagtctcggcggacgaatccgccgacaccaagaagatacagcgctttgcccttatagaaaccgccgcgcgggacatcttcaaaacattgattgcaacgacgccaatcgagtctcctgccttcgtcaacgtctggaacctcctcgacatcctctccctcctctcggactgcgaactatgcgacccagcgctgctgttctggctggtcgaggagctgcttgacagccaaaccatcgccggctgccggaaggtattcgactttctcgagtcacgtcgcgagcgcatcaccgccaaacacttcaagcagaagcaactcgtcatcctccgcacctgtaacgagctcctccggcgcttgtctagagccctcgacccggccttttgtggcagagtcttcattttcacattccagagctttccccttggagacaagagctcggtcaacctcagaggagagtaccacgtcgaaaatgttaccacctacgaccaggagccccagccgacggatggggagaggatggacgtggacacggatgcgacgccacgaaaggacaagcccatggatccggacgcgctgtatcccatattctgggcgcttcaggaaagcttcaaccagccgaagaagttgttcgacccgagccattttgctgcctttaaagctggtctcgaggcaaccgtgacgaccttttgcaccatcaacccggagaagccgtctcgtgccaaggagaagctagataaaccagatgacgacgcgaaaccaagtctcaaacggaagcgggatgacgttgacgatgaactcgccaacagctttaaccccaaatacctaacgagcagggacctgttcaagctcgagatcagcgacctcgcgttccggcgtaacatactcgtccaggcgctcatcaccctcgacttcctcctgtccctctcgccaaaggcaaaggagaagctggcgagcgtcaagaccccaaataagtcggtgacttactcggatcagcagctgagcgaagaggacaccaaatgggcgacacagatgagaggctcgatcaccaggtacctccagaggggggttgacggtccattctttgagcgaatggtcggtacggtccttgtgagggacaagaactgggtgcgttggaagatcgagaactgcccgtccatcgagcttccacccatgtctccccaacagttcgacgaggctagggcgacggcaaccaggatggcaagaacaaggcgactgcctaatgactcgcgttcactcgagtttctcggcgacgaggacgagaccagcgccatggaaaagctccaggaccccgagaggtacagccttccagagctgagtagcttcagggatgccatcgacgatgccgactttgacattgagagggcaaccgacgatgagtccaaagcattggcgatggagagcaaggcgagcaaggcgtggaaagccttgaggctggccagtaaaaccaagctggttgttttcgataaaattgatgacgatgacaagatcgacgtgatcttcaaggacaagccggtcgaggaagccgaggttgaggaggttgccgccaacggcgaagcagtgtaccctgatgatcgcagggcgattgtcattgtggacaggaccacgagtcccggttcaagatccgagctggtcaagcagttcactgctgagcacgcacgggttttcaccagggttccacctcatgtcacgcgcaagccccaagaaggcgaggtcaatgggaaggactaccactttgtggacgtccaagcgttcaatgtgatgcgtgatggcgacctctttctcgagtttagcgaagaaggcgacaatgtccatgggacgaacaagagggtggtggagggcattctggacaatgacagggtgccaattctggaagtggaccgtgatggcgcacagcaggtcaaggacaatggcttcgatgcaaggtttatcctgattgaggcggccggggcggaggaggaaaccaatactcccggattttacgactcggtcgtcagggacctagattctctcaaggcggccatatacgaaacacaaggctcggcacagaacgggccagatgctgagccagcagcaccaccaggcgacggagacgtggcgatgggtgaggtaactgatacatga

SEQ ID NO: 1352 - protein, 771 aa, Myceliophthora thermophilia
MPAAIVDSHGILGVAAAGAFLNDLLARAESVKKTNSIEPPLEKSDLGDLERQLSDALGYEVSADESADTKKIQRFALIETAARDIFKTLIATTPIESPAFVNVWNLLDILSLLSDCELCDPALLFWLVEELLDSQTIAGCRKVFDFLESRRERITAKHFKQKQLVILRTCNELLRRLSRALDPAFCGRVFIFTFQSFPLGDKSSVNLRGEYHVENVTTYDQEPQPTDGERMDVDTDATPRKDKPMDPDALYPIFWALQESFNQPKKLFDPSHFAAFKAGLEATVTTFCTINPEKPSRAKEKLDKPDDDAKPSLKRKRDDVDDELANSFNPKYLTSRDLFKLEISDLAFRRNILVQALITLDFLLSLSPKAKEKLASVKTPNKSVTYSDQQLSEEDTKWATQMRGSITRYLQRGVDGPFFERMVGTVLVRDKNWVRWKIENCPSIELPPMSPQQFDEARATATRMARTRRLPNDSRSLEFLGDEDETSAMEKLQDPERYSLPELSSFRDAIDDADFDIERATDDESKALAMESKASKAWKALRLASKTKLVVFDKIDDDDKIDVIFKDKPVEEAEVEEVAANGEAVYPDDRRAIVIVDRTTSPGSRSELVKQFTAEHARVFTRVPPHVTRKPQEGEVNGKDYHFVDVQAFNVMRDGDLFLEFSEEGDNVHGTNKRVVEGILDNDRVPILEVDRDGAQQVKDNGFDARFILIEAAGAEEETNTPGFYDSVVRDLDSLKAAIYETQGSAQNGPDAEPAAPPGDGDVAMGEVTDT

SEQ ID NO: 1353 - protein, 743 aa, Myceliophthora thermophilia
ESVKKTNSIEPPLEKSDLGDLERQLSDALGYEVSADESADTKKIQRFALIETAARDIFKTLIATTPIESPAFVNVWNLLDILSLLSDCELCDPALLFWLVEELLDSQTIAGCRKVFDFLESRRERITAKHFKQKQLVILRTCNELLRRLSRALDPAFCGRVFIFTFQSFPLGDKSSVNLRGEYHVENVTTYDQEPQPTDGERMDVDTDATPRKDKPMDPDALYPIFWALQESFNQPKKLFDPSHFAAFKAGLEATVTTFCTINPEKPSRAKEKLDKPDDDAKPSLKRKRDDVDDELANSFNPKYLTSRDLFKLEISDLAFRRNILVQALITLDFLLSLSPKAKEKLASVKTPNKSVTYSDQQLSEEDTKWATQMRGSITRYLQRGVDGPFFERMVGTVLVRDKNWVRWKIENCPSIELPPMSPQQFDEARATATRMARTRRLPNDSRSLEFLGDEDETSAMEKLQDPERYSLPELSSFRDAIDDADFDIERATDDESKALAMESKASKAWKALRLASKTKLVVFDKIDDDDKIDVIFKDKPVEEAEVEEVAANGEAVYPDDRRAIVIVDRTTSPGSRSELVKQFTAEHARVFTRVPPHVTRKPQEGEVNGKDYHFVDVQAFNVMRDGDLFLEFSEEGDNVHGTNKRVVEGILDNDRVPILEVDRDGAQQVKDNGFDARFILIEAAGAEEETNTPGFYDSVVRDLDSLKAAIYETQGSAQNGPDAEPAAPPGDGDVAMGEVTDT

SEQ ID NO: 1354 - DNA, 822 bp, Myceliophthora thermophilia
atgtcgcgaatacgatgcgcgaacgcgcctgccaccgctagcctcttcgtccagctcagcctgcgccgacagagcggctggggcgggcttcccatcctggacctcctcctgcctgtgtcttctcacgctacccgggcactttctgttcgcccctatcacctcgtgtcaacaaagagtgcggcagacccgcctcgccaactactcacccttgcccccccaagcggcagaccatcatggagaagttcaacgtcacgctgcacgatgactcagctgcggacaaggtcaccagactcttcctctcggacctttagcacttccgctgcatgtcgcgcgacgcacgccatattcaacccgcaagttgacgacgatggcgacgagatgatgctggagattacgccgcgcgcagcgaagtcggtggctcagcgcctctccgaaataatgaccaaagattcgaacccgaacctcgccctccgaatccaggttgagagtggcggctgccacggttttcaatacctaatgaaacttgtgacactgcccccatcactcccctccaaggagtcgcttccccccgcagcggaggcagatgacttgaccaccgttcacgaggacgacacgattttcacctattcacccgacggtagctcctcacccggggacctgacggctccaaaaatcatactcgaccttccctcgctgcagctcctgaagggcagcaaggtcgattttacgatggagctcattggatcgcagttcaagattgtggacaatcccttggcgacgagcagctgtgggtgcggtacaagctttgatatcaaaatatga

SEQ ID NO: 1355 - protein, 273 aa, Myceliophthora thermophilia
MSRIRCANAPATASLFVQLSLRRQSGWGGLPILDLLLPVSSHATRALSVRPYHLVSTKSAADPPRQLLTLAPPSGRPSWRSSTSRCTMTQLRTRSPDSSSRTFSTSAACRATHAIFNPQVDDDGDEMMLEITPRAAKSVAQRLSEIMTKDSNPNLALRIQVESGGCHGFQYLMKLVTLPPSLPSKESLPPAAEADDLTTVHEDDTIFTYSPDGSSSPGDLTAPKIILDLPSLQLLKGSKVDFTMELIGSQFKIVDNPLATSSCGCGTSFDIKI

SEQ ID NO: 1356 - protein, 227 aa, Myceliophthora thermophilia
LSVRPYHLVSTKSAADPPRQLLTLAPPSGRPSWRSSTSRCTMTQLRTRSPDSSSRTFSTSAACRATHAIFNPQVDDDGDEMMLEITPRAAKSVAQRLSEIMTKDSNPNLALRIQVESGGCHGFQYLMKLVTLPPSLPSKESLPPAAEADDLTTVHEDDTIFTYSPDGSSSPGDLTAPKIILDLPSLQLLKGSKVDFTMELIGSQFKIVDNPLATSSCGCGTSFDIKI

SEQ ID NO: 1357 - DNA, 753 bp, Myceliophthora thermophilia
atggctcccacggccgccaccctggccctctcggccaagccacatgtgcacgccctcctcaagcgcctgcactccgcctcggaggcccaggagaagtccctctcccagtcgtggttctggttcaagcgcctcctcacctcccgactcttcacctggaaatgggacgcctccgccgacgaccacatgcgcgacaagttcgtcgccctcgaggaggacaagtgccacttcatgtacctgctcgttcgcggctcgggcgccctgaacgtcgtcgaggccggcaccagcttcggcgtgtcgaccatctacctcgccctggcagtggggcagaacctggccgaccagaaggccctgggcagggacgtgagcggcagggtcattgccacggagaaggagccgaccaaggccgcccgcgccagggagcactgggccgaggccggagacgaggtggccggcgtcattgagctccgcgagggcgacctcctcgagactcttaagagggacgacatgcccgagcaggtcgactttctccttctcaacatctggaccccgttggcgcttcccacccttaagatcgtccagccgagactcaagaagggcgctatcgtccttgccgacaacacaaccatggcacggacgtggtacaaggagtaccttgactacattcatgaccccgtaaacggtttcaagaccaccgagattccatactccggcggactgcaaatgtcagtttacctgcccggtgaggttaactga

SEQ ID NO: 1358 - protein, 250 aa, Myceliophthora thermophilia
MAPTAATLALSAKPHVHALLKRLHSASEAQEKSLSQSWFWFKRLLTSRLFTWKWDASADDHMRDKFVALEEDKCHFMYLLVRGSGALNVVEAGTSFGVSTIYLALAVGQNLADQKALGRDVSGRVIATEKEPTKAARAREHWAEAGDEVAGVIELREGDLLETLKRDDMPEQVDFLLLNIWTPLALPTLKIVQPRLKKGAIVLADNTTMARTWYKEYLDYIHDPVNGFKTTEIPYSGGLQMSVYLPGEVN

SEQ ID NO: 1359 - protein, 232 aa, Myceliophthora thermophilia
LLKRLHSASEAQEKSLSQSWFWFKRLLTSRLFTWKWDASADDHMRDKFVALEEDKCHFMYLLVRGSGALNVVEAGTSFGVSTIYLALAVGQNLADQKALGRDVSGRVIATEKEPTKAARAREHWAEAGDEVAGVIELREGDLLETLKRDDMPEQVDFLLLNIWTPLALPTLKIVQPRLKKGAIVLADNTTMARTWYKEYLDYIHDPVNGFKTTEIPYSGGLQMSVYLPGEVN

SEQ ID NO: 1360 - DNA, 894 bp, Myceliophthora thermophilia
atgcgtctcaacgctcttgttgtgctcctgccagcgctcggtgctcaagggatccgcatcatccagtccaacgatgatggctgggccgagcagtatgcacgatccttccacaacgctttgatagccgcgggccacgacgcagttctatccgcccccgccgagaacaagtcgggatccggctcgctcgacatcgagccctcccccaggtccactccttgccagtatgacagctgccctgccaacagcggccccatcgggcgcaacgagacctcgccgcggctcaactgggttaactcgttccccgccacgtccatgaggtacggcatcgacaccattggcccccagttgtggaacggcgagggccccgagctggccgtctcgggccccaacgtcggcagcaatctgtatctggcggttcagttctccggcaccgtcggcgccgccgtccacgccgccaagaacgcaaagatccccgccatcgccttctcgggcgcgtccgaaggcacgctggcctggaacagcccggaggagccacgcagccgcgtgtacgccgagctggccgccacgctcaccaacgccgtcatcgcgagcggcaagccctacctccccgaggacgtcttcctcaacgtcaacttccccaaggtcgagggccagtgcaccgaggcgagccagttcaagtgggtgctgagccggatcaacgtcggcctcttctccgccccggacacggagcagtgcggatcgacgcgcttgcccaccgagctctccgtcctggacacagatggctgctacatctcggtcagcgtgggggatgccaacgacaagacgacggccccggccgagaagcaggctgtggtgcgggataagctgaagagcatgttgacgtgtttaccgtga

SEQ ID NO: 1361 - protein, 297 aa, Myceliophthora thermophilia
MRLNALVVLLPALGAQGIRIIQSNDDGWAEQYARSFHNALIAAGHDAVLSAPAENKSGSGSLDIEPSPRSTPCQYDSCPANSGPIGRNETSPRLNWVNSFPATSMRYGIDTIGPQLWNGEGPELAVSGPNVGSNLYLAVQFSGTVGAAVHAAKNAKIPAIAFSGASEGTLAWNSPEEPRSRVYAELAATLTNAVIASGKPYLPEDVFLNVNFPKVEGQCTEASQFKWVLSRINVGLFSAPDTEQCGSTRLPTELSVLDTDGCYISVSVGDANDKTTAPAEKQAVVRDKLKSMLTCLP

SEQ ID NO: 1362 - protein, 280 aa, Myceliophthora thermophilia
IRIIQSNDDGWAEQYARSFHNALIAAGHDAVLSAPAENKSGSGSLDIEPSPRSTPCQYDSCPANSGPIGRNETSPRLNWVNSFPATSMRYGIDTIGPQLWNGEGPELAVSGPNVGSNLYLAVQFSGTVGAAVHAAKNAKIPAIAFSGASEGTLAWNSPEEPRSRVYAELAATLTNAVIASGKPYLPEDVFLNVNFPKVEGQCTEASQFKWVLSRINVGLFSAPDTEQCGSTRLPTELSVLDTDGCYISVSVGDANDKTTAPAEKQAVVRDKLKSMLTCLP

SEQ ID NO: 1363 - DNA, 1686 bp, Myceliophthora thermophilia
atgaaattttccctcgctacagcctgccttctgggcacggctctcgctgttcgggaagaccacctcgtgagccggagacttaacaaacggtttatcgacgacgccggcaactacaacatctccttctatcacatcaacgatgtacacgcgcacctggaccagttttccaagtccggcaccgactgcacgcgtccggaggcgggttgctatggcggttactcgcgtgtcaagacggtgctcaaggagacgcgaccgtcgcatcccgactccctcctcctcaacgtcggcgacgagttccagggtaccatgttcttcaacttctacggcggcgagaagatcgccgaaaccattaaccagatcggcttcgacgccatgaccctgggcaaccacgagtttgatcggggcgacgactacctgggcgagttcctcgagaacctgaccttccccatcctcgtcgccaacatcgaatcggacaacgaggtcctcaaccgcaccatcaagcccttccacatcttccccgagtacgaccttgccgtcattggcgtcacgaccgacacgacgccgggcatctccaaccccggcaagggtaccaagtttaacaacccggtcgccgcggtccaaaacactgtcgacctgatccgctcaacaaccaacatcacccgcctggcggccatcacccacatcggctacgaagaggaccagcgcctggcaaaggaaacgacgggcctgtatctgatcatgggcggtcacagccacacgccgctgggtgatttcgagggcgccgtcggcccgtatcccaccatcgttgagaacaaggatggcgaagaggtgtttatcgtcaccgcgtaccgctggggagagtacttgggctatatcgacgtgacgtacgacgccgacggcaagatcctggcctaccacggcgcccctatccacctcaccaacgcgacggcccaggataaggacctgcaggagcagattaacgagtggcgcggtccgtttgaggagtacgccaaggaggagatcggatatagcaatgttgttttggaccagacgacgtgccaggaacaggagtgcctgctgggcgattttgtttccgatgccttgctcacttaccgtctcaacgcgagcacttctgagacagcgcctgcttttgctctcgtcaatgccggtggcgtcagggccacgatcgacgacgggccaatcacccgcggcgaagtcctgacggccttcccctttagcaattccgtcgttgaggtgactgtgacaggcgaactactctggaaggtcctcgaaggtatcatctccggtgtgaacgtggacaatggcaagccggtcacatcgttcctgcaggtttcacgcggcatccggatcgaatacggcccggcttctgctaacggcaccgacaatgtgctcgtttcggttaccatcggagataagtcgttggataaggcggccgagtacaagattgtcactgtggactttgtggccggcggaggagataacatgttcagtactccattcgagaacctggtgaccctggacgccgtggatgaggtcctggttcggcatatccaggctacatcgcccgtggacattgccctggacgggcggctgaccaaggtgagccgctgcaaggcaagcagggcggtcaggatggagagggcgcggagggccaagaggaactaa

SEQ ID NO: 1364 - protein, 561 aa, Myceliophthora thermophilia
MKFSLATACLLGTALAVREDHLVSRRLNKRFIDDAGNYNISFYHINDVHAHLDQFSKSGTDCTRPEAGCYGGYSRVKTVLKETRPSHPDSLLLNVGDEFQGTMFFNFYGGEKIAETINQIGFDAMTLGNHEFDRGDDYLGEFLENLTFPILVANIESDNEVLNRTIKPFHIFPEYDLAVIGVTTDTTPGISNPGKGTKFNNPVAAVQNTVDLIRSTTNITRLAAITHIGYEEDQRLAKETTGLYLIMGGHSHTPLGDFEGAVGPYPTIVENKDGEEVFIVTAYRWGEYLGYIDVTYDADGKILAYHGAPIHLTNATAQDKDLQEQINEWRGPFEEYAKEEIGYSNVVLDQTTCQEQECLLGDFVSDALLTYRLNASTSETAPAFALVNAGGVRATIDDGPITRGEVLTAFPFSNSVVEVTVTGELLWKVLEGIISGVNVDNGKPVTSFLQVSRGIRIEYGPASANGTDNVLVSVTIGDKSLDKAAEYKIVTVDFVAGGGDNMFSTPFENLVTLDAVDEVLVRHIQATSPVDIALDGRLTKVSRCKASRAVRMERARRAKRN

SEQ ID NO: 1365 - protein, 545 aa, Myceliophthora thermophilia
VREDHLVSRRLNKRFIDDAGNYNISFYHINDVHAHLDQFSKSGTDCTRPEAGCYGGYSRVKTVLKETRPSHPDSLLLNVGDEFQGTMFFNFYGGEKIAETINQIGFDAMTLGNHEFDRGDDYLGEFLENLTFPILVANIESDNEVLNRTIKPFHIFPEYDLAVIGVTTDTTPGISNPGKGTKFNNPVAAVQNTVDLIRSTTNITRLAAITHIGYEEDQRLAKETTGLYLIMGGHSHTPLGDFEGAVGPYPTIVENKDGEEVFIVTAYRWGEYLGYIDVTYDADGKILAYHGAPIHLTNATAQDKDLQEQINEWRGPFEEYAKEEIGYSNVVLDQTTCQEQECLLGDFVSDALLTYRLNASTSETAPAFALVNAGGVRATIDDGPITRGEVLTAFPFSNSVVEVTVTGELLWKVLEGIISGVNVDNGKPVTSFLQVSRGIRIEYGPASANGTDNVLVSVTIGDKSLDKAAEYKIVTVDFVAGGGDNMFSTPFENLVTLDAVDEVLVRHIQATSPVDIALDGRLTKVSRCKASRAVRMERARRAKRN

SEQ ID NO: 1366 - DNA, 783 bp, Myceliophthora thermophilia
atgcgatcatccttgtcggccctcctcctctggagcgtggtcccgctcatcccggtcgcctccgccggggagtgcagctacggagatataccacagattatcgcccacaccggcgaaccggtgggcagagaagagaagtacaacggaggctgtgagaaccccaaggttggcgtgctgtacctcaccgacgtctttggcatccagctgctggagaacaagctgctcgccgactcgttcgcgcgcgcgggtttcctggtcgttgctccggacctgtttgacggcgagccggcgcccgcggacttcggcacgcccggcttcaacatcaccgacttcatcctcaagcacgggcccaatgcgaccgatcctatcgtcgacgtcggcctggcctaccttggcgagacgggcgtcgacaagatcgccgccacgggctactgcttcggcggccgctacgccttccgcctgctcgcggccggcaagggcgtcgacgcggccttcgccgcccaccccagccttctggaggaccgcgagattacggccgtcacgaatccgatcagcgttgccgctgctgagagcgacacgacgatgtctcctgagaggcgctcgcaaattgaggcccttctggccgacaccaagaagccgtatcaggtcaacctatatagcggcacttcccacgggttcggtgtgcgtgccaatgtctccgacccgcagcagaagtttggcaaggaatccgcgttctcgcaagccgtcaggtggtttgaggcttgggctggcggtgcgctgtga

SEQ ID NO: 1367 - protein, 260 aa, Myceliophthora thermophilia
MRSSLSALLLWSVVPLIPVASAGECSYGDIPQIIAHTGEPVGREEKYNGGCENPKVGVLYLTDVFGIQLLENKLLADSFARAGFLVVAPDLFDGEPAPADFGTPGFNITDFILKHGPNATDPIVDVGLAYLGETGVDKIAATGYCFGGRYAFRLLAAGKGVDAAFAAHPSLLEDREITAVTNPISVAAAESDTTMSPERRSQIEALLADTKKPYQVNLYSGTSHGFGVRANVSDPQQKFGKESAFSQAVRWFEAWAGGAL

SEQ ID NO: 1368 - protein, 238 aa, Myceliophthora thermophilia
GECSYGDIPQIIAHTGEPVGREEKYNGGCENPKVGVLYLTDVFGIQLLENKLLADSFARAGFLVVAPDLFDGEPAPADFGTPGFNITDFILKHGPNATDPIVDVGLAYLGETGVDKIAATGYCFGGRYAFRLLAAGKGVDAAFAAHPSLLEDREITAVTNPISVAAAESDTTMSPERRSQIEALLADTKKPYQVNLYSGTSHGFGVRANVSDPQQKFGKESAFSQAVRWFEAWAGGAL

SEQ ID NO: 1369 - DNA, 468 bp, Myceliophthora thermophilia
atggagtgcactgacctgcgttcagccagcttggtcttgagcctagcgttggtctccgcttcgccgtctaattatctcagccagttcagcgtgatggtgattatttctcctctccaatggcatgctagctataatagcacgaattcatgctcacctggttcagggaccttaacatgccggagcagtttgggttcgcgcagcgtcaggtcatcacccttttctgcatgccctccggtgacagggagagcctggacgcgtgggcacattctccctctcggctcctatctagcaaaccaggacgccttgctggctcagcaagcagggttaagtccaaacgagctcttcaaggagactgtcaacttcggtctgctcaaggagatccccgacgcgccgctcgtcctatacttccgcagcgtaagcggcacgatagcgagcgggtggaggcccaacagttatgtccccctctag

SEQ ID NO: 1370 - protein, 155 aa, Myceliophthora thermophilia
MECTDLRSASLVLSLALVSASPSNYLSQFSVMVIISPLQWHASYNSTNSCSPGSGTLTCRSSLGSRSVRSSPFSACPPVTGRAWTRGHILPLGSYLANQDALLAQQAGLSPNELFKETVNFGLLKEIPDAPLVLYFRSVSGTIASGWRPNSYVPL

SEQ ID NO: 1371 - protein, 135 aa, Myceliophthora thermophilia
SPSNYLSQFSVMVIISPLQWHASYNSTNSCSPGSGTLTCRSSLGSRSVRSSPFSACPPVTGRAWTRGHILPLGSYLANQDALLAQQAGLSPNELFKETVNFGLLKEIPDAPLVLYFRSVSGTIASGWRPNSYVPL

SEQ ID NO: 1372 - DNA, 1668 bp, Myceliophthora thermophilia
atgccaatgccgtccctcaggcgcctcgcggtcgtgggcctcgcctcccatgccgcctgcacttcgatcaagtacactactcctccggcggcttccgttatttgcaacgaacattcgtacacgtaccagggccttgcgggatacggctccttgccctcggatgcgcgagatcagtatggcgataccatcagcttcgggtcgtcaatggccatcaagaattggacgaggacagggaacaagtacaagggcaccatgtacggccttccggaccgcggatggaacacgaatgggacgcagaatacgatcccgagggttcatgtttttgagcttagcctcacggaaacggaggcgaccgtgtcgaaaccgtctggcccaaacgtcgagttcaagtaccaacggaccatcctgctccacggacccgacggcaagccgatgaccggcctcgaccctgacttcaccggcggcctgacctatcccggatttcccacaatgcccgctgcgacgtacccaggcgatggatttggcggtcccggtccgggcgacaagcgcatctctctggacgccgaaggcctcgttgtcgaggaggacgggtccttctggatcagcgacgagtatggcccatttttgtacagattcgacgagaagggacggatgacggccgccatccagccacccgatgccctcctgcccattcgtaatggcaacgtcagtttcaactccaacactccacccatttacgacagcagcctggtaccgagcccagaagaccccgaccacggccgtcagaacaaccagggctttgagggtctcaccatcagcgccgatggcaagacgctctgggccatgttgcagtccgccgccgagcaggacggcggcgcttcgtcctctaagcgccgtaacacccgtctgctcaagtacgcgctcagacgaaccgacaagaagaagacgaaaaacaagaagaagggcggcgacgtcgaggtcacgtacgaggcagagtacgccgtgcccctgcccacctacgagaacagcaagggcaagacgcgcgtcgccgcgcagtccgagatccactacgtctccgacagccagctgctcgtcctcgcccgggactcggatgccggtcggggccgggacgaccccctgtctcgctaccgccacgtcgacatcgtcgacatctcgggcgcgaccaacatcgcgggtcccaggtttgacgacgtccgcaacggaaacatcacggtggggggcacgtctgatccttccgacgatctcgtagatggcatcaccccggctaaattatgccctttcatcgactacaacctcaattccgagctcaacaagttcaggactgccgagggcgaccttgtgcacaatggcgagccggtcaatctcgggctcctcaatgagaagtgggaagccctcgcattggtgcccgtcatcccggacaccaagggaaagggaaaggacgagggcgggacctgcggagggaagagggacggagacgagtattacctcttcacgctgtccgataatgatttcatcaccaacaatggctacgcagacttcggcaagatccactacgtggatgattctgccaccgttcccttcctcaatagccaggcattggtctttaggatcaccctacctagaggtagcaaacctcttatttcatga

SEQ ID NO: 1373 - protein, 555 aa, Myceliophthora thermophilia
MPMPSLRRLAVVGLASHAACTSIKYTTPPAASVICNEHSYTYQGLAGYGSLPSDARDQYGDTISFGSSMAIKNWTRTGNKYKGTMYGLPDRGWNTNGTQNTIPRVHVFELSLTETEATVSKPSGPNVEFKYQRTILLHGPDGKPMTGLDPDFTGGLTYPGFPTMPAATYPGDGFGGPGPGDKRISLDAEGLVVEEDGSFWISDEYGPFLYRFDEKGRMTAAIQPPDALLPIRNGNVSFNSNTPPIYDSSLVPSPEDPDHGRQNNQGFEGLTISADGKTLWAMLQSAAEQDGGASSSKRRNTRLLKYALRRTDKKKTKNKKKGGDVEVTYEAEYAVPLPTYENSKGKTRVAAQSEIHYVSDSQLLVLARDSDAGRGRDDPLSRYRHVDIVDISGATNIAGPRFDDVRNGNITVGGTSDPSDDLVDGITPAKLCPFIDYNLNSELNKFRTAEGDLVHNGEPVNLGLLNEKWEALALVPVIPDTKGKGKDEGGTCGGKRDGDEYYLFTLSDNDFITNNGYADFGKIHYVDDSATVPFLNSQALVFRITLPRGSKPLIS

SEQ ID NO: 1374 - protein, 535 aa, Myceliophthora thermophilia
TSIKYTTPPAASVICNEHSYTYQGLAGYGSLPSDARDQYGDTISFGSSMAIKNWTRTGNKYKGTMYGLPDRGWNTNGTQNTIPRVHVFELSLTETEATVSKPSGPNVEFKYQRTILLHGPDGKPMTGLDPDFTGGLTYPGFPTMPAATYPGDGFGGPGPGDKRISLDAEGLVVEEDGSFWISDEYGPFLYRFDEKGRMTAAIQPPDALLPIRNGNVSFNSNTPPIYDSSLVPSPEDPDHGRQNNQGFEGLTISADGKTLWAMLQSAAEQDGGASSSKRRNTRLLKYALRRTDKKKTKNKKKGGDVEVTYEAEYAVPLPTYENSKGKTRVAAQSEIHYVSDSQLLVLARDSDAGRGRDDPLSRYRHVDIVDISGATNIAGPRFDDVRNGNITVGGTSDPSDDLVDGITPAKLCPFIDYNLNSELNKFRTAEGDLVHNGEPVNLGLLNEKWEALALVPVIPDTKGKGKDEGGTCGGKRDGDEYYLFTLSDNDFITNNGYADFGKIHYVDDSATVPFLNSQALVFRITLPRGSKPLIS

SEQ ID NO: 1375 - DNA, 1299 bp, Myceliophthora thermophilia
atgggcattattgcgaaaattgccctcgttatcctggccatctcgttcatggtctttgtgacctttttcggccgcctcccagcacttcgacatacaccgatcgcctggctgcaccgcctaatatgggtacacctccccaatggcctcacaacccttgaccggcgctttaccgggggtaaagtgacctcctcctgcacccgcttcttcaactacatgatgtacgaccggcacccaaccgtcttgatcttcttcctcgtcctcctcgtgggtggcgaagccctgtatctccccgcggcctggccgcagctcagcaccctgcagaagacgacgggcagcgtggccgtcttcctcccctacctcttcctctacctctcggccgcctcggacccgggcaccatcacggaggcgaaccacgtgcccgagatggcgcggtacccgtacgacttcaccctcttccacccgggcgccgtctgcgccacctgccgccgcctcaagcccgcgcgctccaagcactgcagcgtgtgccggcgctgcgtcgcccgctgcgaccaccactgcatcttcatcaacaactgcgtcggcgccggcaaccaccactggttcctcctcctgctgctgtccaccgccgtcctgaccctctacggcggcgtggtcggcgtgcgcctgatgacggcccagatgcgccggcggtttccgagctgggcgctgctgccgtggcgcgccgacggcgggcgcggcatgtccataaccgattggctcgtcgtctggagctgggggatgcaggacggtggccggggcggcggcggcggcagcggtggcgtatggctggccgctgtgacgttgctggcgctgatgatcagcccgctcgtgtgggcgctgctgggctaccacctgtggctgatctactgtggcaccacgaccaacgagtcgatgaagtggtccgattggcaggccgacatggacgacgggctcgcgtggaagaggaggctggatcccgggcgcatcaaggacctgacggtggaacccgcgtggacgaggtggcccgtggaggcggagcaggtcctggtgcggaccaacgacggcaaaccgccgacaggggaggttctcccggggtacggggagtgggagggcgtttggcgcttgaaggatgtcgagaacctctacgatctcggattctgggacaaccttgtggacgtgttcttgccctactttatgtttcgggatccgtacgtgccggtggcagagaacaggctgcggaggaagaagaagaggagagcgaggaagatctacctagcctag

SEQ ID NO: 1376 - protein, 432 aa, Myceliophthora thermophilia
MGIIAKIALVILAISFMVFVTFFGRLPALRHTPIAWLHRLIWVHLPNGLTTLDRRFTGGKVTSSCTRFFNYMMYDRHPTVLIFFLVLLVGGEALYLPAAWPQLSTLQKTTGSVAVFLPYLFLYLSAASDPGTITEANHVPEMARYPYDFTLFHPGAVCATCRRLKPARSKHCSVCRRCVARCDHHCIFINNCVGAGNHHWFLLLLLSTAVLTLYGGVVGVRLMTAQMRRRFPSWALLPWRADGGRGMSITDWLVVWSWGMQDGGRGGGGGSGGVWLAAVTLLALMISPLVWALLGYHLWLIYCGTTTNESMKWSDWQADMDDGLAWKRRLDPGRIKDLTVEPAWTRWPVEAEQVLVRTNDGKPPTGEVLPGYGEWEGVWRLKDVENLYDLGFWDNLVDVFLPYFMFRDPYVPVAENRLRRKKKRRARKIYLA

SEQ ID NO: 1377 - protein, 404 aa, Myceliophthora thermophilia
LRHTPIAWLHRLIWVHLPNGLTTLDRRFTGGKVTSSCTRFFNYMMYDRHPTVLIFFLVLLVGGEALYLPAAWPQLSTLQKTTGSVAVFLPYLFLYLSAASDPGTITEANHVPEMARYPYDFTLFHPGAVCATCRRLKPARSKHCSVCRRCVARCDHHCIFINNCVGAGNHHWFLLLLLSTAVLTLYGGVVGVRLMTAQMRRRFPSWALLPWRADGGRGMSITDWLVVWSWGMQDGGRGGGGGSGGVWLAAVTLLALMISPLVWALLGYHLWLIYCGTTTNESMKWSDWQADMDDGLAWKRRLDPGRIKDLTVEPAWTRWPVEAEQVLVRTNDGKPPTGEVLPGYGEWEGVWRLKDVENLYDLGFWDNLVDVFLPYFMFRDPYVPVAENRLRRKKKRRARKIYLA

SEQ ID NO: 1378 - DNA, 429 bp, Myceliophthora thermophilia
atgggtctctcgctacatcccatctccagattcttggtgttgttcgttacggtcgtgtactcgatttcctccgctaaaagtccgaactccccccgagtcacaccaagggctcggcagcccgaaacgacggacaaaaccatccagcatttctacacgaatgagacgaatgagggcgagagtggtgccaagaaaactccggagcgacatgttaatagtcgtattttttaccataacgtatcagaattcccgttcgaggcaaccccgtcgtcaggcgccaagacatcagtggtggaacgagctatttcggtcaaggactacgcaggagcaacccgtactgcgtactcgttcgttcgcgcgtgggcgggattctgtccggccccggggcgaacattccggtgtttcatgtttcgattttcgatcgtcaagtag

SEQ ID NO: 1379 - protein, 142 aa, Myceliophthora thermophilia
MGLSLHPISRFLVLFVTVVYSISSAKSPNSPRVTPRARQPETTDKTIQHFYTNETNEGESGAKKTPERHVNSRIFYHNVSEFPFEATPSSGAKTSVVERAISVKDYAGATRTAYSFVRAWAGFCPAPGRTFRCFMFRFSIVK

SEQ ID NO: 1380 - protein, 121 aa, Myceliophthora thermophilia
ISSAKSPNSPRVTPRARQPETTDKTIQHFYTNETNEGESGAKKTPERHVNSRIFYHNVSEFPFEATPSSGAKTSVVERAISVKDYAGATRTAYSFVRAWAGFCPAPGRTFRCFMFRFSIVK

SEQ ID NO: 1381 - DNA, 3672 bp, Myceliophthora thermophilia
atggcaccaccctccagccgccgaccggtggcagccgggccgtccgagacagtctcaacctcatttctgctcgccaaccttcactgtcccacatgtgtgtcgacgataaagagcgccctccacggatcctgcggctctctcgtcaaatgggtctcacccaacgttgtcacctctgtagtgaccgtcgagcacgccccagacgcatctctccggcagatgcgccaagcccttgaggagagcgggttcgaagtatgcggaataaccacctcgtctggcactatctccgactcggatcttgaaacgggagagtttcagccgaacggcgagagtagcgacagcagattcagcaacagcaccaacgacatgggccttccggtgtctggcctcgcccgttggttccggcccgtgccgtcgcaggcttccccgtctgaaaagagccgggcccatctcgagaactgcgaacagtgccggagcaccgtgggcaccctgacggacgagaaggcagtattgaacatcgtgtcccaacataccaccactccgagcacgcccatcactagtttggctccattacccaccacgtcatccagcccctttatcgccatcggaggcgataaggatcagccatcactctggagggtatcgctcgccgtgggaggcatgacatgctccgcctgtgccaacatgattaccgagggcctcaagaagaacgactgggtcgcaaacgttgtggtcaacctcgtcggaaacagcgccgtggtggacgtgaaggaaagggacaaagccgacgagctcgttcaagtcattgaggacctcggatacgaggcgactctggactcggtcactgacctaagccaagggaagcgcaaagccacggaaagctcggatctctggcgagcgagccttgctatcgggggcatgacctgcgccgcttgctccaacaccatcaccagggaactgatgaagaaggactgggtcaaggacatcactgtcaacttactcaccaatagcgcctcggccgacattgagggccgggccaacgccgacaggctagtggaagcgattgaggatcttggctacgacgcgacccttgacacggtaatcaacctcgcccaagaagcggccgaagaacgcaggcggaccgtcgagatccgggtcgacggcctctactgcgaacactgcccggaccgcgtgacaaaaagcctcgccggcttcaggcgacacctcgaagttctcaccccgccgagccgcaaacggcccatcatgaagctcagctacgtccccgacgcgcccacgttcacagtgcgccagatcctcgccgccatcgaggccagcgacccggggtttaccgccgccatctaccacccgcccaccctcgaagagcgctctaagcagatccagcgcaaacaccgcctccagatcctcttacgcgtcatcttcaccggcgtcgtctgcatccccaccttcatcatcggcatcgtctacatgtccctgctcccctccagtaaccccaccaagcatttcctgatgaggccgtggacgtcgggcatcagccgcgcgcagattgcgctcttcatcatggcgacgcccgtctacttctttgccgcggacctgttccaccggcgcgccatcaaggagatccgcaccctctggcgccccggcagccgggtccccatcctgcagcgcttctaccgcttcgggagcatgaacacgctcatgtcgctcggcaccaccattgcctacatctcgtccgtgagccagctgatcgccgccgccgcgaacaagctggacgaggtgaacgactccaatttctactttgactcggtcgtcttcctgaccttcttcctgctcttgggccggttgattgagggttacagcaagtctaagaccggagacgcggtagagatgctggggaagttgcggccgacgaccgcgaccctcgtcgaggggtacgggacggacaaggagaaagacgtgcttgtcaaggccgacttgctcgattttggcgacgtggtgcgcgtcactcacggcgcgtcgccgcccgcggacggcaccgtcgtggggggggagagcaactttgacgagtctagcctgacgggagagtcacggctggtcaagaaggcggtgggcgaccaggtgttctcgggaacggtcaacaaggatgcctcgctcttggtgcgcatcaccggcgtggcggggtcgtcgatgctagaccagatcgtccacgtcgtccgcgagggccagacgaagagggcgccgatcgagcaggtcgcggacatgctgacgtcgtacttcgtccccgtggtcaccttcattgccgtcctcacctggatcctctggctctcgctcggactaggtggccacatccccgagcattacctggacgttacttccggcggctgggtcgccttctcgctgcaattcgccattgccgtgttcgttgtggcgtgcccctgcggcctcgctctcgcggcgccgaccgcgatttttgtgggcagtggtctcgcagcgaagcatgggatcctcgccaagggcggtggcgaggcgtttgagaaggctagcaggatcgattgcgtcgtcttcgacaagacgggcaccctcaccaagggcggcgagcccagcatcaccgactccgaggtgtacgcccaagaggccgcccggagggacgccctcttcgcagcgctgaaggcggtcgaagagaacagcagtcacccgatcgcaaaggccgttgtctccttctgcagcacccaaacatcctcccgggccacggttgatgacctccaagaagttgccggaaaagggctgagagcgacgtaccgggccaccgacccggcatcatctttcgagctcgccgtcggaaatgaatccttcatgtctgacttctccgtcgccatccccgcccagacagcggccgccctcgagcgctggaaatccgaagccaagtcggtcgctctcgttgccacccgcgccgcggactcccaatcatggactctcgcagcggcgttctccatctcggaccccatccgccccgaggcaccgcgcatcatccgcgccctccggtcccggggcacccgcgtgtggatgctgtccggcgacaacccgaccaccgcctcggcggtcgcctcccagctcggcatccccccggaccaggtcatcgcgggcgtgctgccgaccggcaaagcggacaagatcaagtacctccagtcgacgctcaaagcgcgtgccggcgggagcgggagcgggagcaggggccagtccgccaccaagcgagccatggtcgccatggtcggcgacggcatcaacgactcgcccgcgctggcgacggccgacgtgggcgtcgccatcgggtccggggccgacgtggccatcagcagcgccgacttcgtgctggtcaagagcgacctgcgggcggtagtcgacctgctggacctgtcggccgtcgtcttctcgcgcatcaagctcaactttggctgggccgtcgtgtacaactgcatcgccctgcccgtggctgggggtgccttctaccccatcgtgagccgcgggcagcacgtccggctggaccccgtgtgggcgagcctggccatggcgctgagcagcatcagcgtcgtgctcagctccctggcactgcgggtcagggtgcaggggatcgggtaccgcgagaggcggatcgagtga

SEQ ID NO: 1382 - protein, 1223 aa, Myceliophthora thermophilia
MAPPSSRRPVAAGPSETVSTSFLLANLHCPTCVSTIKSALHGSCGSLVKWVSPNVVTSVVTVEHAPDASLRQMRQALEESGFEVCGITTSSGTISDSDLETGEFQPNGESSDSRFSNSTNDMGLPVSGLARWFRPVPSQASPSEKSRAHLENCEQCRSTVGTLTDEKAVLNIVSQHTTTPSTPITSLAPLPTTSSSPFIAIGGDKDQPSLWRVSLAVGGMTCSACANMITEGLKKNDWVANVVVNLVGNSAVVDVKERDKADELVQVIEDLGYEATLDSVTDLSQGKRKATESSDLWRASLAIGGMTCAACSNTITRELMKKDWVKDITVNLLTNSASADIEGRANADRLVEAIEDLGYDATLDTVINLAQEAAEERRRTVEIRVDGLYCEHCPDRVTKSLAGFRRHLEVLTPPSRKRPIMKLSYVPDAPTFTVRQILAAIEASDPGFTAAIYHPPTLEERSKQIQRKHRLQILLRVIFTGVVCIPTFIIGIVYMSLLPSSNPTKHFLMRPWTSGISRAQIALFIMATPVYFFAADLFHRRAIKEIRTLWRPGSRVPILQRFYRFGSMNTLMSLGTTIAYISSVSQLIAAAANKLDEVNDSNFYFDSVVFLTFFLLLGRLIEGYSKSKTGDAVEMLGKLRPTTATLVEGYGTDKEKDVLVKADLLDFGDVVRVTHGASPPADGTVVGGESNFDESSLTGESRLVKKAVGDQVFSGTVNKDASLLVRITGVAGSSMLDQIVHVVREGQTKRAPIEQVADMLTSYFVPVVTFIAVLTWILWLSLGLGGHIPEHYLDVTSGGWVAFSLQFAIAVFVVACPCGLALAAPTAIFVGSGLAAKHGILAKGGGEAFEKASRIDCVVFDKTGTLTKGGEPSITDSEVYAQEAARRDALFAALKAVEENSSHPIAKAVVSFCSTQTSSRATVDDLQEVAGKGLRATYRATDPASSFELAVGNESFMSDFSVAIPAQTAAALERWKSEAKSVALVATRAADSQSWTLAAAFSISDPIRPEAPRIIRALRSRGTRVWMLSGDNPTTASAVASQLGIPPDQVIAGVLPTGKADKIKYLQSTLKARAGGSGSGSRGQSATKRAMVAMVGDGINDSPALATADVGVAIGSGADVAISSADFVLVKSDLRAVVDLLDLSAVVFSRIKLNFGWAVVYNCIALPVAGGAFYPIVSRGQHVRLDPVWASLAMALSSISVVLSSLALRVRVQGIGYRERRIE

SEQ ID NO: 1383 - protein, 1188 aa, Myceliophthora thermophilia
IKSALHGSCGSLVKWVSPNVVTSVVTVEHAPDASLRQMRQALEESGFEVCGITTSSGTISDSDLETGEFQPNGESSDSRFSNSTNDMGLPVSGLARWFRPVPSQASPSEKSRAHLENCEQCRSTVGTLTDEKAVLNIVSQHTTTPSTPITSLAPLPTTSSSPFIAIGGDKDQPSLWRVSLAVGGMTCSACANMITEGLKKNDWVANVVVNLVGNSAVVDVKERDKADELVQVIEDLGYEATLDSVTDLSQGKRKATESSDLWRASLAIGGMTCAACSNTITRELMKKDWVKDITVNLLTNSASADIEGRANADRLVEAIEDLGYDATLDTVINLAQEAAEERRRTVEIRVDGLYCEHCPDRVTKSLAGFRRHLEVLTPPSRKRPIMKLSYVPDAPTFTVRQILAAIEASDPGFTAAIYHPPTLEERSKQIQRKHRLQILLRVIFTGVVCIPTFIIGIVYMSLLPSSNPTKHFLMRPWTSGISRAQIALFIMATPVYFFAADLFHRRAIKEIRTLWRPGSRVPILQRFYRFGSMNTLMSLGTTIAYISSVSQLIAAAANKLDEVNDSNFYFDSVVFLTFFLLLGRLIEGYSKSKTGDAVEMLGKLRPTTATLVEGYGTDKEKDVLVKADLLDFGDVVRVTHGASPPADGTVVGGESNFDESSLTGESRLVKKAVGDQVFSGTVNKDASLLVRITGVAGSSMLDQIVHVVREGQTKRAPIEQVADMLTSYFVPVVTFIAVLTWILWLSLGLGGHIPEHYLDVTSGGWVAFSLQFAIAVFVVACPCGLALAAPTAIFVGSGLAAKHGILAKGGGEAFEKASRIDCVVFDKTGTLTKGGEPSITDSEVYAQEAARRDALFAALKAVEENSSHPIAKAVVSFCSTQTSSRATVDDLQEVAGKGLRATYRATDPASSFELAVGNESFMSDFSVAIPAQTAAALERWKSEAKSVALVATRAADSQSWTLAAAFSISDPIRPEAPRIIRALRSRGTRVWMLSGDNPTTASAVASQLGIPPDQVIAGVLPTGKADKIKYLQSTLKARAGGSGSGSRGQSATKRAMVAMVGDGINDSPALATADVGVAIGSGADVAISSADFVLVKSDLRAVVDLLDLSAVVFSRIKLNFGWAVVYNCIALPVAGGAFYPIVSRGQHVRLDPVWASLAMALSSISVVLSSLALRVRVQGIGYRERRIE

SEQ ID NO: 1384 - DNA, 3927 bp, Myceliophthora thermophilia
atggccctccgagggagagacatagcacttgccggcgtcgcgtgcttcatcgcctggggatacgccgtcaattggttccccgctctgcgctgggccggccacgcctttgtgggcggtgtgctgctcgccgtcgctggcctgctcgccctcgtgcttctcacctctcgcggcccacgacatcgccagcttcggcaatcacaccgccccagggcagccgcttttctggcccccgacgcgtggaagaccgaagtcgccgccctgcgacgccgccaggcctacaccaagacgccgctctgccccgagtatccgaagctgtcggccgccctcgacgaggtcctcgagtgcatcatccgcgacttcatccggtcctggtactcgcacatcagcaaaaaccccgtgtttaccgacgaggtcgacaaggcgatacgatgtgccctgctccgggttcgcgaccggctgcagcggctggacctcgcagaggtgctgaccacccgcttcgtccccatcttgacggcccacttccgcgacttctacgatgccgagcggtcggtcagggggcgtaagctgaaccggtccgtcaccgagacggaggagctggacctggccattgcttccaagtacagggaggggaagctacatccggcggcgagcctggccttctccgatacaaagacgatccagcaggactacttgcgacagacaatgtcgaaaatcctacccgtcgtgctgccggaaaacatgcttgcttcgagagcggtgtcgatactcatccgagagatcacctcgtgcgccgtcatgttcccagtgatgcagatgctgtccgacccggacacgtggaatcagctgatggagaactatgggcgggccacgctccaggaccgctccaccgtccggagactccgcgccgccctggacgagcacgcctctccggccccgaaggccggcaagcccgtggccttccctcgcctgatgccgggagacagcgagcggagattcgaaaagttcatcagggtcatcaggaaggtcaataacctctcggacgcgcggcgtttccgtagcgaagttgccagccagctcaagagagactcgcagcaggagaacgcggaccatgtgtacctgcgccggttggagctcggcaagaggatgctggatcagagagtgcagcatctggccgccggaggcgggcgccgacctcctctccagcaacccgcagagctcgccgtgccgagcgagtctcggctgcagaatgcgccgctggtcgaagtgctacgggacccctcgacgctctcctacttcatggaatacatggaccggcagcggctgatgcccttggtgcaattctggctcgtcgtggatggcttccgcaaccctctcgaagacgacgggcccgaaggagaggagttgccgctacagctacccccgtggacggaatcagacaggctcgacctcgcccagatcgatgccgcttacttgagtaggccggagctgaacgtccctgcttcctcgaaactggtcattcaagagttcctcagggccggcaaacgggccacacccgagcagtactacagggcgcgcagggccatcttgcgagcacagagcgcagtgctggaggagatgcgcgccaagcatttccagaacttcaagcagtccgatctgttcttcaaggcattggccgcagaagaggcttccaagcgcacgaccctggcgaacgcgagaccaagatcgggctcctcccttccgcgatcgaccacgtatggcccctcctccaggccgacgcctgtggctcgcctaggctcgagattacaggcggggcccaacaacagacgggccggatcgacgtcggatctcaaggccttgaatactaacggcggaaatgactttgatccgcggcgaccagcaggcgagcctcattccccgcctcctctacctgacgccgacgaggaggtgggcgacgacacgctggccgattccatggcgagcctcgaccaggacgtgagcgccgcgcagccgatgctcgacacaaaggtcgtccaagccatggagcaggccctgaatcatatcctcgaggagagcaagccgtcaacggccgaggatctcagggcgtcgctgttcggagacgacgacgccggaagtagcatcttctccccgctgagcgacgcgcctaagcagagggcatcgcccgccccggcgtcaagatcaaacagaggctcggtagacttgacgagatccagccgttcttcgctcgatgttcctcggcctgccgagcaacccagatcgagccgagggtcttttgacgcccgtcgctccggcgagcttcctcggtctggtagagcctcgctggacgctgagcgaccggcgaagggccaggagaaacccagcttggcttcgctgggcttggtaagcgcagcttcgcggattggcgtctttgaagacgatgacctcttcgaagacgagaacaggtacctctcggacgagccttctgatctggatgacgacgcggacgccgacgacgccgatgccgtgcacgaggctgctccgggcgatcttggcctcgcggaagccatcacggcgctgactaacgacatcgacaagctgatcgcccaagaagcagtggtggactctctgctgaaaaaggccgagctgacgaacaacacggccgagctgagggtcctgcgcaagtcaaaggcgagcttgcaaagagagatccggcgcaaggagctacagaggcagcagtacgtcatacaagagagcgacaacagcctctacgggcgatccaccatcaagatcaagtccatccagctcggccgcgaggacgacggcaaggaagtcgccttctacgtgatcgaagtctcgcgcaacgccggcgagaggatgcccgccgcgacttgggtcgtcacacgtcgctacagcgagttcctcgagctgcaccagaaactgcgctcgcggtatccatccgtccgcaacctcgacttcccccgccgtcgcgtcgtcatgaagctacagaacgagttcctccagaagcgccgcgtcgcgctcgagaagtacctcagcgagctgctcctgcttcccgaagtctgtcggagccgcgaactacgcgccttcctctcgcagagcgtcattcaccccgcccagggcggcgcctccgaccagaacgacgcggccaacagcagcagcagcagcaagaaggacatgatcacgcgcatctacgactcggtcgccgacggcatggaggacatcctcggaagcatccccgtcctggaccagctctccctggccgggcagagcctgatcgccgccgccgccggccagctcggcaacgtcccgctggccgcgcttgccgagggggacgccgccgccgcgtcggcggagggcggcgtcatgatgaacgcggccgaggccgaggcggagctgaacgcgttcgaggagagcaagggccagggggaggcggagccgttcgtcaagcccatctgcgacatcttcctcgagatcttcgagctcaaccggggcaacaactggctgcgcggccgcgccgtcgtcgtcgtgctgcaccagctgctggggggcaccatcgagcgcaagctgcgcgagaacgtgcggctgctgctggtccgcgaggacgcgctgctgaggtacgtcggcctgctgagggacgcgctctggcccgggggggggcccaacgacgacgggtcggcgaggacaaacaaggcgcccaggaccaggaccgaggcggagaaggcgaggacgcggagcgaggccggcttgatgctggccaccctggtgccggacctcgtggggagcgtggtcggccgggtgaacgcgcaggccgcgagtcggcgggtgtttgcggctttcaacaacgcaagattaaatgcccaccttgcgtttacgctgttggacgagattgtcgatgtcttgtttggggaatga

SEQ ID NO: 1385 - protein, 1308 aa, Myceliophthora thermophilia
MALRGRDIALAGVACFIAWGYAVNWFPALRWAGHAFVGGVLLAVAGLLALVLLTSRGPRHRQLRQSHRPRAAAFLAPDAWKTEVAALRRRQAYTKTPLCPEYPKLSAALDEVLECIIRDFIRSWYSHISKNPVFTDEVDKAIRCALLRVRDRLQRLDLAEVLTTRFVPILTAHFRDFYDAERSVRGRKLNRSVTETEELDLAIASKYREGKLHPAASLAFSDTKTIQQDYLRQTMSKILPVVLPENMLASRAVSILIREITSCAVMFPVMQMLSDPDTWNQLMENYGRATLQDRSTVRRLRAALDEHASPAPKAGKPVAFPRLMPGDSERRFEKFIRVIRKVNNLSDARRFRSEVASQLKRDSQQENADHVYLRRLELGKRMLDQRVQHLAAGGGRRPPLQQPAELAVPSESRLQNAPLVEVLRDPSTLSYFMEYMDRQRLMPLVQFWLVVDGFRNPLEDDGPEGEELPLQLPPWTESDRLDLAQIDAAYLSRPELNVPASSKLVIQEFLRAGKRATPEQYYRARRAILRAQSAVLEEMRAKHFQNFKQSDLFFKALAAEEASKRTTLANARPRSGSSLPRSTTYGPSSRPTPVARLGSRLQAGPNNRRAGSTSDLKALNTNGGNDFDPRRPAGEPHSPPPLPDADEEVGDDTLADSMASLDQDVSAAQPMLDTKVVQAMEQALNHILEESKPSTAEDLRASLFGDDDAGSSIFSPLSDAPKQRASPAPASRSNRGSVDLTRSSRSSLDVPRPAEQPRSSRGSFDARRSGELPRSGRASLDAERPAKGQEKPSLASLGLVSAASRIGVFEDDDLFEDENRYLSDEPSDLDDDADADDADAVHEAAPGDLGLAEAITALTNDIDKLIAQEAVVDSLLKKAELTNNTAELRVLRKSKASLQREIRRKELQRQQYVIQESDNSLYGRSTIKIKSIQLGREDDGKEVAFYVIEVSRNAGERMPAATWVVTRRYSEFLELHQKLRSRYPSVRNLDFPRRRVVMKLQNEFLQKRRVALEKYLSELLLLPEVCRSRELRAFLSQSVIHPAQGGASDQNDAANSSSSSKKDMITRIYDSVADGMEDILGSIPVLDQLSLAGQSLIAAAAGQLGNVPLAALAEGDAAAASAEGGVMMNAAEAEAELNAFEESKGQGEAEPFVKPICDIFLEIFELNRGNNWLRGRAVVVVLHQLLGGTIERKLRENVRLLLVREDALLRYVGLLRDALWPGGGPNDDGSARTNKAPRTRTEAEKARTRSEAGLMLATLVPDLVGSVVGRVNAQAASRRVFAAFNNARLNAHLAFTLLDEIVDVLFGE

SEQ ID NO: 1386 - protein, 1286 aa, Myceliophthora thermophilia
VNWFPALRWAGHAFVGGVLLAVAGLLALVLLTSRGPRHRQLRQSHRPRAAAFLAPDAWKTEVAALRRRQAYTKTPLCPEYPKLSAALDEVLECIIRDFIRSWYSHISKNPVFTDEVDKAIRCALLRVRDRLQRLDLAEVLTTRFVPILTAHFRDFYDAERSVRGRKLNRSVTETEELDLAIASKYREGKLHPAASLAFSDTKTIQQDYLRQTMSKILPVVLPENMLASRAVSILIREITSCAVMFPVMQMLSDPDTWNQLMENYGRATLQDRSTVRRLRAALDEHASPAPKAGKPVAFPRLMPGDSERRFEKFIRVIRKVNNLSDARRFRSEVASQLKRDSQQENADHVYLRRLELGKRMLDQRVQHLAAGGGRRPPLQQPAELAVPSESRLQNAPLVEVLRDPSTLSYFMEYMDRQRLMPLVQFWLVVDGFRNPLEDDGPEGEELPLQLPPWTESDRLDLAQIDAAYLSRPELNVPASSKLVIQEFLRAGKRATPEQYYRARRAILRAQSAVLEEMRAKHFQNFKQSDLFFKALAAEEASKRTTLANARPRSGSSLPRSTTYGPSSRPTPVARLGSRLQAGPNNRRAGSTSDLKALNTNGGNDFDPRRPAGEPHSPPPLPDADEEVGDDTLADSMASLDQDVSAAQPMLDTKVVQAMEQALNHILEESKPSTAEDLRASLFGDDDAGSSIFSPLSDAPKQRASPAPASRSNRGSVDLTRSSRSSLDVPRPAEQPRSSRGSFDARRSGELPRSGRASLDAERPAKGQEKPSLASLGLVSAASRIGVFEDDDLFEDENRYLSDEPSDLDDDADADDADAVHEAAPGDLGLAEAITALTNDIDKLIAQEAVVDSLLKKAELTNNTAELRVLRKSKASLQREIRRKELQRQQYVIQESDNSLYGRSTIKIKSIQLGREDDGKEVAFYVIEVSRNAGERMPAATWVVTRRYSEFLELHQKLRSRYPSVRNLDFPRRRVVMKLQNEFLQKRRVALEKYLSELLLLPEVCRSRELRAFLSQSVIHPAQGGASDQNDAANSSSSSKKDMITRIYDSVADGMEDILGSIPVLDQLSLAGQSLIAAAAGQLGNVPLAALAEGDAAAASAEGGVMMNAAEAEAELNAFEESKGQGEAEPFVKPICDIFLEIFELNRGNNWLRGRAVVVVLHQLLGGTIERKLRENVRLLLVREDALLRYVGLLRDALWPGGGPNDDGSARTNKAPRTRTEAEKARTRSEAGLMLATLVPDLVGSVVGRVNAQAASRRVFAAFNNARLNAHLAFTLLDEIVDVLFGE

SEQ ID NO: 1387 - DNA, 1377 bp, Myceliophthora thermophilia
atgatgccgcgtcgccgcgtcggggccgaagacggcgccgtcggtccacatcctcatccctaccgcacgctcctcgcttcctttgcggcgtggaaactcttcctgctcaccatcgccctgggcagcatcctcgcgggcgacgcctacgacacgtcggcggggctgctgctgcttcagggcgaccaggaggagggccgtagtaacgcgacggccggccggccgccggaggagggcctcgggatccggctgatcacccgcctgaccagctgggacgctgtgtactttgtcagcaccgcacacaggggttaccggttcgagcaggagtgggcgtttggtgccggtctgccttttaccgtgcgaaacctgcttcgtgggcttactcatattggcgtcctcgatccgtccgcggccggagggaaacctgtgcccgaagcgctgaccggcatcgccattgccaacacggcccacctgctctccgccctagtgctctaccgccttggccaggtggtctggcgcgaccatacgctatctttagtcgctgctcttgtgcacatcatctccccggccggcctgttcctgtccgccccctacgccgagagctcctatgccctgctctccttctccggattcctactcttcgccctcggctgccgggctgagggcagcccaacacgccgcgacctctacaccatagcggccggggccctcttcggtctagccacagccttccgcagcaacggcatcctgaacggccttcccttcgccttggaggccctgcggcacctccccgcgctgcccaagcgtcccttcgacaccctgcgtcggctgcttgcacttggcgtgggtggggtaatggtggccgctggctcgctcgggccccagactgccgcctatctgcgcttctgttccggcccatccggggcattacccaggccttggtgccaccaatatctgcccagcatctttacctttgtccagcagcactactggaacgtcggcttcctgtgctactggaccttgtctaatctcccactctttttgctcgccaccccgatgctcacgattctaaccaagtccgggatggatacgctgaggggtcggagcattcctgctgctgacggatccgccgagtcggcgcggttgttgtcccttgtccagtctgccgccgccgccgaagtgctgcttgccgtactcgcggtcacaacctaccatgtccagattatcacgaggatatcttcgggataccccgcgtggcattggtggcttgctgggaaccttgtccgtggggaagaggcggggagccgcattgtcatgttcatggtcctctacgcatcgatccaaggtgcgctcttcgcgtcgtttctgcccccagcatag

SEQ ID NO: 1388 - protein, 458 aa, Myceliophthora thermophilia
MMPRRRVGAEDGAVGPHPHPYRTLLASFAAWKLFLLTIALGSILAGDAYDTSAGLLLLQGDQEEGRSNATAGRPPEEGLGIRLITRLTSWDAVYFVSTAHRGYRFEQEWAFGAGLPFTVRNLLRGLTHIGVLDPSAAGGKPVPEALTGIAIANTAHLLSALVLYRLGQVVWRDHTLSLVAALVHIISPAGLFLSAPYAESSYALLSFSGFLLFALGCRAEGSPTRRDLYTIAAGALFGLATAFRSNGILNGLPFALEALRHLPALPKRPFDTLRRLLALGVGGVMVAAGSLGPQTAAYLRFCSGPSGALPRPWCHQYLPSIFTFVQQHYWNVGFLCYWTLSNLPLFLLATPMLTILTKSGMDTLRGRSIPAADGSAESARLLSLVQSAAAAEVLLAVLAVTTYHVQIITRISSGYPAWHWWLAGNLVRGEEAGSRIVMFMVLYASIQGALFASFLPPA

SEQ ID NO: 1389 - protein, 417 aa, Myceliophthora thermophilia
SILAGDAYDTSAGLLLLQGDQEEGRSNATAGRPPEEGLGIRLITRLTSWDAVYFVSTAHRGYRFEQEWAFGAGLPFTVRNLLRGLTHIGVLDPSAAGGKPVPEALTGIAIANTAHLLSALVLYRLGQVVWRDHTLSLVAALVHIISPAGLFLSAPYAESSYALLSFSGFLLFALGCRAEGSPTRRDLYTIAAGALFGLATAFRSNGILNGLPFALEALRHLPALPKRPFDTLRRLLALGVGGVMVAAGSLGPQTAAYLRFCSGPSGALPRPWCHQYLPSIFTFVQQHYWNVGFLCYWTLSNLPLFLLATPMLTILTKSGMDTLRGRSIPAADGSAESARLLSLVQSAAAAEVLLAVLAVTTYHVQIITRISSGYPAWHWWLAGNLVRGEEAGSRIVMFMVLYASIQGALFASFLPPA

SEQ ID NO: 1390 - DNA, 2256 bp, Myceliophthora thermophilia
atgaagggcacatcggcgttgcagctccttcttgctgtcgccgcggcggtggcccccgccggggcggcgacggcgtggaaaaatgtcaacattggcggcggcggcggcttcgtcccgggcatcatcttccaccccaaggaaaagggggtggcatatgcccggaccgacattggcggtctctaccggctgaaccccgacgacgactcgtggaccccgctgacggataacctgggcaccaacgagaaatggggccgctggggtatcgatgccgtcgccgtcgacccccaggatgccgacagggtctacgcggccgtcggcatgtacactaacgactgggaccccaacccgggctccatcatccgcagctcggacaggggcgccacctgggaagtcaccgagctacccttcaaggtgggcgggaacatgccgggccgcgggatgggcgagaggctcgcggtcgacccggccaactcggacatactgttcttcggcgcccgcagcggcaacggcctgtggaagagcgccgacggcggcgtcacctgggcccgcgtcgagtccttcaccaacgtaggcacctacgcgcccgacccaagcgacgccaccggcctgaactcggacctgatcggcctgacctttgtcacgttcgactcgacctcgaacgtggtcggcggcgccacctcgcgcatctttgtcggcacggccgacaacaagaccgcctcggtctacgtgtcggaggacgccggcgccacctggaagcccgtcgagggccagccgggcgccttcttcccgcacaagtgcgtgctgcagcccgaggagaaggcgctctacctgagctacagcaacggcgccggcccctacgacggcaccctgggcgccgtctaccgctacgacctcgccgcccgcacctggaccgacatcaccccggcctcgggcggcgacctctacttcggcttcggtggcctcagcgtcgacttgcggaagccgggcaccctcatggtcgccaccctgaactcgtggtggcccgacgcccagatctaccgctcgaccgactcgggcgccacctggtccaagatctgggagtgggcggcctatccggacatgaactggtactacggtctctataccgataaagccccctggatcaacgccggcttcatctcccaggacaccaagcgtctcggctggatgatcgaggccctcgagatcgactcccacgacagcgaccactggctgtacggaaccggcctcaccctctacggcggccatgaccttaccaagtgggacaccgtgactcgcaacgtcaccatctcgtcgctcgccgccggcatcgaggagatggccgtcctcggcctcgcctcgccccccaacggatccgaactcctggccgccgtgggcgacgactgtggcttcaccttccggaagagccaagacctcggcacgtcccctcagactccctggatgaatcccatctggacttcgaccaccgacgtcgactacgccggcaacgagcccgatcacgtcgtccgcgtcggcaactctcagggcgccccgcaggtcgccgtgtccgaggatggcggcgtgacctggagcgcgcacccgggcgccgacggcaccaccaactcgggcacgctggcctactcggccgacgcggacacgatcgtctggtcgtctggcagcgccggcgtactccgctcccagaaccagggcgccttcgccgccgttggctccctcccctcgggcgccactgtcgccgccgaccggcgcaacaacaccgtcttctacgccgcctcgggcgcctccttctaccgcagcaccgacacgggcgccacctttgccaaggtcgcctccgcctttggcagcaaggtcgccgccgtcaaagccattgcggcccacccggtcgttgctggcgaggtctgggtcgccaccgacgccggcctgttccgcagcatcgactacggtgccaccttctcggccgcctccggcagcatcaccgatgccatccaggtctccctcggcaagggtgatggctccgcctggaacgtctacgttttcggcacgggccccgagggcaccaagctgtacgcctcggccgacgagggcgccacctgggtcgacatccagggcgagcagggcttcggctcgctctctgccaacaggctcgtcggcagcggcaacgtcgccggccaggtctacgtcggcaccaacggccgcggcgtcttttacgccaaggtatccctgtccgccgccgccaactaa

SEQ ID NO: 1391 - protein, 751 aa, Myceliophthora thermophilia
MKGTSALQLLLAVAAAVAPAGAATAWKNVNIGGGGGFVPGIIFHPKEKGVAYARTDIGGLYRLNPDDDSWTPLTDNLGTNEKWGRWGIDAVAVDPQDADRVYAAVGMYTNDWDPNPGSIIRSSDRGATWEVTELPFKVGGNMPGRGMGERLAVDPANSDILFFGARSGNGLWKSADGGVTWARVESFTNVGTYAPDPSDATGLNSDLIGLTFVTFDSTSNVVGGATSRIFVGTADNKTASVYVSEDAGATWKPVEGQPGAFFPHKCVLQPEEKALYLSYSNGAGPYDGTLGAVYRYDLAARTWTDITPASGGDLYFGFGGLSVDLRKPGTLMVATLNSWWPDAQIYRSTDSGATWSKIWEWAAYPDMNWYYGLYTDKAPWINAGFISQDTKRLGWMIEALEIDSHDSDHWLYGTGLTLYGGHDLTKWDTVTRNVTISSLAAGIEEMAVLGLASPPNGSELLAAVGDDCGFTFRKSQDLGTSPQTPWMNPIWTSTTDVDYAGNEPDHVVRVGNSQGAPQVAVSEDGGVTWSAHPGADGTTNSGTLAYSADADTIVWSSGSAGVLRSQNQGAFAAVGSLPSGATVAADRRNNTVFYAASGASFYRSTDTGATFAKVASAFGSKVAAVKAIAAHPVVAGEVWVATDAGLFRSIDYGATFSAASGSITDAIQVSLGKGDGSAWNVYVFGTGPEGTKLYASADEGATWVDIQGEQGFGSLSANRLVGSGNVAGQVYVGTNGRGVFYAKVSLSAAAN

SEQ ID NO: 1392 - protein, 729 aa, Myceliophthora thermophilia
ATAWKNVNIGGGGGFVPGIIFHPKEKGVAYARTDIGGLYRLNPDDDSWTPLTDNLGTNEKWGRWGIDAVAVDPQDADRVYAAVGMYTNDWDPNPGSIIRSSDRGATWEVTELPFKVGGNMPGRGMGERLAVDPANSDILFFGARSGNGLWKSADGGVTWARVESFTNVGTYAPDPSDATGLNSDLIGLTFVTFDSTSNVVGGATSRIFVGTADNKTASVYVSEDAGATWKPVEGQPGAFFPHKCVLQPEEKALYLSYSNGAGPYDGTLGAVYRYDLAARTWTDITPASGGDLYFGFGGLSVDLRKPGTLMVATLNSWWPDAQIYRSTDSGATWSKIWEWAAYPDMNWYYGLYTDKAPWINAGFISQDTKRLGWMIEALEIDSHDSDHWLYGTGLTLYGGHDLTKWDTVTRNVTISSLAAGIEEMAVLGLASPPNGSELLAAVGDDCGFTFRKSQDLGTSPQTPWMNPIWTSTTDVDYAGNEPDHVVRVGNSQGAPQVAVSEDGGVTWSAHPGADGTTNSGTLAYSADADTIVWSSGSAGVLRSQNQGAFAAVGSLPSGATVAADRRNNTVFYAASGASFYRSTDTGATFAKVASAFGSKVAAVKAIAAHPVVAGEVWVATDAGLFRSIDYGATFSAASGSITDAIQVSLGKGDGSAWNVYVFGTGPEGTKLYASADEGATWVDIQGEQGFGSLSANRLVGSGNVAGQVYVGTNGRGVFYAKVSLSAAAN

SEQ ID NO: 1393 - DNA, 1230 bp, Myceliophthora thermophilia
atgcgctggctacagggcatcgccttgtgggcggcgctcgcccccttgtcgcacgccaacgttcccgatccggccaaggacgccaccccctaccatgaagagttcgttctgttccgcagcgccaacatggcctcacccgataagctctcgagcggcgtcggcttccactcgttccgcatcccggccgttgtctggactaacacaggccggatcctcgcctttgccgaaggccgccgccacaacaaccgcgactatggcgacatcaacctggtctacaagcgcaccaagaccaccaccagccacggcgcctccttcagcgactgggagccactgaaggaagtcgtcggcgccggcgccggaacgtggggtaacccgacgcccgtggtcgacggcgacaccatctacctcttcatgtcctggaacggcgcccagtacagccagaacgggggcgacacactgccggacggcagcaagaccaagaagatcgatagcacctgggagggccgccgccacctgtacctcagcaagagcaccgacgacggcgcgacctggtccgagcccgaggacttgaccgagacgctgaccccggccggccgggcctgggacgccgtcgggccgggcattggcatccgcctgaccacgggcgagctggtggtgcccgcacagcagcgcaacatcatcgggcgcgggccccccggcaaccgcacctggtcggtgcagtctctcccgggcgccgggtccgagggcaccatcgcgcagacgcccgacggtcagctctaccgcaacgaccggccgggcagcaacagcgactaccgccgcgtggcccgcggcaacctcaccagcttcggcgccttcgccgacgacacgggcctgccggatcccgggtgcgagggctcggtgctgctgtacaacttggccgacgacaagggcccggcgcgggtcgtcttcatgaactcggccagcaaggacagccgccgggcgatgcgcgtgcgcatcagctacgacagcgacgctgccaagttcaactttgggcgcgagctcggcgacgcccccgtgtccggcgccggctacgagggcgggtactcgagcatgaccaagacggccgactacaagatcggtgccctggtcgagagcgacttttacaacgacaagggcggggagaagtcgtaccgcgccatcatctggagacgcttcaacctgtcgtggatcctgaacgggccgcgcaattag

SEQ ID NO: 1394 - protein, 409 aa, Myceliophthora thermophilia
MRWLQGIALWAALAPLSHANVPDPAKDATPYHEEFVLFRSANMASPDKLSSGVGFHSFRIPAVVWTNTGRILAFAEGRRHNNRDYGDINLVYKRTKTTTSHGASFSDWEPLKEVVGAGAGTWGNPTPVVDGDTIYLFMSWNGAQYSQNGGDTLPDGSKTKKIDSTWEGRRHLYLSKSTDDGATWSEPEDLTETLTPAGRAWDAVGPGIGIRLTTGELVVPAQQRNIIGRGPPGNRTWSVQSLPGAGSEGTIAQTPDGQLYRNDRPGSNSDYRRVARGNLTSFGAFADDTGLPDPGCEGSVLLYNLADDKGPARVVFMNSASKDSRRAMRVRISYDSDAAKFNFGRELGDAPVSGAGYEGGYSSMTKTADYKIGALVESDFYNDKGGEKSYRAIIWRRFNLSWILNGPRN

SEQ ID NO: 1395 - protein, 390 aa, Myceliophthora thermophilia
NVPDPAKDATPYHEEFVLFRSANMASPDKLSSGVGFHSFRIPAVVWTNTGRILAFAEGRRHNNRDYGDINLVYKRTKTTTSHGASFSDWEPLKEVVGAGAGTWGNPTPVVDGDTIYLFMSWNGAQYSQNGGDTLPDGSKTKKIDSTWEGRRHLYLSKSTDDGATWSEPEDLTETLTPAGRAWDAVGPGIGIRLTTGELVVPAQQRNIIGRGPPGNRTWSVQSLPGAGSEGTIAQTPDGQLYRNDRPGSNSDYRRVARGNLTSFGAFADDTGLPDPGCEGSVLLYNLADDKGPARVVFMNSASKDSRRAMRVRISYDSDAAKFNFGRELGDAPVSGAGYEGGYSSMTKTADYKIGALVESDFYNDKGGEKSYRAIIWRRFNLSWILNGPRN

SEQ ID NO: 1396 - DNA, 3228 bp, Myceliophthora thermophilia
atggtggcggcagaggaggcggccgtggcggtcgcggcggccaagccggcgagggcttccgcggcggagggggccgtggtgggtacccgggcggcggccgcggaggcggggacggctaccgaggcggtcgcggtggtggtggtggtgagtttcgtggaggacgtggtggccgcggtgactttcgaggaggtcgaggaggtggcggccgcggagggcgtggtggctatggtggctccggcccagatgtcttcctgtaatggtgctggcccgagcattccggcccctgatgctgccgtcacggagctcgaggaccgctggatcgagaagcacggaatccagtcccggacgaccggcgctagtgagctggagtccaagatggccgacctatccctcggcaccatctccatgcctaagcgacccggcttcggcaccggcggcaatcctgtcgtcctctgggcaaattatttcaacgtgaacctaaagcttggcgccgtgtaccggtacgacctcagagtcatctccaaaaagctgacaaaggagcaagatgatgccctgagcaaacagcaggaatccgcaagcaagaaggcaaagggcaagccaaagcaggccagcgggcaacaaccgaatgctcccaaggacgccagagaggccaagggcaagaaactgtccgaggtcatcaaacttgccctggaccggctgcccggcgagcccgcgatcgcgaccgagtacaagcagcagctcgtgacgacggagaagctgcaggtcccgccagacgggctcatgcaggtcgagctcgccgaacccgggcgcaacccagagacctggtatgtccgcttcgacgggccctcatccatcaacatcgctggtttgatggactacgtgcggtcgctcgaggacaagaacgacggcgtcttccccaagttccccgaagagattgacgcactcggcatagtgttgggtcacaccgcaagagccaacctcaacactgctgctatcggcagcagccggttctttgctattgaccaagcaagaaaagaccaggcatcaatgccaccagactctcggatcgagatcttgcgcggctacgtccagagcgtccgcccagcaaccggccggttgctgctcaacaccaacgttacgcatgctgtgtttcgcaaagcggtcaagttagacgagctattccaaaagtgtgggctcgcgaacttacacttgccgcaacagcgccccaaccacgctttgcggacccttgacggcttgaacaagttccttgccaagtcgcgcatcgagtgcaaggttcctggtgagagaccaggcgagttcttcaagattcaacgaggcatggcgggcttggccaccacgaaggatggcaaggatgaagaccagaagcccgaattcacggagagcgggtttcgtttcgggaccccggctacggtaaggttctatctccggaagcctaaggaccctggagcgaagccaccccctggactctcttttgatactatggtgctggtgtcagactattacaaagccagatacggcatccgtgcggaccctggtctgccgttaatcaatgtcggaacagccggcaaaccgatctatatcctggccgagttctgcaccctactccctggtcagccgctcaaggcgaggctgtcaccccaagagcaagatgcaatgatcaggttcgcatgccgcccacctcccgagaacgcactgtcggtcaccacgtcggcaagggagttgctggccctggacaacaacatgctgctcgataagtttggcatcacagtcgacaagcatctcatcacggtcaaaggccgcgagctcccccctcctgctgtcggctacttgagagggaactcaattgagcgggtcactccggagaatggaggctggctcatgaagggggtcaaggtctgcaaatccggaaggcgtatcgcaaactgggcattcctcgtaatcggaaaagcgcgcccgcccatcgattttgggaccatcaaatctgcggttggaggctttgcccgattcctgaataacaacatgggcatcgacatgaatatgcaacctgtccccgcaaacggctaccaaacggctggcacgagcgaagaagacttgcgaaatgccttccgaaccatttccaaacagaagcctcaaccggagttcatcctagtacttcttccagacaaagatgccactacgtataacatcgtcaagaagctaggtgatgttgaatacggcatcactaccgtctgtgtccggcaggaaatgcttaccaaggaacaaggacaaatggggtactttgccaatgtcggtctgaaggtgaacctgaaatttggcggcatcaaccacagggtccgagacgagaccgggctggtggacaaaaccatgtttgtcggttacgacgtcactcaccctactaacctacccggcggcgctggcgataacgcgcccagtctggttggtctggtggccagtgttgacaacagcctcgctcagtggcctgccgtgacctgggagaataaatcccgggttgagcaagtcggagggaagacggacgagggccagttcattgctcacttcaaagaccgcctcaggttatggcagaaacacaacagcaatcgcctgcccgagaacatcgtcatcttccgtgatggtgtttccgaggggcagttcagcatggtgcttgaaaaggagctgcccaacattcgccaggcctgccaggagacgtacccagcaagaccgaacgcgcagccgcgcctgtccctcatagtgtcggtaaaacggcaccagacccggttctacccaaccgaccgcaaccacatccaccccaggtccaagagtccgaaggagggaaccgtcgtcgaccgcggcgtcaccaatgtacgctactgggactttttcctccaggcccacgcatctctccagggcacggctcgtccggcccactacacagtcctgcttgacgagatcttccggcacaaattcgggcccaatgccgccgacgcgctcgagacgctgacgcacaacatgtgctacgcgtacggccgcgccaccaaggccgtcagcatctgcccgccagcgtactatgccgacctggtcgccgcccgcgcgcgcatccataagagcgagctgttcgaaaacgtccagtccctggcttcgagtgagcagtcgagcgtgtccaggcgtaaggtccacgacaggctcaaggacaccatgtattacatctaa

SEQ ID NO: 1397 - protein, 1075 aa, Myceliophthora thermophilia
MVAAEEAAVAVAAAKPARASAAEGAVVGTRAAAAEAGTATEAVAVVVVVSFVEDVVAAVTFEEVEEVAAAEGVVAMVAPAQMSSCNGAGPSIPAPDAAVTELEDRWIEKHGIQSRTTGASELESKMADLSLGTISMPKRPGFGTGGNPVVLWANYFNVNLKLGAVYRYDLRVISKKLTKEQDDALSKQQESASKKAKGKPKQASGQQPNAPKDAREAKGKKLSEVIKLALDRLPGEPAIATEYKQQLVTTEKLQVPPDGLMQVELAEPGRNPETWYVRFDGPSSINIAGLMDYVRSLEDKNDGVFPKFPEEIDALGIVLGHTARANLNTAAIGSSRFFAIDQARKDQASMPPDSRIEILRGYVQSVRPATGRLLLNTNVTHAVFRKAVKLDELFQKCGLANLHLPQQRPNHALRTLDGLNKFLAKSRIECKVPGERPGEFFKIQRGMAGLATTKDGKDEDQKPEFTESGFRFGTPATVRFYLRKPKDPGAKPPPGLSFDTMVLVSDYYKARYGIRADPGLPLINVGTAGKPIYILAEFCTLLPGQPLKARLSPQEQDAMIRFACRPPPENALSVTTSARELLALDNNMLLDKFGITVDKHLITVKGRELPPPAVGYLRGNSIERVTPENGGWLMKGVKVCKSGRRIANWAFLVIGKARPPIDFGTIKSAVGGFARFLNNNMGIDMNMQPVPANGYQTAGTSEEDLRNAFRTISKQKPQPEFILVLLPDKDATTYNIVKKLGDVEYGITTVCVRQEMLTKEQGQMGYFANVGLKVNLKFGGINHRVRDETGLVDKTMFVGYDVTHPTNLPGGAGDNAPSLVGLVASVDNSLAQWPAVTWENKSRVEQVGGKTDEGQFIAHFKDRLRLWQKHNSNRLPENIVIFRDGVSEGQFSMVLEKELPNIRQACQETYPARPNAQPRLSLIVSVKRHQTRFYPTDRNHIHPRSKSPKEGTVVDRGVTNVRYWDFFLQAHASLQGTARPAHYTVLLDEIFRHKFGPNAADALETLTHNMCYAYGRATKAVSICPPAYYADLVAARARIHKSELFENVQSLASSEQSSVSRRKVHDRLKDTMYYI

SEQ ID NO: 1398 - protein, 1056 aa, Myceliophthora thermophilia
SAAEGAVVGTRAAAAEAGTATEAVAVVVVVSFVEDVVAAVTFEEVEEVAAAEGVVAMVAPAQMSSCNGAGPSIPAPDAAVTELEDRWIEKHGIQSRTTGASELESKMADLSLGTISMPKRPGFGTGGNPVVLWANYFNVNLKLGAVYRYDLRVISKKLTKEQDDALSKQQESASKKAKGKPKQASGQQPNAPKDAREAKGKKLSEVIKLALDRLPGEPAIATEYKQQLVTTEKLQVPPDGLMQVELAEPGRNPETWYVRFDGPSSINIAGLMDYVRSLEDKNDGVFPKFPEEIDALGIVLGHTARANLNTAAIGSSRFFAIDQARKDQASMPPDSRIEILRGYVQSVRPATGRLLLNTNVTHAVFRKAVKLDELFQKCGLANLHLPQQRPNHALRTLDGLNKFLAKSRIECKVPGERPGEFFKIQRGMAGLATTKDGKDEDQKPEFTESGFRFGTPATVRFYLRKPKDPGAKPPPGLSFDTMVLVSDYYKARYGIRADPGLPLINVGTAGKPIYILAEFCTLLPGQPLKARLSPQEQDAMIRFACRPPPENALSVTTSARELLALDNNMLLDKFGITVDKHLITVKGRELPPPAVGYLRGNSIERVTPENGGWLMKGVKVCKSGRRIANWAFLVIGKARPPIDFGTIKSAVGGFARFLNNNMGIDMNMQPVPANGYQTAGTSEEDLRNAFRTISKQKPQPEFILVLLPDKDATTYNIVKKLGDVEYGITTVCVRQEMLTKEQGQMGYFANVGLKVNLKFGGINHRVRDETGLVDKTMFVGYDVTHPTNLPGGAGDNAPSLVGLVASVDNSLAQWPAVTWENKSRVEQVGGKTDEGQFIAHFKDRLRLWQKHNSNRLPENIVIFRDGVSEGQFSMVLEKELPNIRQACQETYPARPNAQPRLSLIVSVKRHQTRFYPTDRNHIHPRSKSPKEGTVVDRGVTNVRYWDFFLQAHASLQGTARPAHYTVLLDEIFRHKFGPNAADALETLTHNMCYAYGRATKAVSICPPAYYADLVAARARIHKSELFENVQSLASSEQSSVSRRKVHDRLKDTMYYI

SEQ ID NO: 1399 - DNA, 2292 bp, Myceliophthora thermophilia
atgcgactgctcctcccagcattgctggctgttgccggcttcgtggggacggtgaagggacactggctcggggagatctctcatcagggttttgctccgtttgccggggccaactatcccgtcttccgcaacgttaaggactacggcgcaagaggtgatggcgtaacggacgatacggcagccatcaatgccgccatcaacgccggaaacccttgcaacaggggctgtgcgtcgacgacccaaaccccagcagtgatctactttcccgccggcacatacctgatctcttcgtctatcaagccggcctacttcacccagctcatcggcgatgcttcgtctcggccaacgctcaaggcgacgcccaactttgccgggttcggtctcattgacagcaatccctactacaccgaggtgctgaactggaagtctcaaaatgtcttcttccgccagatccgcaactttgtcatcgacacgaccaacatcccgcccgcaacggctgccaccggtattcactggccgacgtctcaggcgaccagcctccagaacattgtgttcaacatgcccgccacacccgacgtcgtccacgtcggcctgttcatggaagaaggaagcgggggcttcttgactgacctggagtttaacggtggtgccactggtgccagtatgggaaaccaacaattcaccatgcggaatatgaagttcaacaactgcaagacggccatcatccaaatttgggactggggttggacgtattccggcctgtccatcaacaactgccaggtcggtattgacatgtcgaacggcaacacgatgaacgtgggctcgatcaccctgattgacagcagcttcaccaacgtgcctgttgccatcctcacctcttggaccgagaacccgaaccctgccacggtcgagagtctggtgatggagaacgtggtactggacaacgtgcccgtcgccgtccagggaccaaacggaagaaccctgctcgccggcgggtcgacgacaatcaacggctggggcatcggccacagctacggctcctccggccctacctcgttcgccggtccagtaactcccaactcgcgcccgggaatcctcctcaataacgggcggtacttcactcgctccaagccgcagtacgagagcgtgcccgtctcgtccttcctgtcggttcggtcggcgggagccaagggcgacgcctcgacggatgacacggcggcgctccagaacgccatcaacacagctgtgtctcagaacaagatcctcttcctcgactacggcatctaccgcgtgaccagcaccatcagcatcccgcccggcgccaagatcgtgggcgagacataccccgtcatcatgtcgtccggcgccttcttcaacgacataaacaaccccaagcccgtggtccaggtcggcaagtcgggccagcagggccaggtcgagctgaccgactttatcgtctcgacgcaggggaggcaagcgggggcgatctgcatcgaatggaacctcgccagcgacgccggcaaccccagcggcatgtgggacgtccatgtgcgcatcggtggcttcaccggtacgcagcagcaggtcgcccaatgccccaagacgccgggcaacccggccgtcaacgacaactgcctcgtggcctatatgggcatgcacgtcaccaagggagcaagcgggctatacatggagaatgtgtggatctggactgccgaccacgatatcgatgatgctcagaacacccaaatcaccatctatgccggccgtggtctcctaaccgaatccgaaaacggtcccctctggctctggggcacgggttcggagcactttgtgctctaccagtaccagttcgccggcaccaagaacatcttcatgggccagatccagaccgagacgccctactaccagccgaccccgaacgcgctggtgcccttcccggtggcgtcggcgttgcgcgacccggatttccaggcgcagtgcgcgggcgtcgagggcaactgcgcggcggcgtggggcctgcgcgtcgtcgactcgagcgacgtgctggtgtacggcgccgggctgtactcgttcttcagcgactacagcaccgcctgctcgacgtttgacgccgggcagacgtgccagcagcgcatcacctccgtcgagggctccgccaccaacgtcaacctgtacaacctcaacacgatcgggacgcgcgagatgctgacgcgggatgggaggcgggtcgcttggtacgcggataaccagaacacctttgcgtccaacgtggcggtgtacaagagcaactga

SEQ ID NO: 1400 - protein, 763 aa, Myceliophthora thermophilia
MRLLLPALLAVAGFVGTVKGHWLGEISHQGFAPFAGANYPVFRNVKDYGARGDGVTDDTAAINAAINAGNPCNRGCASTTQTPAVIYFPAGTYLISSSIKPAYFTQLIGDASSRPTLKATPNFAGFGLIDSNPYYTEVLNWKSQNVFFRQIRNFVIDTTNIPPATAATGIHWPTSQATSLQNIVFNMPATPDVVHVGLFMEEGSGGFLTDLEFNGGATGASMGNQQFTMRNMKFNNCKTAIIQIWDWGWTYSGLSINNCQVGIDMSNGNTMNVGSITLIDSSFTNVPVAILTSWTENPNPATVESLVMENVVLDNVPVAVQGPNGRTLLAGGSTTINGWGIGHSYGSSGPTSFAGPVTPNSRPGILLNNGRYFTRSKPQYESVPVSSFLSVRSAGAKGDASTDDTAALQNAINTAVSQNKILFLDYGIYRVTSTISIPPGAKIVGETYPVIMSSGAFFNDINNPKPVVQVGKSGQQGQVELTDFIVSTQGRQAGAICIEWNLASDAGNPSGMWDVHVRIGGFTGTQQQVAQCPKTPGNPAVNDNCLVAYMGMHVTKGASGLYMENVWIWTADHDIDDAQNTQITIYAGRGLLTESENGPLWLWGTGSEHFVLYQYQFAGTKNIFMGQIQTETPYYQPTPNALVPFPVASALRDPDFQAQCAGVEGNCAAAWGLRVVDSSDVLVYGAGLYSFFSDYSTACSTFDAGQTCQQRITSVEGSATNVNLYNLNTIGTREMLTRDGRRVAWYADNQNTFASNVAVYKSN

SEQ ID NO: 1401 - protein, 743 aa, Myceliophthora thermophilia
HWLGEISHQGFAPFAGANYPVFRNVKDYGARGDGVTDDTAAINAAINAGNPCNRGCASTTQTPAVIYFPAGTYLISSSIKPAYFTQLIGDASSRPTLKATPNFAGFGLIDSNPYYTEVLNWKSQNVFFRQIRNFVIDTTNIPPATAATGIHWPTSQATSLQNIVFNMPATPDVVHVGLFMEEGSGGFLTDLEFNGGATGASMGNQQFTMRNMKFNNCKTAIIQIWDWGWTYSGLSINNCQVGIDMSNGNTMNVGSITLIDSSFTNVPVAILTSWTENPNPATVESLVMENVVLDNVPVAVQGPNGRTLLAGGSTTINGWGIGHSYGSSGPTSFAGPVTPNSRPGILLNNGRYFTRSKPQYESVPVSSFLSVRSAGAKGDASTDDTAALQNAINTAVSQNKILFLDYGIYRVTSTISIPPGAKIVGETYPVIMSSGAFFNDINNPKPVVQVGKSGQQGQVELTDFIVSTQGRQAGAICIEWNLASDAGNPSGMWDVHVRIGGFTGTQQQVAQCPKTPGNPAVNDNCLVAYMGMHVTKGASGLYMENVWIWTADHDIDDAQNTQITIYAGRGLLTESENGPLWLWGTGSEHFVLYQYQFAGTKNIFMGQIQTETPYYQPTPNALVPFPVASALRDPDFQAQCAGVEGNCAAAWGLRVVDSSDVLVYGAGLYSFFSDYSTACSTFDAGQTCQQRITSVEGSATNVNLYNLNTIGTREMLTRDGRRVAWYADNQNTFASNVAVYKSN

SEQ ID NO: 1402 - DNA, 855 bp, Myceliophthora thermophilia
atgtccccgcacccggctcagaaagagccacccaagctgtccaagggaaaagggaaaggggctctgctgttgctgaccatgtatgtggttgcgtatcgagcaggcgccaggcgtgtgagtaatttgtcagaagaacagcggaacaagaaacgagagaacgaccggatagcacaacaaaatattcgccgccgcaacaaagagctgattgagaagctccaacaagaggtggaggatctcagaaagcgggatagggtggacatggtaagccggttgatcaggcggaacagggagctggaggacgaggtacatgcgctcagaaaaacccttttcttgcatactggccggccgtatcccacacctggatttgaagtggaaggactgcccccaggcgggcattcgggcgattacagcgtgccgcattctttcggatcgccgtacctcaccaccgcgaacccttacgaccagtggccgagcagcgtggtacctgtcccatctacggtcacagtcaactcggtcgagtcaagtccaggggcgtccgggcacggagacgattttccgccggcgtacgtgcactcgggtgtgccggcgatcgacgggaccgtcatcgcgggtaatacatcggcgcccagcctcaatcctgccaaggcggagtaccaagaagttgacaccggtatggccatcgcgggtcacaagggcttgtctttttttcgtggcttgacttccgctgacgggaggcgatccccggcaggatcatcgaacaacgcctatcccggccacaacgcgcaacacccttcggcgtacttgcacgagcctccgtgggtgtatcctgccggtacttactacaccacacattga

SEQ ID NO: 1403 - protein, 284 aa, Myceliophthora thermophilia
MSPHPAQKEPPKLSKGKGKGALLLLTMYVVAYRAGARRVSNLSEEQRNKKRENDRIAQQNIRRRNKELIEKLQQEVEDLRKRDRVDMVSRLIRRNRELEDEVHALRKTLFLHTGRPYPTPGFEVEGLPPGGHSGDYSVPHSFGSPYLTTANPYDQWPSSVVPVPSTVTVNSVESSPGASGHGDDFPPAYVHSGVPAIDGTVIAGNTSAPSLNPAKAEYQEVDTGMAIAGHKGLSFFRGLTSADGRRSPAGSSNNAYPGHNAQHPSAYLHEPPWVYPAGTYYTTH

SEQ ID NO: 1404 - protein, 248 aa, Myceliophthora thermophilia
RRVSNLSEEQRNKKRENDRIAQQNIRRRNKELIEKLQQEVEDLRKRDRVDMVSRLIRRNRELEDEVHALRKTLFLHTGRPYPTPGFEVEGLPPGGHSGDYSVPHSFGSPYLTTANPYDQWPSSVVPVPSTVTVNSVESSPGASGHGDDFPPAYVHSGVPAIDGTVIAGNTSAPSLNPAKAEYQEVDTGMAIAGHKGLSFFRGLTSADGRRSPAGSSNNAYPGHNAQHPSAYLHEPPWVYPAGTYYTTH

SEQ ID NO: 1405 - DNA, 1965 bp, Myceliophthora thermophilia
atgcccccttcctcttcctcctccgctgcaagatggagcctccgcctatctctccttgcgggcggtgtcgccgtcgtcttcagtctgcagccgcagctgcttacccggggtgtttttggccagtcacggtcatcgtccggcatccatgacagcgtgcagacgtattgctaccagtccgtccgcactgccgccatagtcgccgcctcgggcgagaacggcatcgaggaaccgaactgcttctcggtctcccctgacggccgcttcgcccgcgtcttctcctcccgctcgtctcggccgagagcgcacgacgacgggagcgaggcgtatgccgtccgacccggccatgtcctccccggtctgtgggacggccacgggcacctgatccagtacggcgagttcctgcactcagccaacctgttcggggccgcatcgccggaagaggtgcggaggcggctgagggagtatctggatgccaacccgggggtcgggagcaaggaagaatggggcaggggaatcggctgggaccagatgactatgggggggatgccttttgccgatatgctggaggaggatgaggccttgaggggcaaatacttgatgctagaccgcgtggatgtgcattgcacgtgggtttccagggcggtgctggacctgctgccggcggatctgcccgaggaggtgcccgggggcgagattgtgaggacgcccggaatgggcgtgttctgtgacaacgcaatggacttggtcacctcgctatggcctaagccaagcaaggagcggaggaagaagtttgtggcgtcggccatgagggagctgcacaaggtcgggctcgtgggcatgcacgatgcgggcgtggtgccggctgacgtcgcaatgtacgacgagatgagtcgcacggaggactggacgctcagggtgtacgccatgctcgaatgtccggagaggaacacgttctgccccgacgaggcggtccaggtgcagcaccccgacggcatgctctcggtcaggagcgtcaagctgtttgccgacggcgccctgggaagctggggtagcgccatgatcgagccctattcagaccgccccgacacttcgggttcgctgctggtcaacgcctccactctcacttcgctcgcgcggtcctggtctgcagccggctttcaagtcaacatccacgccatcggggacctcgccaaccgcctggccatcgatgccctcgaggcatcgctcaaggacctctgccccgacagccaagacctcgcggcctgccagtcccgccaccgcttccgcatcgagcactcgcagatcatccacccggccgaccagcagcggttgcacgccatcggcatcatcccttccatccagcccacccacgccacctcggacatggcctacgccgagctccgtctcggcgaggagcgcacgcgcactgaggcctaccgcatgcgctccctgctggacattagccccgtcctgggcagcgacttccccgtggaaccgccgaaccccttggaaggtgtctacgccgccgtaacgaggaaaagcccgcacacgggaatgggaccgccggggtacgaggacggctggcacgtggaagaggcgctgacggtggagcaggcgctggatgggtttaccaggggcgtggccaggggggcgttcatggatgggcaggcaggggtcatcgccgagggggcttttgcggattggattgttttggatgaggacgtcatggccgttgaggcagaagagataaggaggttgagggtgagggagacttctctctctgtcatggagaatctcgagcatccacacctcatccgcagcggacaagccatccgggtgagcataccacaagtgcggccagacgcactctcgcaccacataaccctcgcgtgttccaagaggtgtcccggcacatcaaggccatgcatggcccgagacatcgtgggcgcgagggaggcgccgtga

SEQ ID NO: 1406 - protein, 654 aa, Myceliophthora thermophilia
MPPSSSSSAARWSLRLSLLAGGVAVVFSLQPQLLTRGVFGQSRSSSGIHDSVQTYCYQSVRTAAIVAASGENGIEEPNCFSVSPDGRFARVFSSRSSRPRAHDDGSEAYAVRPGHVLPGLWDGHGHLIQYGEFLHSANLFGAASPEEVRRRLREYLDANPGVGSKEEWGRGIGWDQMTMGGMPFADMLEEDEALRGKYLMLDRVDVHCTWVSRAVLDLLPADLPEEVPGGEIVRTPGMGVFCDNAMDLVTSLWPKPSKERRKKFVASAMRELHKVGLVGMHDAGVVPADVAMYDEMSRTEDWTLRVYAMLECPERNTFCPDEAVQVQHPDGMLSVRSVKLFADGALGSWGSAMIEPYSDRPDTSGSLLVNASTLTSLARSWSAAGFQVNIHAIGDLANRLAIDALEASLKDLCPDSQDLAACQSRHRFRIEHSQIIHPADQQRLHAIGIIPSIQPTHATSDMAYAELRLGEERTRTEAYRMRSLLDISPVLGSDFPVEPPNPLEGVYAAVTRKSPHTGMGPPGYEDGWHVEEALTVEQALDGFTRGVARGAFMDGQAGVIAEGAFADWIVLDEDVMAVEAEEIRRLRVRETSLSVMENLEHPHLIRSGQAIRVSIPQVRPDALSHHITLACSKRCPGTSRPCMARDIVGAREAP

SEQ ID NO: 1407 - protein, 626 aa, Myceliophthora thermophilia
LQPQLLTRGVFGQSRSSSGIHDSVQTYCYQSVRTAAIVAASGENGIEEPNCFSVSPDGRFARVFSSRSSRPRAHDDGSEAYAVRPGHVLPGLWDGHGHLIQYGEFLHSANLFGAASPEEVRRRLREYLDANPGVGSKEEWGRGIGWDQMTMGGMPFADMLEEDEALRGKYLMLDRVDVHCTWVSRAVLDLLPADLPEEVPGGEIVRTPGMGVFCDNAMDLVTSLWPKPSKERRKKFVASAMRELHKVGLVGMHDAGVVPADVAMYDEMSRTEDWTLRVYAMLECPERNTFCPDEAVQVQHPDGMLSVRSVKLFADGALGSWGSAMIEPYSDRPDTSGSLLVNASTLTSLARSWSAAGFQVNIHAIGDLANRLAIDALEASLKDLCPDSQDLAACQSRHRFRIEHSQIIHPADQQRLHAIGIIPSIQPTHATSDMAYAELRLGEERTRTEAYRMRSLLDISPVLGSDFPVEPPNPLEGVYAAVTRKSPHTGMGPPGYEDGWHVEEALTVEQALDGFTRGVARGAFMDGQAGVIAEGAFADWIVLDEDVMAVEAEEIRRLRVRETSLSVMENLEHPHLIRSGQAIRVSIPQVRPDALSHHITLACSKRCPGTSRPCMARDIVGAREAP

SEQ ID NO: 1408 - DNA, 1134 bp, Myceliophthora thermophilia
atgcaggcgccatggacttggacgccatcccgcctggctgttcgcggcaccagagtctcacgttcattgcaacaatgcgcattctcctcctctagcccacgcgccttcgcgcgctgctcggcgcgctcactcgcctcgtcgacacaacgcgcaagacatagacgagcaacatcatcattggggtcaccccaacagccggcacgctcacagccgcccctgactcccaccccagtcccaagccaaacccgcctcgcctcctcctcggcctcgtcccgctggaagctccgccagggctccgaccccttcgcccgcgccgcccgcgtgcaggggctcaagtcgcgggccgccttcaagctgctcgagctggacgcaaagtaccacctcttccggcgcggccggggccaggtggtggtcgacctcggctacgcgccggggagctggtcgcaggtggccgtcgaccgcaccgcgcccaacggcaccgtcgtcggcatcgacatcatccccgcccagccaccccgcggggtgagcacgatccagggcaacttcctgagccccggcgtgcgggacatggtcaagcagttcctcctggacgcggagaggaagaggagggccgagagggccgctgccgggaagggcaagaaggtggaggaggaggaggaggcggagcgagagggtggggacgagaacggggtgcagggcggaggggcgctgaagtggtggctgatcgcccgagttacatcgacctggagcggatggcggcgaagcagagtagtcctcagcgacatgtcagcaccctggccccagacccacggcttctccatcaacagtttgagtaacccgtatatcaggatgatgaacacgagcggcatcgccttcaaagaccacgcagggagcatggacctttgccgtgctgcgctatcctttgcgtccgagacgctcaagcccggcggccactttgtgtgcaagttttaccagggagccgaggacaaggctttcgagatgctcctgaaaaagttgtttgccaaagtccaccgggagaagcccgaatcgtcacgcagtgaatcaagagaggcgttttttgtcgcgctcaagagaaaaggggatgtgacattggaggacattgaggttcaatag

SEQ ID NO: 1409 - protein, 377 aa, Myceliophthora thermophilia
MQAPWTWTPSRLAVRGTRVSRSLQQCAFSSSSPRAFARCSARSLASSTQRARHRRATSSLGSPQQPARSQPPLTPTPVPSQTRLASSSASSRWKLRQGSDPFARAARVQGLKSRAAFKLLELDAKYHLFRRGRGQVVVDLGYAPGSWSQVAVDRTAPNGTVVGIDIIPAQPPRGVSTIQGNFLSPGVRDMVKQFLLDAERKRRAERAAAGKGKKVEEEEEAEREGGDENGVQGGGALKWWLIARVTSTWSGWRRSRVVLSDMSAPWPQTHGFSINSLSNPYIRMMNTSGIAFKDHAGSMDLCRAALSFASETLKPGGHFVCKFYQGAEDKAFEMLLKKLFAKVHREKPESSRSESREAFFVALKRKGDVTLEDIEVQ

SEQ ID NO: 1410 - protein, 340 aa, Myceliophthora thermophilia
RCSARSLASSTQRARHRRATSSLGSPQQPARSQPPLTPTPVPSQTRLASSSASSRWKLRQGSDPFARAARVQGLKSRAAFKLLELDAKYHLFRRGRGQVVVDLGYAPGSWSQVAVDRTAPNGTVVGIDIIPAQPPRGVSTIQGNFLSPGVRDMVKQFLLDAERKRRAERAAAGKGKKVEEEEEAEREGGDENGVQGGGALKWWLIARVTSTWSGWRRSRVVLSDMSAPWPQTHGFSINSLSNPYIRMMNTSGIAFKDHAGSMDLCRAALSFASETLKPGGHFVCKFYQGAEDKAFEMLLKKLFAKVHREKPESSRSESREAFFVALKRKGDVTLEDIEVQ

SEQ ID NO: 1411 - DNA, 999 bp, Myceliophthora thermophilia
atgcgcctcctctccgtcctctccctcgccctgggagggctgtccctcgcctccgccgtcagatccaaaaagacgtccgaggagcgcttccagctctaccacggcaaagcgctctcctcgagccccatcaagctgggcgactcgtcgtaccgggagctgacggcgacgccgcgcgactacgcggtggcggtgctcctgacggcgatggagtcgcggtacggctgccagatgtgccgcgagtttcagcccgagtgggagctgctggcgcgcagctggacgagcggggaccgcaagggcgagtcgcgggtcgtgttcgggacgctggactttggggatgggagggaagtctttatgagtttgggtctgcaaacggcgccggtgctgttcttcttcccgcctacgactggccctcacgccgctgcttcgcccgatgcggtccgatatgatttcacgggcggagcccaagctgccgaggtagtacaccactggctatcacgacaccttcccgaccgcccgcacccgcccatcaagcggccaatcaactggatgcgttggatctcgaccttcgtcatgctctcgggcgccctgaccgcctcctacgtcgcgtggccatacgtgcttcccattatccagagccgcactgtctgggccgccgttacgctcatctcgatcttgctcttcaccagcgggcacatgtttaatcacatccggaacgtgccttatgtcgccggagacggtcgcggcggtattagctatttcgcaggcggctttcagaaccaatacggcctagaaacgcagattgtggctgccttgtatggtatcctcactctttccagcatttcccttgccgttaaggttccccggataggcgaccccaggtatcagggtatcgccttcgtcgcctggttcggcgtcatggtcctggtgtacagcctcctcctcagcatcttccggggaaagaacccgggctacaccttttccctgccgcccttcatgtaa

SEQ ID NO: 1412 - protein, 332 aa, Myceliophthora thermophilia
MRLLSVLSLALGGLSLASAVRSKKTSEERFQLYHGKALSSSPIKLGDSSYRELTATPRDYAVAVLLTAMESRYGCQMCREFQPEWELLARSWTSGDRKGESRVVFGTLDFGDGREVFMSLGLQTAPVLFFFPPTTGPHAAASPDAVRYDFTGGAQAAEVVHHWLSRHLPDRPHPPIKRPINWMRWISTFVMLSGALTASYVAWPYVLPIIQSRTVWAAVTLISILLFTSGHMFNHIRNVPYVAGDGRGGISYFAGGFQNQYGLETQIVAALYGILTLSSISLAVKVPRIGDPRYQGIAFVAWFGVMVLVYSLLLSIFRGKNPGYTFSLPPFM

SEQ ID NO: 1413 - protein, 313 aa, Myceliophthora thermophilia
VRSKKTSEERFQLYHGKALSSSPIKLGDSSYRELTATPRDYAVAVLLTAMESRYGCQMCREFQPEWELLARSWTSGDRKGESRVVFGTLDFGDGREVFMSLGLQTAPVLFFFPPTTGPHAAASPDAVRYDFTGGAQAAEVVHHWLSRHLPDRPHPPIKRPINWMRWISTFVMLSGALTASYVAWPYVLPIIQSRTVWAAVTLISILLFTSGHMFNHIRNVPYVAGDGRGGISYFAGGFQNQYGLETQIVAALYGILTLSSISLAVKVPRIGDPRYQGIAFVAWFGVMVLVYSLLLSIFRGKNPGYTFSLPPFM

SEQ ID NO: 1414 - DNA, 423 bp, Myceliophthora thermophilia
atgatccacggagagacacgtgcccgaaccgggctcaccactttcctgctcgccagcagtgccctagtatgggcatcggccgtcatcgtcatgggcattctggcctactatgtatctcttgattaccgcggtacccatctcatctatagtttggtgattgccgtcttgacatcggcattcttccccctggccttcttcctcgtcatctctccgggattcatcctcctgttcaacctgatcttctcgtacctctggctcgtcgtggtaaccttcatcgcttccgactggagcagcagcaagaacgacaaactgctcacagtcgaagccttcagcttcattgcattcttcttcctcttcttcaacatcatctacgattggcactacggtttcttccgccccgaagtcaggagagcagtcgtatga

SEQ ID NO: 1415 - protein, 140 aa, Myceliophthora thermophilia
MIHGETRARTGLTTFLLASSALVWASAVIVMGILAYYVSLDYRGTHLIYSLVIAVLTSAFFPLAFFLVISPGFILLFNLIFSYLWLVVVTFIASDWSSSKNDKLLTVEAFSFIAFFFLFFNIIYDWHYGFFRPEVRRAVV

SEQ ID NO: 1416 - protein, 113 aa, Myceliophthora thermophilia
VIVMGILAYYVSLDYRGTHLIYSLVIAVLTSAFFPLAFFLVISPGFILLFNLIFSYLWLVVVTFIASDWSSSKNDKLLTVEAFSFIAFFFLFFNIIYDWHYGFFRPEVRRAVV

SEQ ID NO: 1417 - DNA, 543 bp, Myceliophthora thermophilia
atgacatccctgttaccgctgatccaggatatcctccccatgattttgccggcatccgtcaccgttaccaaggctgccgacatccttcccggtgagacagggtccagtgaaaccgcagctgcaacgcccggggtacgggtcattagcaggaacgcggttgtcggcaagacggacaagatgtgcacctcaatcctcattttaaagcccaactcctcctcatcggtacgccaccacggcgaacaagggtgtgcacaacctagcgaagcgactccttctaaaccgccgtgggaagaaaccatcatctacgcagtctccggcaagggtgccattctctcccagcccacgggggacgacgaggagccagaacgccatgacctcgacccgggcgattttgcttttatcccggcctggaccgagcaccaagcagtgaacgactcggaagtcgattggcatcttgtcatcatccgcagcggcagccacccagtcgaggtcaatttgacaggttggggcggcgccgaaatcaaggaaccccccagacaatga

SEQ ID NO: 1418 - protein, 180 aa, Myceliophthora thermophilia
MTSLLPLIQDILPMILPASVTVTKAADILPGETGSSETAAATPGVRVISRNAVVGKTDKMCTSILILKPNSSSSVRHHGEQGCAQPSEATPSKPPWEETIIYAVSGKGAILSQPTGDDEEPERHDLDPGDFAFIPAWTEHQAVNDSEVDWHLVIIRSGSHPVEVNLTGWGGAEIKEPPRQ

SEQ ID NO: 1419 - protein, 155 aa, Myceliophthora thermophilia
ADILPGETGSSETAAATPGVRVISRNAVVGKTDKMCTSILILKPNSSSSVRHHGEQGCAQPSEATPSKPPWEETIIYAVSGKGAILSQPTGDDEEPERHDLDPGDFAFIPAWTEHQAVNDSEVDWHLVIIRSGSHPVEVNLTGWGGAEIKEPPRQ

SEQ ID NO: 1420 - DNA, 756 bp, Myceliophthora thermophilia
atgttatcaaccctctacaagtttgccctccgcgacggactcctctccctctggtccggtctctcggcgtccatcctccgccagtccacctactcgaccgcccgcttcgggctgtacaaccttctttctcggcagatgcagcagaagtcagaaacttcgaagctgtccaccgcgtccaccatcgcatgtgctggggttgcggggggcttggcgggcatgatcgggaacccaacagaggtcatccttgttcgcatgtgcgccgatgccgccaagccgattcccgaacgctttggatactccgacgcggtgaccggcttgtaccgcatcggaaaagaggagggtatcagggtgtttgggagggggttgtctgcgaacgttgttaggagcgtgctcatgaatgtctctcagatcgcgccatatgccgcagcgaaacgaaccatcctctcgaggaccaatcttcgagacgacatccggacgcatgcgcttgcctcgttgttcgctgggacggtagccacgaccgcgtgtgcccccgccgatgtgttgaagagccggatacagaatgccgcaaaggggtccactgtgatgcaagtggtaaaagaaggcctgagtcgggagggcccgatgttcttgatgaaaggatggacgcctgcatggctgaggttgacgccacataccgtcttgacatttgtgttcatggagaagttgcaggacctggtcaatctgacggcctcaacgcccgcccgtgcaactgcttga

SEQ ID NO: 1421 - protein, 251 aa, Myceliophthora thermophilia
MLSTLYKFALRDGLLSLWSGLSASILRQSTYSTARFGLYNLLSRQMQQKSETSKLSTASTIACAGVAGGLAGMIGNPTEVILVRMCADAAKPIPERFGYSDAVTGLYRIGKEEGIRVFGRGLSANVVRSVLMNVSQIAPYAAAKRTILSRTNLRDDIRTHALASLFAGTVATTACAPADVLKSRIQNAAKGSTVMQVVKEGLSREGPMFLMKGWTPAWLRLTPHTVLTFVFMEKLQDLVNLTASTPARATA

SEQ ID NO: 1422 - protein, 228 aa, Myceliophthora thermophilia
SILRQSTYSTARFGLYNLLSRQMQQKSETSKLSTASTIACAGVAGGLAGMIGNPTEVILVRMCADAAKPIPERFGYSDAVTGLYRIGKEEGIRVFGRGLSANVVRSVLMNVSQIAPYAAAKRTILSRTNLRDDIRTHALASLFAGTVATTACAPADVLKSRIQNAAKGSTVMQVVKEGLSREGPMFLMKGWTPAWLRLTPHTVLTFVFMEKLQDLVNLTASTPARATA

SEQ ID NO: 1423 - DNA, 1143 bp, Myceliophthora thermophilia
atggacaaggcctcggaccggacacggcgacagcgcgctctcgggccgcggctgcccaatctcgcgctggtcgccgggctcttcatcaacccatcatcccccatcgccccggccggcgctgccgccgctgccgtcgcggccagacaatgtctccaggctcccgcggctcccgcggcaccccggtctccccggtccctcccgtctccgctccaggtacgcaacgagggcgagcacgtagtcctcgccgactgcgtcgacacggccggcgtgctgtcttcgcagatcgcctacttccccggcgacccgggcccgtcgccccaggacgtggccgtggtcgagaccaaggagggccagacggcgctatgggtcaacgacaacacgtcggccctcttcacgaccacgggcgtcaccttcaccgccctgatcggcccgcacgtcaaggacggcgagttcgccggcatcggcaacaacggctacggcaactttagctgctaccagatgtacagcaaggacctgtacaagtacgccaagaccacatgctcgcaggtgtacctgtgcgaccacagcgctccgcccgcgggctgggtctgggacccgtcgaagggcagtagtaatagcatgtcccacggcaccatcatcggcatcgcggtcggggtcgtcggcggggtgctcttccttctcgcggcggctctggccatttggtatttccggcggtcgaggggcgggcgcgggggcgcggctagccgcctctcgagcaagttgctcaggtcgggcacctcttcgaccgcggcggcatcctcggacgcgggcgagcccaagtctcagacgcagacgcagacgccgatgccgacgccgagcgagttttcgtcgagccagcaccaccagcccgtggtgcagaagataaccggcccttacgagatggatggccggtaccgcgtcgagctggccaacgacaacggcaagtacgagatggacccgcacggccacggcagcgccgagctcgatcctacgtccaagcaacaagaacacgcgacaccttccacccagaaccaggtgtcacccgtcactcccgcgcagtcagattccctgctgcagcatggcggcttcccgccgaggtctccacctccgcagtatgcggaatga

SEQ ID NO: 1424 - protein, 380 aa, Myceliophthora thermophilia
MDKASDRTRRQRALGPRLPNLALVAGLFINPSSPIAPAGAAAAAVAARQCLQAPAAPAAPRSPRSLPSPLQVRNEGEHVVLADCVDTAGVLSSQIAYFPGDPGPSPQDVAVVETKEGQTALWVNDNTSALFTTTGVTFTALIGPHVKDGEFAGIGNNGYGNFSCYQMYSKDLYKYAKTTCSQVYLCDHSAPPAGWVWDPSKGSSNSMSHGTIIGIAVGVVGGVLFLLAAALAIWYFRRSRGGRGGAASRLSSKLLRSGTSSTAAASSDAGEPKSQTQTQTPMPTPSEFSSSQHHQPVVQKITGPYEMDGRYRVELANDNGKYEMDPHGHGSAELDPTSKQQEHATPSTQNQVSPVTPAQSDSLLQHGGFPPRSPPPQYAE

SEQ ID NO: 1425 - protein, 338 aa, Myceliophthora thermophilia
AAVAARQCLQAPAAPAAPRSPRSLPSPLQVRNEGEHVVLADCVDTAGVLSSQIAYFPGDPGPSPQDVAVVETKEGQTALWVNDNTSALFTTTGVTFTALIGPHVKDGEFAGIGNNGYGNFSCYQMYSKDLYKYAKTTCSQVYLCDHSAPPAGWVWDPSKGSSNSMSHGTIIGIAVGVVGGVLFLLAAALAIWYFRRSRGGRGGAASRLSSKLLRSGTSSTAAASSDAGEPKSQTQTQTPMPTPSEFSSSQHHQPVVQKITGPYEMDGRYRVELANDNGKYEMDPHGHGSAELDPTSKQQEHATPSTQNQVSPVTPAQSDSLLQHGGFPPRSPPPQYAE

SEQ ID NO: 1426 - DNA, 1806 bp, Myceliophthora thermophilia
atgcgtctctccggagtcgccgtcgccggcctgcatctatctgtcgccctagctggtatcggaattggggatcatgaacagacgcctctgggtctcggcggcccgtggggtcccatctctcaggggaagaagaaacccaacatcgtgtttatcctgaccgatgaccaagacctgcacttgcagtcgctcgactaccttcccctgattaagaaacatctcatcgacaagggaactttctacaagcgccactactgcaccacggccatctgctgcccgtcccgagtctctctgtggactggcaagctcgcgcacaacacgaatgtgaccgacgtgagcccgccttatggcggataccccaagtttgtgaagcaggggctgaacgaggcctacctcccggtgtggctccaggaggccgggtacgacacgtactacacgggcaagctcttcaacgcgcacacggtcgacaactacgactcgccgtacccggccggctggaacgggaccgagttcctgcttgacccttacacctacatgtacctcaacgccagcttccagcggaaccgcgacccgcccgtcagctacccgaaccagcactcggtggacgtgctgacccagaaggccctctccttcctggacgaggcctcgcagcgccgacgccggacggggacggggggctgggacgaggacggggactacgacgacatcgagtcgcgggtgaccttcacgccgccgatccccgcggcgcggcacgcgcacctgttcgccgacgccgtggtgccgcgcacgccgcacttcaacccggccgagccggcggtggcgacatggggtgccgggtggctgcgtcagctgccgccgcagacggcggccaacgtggccttcaacgaccacttctaccggcagcgcctgcgcgtgctgcagtcggtcgacgagctggtcgacgccgtggtgcgccggctcgaccagctcggcctgctcgccgacacgtacctcttctacacgaccgacaacggcttccacatcggccagcaccgcctgcagccgggcaaggagtgcggcttcgaggaggacatcaacgtgcccctcatcgtgcgcgggcccggcgtcgccccggcccacgtcgccgaccgcctcgtgaccgcccacgtcgacctggccccgaccatcctgcgcctcgccggcgtcgaccccgcccgcctccgcgaccactacggcttcgacggcgaggccatccctctctcccgcccggccatcgacgccgccgcccgctcccgccacgagcacgtcaccgtcgagttctggggcttcgccctgtccgagggcagggcctttcccggccacgaggagcgcctgctgcgcaacaacacgtacaaggccctgcgcgtcatcggcgacgagtataacttgtattatgccgtgtggtgcaataacgagcacgagctctacgacttgacgacggacccctaccagctcaacaacctccttcgcgactcggccaagccccccgccaccctgctgggggtgccgttcgagaaggttgttgcccgtctggactcgctgctgtttgtgctcaagtcgtgcaaggggcagacctgtgtccggccgtggcacgccctgcacccggccggcaacgtccagaacctgcacgacgccctgaacccccgcttcgacgtcttttacgagcagcagcagaagaaggtcagcttcacccgctgcgagatgggctacctcctagatgccgaggggccccagttcgagacggacgggctggtgtatcggcacggggcgagatggagcgaatgggtttga

SEQ ID NO: 1427 - protein, 601 aa, Myceliophthora thermophilia
MRLSGVAVAGLHLSVALAGIGIGDHEQTPLGLGGPWGPISQGKKKPNIVFILTDDQDLHLQSLDYLPLIKKHLIDKGTFYKRHYCTTAICCPSRVSLWTGKLAHNTNVTDVSPPYGGYPKFVKQGLNEAYLPVWLQEAGYDTYYTGKLFNAHTVDNYDSPYPAGWNGTEFLLDPYTYMYLNASFQRNRDPPVSYPNQHSVDVLTQKALSFLDEASQRRRRTGTGGWDEDGDYDDIESRVTFTPPIPAARHAHLFADAVVPRTPHFNPAEPAVATWGAGWLRQLPPQTAANVAFNDHFYRQRLRVLQSVDELVDAVVRRLDQLGLLADTYLFYTTDNGFHIGQHRLQPGKECGFEEDINVPLIVRGPGVAPAHVADRLVTAHVDLAPTILRLAGVDPARLRDHYGFDGEAIPLSRPAIDAAARSRHEHVTVEFWGFALSEGRAFPGHEERLLRNNTYKALRVIGDEYNLYYAVWCNNEHELYDLTTDPYQLNNLLRDSAKPPATLLGVPFEKVVARLDSLLFVLKSCKGQTCVRPWHALHPAGNVQNLHDALNPRFDVFYEQQQKKVSFTRCEMGYLLDAEGPQFETDGLVYRHGARWSEWV

SEQ ID NO: 1428 - protein, 583 aa, Myceliophthora thermophilia
GIGIGDHEQTPLGLGGPWGPISQGKKKPNIVFILTDDQDLHLQSLDYLPLIKKHLIDKGTFYKRHYCTTAICCPSRVSLWTGKLAHNTNVTDVSPPYGGYPKFVKQGLNEAYLPVWLQEAGYDTYYTGKLFNAHTVDNYDSPYPAGWNGTEFLLDPYTYMYLNASFQRNRDPPVSYPNQHSVDVLTQKALSFLDEASQRRRRTGTGGWDEDGDYDDIESRVTFTPPIPAARHAHLFADAVVPRTPHFNPAEPAVATWGAGWLRQLPPQTAANVAFNDHFYRQRLRVLQSVDELVDAVVRRLDQLGLLADTYLFYTTDNGFHIGQHRLQPGKECGFEEDINVPLIVRGPGVAPAHVADRLVTAHVDLAPTILRLAGVDPARLRDHYGFDGEAIPLSRPAIDAAARSRHEHVTVEFWGFALSEGRAFPGHEERLLRNNTYKALRVIGDEYNLYYAVWCNNEHELYDLTTDPYQLNNLLRDSAKPPATLLGVPFEKVVARLDSLLFVLKSCKGQTCVRPWHALHPAGNVQNLHDALNPRFDVFYEQQQKKVSFTRCEMGYLLDAEGPQFETDGLVYRHGARWSEWV

SEQ ID NO: 1429 - DNA, 450 bp, Myceliophthora thermophilia
atggagcgctttgttcctatagtccacgccatcactgcggtctttgcagtcattgagttgggcttgaccgcttacctcgtcagcccatggtgggggacgccgagtgtgctgtccttcatgctcttcaactcgatctggtccctcctggtccttgcctacgtattcttggcgcctctctactttgcccgcttcttccatggcgtggtggcattggttctggaatggattacgatgattttctggttcgccggctcgattgccctcgccgcctggtggggctccccgagatgcggcggcgacacgtactgcggctctaccgaggcggccatcgcctttggcttcttcatctgggcgctctttgccttcctcgttgttgtcgacaccctggccttcatgcgcggccgggggcacagcaccaccgcttatcccaagccccacgccgttgcatag

SEQ ID NO: 1430 - protein, 149 aa, Myceliophthora thermophilia
MERFVPIVHAITAVFAVIELGLTAYLVSPWWGTPSVLSFMLFNSIWSLLVLAYVFLAPLYFARFFHGVVALVLEWITMIFWFAGSIALAAWWGSPRCGGDTYCGSTEAAIAFGFFIWALFAFLVVVDTLAFMRGRGHSTTAYPKPHAVA

SEQ ID NO: 1431 - protein, 126 aa, Myceliophthora thermophilia
AYLVSPWWGTPSVLSFMLFNSIWSLLVLAYVFLAPLYFARFFHGVVALVLEWITMIFWFAGSIALAAWWGSPRCGGDTYCGSTEAAIAFGFFIWALFAFLVVVDTLAFMRGRGHSTTAYPKPHAVA

SEQ ID NO: 1432 - DNA, 4512 bp, Myceliophthora thermophilia
atgctcccactctcacagcttccttggggcatcactgccctcctagttgccccatggctcccttcatcactggttgccgcctcgccatcagtcaatgttgcgcttaaggcagcattcccgtcccccccttatttggtggagttgctagaaacagcagcttccgagaatgcgacggcctattttcctctcctcaaccggattgcacaggggcacttccttgaagccacgaccgacaaggcattatatgagaagtttatcgaagttctgcgcagggatgggcatatggacggggaggccttgtcgaccttcaggttaggcctttccatgcggacggcagcaccccgtgtggaagcacactatcagtactacaccactgcggtggaaccctcgctcccggatgaccaggacaagtgtgggcaatggttcttggttggtggtaaacaatattgcactcccgccctggacgttgcgcacggggatgtcaggggagacgcccaggaacgtgtactgccgtttgatcgcaagatcgggacaggaccccgtgaaatcattctctacgctgatattacgtcgcctgactttggcaacttccatcaagccgccctgaaattggcccagaacggagagggcacgtaccgggttagatacaaaagaaaccctgcacaacgcagagaagccctctccgtcaatggctacggagtggagctcgcgctcaaacggacagactacattgttattgatgaccgggacaccggctccggcgaggcaccccctgatcaaaccccaaaccccattgggtcctcgcaggtggtcctcaacgaggaggaagagatcacagacatcaagccactggaaaagtccgagcttgcgccactgggcatgaaggcggcgtctttcattatgcagagtgatgcgccgtttgagactctgctaaagctcacacaggacttccccaagtactcaacattccttgcggcccacaacgtgtccgccgacttcaaggccgagcatgcgggtaaccggagggtgctgcttcctgagggggtgaacatattgtggatgaatggccttcagctgattgaacgccaaatccaaccgttcggactggtggaattacttcagcgcgagcgcaagctgatcaatggtgttctcgacctcggtcttagcgggcaacaggccatctccctgctgggccacccagaaattgctcaggcaaggtcgggtgacgaagaaccgcgccggttcgactggcgtgatgagattgaagacggtcgggtcatcatttggctcaacaaccttgaaaaggataagcggtaccgcgaattctcgccgagcatctatgccgtgattcaacccatgggccatggtctgccccaaatccggaaggatatcttcaatctggtcgtccctgtggacttcacgaagcctgaggacgtcgaaatggtgacaacacagctcttaggcttcgtgaggcggcttatcccgattcgattcgggctggttccgctcacaccaactggagaagccattgaacaggccaaggtcgtctactatcttttggagaaccacggcctctcagcggtggtgtcctatctggagaagtcgcttgagcagaggaagacggccaggcccgaccagaacatcctgcttgaggccatcaaggaccgacctctgcggccagaggcgagcccgctgccgttcaacgacattttcacctcggagacacacgagaaacaaattcacctcgctaagcactgggttgagcgcctacgcgccggtggcgagattccctccgtcttcctgaatggctttgcaatccctcgggacgaacattgggtcaaggtcatgaatcagaaattgatggtcgatctgcaagctcttcagcacgcagcctattttggacagataaacgacaacgtttgggttcctggcatgttcctggagaacgccgtcgcaaggcgtaattcgttgatattccccgaggatgcgacagatctaaaggtgctcaatgtaaagaagatttacaccgagcaccacgatgtcctcagcaaggtgccaattattgaggctgacgatcagtctatcaaggcagactgggctgctctaacggttatcacggatctggacagtcttgacggccagaaacttctttacttcgccctccagtttcgcagagatcagccgggcgtccgcgtggatattgtgcataacccaaaagacgtcacccgctccgcctcgcagctcaatcaacgcattaaggctcgtgaaagcgaactgtccgcagtcagccggctccttgacctggagaccattctccagagcggtgaggcacaggctgatccaggttacgacgctgccctcgcagccttccttgcaactgccaagcttcaggcgggcgacaacgcgttgatcctcaacggccgtgtcgtcggtcccattcagtcagccgaagatttctcgaaggaggactttgatcagcttctcagcgccgagcgcgcaagccggatcttgcccgttcacaaggcggttgaggacctggggctggacgacaagatctcgggccccttggatgctgccaaggtaacctcggtcaccgctctttctggtatctcggatctcccacaaggcatctttggctcagcaccatctctgaggacaactgctttcaataagctaaactcgacgcacacatcgttcgaagtcggcgatccctcgagggcaaccatattcttggttgccatcatcaaccccgggagcgaggtcggtcaaaagtgggctcccgtactcaaagtgctttccgagcttgaaggcgtccatctcaagatcttcctcaatcctatagaagagctaggggaacttcccgtcaagagattctaccgctacgttcttgagtcggcgcctagctttgacgagcatggcaaggttaaggcgctctcggcaaactttgctggcgttccgctagacacgctgctcgtcgccggcatggatgtgccgccagcatggctagtggcacccaaggtctccgttgacgacctagacaatctgcgcatcaaggacatcaagaccagaagaggcaccgaacatatcgaggcagtttatgagctcgagagtatcttgatcgaaggccactcccgcgaaatgccggcaggccggcctcctaggggtgtgcagctcgtgctgggaactgagcgagacccgcacttcgcggacactattatcatggccaacctgggttacttccagttcaaggctagcccaggcgtctacaacctccgtctgaaggaaggccggagctcagacatcttttccatggagagtgccggcgcccaaggctggacgcccgttcctggcgacaacaccaccgaaattgtgctcataaacttccaaggtaccacgctgtacccacgcctgaagcgtaaacctggaatggaggcagaggacgttctcgaggaatccagcgccaacgccggcaccggtagcgcaatggaatatgtttcaaagggcctcaagttcgccgaaggcctcttcggccgcgccaagtccactcccgagaccaagtccctttccgccacgcagcatgccgacatcaatatcttctccgtcgccagcggtcacctctacgagcgcatgctcaacattatgatggtctcggtcatgcggcacactaaccacaccgtcaaattctggttcatcgagcaattcctgtccccatccttcaagaactctatcccgcacctcgcggcccactacaacttcacctacgagatggtcacgtacaaatggccacactggctgcgccagcaaaaagaaaaacaacgcgagatctggggttacaagatcctcttcctcgacgtgctcttccccctgtccctcgacaaggtaattttcgtcgacgccgaccagattgtgcgcaccgacatgtacgacctcgtcacccacgacctgcacggggcaccctacggattcacgcccatgtgcgactcgcgcaccgagatggagggtttccggttctggaagacgggctactgggcgaactacctcaggggcctgccataccacatcagcgcgctgtacgtggttgacctgcgacggttccgcgagctggccgcgggcgaccggcttcgacagcagtatcacaccctctcggcggacccgcactcgctcgccaatctggaccaggacctgccgaaccacatgcagtttcagatcccaatccactcgctgccgcaagagtggctgtggtgcgagacgtggtgtagcgacgagacgctcgaggaagcaaggacgattgatttgtgtaacaatccccagaccaaggaacccaagctggaccgggcgcgtagacaagtgccggagtggactgagtatgatgaggagattgctgcgctgctgaagcggcggagggaggagcagcaggagcagcaagccggggaagtggagaagaatacgaagagcaggaagtttgaagaagaccgggcgaccgaaacgacgagtgtcaaggacgaattgtaa

SEQ ID NO: 1433 - protein, 1503 aa, Myceliophthora thermophilia
MLPLSQLPWGITALLVAPWLPSSLVAASPSVNVALKAAFPSPPYLVELLETAASENATAYFPLLNRIAQGHFLEATTDKALYEKFIEVLRRDGHMDGEALSTFRLGLSMRTAAPRVEAHYQYYTTAVEPSLPDDQDKCGQWFLVGGKQYCTPALDVAHGDVRGDAQERVLPFDRKIGTGPREIILYADITSPDFGNFHQAALKLAQNGEGTYRVRYKRNPAQRREALSVNGYGVELALKRTDYIVIDDRDTGSGEAPPDQTPNPIGSSQVVLNEEEEITDIKPLEKSELAPLGMKAASFIMQSDAPFETLLKLTQDFPKYSTFLAAHNVSADFKAEHAGNRRVLLPEGVNILWMNGLQLIERQIQPFGLVELLQRERKLINGVLDLGLSGQQAISLLGHPEIAQARSGDEEPRRFDWRDEIEDGRVIIWLNNLEKDKRYREFSPSIYAVIQPMGHGLPQIRKDIFNLVVPVDFTKPEDVEMVTTQLLGFVRRLIPIRFGLVPLTPTGEAIEQAKVVYYLLENHGLSAVVSYLEKSLEQRKTARPDQNILLEAIKDRPLRPEASPLPFNDIFTSETHEKQIHLAKHWVERLRAGGEIPSVFLNGFAIPRDEHWVKVMNQKLMVDLQALQHAAYFGQINDNVWVPGMFLENAVARRNSLIFPEDATDLKVLNVKKIYTEHHDVLSKVPIIEADDQSIKADWAALTVITDLDSLDGQKLLYFALQFRRDQPGVRVDIVHNPKDVTRSASQLNQRIKARESELSAVSRLLDLETILQSGEAQADPGYDAALAAFLATAKLQAGDNALILNGRVVGPIQSAEDFSKEDFDQLLSAERASRILPVHKAVEDLGLDDKISGPLDAAKVTSVTALSGISDLPQGIFGSAPSLRTTAFNKLNSTHTSFEVGDPSRATIFLVAIINPGSEVGQKWAPVLKVLSELEGVHLKIFLNPIEELGELPVKRFYRYVLESAPSFDEHGKVKALSANFAGVPLDTLLVAGMDVPPAWLVAPKVSVDDLDNLRIKDIKTRRGTEHIEAVYELESILIEGHSREMPAGRPPRGVQLVLGTERDPHFADTIIMANLGYFQFKASPGVYNLRLKEGRSSDIFSMESAGAQGWTPVPGDNTTEIVLINFQGTTLYPRLKRKPGMEAEDVLEESSANAGTGSAMEYVSKGLKFAEGLFGRAKSTPETKSLSATQHADINIFSVASGHLYERMLNIMMVSVMRHTNHTVKFWFIEQFLSPSFKNSIPHLAAHYNFTYEMVTYKWPHWLRQQKEKQREIWGYKILFLDVLFPLSLDKVIFVDADQIVRTDMYDLVTHDLHGAPYGFTPMCDSRTEMEGFRFWKTGYWANYLRGLPYHISALYVVDLRRFRELAAGDRLRQQYHTLSADPHSLANLDQDLPNHMQFQIPIHSLPQEWLWCETWCSDETLEEARTIDLCNNPQTKEPKLDRARRQVPEWTEYDEEIAALLKRRREEQQEQQAGEVEKNTKSRKFEEDRATETTSVKDEL

SEQ ID NO: 1434 - protein, 1477 aa, Myceliophthora thermophilia
ASPSVNVALKAAFPSPPYLVELLETAASENATAYFPLLNRIAQGHFLEATTDKALYEKFIEVLRRDGHMDGEALSTFRLGLSMRTAAPRVEAHYQYYTTAVEPSLPDDQDKCGQWFLVGGKQYCTPALDVAHGDVRGDAQERVLPFDRKIGTGPREIILYADITSPDFGNFHQAALKLAQNGEGTYRVRYKRNPAQRREALSVNGYGVELALKRTDYIVIDDRDTGSGEAPPDQTPNPIGSSQVVLNEEEEITDIKPLEKSELAPLGMKAASFIMQSDAPFETLLKLTQDFPKYSTFLAAHNVSADFKAEHAGNRRVLLPEGVNILWMNGLQLIERQIQPFGLVELLQRERKLINGVLDLGLSGQQAISLLGHPEIAQARSGDEEPRRFDWRDEIEDGRVIIWLNNLEKDKRYREFSPSIYAVIQPMGHGLPQIRKDIFNLVVPVDFTKPEDVEMVTTQLLGFVRRLIPIRFGLVPLTPTGEAIEQAKVVYYLLENHGLSAVVSYLEKSLEQRKTARPDQNILLEAIKDRPLRPEASPLPFNDIFTSETHEKQIHLAKHWVERLRAGGEIPSVFLNGFAIPRDEHWVKVMNQKLMVDLQALQHAAYFGQINDNVWVPGMFLENAVARRNSLIFPEDATDLKVLNVKKIYTEHHDVLSKVPIIEADDQSIKADWAALTVITDLDSLDGQKLLYFALQFRRDQPGVRVDIVHNPKDVTRSASQLNQRIKARESELSAVSRLLDLETILQSGEAQADPGYDAALAAFLATAKLQAGDNALILNGRVVGPIQSAEDFSKEDFDQLLSAERASRILPVHKAVEDLGLDDKISGPLDAAKVTSVTALSGISDLPQGIFGSAPSLRTTAFNKLNSTHTSFEVGDPSRATIFLVAIINPGSEVGQKWAPVLKVLSELEGVHLKIFLNPIEELGELPVKRFYRYVLESAPSFDEHGKVKALSANFAGVPLDTLLVAGMDVPPAWLVAPKVSVDDLDNLRIKDIKTRRGTEHIEAVYELESILIEGHSREMPAGRPPRGVQLVLGTERDPHFADTIIMANLGYFQFKASPGVYNLRLKEGRSSDIFSMESAGAQGWTPVPGDNTTEIVLINFQGTTLYPRLKRKPGMEAEDVLEESSANAGTGSAMEYVSKGLKFAEGLFGRAKSTPETKSLSATQHADINIFSVASGHLYERMLNIMMVSVMRHTNHTVKFWFIEQFLSPSFKNSIPHLAAHYNFTYEMVTYKWPHWLRQQKEKQREIWGYKILFLDVLFPLSLDKVIFVDADQIVRTDMYDLVTHDLHGAPYGFTPMCDSRTEMEGFRFWKTGYWANYLRGLPYHISALYVVDLRRFRELAAGDRLRQQYHTLSADPHSLANLDQDLPNHMQFQIPIHSLPQEWLWCETWCSDETLEEARTIDLCNNPQTKEPKLDRARRQVPEWTEYDEEIAALLKRRREEQQEQQAGEVEKNTKSRKFEEDRATETTSVKDEL

SEQ ID NO: 1435 - DNA, 222 bp, Myceliophthora thermophilia
atggtgttgaggccacactcgggggtgaagctcacgccgggatgcgtctcggcgacagcactcatctcgctgtgggtgaaggtggtcgggaagcaggccccggagaacctcaggcgcaacacagaggcggtgcggactgtaggggacaaggggaccggtgaggatggaaggggcaaaacaacaggaacaactgggcacaaagacgctgaggaacgtctctaa

SEQ ID NO: 1436 - protein, 73 aa, Myceliophthora thermophilia
MVLRPHSGVKLTPGCVSATALISLWVKVVGKQAPENLRRNTEAVRTVGDKGTGEDGRGKTTGTTGHKDAEERL

SEQ ID NO: 1437 - protein, 43 aa, Myceliophthora thermophilia
KQAPENLRRNTEAVRTVGDKGTGEDGRGKTTGTTGHKDAEERL

SEQ ID NO: 1438 - DNA, 1011 bp, Myceliophthora thermophilia
atgcggttcagtttcctcactgtcgcctcggccctcgctccatttaccgcggcgttccccttcgggagctttggcctcgcgtcgtgggatgtcgagggctttgccaaagacaatcccattggcgtcaccactggcggcgagggcgggtcaacggtgaccgtggataacgcggccgacttcaaggcagctgttgcgggagacgagcccaagacggtcctcgtcaagggcgagatcaacctgccgtcccggccaaagattggctccaacaagtccgtcattggtgtcggacgcaccgcccacatcaccggcagcggcctcgacgtgttcaactcgaccaacgtcatcatccgcaacctcaagatcagcttcatcgaggacaacgattgcatcaccatccggaactccaccagggtctgggtggaccacaacgagttcgcttccgacatcacgaaaggacccgacgcctacgacggccaagtcgacatcatccgcggttccgactggatcacggtatcgtggaactacttccacgaccactggaagtcgtccctggtcggcaacgacgccaccttccgcgacatcgactttggccacctgcacgtaacctaccaccacaactactggcgcaacgagggtacccgcggcccggccggccgcttcgggcaccagcacgtctacaacaacctctacgtcgacttcctctaccaggccatccactcccgctccgacaaccaggtcctcgtcgagggcaacgtcttccgcggcaagacccgcgaggccctgagcacctacggcctggtgatcccggacgactcgcccaacacttgcacctgcggcgacgaagagctggacggctacgccaacttgggcgccaaaaacgattggggcaaggcgacggtcaacatcacgcaggtcggcaactttcgaaaggcaccgtacaagttcaagttgactcccctgccgttggttgagccgattgtcaagctcggggccggtgtgggcaagatctga

SEQ ID NO: 1439 - protein, 336 aa, Myceliophthora thermophilia
MRFSFLTVASALAPFTAAFPFGSFGLASWDVEGFAKDNPIGVTTGGEGGSTVTVDNAADFKAAVAGDEPKTVLVKGEINLPSRPKIGSNKSVIGVGRTAHITGSGLDVFNSTNVIIRNLKISFIEDNDCITIRNSTRVWVDHNEFASDITKGPDAYDGQVDIIRGSDWITVSWNYFHDHWKSSLVGNDATFRDIDFGHLHVTYHHNYWRNEGTRGPAGRFGHQHVYNNLYVDFLYQAIHSRSDNQVLVEGNVFRGKTREALSTYGLVIPDDSPNTCTCGDEELDGYANLGAKNDWGKATVNITQVGNFRKAPYKFKLTPLPLVEPIVKLGAGVGKI

SEQ ID NO: 1440 - protein, 318 aa, Myceliophthora thermophilia
FPFGSFGLASWDVEGFAKDNPIGVTTGGEGGSTVTVDNAADFKAAVAGDEPKTVLVKGEINLPSRPKIGSNKSVIGVGRTAHITGSGLDVFNSTNVIIRNLKISFIEDNDCITIRNSTRVWVDHNEFASDITKGPDAYDGQVDIIRGSDWITVSWNYFHDHWKSSLVGNDATFRDIDFGHLHVTYHHNYWRNEGTRGPAGRFGHQHVYNNLYVDFLYQAIHSRSDNQVLVEGNVFRGKTREALSTYGLVIPDDSPNTCTCGDEELDGYANLGAKNDWGKATVNITQVGNFRKAPYKFKLTPLPLVEPIVKLGAGVGKI

SEQ ID NO: 1441 - DNA, 1275 bp, Myceliophthora thermophilia
atgcgtattcacctccgtggttttgccatcctcggcctcgcggtcgaagctgccatcgcacgaccaccaggtcctccagatacccctcgttctccggggcctcctcttccccccggtcctccgggtccccctgggccacctgtaccgccggactcagaccatctccctccctttagcaccttcagcaaccgtgttatttacacaccacccaagggtggtcgggcggtgtacccgcgtgtcgctgagctcagtgacggcactctcctggtgaccgcgagtgtcagcggcgttgtcgggcccgacaacctcccggcgttccccatctttgagagcaaagatggcggcgtcacctaccagtggatctcgaatctcaccgaccaggtcaacggctggggcatgagcgcgcagcccgccctgctcgagctgcgacagccccttgggggcttcaagcccggcaccgtcctggcgtcgggaaacagctggagcgacaagggaacccgtatcgacctgtacgcaagcacagacaaggggcggacctgggagtttgtgagccatgctgccgagggcggccgtcccaacaccaccaatggcgccacgcccgtgtgggagccgttcctcctcacttacgacgacgagctcatcgtctactactccgaccagcgcgatcctaggcatggccagaagctcgcccaccagacatcccgtgatctcaagcactggggccccgttgtcaacgacgtcgcctatgacgaatacctcgcccggcccggcatgactgtcgtcgcgtacatcccgcccatcaagaagtggattcttgtgtatgaacggccgatcggcaactcgagctcccacggggtgaactatcctgttcactaccgcctcgccgatgacccgaggaagtttgacgcggcccagccgatccccattgtcatcgagaccagggaggggacgaccgtggcgccaaatgcatcgccctatgttgtctggtcccccgtgggaggacccaagggcacgatcatcgtgtcagatgcggaccggagctggctctacctcaacaccgccggaggcgacccggataagtggcagatcagggagtgcggtcaaccagaggcatacagccgcgcactccacgttttcgagaaacggccggatcgcctgatggtgttgggaggggatacctttgacggaaacggtgtcggcgcgctgacagacagcgttctcgacatgaacaagtttctgcaaggcggctattctgcacctggccagtcaccctaa

SEQ ID NO: 1442 - protein, 424 aa, Myceliophthora thermophilia
MRIHLRGFAILGLAVEAAIARPPGPPDTPRSPGPPLPPGPPGPPGPPVPPDSDHLPPFSTFSNRVIYTPPKGGRAVYPRVAELSDGTLLVTASVSGVVGPDNLPAFPIFESKDGGVTYQWISNLTDQVNGWGMSAQPALLELRQPLGGFKPGTVLASGNSWSDKGTRIDLYASTDKGRTWEFVSHAAEGGRPNTTNGATPVWEPFLLTYDDELIVYYSDQRDPRHGQKLAHQTSRDLKHWGPVVNDVAYDEYLARPGMTVVAYIPPIKKWILVYERPIGNSSSHGVNYPVHYRLADDPRKFDAAQPIPIVIETREGTTVAPNASPYVVWSPVGGPKGTIIVSDADRSWLYLNTAGGDPDKWQIRECGQPEAYSRALHVFEKRPDRLMVLGGDTFDGNGVGALTDSVLDMNKFLQGGYSAPGQSP

SEQ ID NO: 1443 - protein, 404 aa, Myceliophthora thermophilia
RPPGPPDTPRSPGPPLPPGPPGPPGPPVPPDSDHLPPFSTFSNRVIYTPPKGGRAVYPRVAELSDGTLLVTASVSGVVGPDNLPAFPIFESKDGGVTYQWISNLTDQVNGWGMSAQPALLELRQPLGGFKPGTVLASGNSWSDKGTRIDLYASTDKGRTWEFVSHAAEGGRPNTTNGATPVWEPFLLTYDDELIVYYSDQRDPRHGQKLAHQTSRDLKHWGPVVNDVAYDEYLARPGMTVVAYIPPIKKWILVYERPIGNSSSHGVNYPVHYRLADDPRKFDAAQPIPIVIETREGTTVAPNASPYVVWSPVGGPKGTIIVSDADRSWLYLNTAGGDPDKWQIRECGQPEAYSRALHVFEKRPDRLMVLGGDTFDGNGVGALTDSVLDMNKFLQGGYSAPGQSP

SEQ ID NO: 1444 - DNA, 435 bp, Myceliophthora thermophilia
atgctcgttccgactttcactcccctcctcgccctctcaaccaccatcttgggcgccgtcacggcaaccccgattaacactaacggcgctccggaggctgccaacccgaccaagcgcgccgtcctcacctccggccgcttcacctactacaatcccggcctgggcgcctgcggccatagcaacggcgacggcgacctggtcgtcgccctcagccacgccgacttcgatccctccacgcccaacggcaaccccaacaacaaccccctctgcggccgccgcctgcgcgcctcctacgcgggcaggtcggtcgacgtcaccgtcgttgaccgctgcgtggcctgcaactcgggcgacctcgacctcagcccggccgctttccaggcgctcgcggatctctctgtcggcgtcatcggcggcacttggaactggatctga

SEQ ID NO: 1445 - protein, 144 aa, Myceliophthora thermophilia
MLVPTFTPLLALSTTILGAVTATPINTNGAPEAANPTKRAVLTSGRFTYYNPGLGACGHSNGDGDLVVALSHADFDPSTPNGNPNNNPLCGRRLRASYAGRSVDVTVVDRCVACNSGDLDLSPAAFQALADLSVGVIGGTWNWI

SEQ ID NO: 1446 - protein, 122 aa, Myceliophthora thermophilia
TPINTNGAPEAANPTKRAVLTSGRFTYYNPGLGACGHSNGDGDLVVALSHADFDPSTPNGNPNNNPLCGRRLRASYAGRSVDVTVVDRCVACNSGDLDLSPAAFQALADLSVGVIGGTWNWI

SEQ ID NO: 1447 - DNA, 1035 bp, Myceliophthora thermophilia
atgcctccgagattcaccctgacgctcaatgcgtccgcggccctgcgaatcgggcgatcggttgtacggcacgtgcgatactcgaccgaggccaacacgggacccctcatccgcgtcacgaaccttcccgcgcccaattcgggtcacattcgcatcctcgagctcaaccggcctgcggcgcgcaatgccatatcgcgagcgctactatcctctcttcgcgacgagatcgacgctgtacacgaacagtacgacgccgcgacgggggaggaacttccgaccccgtcgtggaacaagcgcttcggcggcgtggcgggtgatgaccaaaagggcccaacaagagccctgattctcgcctcagcggttgacacatccttttgtgccggcgcagacctgaaagagcgcaagtccttcacccaagaggaaaccgccgcgtttctcctcaacctccgcacgaccctcacctccctctccgccctgcccatccccaccatctccgccatctcctccctcgccctcggcggcggcctcgagctggccctggccacccacttccgcgtgctcacctccaacgccgtcgtcggcctgcccgagacccgcctgggcatcatccccggcgccggcggcacctaccgcctgccggccctgatcggcatcccgcgggcccgcgacctcatcctgacgggccggcgcgtgtcggcgcccgaggcgtactttctggggctggcggaccgcctggtcgaggtggcccccgagagcgaggagcaggccaaggagtgggacgccatggaggacagcgcgcgcgagaaggcggtgctggacgtggcgcgccgcgccgcgctgagcgaggcggtccggctggccaccgagatctgcgagggcgggccgatcgcgatccgcgccgcgatccgcgccgtcgaggagccgagagaggcggtcgagaatcagatgtacgagcgggtggtccggacggaggatcgggacgaggcgctgcgcgcgtttgcggaaaagaggaagcctgtcttcaaggggaggtga

SEQ ID NO: 1448 - protein, 344 aa, Myceliophthora thermophilia
MPPRFTLTLNASAALRIGRSVVRHVRYSTEANTGPLIRVTNLPAPNSGHIRILELNRPAARNAISRALLSSLRDEIDAVHEQYDAATGEELPTPSWNKRFGGVAGDDQKGPTRALILASAVDTSFCAGADLKERKSFTQEETAAFLLNLRTTLTSLSALPIPTISAISSLALGGGLELALATHFRVLTSNAVVGLPETRLGIIPGAGGTYRLPALIGIPRARDLILTGRRVSAPEAYFLGLADRLVEVAPESEEQAKEWDAMEDSAREKAVLDVARRAALSEAVRLATEICEGGPIAIRAAIRAVEEPREAVENQMYERVVRTEDRDEALRAFAEKRKPVFKGR

SEQ ID NO: 1449 - protein, 324 aa, Myceliophthora thermophilia
VVRHVRYSTEANTGPLIRVTNLPAPNSGHIRILELNRPAARNAISRALLSSLRDEIDAVHEQYDAATGEELPTPSWNKRFGGVAGDDQKGPTRALILASAVDTSFCAGADLKERKSFTQEETAAFLLNLRTTLTSLSALPIPTISAISSLALGGGLELALATHFRVLTSNAVVGLPETRLGIIPGAGGTYRLPALIGIPRARDLILTGRRVSAPEAYFLGLADRLVEVAPESEEQAKEWDAMEDSAREKAVLDVARRAALSEAVRLATEICEGGPIAIRAAIRAVEEPREAVENQMYERVVRTEDRDEALRAFAEKRKPVFKGR

SEQ ID NO: 1450 - DNA, 990 bp, Myceliophthora thermophilia
atgttctcctccttgaaccggcctgcgggccagtcgaccttcggcggtggttcgactagtttgtttgggccagcgcttggcacttccactcaacaacaacagcagcagcagcagcagccgcaatcgcagccgcagcagcaacagcagcagccggtgcttggtcagctgaacccaaacccgcagcccggcgggtcattatggcaacccaacagtcacacgagttatcagaagccgatccccgagcagatgaagctcattatggaaaaatgggatccgaccaaccctaactgcgcctttaagacctacctctacaacaaagtcgacgagcacactgtcccactgtacggtcccggtcccaatgaggacccgaaggagtgggaagaggcgcttcagcgcaagccagcgcccaactacatccccgtgctctgcgcagggttcccctccatcatcgcgcgcgtcacgctgcagaggcgcgtaatcgtcgagttcaacaacaagctgcacgccatcaacgccagcctggacgcgatcctgtcgcgacacgacctcgagcacacggtgcgtgccttcaatgcgcgccgccgccacgccgagctgagcaagcgctgcctggtactcgcctcgcgagtgcaggtgctgcgcaaccgcgggtacgccctcagcggcgacgaggacgagctcaaacagaagctggcccgcatcgacaagagcatccaggacccggccctcagcgcgcgcatggaggagctgtggagccgcctgattatcctgaggggttatgcggaaaatttgaaggacgagatcaacaagcccggttttgcggacggcgatgggttagatgaggaagtcgaggccaaggcgaaaaagatcctcgaggattatgacaaacagctgcaacatctcaagacgcaggtcgaggaggccaagaaagactttgaggcatgggaagcccaacacaatccgacaccggcgccggccacgtctgcttaa

SEQ ID NO: 1451 - protein, 329 aa, Myceliophthora thermophilia
MFSSLNRPAGQSTFGGGSTSLFGPALGTSTQQQQQQQQQPQSQPQQQQQQPVLGQLNPNPQPGGSLWQPNSHTSYQKPIPEQMKLIMEKWDPTNPNCAFKTYLYNKVDEHTVPLYGPGPNEDPKEWEEALQRKPAPNYIPVLCAGFPSIIARVTLQRRVIVEFNNKLHAINASLDAILSRHDLEHTVRAFNARRRHAELSKRCLVLASRVQVLRNRGYALSGDEDELKQKLARIDKSIQDPALSARMEELWSRLIILRGYAENLKDEINKPGFADGDGLDEEVEAKAKKILEDYDKQLQHLKTQVEEAKKDFEAWEAQHNPTPAPATSA

SEQ ID NO: 1452 - protein, 302 aa, Myceliophthora thermophilia
TSTQQQQQQQQQPQSQPQQQQQQPVLGQLNPNPQPGGSLWQPNSHTSYQKPIPEQMKLIMEKWDPTNPNCAFKTYLYNKVDEHTVPLYGPGPNEDPKEWEEALQRKPAPNYIPVLCAGFPSIIARVTLQRRVIVEFNNKLHAINASLDAILSRHDLEHTVRAFNARRRHAELSKRCLVLASRVQVLRNRGYALSGDEDELKQKLARIDKSIQDPALSARMEELWSRLIILRGYAENLKDEINKPGFADGDGLDEEVEAKAKKILEDYDKQLQHLKTQVEEAKKDFEAWEAQHNPTPAPATSA

SEQ ID NO: 1453 - DNA, 2412 bp, Myceliophthora thermophilia
atgcaattctgcgttgctctcttattgggagttgtatctggcgtctgggcggcctactggatggaggaccttcaccgccagggtctcgcaccgttcgctgaagcaagcagatacagcgtcttcagaaatgtgaagcagtggggagctaagggagatggagttaccgacgataccgcagccatcaatgccgcaattagcgacggcgatcgttgcggcggcccggactgtgttggctcaaccacgacgccggccattgtttatttccctcccggaacttacatgatcagttcgccaattttcagctactactatacccaaattattggcgaccctaccaatatgccagtcatcaaagcttcccaaaactttcctaccaatgtgctcgccatgctggatgccgaccgttacatggacaacggaaggctcaactttctcgcaacaaacgtcttcttcagacagcttcgcaacctcgtctttgacacaacggctgttcgtgggacgatcaccggaatccattggccatcctcccaagcgaccctggtccagaactgcgtcttcaagctttcctctagagaagatgacacccacgtcggtattttcatggaagaagggagcgggggcatgatggcagaccttatattccacggcggcaaatacggcgctcggtttggcaaccagcagtacacgatgcgaaatctaacattctatgactgcgatacggccatcgagcagatatggaattggggatggacgtacaaatcgcttaaggttgttggttcccgcgtaggtatcaacatgtcttcaagcgatgttggctcagtcactctgctcgacagctcgtttgtcaatgtcagcacagctttgatatctggccgcattcccggaaacaagattggtcttggatcactgctgatccagaatgtcgaatacaaaaacgttccgacagtattggcagaagctgatgggaggccgcttctattgggagacgcgaacgggacagtctacgacagaggttacgcaagaggcaacacatatgctccgaatgggcccttgtggcttgagggacacgagtttaacttttctcaaccttcgacccttaaaatcggagaccggtactacgagagatcaaaaccgcagtacgaggactactcttcttcggactttatatcagcccgagatcacaatgccttcggcgatgggcgcaccgacgacacggacatgatcaacaaggtcatccaggctgccgcgaattcatcatacatcgccttcttagatgccggttattacagggtcacagataccatattcatcccacccaacactcgagtcatgggcgaaggactcgccaccgtcatcatggggacgggggagaagttctcggatccaaataacccacgccctgtggtacaggttgggaagcttggtgatactgggtttgtcgaaattaacgacctcatcgcgtcgacgcaggggccagctgcaggcgccatcatgatcgagtacaatctcaacacgccagcagctgagagcatgtgtagtctgggaagccccccgtcggggatgtgggatgtccatgtccgcgtcggtggcttcagaggatctcagcttcaagttgctgagtgtcccacgacccccgagaggcttgactacgtcaacccgtcatgcatcgctggttatatgggtatgcatatctctccgagcgctcgaaatctgtacctggaaaacagctggatatgggtggcagaccatgacgttgatgattggaaccagacccaaatcagcgtcttcgtggcacggggaatgctggttcaggggagccgtatctggttggttggaagctctgttgagcatcacgcgttgtaccagtaccagctgctcaacgcttcggatgtctggatggggcagatccaaacagaaaccccttactaccaacccaacccaccagcatcgtaccctttcacccagctgaacgacagcattcgcgatcctgattttacagttgactgcagggaacgcgagacggagaactccttgagctcacaaggtaacccgtcatgcgcaatggcatggggacttcgcattattggctcccagaatgtggtggtgttcggagcgggcctgtacagtttcttcaacaattacaacacgagctgcagcaccgtcgagtcgggtgagaactgccaggcgcgcattttctgggttggccaggacacgtccgacggagctgaacgccaaggtagcgctgaaggcgaggagatgctagcagtggaggtgtacaacctcaacacgatcggcagcgtcatcatgatcacccaatctgggttggatatggcgacatgggctcagaacagggcgacgtttgcgagcacactggctgctttccgttctgagggccacaggatggcgctatag

SEQ ID NO: 1454 - protein, 803 aa, Myceliophthora thermophilia
MQFCVALLLGVVSGVWAAYWMEDLHRQGLAPFAEASRYSVFRNVKQWGAKGDGVTDDTAAINAAISDGDRCGGPDCVGSTTTPAIVYFPPGTYMISSPIFSYYYTQIIGDPTNMPVIKASQNFPTNVLAMLDADRYMDNGRLNFLATNVFFRQLRNLVFDTTAVRGTITGIHWPSSQATLVQNCVFKLSSREDDTHVGIFMEEGSGGMMADLIFHGGKYGARFGNQQYTMRNLTFYDCDTAIEQIWNWGWTYKSLKVVGSRVGINMSSSDVGSVTLLDSSFVNVSTALISGRIPGNKIGLGSLLIQNVEYKNVPTVLAEADGRPLLLGDANGTVYDRGYARGNTYAPNGPLWLEGHEFNFSQPSTLKIGDRYYERSKPQYEDYSSSDFISARDHNAFGDGRTDDTDMINKVIQAAANSSYIAFLDAGYYRVTDTIFIPPNTRVMGEGLATVIMGTGEKFSDPNNPRPVVQVGKLGDTGFVEINDLIASTQGPAAGAIMIEYNLNTPAAESMCSLGSPPSGMWDVHVRVGGFRGSQLQVAECPTTPERLDYVNPSCIAGYMGMHISPSARNLYLENSWIWVADHDVDDWNQTQISVFVARGMLVQGSRIWLVGSSVEHHALYQYQLLNASDVWMGQIQTETPYYQPNPPASYPFTQLNDSIRDPDFTVDCRERETENSLSSQGNPSCAMAWGLRIIGSQNVVVFGAGLYSFFNNYNTSCSTVESGENCQARIFWVGQDTSDGAERQGSAEGEEMLAVEVYNLNTIGSVIMITQSGLDMATWAQNRATFASTLAAFRSEGHRMAL

SEQ ID NO: 1455 - protein, 786 aa, Myceliophthora thermophilia
AYWMEDLHRQGLAPFAEASRYSVFRNVKQWGAKGDGVTDDTAAINAAISDGDRCGGPDCVGSTTTPAIVYFPPGTYMISSPIFSYYYTQIIGDPTNMPVIKASQNFPTNVLAMLDADRYMDNGRLNFLATNVFFRQLRNLVFDTTAVRGTITGIHWPSSQATLVQNCVFKLSSREDDTHVGIFMEEGSGGMMADLIFHGGKYGARFGNQQYTMRNLTFYDCDTAIEQIWNWGWTYKSLKVVGSRVGINMSSSDVGSVTLLDSSFVNVSTALISGRIPGNKIGLGSLLIQNVEYKNVPTVLAEADGRPLLLGDANGTVYDRGYARGNTYAPNGPLWLEGHEFNFSQPSTLKIGDRYYERSKPQYEDYSSSDFISARDHNAFGDGRTDDTDMINKVIQAAANSSYIAFLDAGYYRVTDTIFIPPNTRVMGEGLATVIMGTGEKFSDPNNPRPVVQVGKLGDTGFVEINDLIASTQGPAAGAIMIEYNLNTPAAESMCSLGSPPSGMWDVHVRVGGFRGSQLQVAECPTTPERLDYVNPSCIAGYMGMHISPSARNLYLENSWIWVADHDVDDWNQTQISVFVARGMLVQGSRIWLVGSSVEHHALYQYQLLNASDVWMGQIQTETPYYQPNPPASYPFTQLNDSIRDPDFTVDCRERETENSLSSQGNPSCAMAWGLRIIGSQNVVVFGAGLYSFFNNYNTSCSTVESGENCQARIFWVGQDTSDGAERQGSAEGEEMLAVEVYNLNTIGSVIMITQSGLDMATWAQNRATFASTLAAFRSEGHRMAL

SEQ ID NO: 1456 - DNA, 1464 bp, Myceliophthora thermophilia
atgcccgcagccatgtcccactttggcgtcatgctgggcgtcttgctgattgtgtggtgcgggctcacgtcagcttttggtctgtaccttcaggcacgctgcgctcgctacctcgataggggaacttcgtccttcttcgcgctctcgcagatcacgtatccgaacgctgctgttgtgttcgatgctgccatcgcgataaaatgcttcggcgtgggcgtttcctacatgatcatcatcggggacctgatgccaggcgtggcggaatcgtttgggagtgctgactggggtctgccgtttctggacgaccgcaagttctggatcacggccttctttttgctcttcattatcccgctgagcttccccaggaggctagattcgctcaagtacacgagcatggtcgcattgcttgcgatcggctatctcatcatcctggtggcctaccactttgccgctgatgagatcccgaacgaacgggatatccggatcattacgtgggagggaccagtggctgcgctcagcagtctgccggtggtcatttttgcctacacgtgccaccagaacatgttctcgattctgaacgagatcaaggacaactcccccggcagtattgtcgccgttatcggatccagcatcggatccgccgcctttatctacgtcctggtcgccatcaccgggtacttcaccttcggcaatgacgtcaaggggaacatagtcagcatgtatcccccttccgtcgcctctacgatcgccaaggcagccatcgttgccctggtcaccttcagcatcccgctgcagatccacccctgccgcgcctccatcgacgcgcagccagcggtccccaagtgtcgcgagcgttacctcggccagcggcggcagcataccgctctccccgcgggcggcttgtggctcggcacttccccctcagccctcgacagccacggcgcgccggtcgccgtcatgtcggagctgcgcttcgccctcatcaccagcgccatcctcgtgcttagctacatcacggccctgcgcgtgtcgacgctcgaccgcgtgctggcctacgtcggcagcaccggctccaccgccatctccttcatcctcccgggcctgttctactacaagatcagcgaccccgatagcatctaccaccagcgcctgtccaaggaggacgacgacgcggtgtacagcgacgaggccgacggccggggtctcgatctcgacgactgcgacaacgacgaggaggacgcgctcgcgacgagcgtgacgagcctgaggtccgcggccagcctggccgggtcggcggcggcgcggtcgagaggcgggaggggaggccgatggcggcggaagtggaggtgggacctggagcacctcgagacgggcctgctgcgcaagctggccgtgtgcctgtcggcgtacggcgtgtgcgtcatggtggtgtgcctggggatgaacgcgttcttttcgcactga

SEQ ID NO: 1457 - protein, 487 aa, Myceliophthora thermophilia
MPAAMSHFGVMLGVLLIVWCGLTSAFGLYLQARCARYLDRGTSSFFALSQITYPNAAVVFDAAIAIKCFGVGVSYMIIIGDLMPGVAESFGSADWGLPFLDDRKFWITAFFLLFIIPLSFPRRLDSLKYTSMVALLAIGYLIILVAYHFAADEIPNERDIRIITWEGPVAALSSLPVVIFAYTCHQNMFSILNEIKDNSPGSIVAVIGSSIGSAAFIYVLVAITGYFTFGNDVKGNIVSMYPPSVASTIAKAAIVALVTFSIPLQIHPCRASIDAQPAVPKCRERYLGQRRQHTALPAGGLWLGTSPSALDSHGAPVAVMSELRFALITSAILVLSYITALRVSTLDRVLAYVGSTGSTAISFILPGLFYYKISDPDSIYHQRLSKEDDDAVYSDEADGRGLDLDDCDNDEEDALATSVTSLRSAASLAGSAAARSRGGRGGRWRRKWRWDLEHLETGLLRKLAVCLSAYGVCVMVVCLGMNAFFSH

SEQ ID NO: 1458 - protein, 460 aa, Myceliophthora thermophilia
LYLQARCARYLDRGTSSFFALSQITYPNAAVVFDAAIAIKCFGVGVSYMIIIGDLMPGVAESFGSADWGLPFLDDRKFWITAFFLLFIIPLSFPRRLDSLKYTSMVALLAIGYLIILVAYHFAADEIPNERDIRIITWEGPVAALSSLPVVIFAYTCHQNMFSILNEIKDNSPGSIVAVIGSSIGSAAFIYVLVAITGYFTFGNDVKGNIVSMYPPSVASTIAKAAIVALVTFSIPLQIHPCRASIDAQPAVPKCRERYLGQRRQHTALPAGGLWLGTSPSALDSHGAPVAVMSELRFALITSAILVLSYITALRVSTLDRVLAYVGSTGSTAISFILPGLFYYKISDPDSIYHQRLSKEDDDAVYSDEADGRGLDLDDCDNDEEDALATSVTSLRSAASLAGSAAARSRGGRGGRWRRKWRWDLEHLETGLLRKLAVCLSAYGVCVMVVCLGMNAFFSH

SEQ ID NO: 1459 - DNA, 552 bp, Myceliophthora thermophilia
atgaagttcctctcgaccgccctctgcttggcctcatctgtgctggctcttcccagcattggcaaggccgacgcggcacttgttccgcggcagtcggccatccagatcaccgatcagtaccttttcgacctcactcttcctgccttcacagccaagcgtaacgcccgcgatcccccgtccctgatctgggactcggacggctgcagctcctctccggacaacccgttcggcttcccctttgttcccgcttgccaccgccatgacttcggatatcgcaactacaaggcccagaaccggttcacggatgccggcaagctgagcatcgacgacaacttcaagagcgatctgtattatcaatgcgagtctgtcagcgcgaagaccgcgtgccgggccctagccgatgtctactatgctgcggtgagggcgttcggtggcagtacccaagacaagcgcgatgacgacctcgtcaagatctacgaggagaaggtggctatctataacaaggccgtcgaggaggctcaggccaagggcgaactttggactctcgactaa

SEQ ID NO: 1460 - protein, 183 aa, Myceliophthora thermophilia
MKFLSTALCLASSVLALPSIGKADAALVPRQSAIQITDQYLFDLTLPAFTAKRNARDPPSLIWDSDGCSSSPDNPFGFPFVPACHRHDFGYRNYKAQNRFTDAGKLSIDDNFKSDLYYQCESVSAKTACRALADVYYAAVRAFGGSTQDKRDDDLVKIYEEKVAIYNKAVEEAQAKGELWTLD

SEQ ID NO: 1461 - protein, 167 aa, Myceliophthora thermophilia
LPSIGKADAALVPRQSAIQITDQYLFDLTLPAFTAKRNARDPPSLIWDSDGCSSSPDNPFGFPFVPACHRHDFGYRNYKAQNRFTDAGKLSIDDNFKSDLYYQCESVSAKTACRALADVYYAAVRAFGGSTQDKRDDDLVKIYEEKVAIYNKAVEEAQAKGELWTLD

SEQ ID NO: 1462 - DNA, 951 bp, Myceliophthora thermophilia
atgtcaacacaattcccactctacacctccaagattgtcctcattcacctcatcacactgtctctcgccggagtgacaacggcacgcgacgctccgaaaaatctcctcgagttctacgatgtaatacgagcaaaagggcactgtcgccacgaactggcatcaggcttctacagccgcgacaatggccccaacaactttgcctactgcggcgactacctcgacagcgcgggcgtaatctatatccaaggccgctccggcgccctggcgaacctggacgtagattgcgacggcagttcgggaggccccagcgacgacggccggtgccggcgcgagctcagcccggacctgcagaacgccacctcgttccgcgacgtgctcgccagctacggccgcgccggcgtcgccgaactcaacccgtacgtccacccttacgtcgtgttcggcaacgcgccggccacgaaaactaccaccgcatccacgggacggggggccaagtccggagcgtggcgagcgttcgacccgtccgagtacgggatgcggccgctcggcgtcatggcggtcgtctgcccgacgagccggaagctggtgtacggcgtgtggggggacatgaacggggacgacggggccaggccgatggtcggggaggcgtcgctggcgctggtgacggcctgcggcgggaagggggtcagcggggcggacgggatcgacgaggacgccgccctgttcctggggttcacgggcgacgaggcggtgccgggacgcgacggcgccgactgggccgccaaggactttgacacgtttgagaggagcatcgaacgattgggaaacaggctggtggagcgtgtccgggctgcagacgaggacgcgtcgtgcagcgtccggccaagctgggcccgggttgcggctgttgctgctgcggtggtgggctcgacatggttgcttctgtcataa

SEQ ID NO: 1463 - protein, 316 aa, Myceliophthora thermophilia
MSTQFPLYTSKIVLIHLITLSLAGVTTARDAPKNLLEFYDVIRAKGHCRHELASGFYSRDNGPNNFAYCGDYLDSAGVIYIQGRSGALANLDVDCDGSSGGPSDDGRCRRELSPDLQNATSFRDVLASYGRAGVAELNPYVHPYVVFGNAPATKTTTASTGRGAKSGAWRAFDPSEYGMRPLGVMAVVCPTSRKLVYGVWGDMNGDDGARPMVGEASLALVTACGGKGVSGADGIDEDAALFLGFTGDEAVPGRDGADWAAKDFDTFERSIERLGNRLVERVRAADEDASCSVRPSWARVAAVAAAVVGSTWLLLS

SEQ ID NO: 1464 - protein, 288 aa, Myceliophthora thermophilia
RDAPKNLLEFYDVIRAKGHCRHELASGFYSRDNGPNNFAYCGDYLDSAGVIYIQGRSGALANLDVDCDGSSGGPSDDGRCRRELSPDLQNATSFRDVLASYGRAGVAELNPYVHPYVVFGNAPATKTTTASTGRGAKSGAWRAFDPSEYGMRPLGVMAVVCPTSRKLVYGVWGDMNGDDGARPMVGEASLALVTACGGKGVSGADGIDEDAALFLGFTGDEAVPGRDGADWAAKDFDTFERSIERLGNRLVERVRAADEDASCSVRPSWARVAAVAAAVVGSTWLLLS

SEQ ID NO: 1465 - DNA, 702 bp, Myceliophthora thermophilia
atggttcagttctataccgttgtcggggcgctcgccttgactttttcggctgtccaggctgcgcctaatctttccgcccgccagaacatccccgacccggctggggagaaaaacgtgggtaacgggaggggcttgcagtttatcggcggccaatgtctcggcgcggccgactgtgcctctggatgctgtgctatcctacccaaaggcggccaaaccatcggcgtctgctctggtgttggtgctcagaaccaggcgggcaaacaaggctgcggcttcgagagcggcgttggtgctggcaaccaaacccaaggtggtagccagggtgggaaccagaacaacaccgggggcaaccagcgcaacggcgggaacaaccaatgcaacaatcaggggggcaaccaagacaaccaaggcaaccaagacaaccaagacaaccaaaacaacggccaaaccggcgccaccatccgacccagcaccctcaagcccgaccctgcaggtgccgccaacgtcggcaacggccaagggcagcagttcatcgggggcgagtgcaccagcgacgccgactgcgcctcggcgtgctgcgccctggtgaacacgggcgaggagagatttggcatctgctccggccctgcggccaacactcagaacggcaagcagggctgcggctttcccattggtgggaagaacatctctggctcggcttga

SEQ ID NO: 1466 - protein, 233 aa, Myceliophthora thermophilia
MVQFYTVVGALALTFSAVQAAPNLSARQNIPDPAGEKNVGNGRGLQFIGGQCLGAADCASGCCAILPKGGQTIGVCSGVGAQNQAGKQGCGFESGVGAGNQTQGGSQGGNQNNTGGNQRNGGNNQCNNQGGNQDNQGNQDNQDNQNNGQTGATIRPSTLKPDPAGAANVGNGQGQQFIGGECTSDADCASACCALVNTGEERFGICSGPAANTQNGKQGCGFPIGGKNISGSA

SEQ ID NO: 1467 - protein, 213 aa, Myceliophthora thermophilia
APNLSARQNIPDPAGEKNVGNGRGLQFIGGQCLGAADCASGCCAILPKGGQTIGVCSGVGAQNQAGKQGCGFESGVGAGNQTQGGSQGGNQNNTGGNQRNGGNNQCNNQGGNQDNQGNQDNQDNQNNGQTGATIRPSTLKPDPAGAANVGNGQGQQFIGGECTSDADCASACCALVNTGEERFGICSGPAANTQNGKQGCGFPIGGKNISGSA

SEQ ID NO: 1468 - DNA, 1542 bp, Myceliophthora thermophilia
atgaaagcaaacacaacacggcggccgcgccttctcctgttcgccgggctgagttgtttgcttcttgggaacgcggcgacggcccaatcaacatgctacaatacgcgcggggaggaagacccgaacctgcagccatgctctgcaccgggcgcggacgcggacgcgggagaggcgacctggtgctgcgcccggggagacacctgtctctccaacggcctctgtctgagtcccgggtcgagcaacctcatgacgcagcaaggatgcaccgacaagaactggggcgggtcgtgcaagaagtactgcccggccagcgatgaccagaaactgaccgagatccccctcgtcccctgcccggcgagcttcaacagcgacacgaacgacgtcaagttctgctgcggccccgacccgtcttcctgctgcgaagagtccgcctcctggatctccctccctgccggcaccattgtcccctcgcaagcgaacgacgactcgacctcctcatcctcctcctcctccaactccgacaacgtccgctactcgctcaggatcggtctgggtatcggcctcggcatcggcgtgcccatcctcctcgtcctcctcgcagtggcctacctcctcgcgcagccgctgcactcccgcagcggggggcggcacggctcgggcaggcgcaagggcggcggcggtagaggcggggattgggacggggacgacgtggacgacgggaccaacacggaaaagacgtccgacacctaccacacctacccgccgcgctcctacttcgcccgaaccgctggcggggtcggcggtggcggcggcggcagcggcggaggcacgcgcactcacaccacccggccgcgacgcaagtccttcggcaaccacacccacgtccgcggcggcttcgcctcctcctcctcctcgtcatcccccgccgccgacgacgaagcgaaccaccacggaggcagggacgaccagcacacgcaccccgccatcgcgctctggtccccgcatctccaccaccaccaccaccatcaccacggcacgggagggatccagagcgcgcggagcgattcggcgggctggagcccccgctcccggggcttcgagaacccgcgggagatggacgggagcgggagcgggagccgggagcgggcggtccgcgaggggcccacggccgggagcggcggcggcagcggcagcggcagtgggatgggggagacgacgccgagccggctgggcgcggccgagctgccgtcgccggatctgtgccggctcgaggaaggcggaggaggtggaggaggaggaggggaagtggggggtcacggtccgggtcctgccgcttcttctccctcctcttcctctccttctgctcccggtggtggtggcggcggcggtattagtagtggtggtggtggtgcgtctgggcaggcggcgtggcacgccgggaggagggtgcacgttgctgccgaagaggttgaattgcccacccccgacacgcccgtgcgacccgatcaggatgtggaaaaggggctgggcgggaagaaatga

SEQ ID NO: 1469 - protein, 513 aa, Myceliophthora thermophilia
MKANTTRRPRLLLFAGLSCLLLGNAATAQSTCYNTRGEEDPNLQPCSAPGADADAGEATWCCARGDTCLSNGLCLSPGSSNLMTQQGCTDKNWGGSCKKYCPASDDQKLTEIPLVPCPASFNSDTNDVKFCCGPDPSSCCEESASWISLPAGTIVPSQANDDSTSSSSSSSNSDNVRYSLRIGLGIGLGIGVPILLVLLAVAYLLAQPLHSRSGGRHGSGRRKGGGGRGGDWDGDDVDDGTNTEKTSDTYHTYPPRSYFARTAGGVGGGGGGSGGGTRTHTTRPRRKSFGNHTHVRGGFASSSSSSSPAADDEANHHGGRDDQHTHPAIALWSPHLHHHHHHHHGTGGIQSARSDSAGWSPRSRGFENPREMDGSGSGSRERAVREGPTAGSGGGSGSGSGMGETTPSRLGAAELPSPDLCRLEEGGGGGGGGGEVGGHGPGPAASSPSSSSPSAPGGGGGGGISSGGGGASGQAAWHAGRRVHVAAEEVELPTPDTPVRPDQDVEKGLGGKK

SEQ ID NO: 1470 - protein, 488 aa, Myceliophthora thermophilia
ATAQSTCYNTRGEEDPNLQPCSAPGADADAGEATWCCARGDTCLSNGLCLSPGSSNLMTQQGCTDKNWGGSCKKYCPASDDQKLTEIPLVPCPASFNSDTNDVKFCCGPDPSSCCEESASWISLPAGTIVPSQANDDSTSSSSSSSNSDNVRYSLRIGLGIGLGIGVPILLVLLAVAYLLAQPLHSRSGGRHGSGRRKGGGGRGGDWDGDDVDDGTNTEKTSDTYHTYPPRSYFARTAGGVGGGGGGSGGGTRTHTTRPRRKSFGNHTHVRGGFASSSSSSSPAADDEANHHGGRDDQHTHPAIALWSPHLHHHHHHHHGTGGIQSARSDSAGWSPRSRGFENPREMDGSGSGSRERAVREGPTAGSGGGSGSGSGMGETTPSRLGAAELPSPDLCRLEEGGGGGGGGGEVGGHGPGPAASSPSSSSPSAPGGGGGGGISSGGGGASGQAAWHAGRRVHVAAEEVELPTPDTPVRPDQDVEKGLGGKK

SEQ ID NO: 1471 - DNA, 279 bp, Myceliophthora thermophilia
atgaagctcctcaccacagccgtaaccctcctcatggcctccatggccaacgccgaggtcttctactggtgcactggcaacggcaagtgcgacaatgcgcctggcgtgggcccaacctacgattgcggcaaaaaactcggctacgactactacgactccaaccgcaagcgctggcggacgagtggcgacacggttaaaaagttttgggaaaccggcggcttctacgactgctgccacgctaagaacaagggcgcttgctacgatattcaaaaccagtga

SEQ ID NO: 1472 - protein, 92 aa, Myceliophthora thermophilia
MKLLTTAVTLLMASMANAEVFYWCTGNGKCDNAPGVGPTYDCGKKLGYDYYDSNRKRWRTSGDTVKKFWETGGFYDCCHAKNKGACYDIQNQ

SEQ ID NO: 1473 - protein, 74 aa, Myceliophthora thermophilia
EVFYWCTGNGKCDNAPGVGPTYDCGKKLGYDYYDSNRKRWRTSGDTVKKFWETGGFYDCCHAKNKGACYDIQNQ

SEQ ID NO: 1474 - DNA, 1014 bp, Myceliophthora thermophilia
atgccaccaaccccgggcaccctcaagaaacccgttcccacccacttcctctgcattcccctcgccgtcagcccggccgcccgcgcccaactggccgcctccctctcggcctttcgcagcgacgtctgcgcgtcccctgccgcgggcgggttcgatgtgcccttcgacgcggtccgtcccgtcgggacagtgcacctgacgctgggcgtcatgagcttcccaacgccgccgccgccgccaccgccgagggggcgcaccgacgcggtttccggcggcggtagtggaggaggcgatgctgatggtagcggttcggaaggggaggcgcagcggtcggaggagggaggccctcggtcggcagggctgcagcgggcgagggaggtgctcgccggcatcgggctgcggaccatctggagggaggtggtgcgcgggaggcagggggacgcggtccggcggctggaggggatggcgcaggggagggtcggcaccgggttggtgaagaaggaagggcacgagcaggaggaggagcgggagcgggagcgggaggaagaggaggaggaggagggggaaaggccgaggatcacgctcagaggcctggcgtctatgcaacccgcggagaaggcggcggtgctctacgctccgcccgtcgaccagttcgggctgctccaggccttctgcgagaaggtcagggacgtgtttaaggaggcggagctcatggtggatgaggaccggccgcttctcttgcatgccactgtggtgaatacgacctatgtcaaagggaaccgaggcgaagggggtggcagcaggggcaagggtggccggggccggagagggggaaagaagtgggaacggctggtatttgacgcgagaggtatcattgaccgctacgaggatcaggtgtggttggagaacatgcccctggataaggtcgcgatatgtaggatgggcgcgacgaagataatggtgaacggcgaagaggacgaggcatacgaggtagaggccgaggtgaacttctag

SEQ ID NO: 1475 - protein, 337 aa, Myceliophthora thermophilia
MPPTPGTLKKPVPTHFLCIPLAVSPAARAQLAASLSAFRSDVCASPAAGGFDVPFDAVRPVGTVHLTLGVMSFPTPPPPPPPRGRTDAVSGGGSGGGDADGSGSEGEAQRSEEGGPRSAGLQRAREVLAGIGLRTIWREVVRGRQGDAVRRLEGMAQGRVGTGLVKKEGHEQEEEREREREEEEEEEGERPRITLRGLASMQPAEKAAVLYAPPVDQFGLLQAFCEKVRDVFKEAELMVDEDRPLLLHATVVNTTYVKGNRGEGGGSRGKGGRGRRGGKKWERLVFDARGIIDRYEDQVWLENMPLDKVAICRMGATKIMVNGEEDEAYEVEAEVNF

SEQ ID NO: 1476 - protein, 308 aa, Myceliophthora thermophilia
QLAASLSAFRSDVCASPAAGGFDVPFDAVRPVGTVHLTLGVMSFPTPPPPPPPRGRTDAVSGGGSGGGDADGSGSEGEAQRSEEGGPRSAGLQRAREVLAGIGLRTIWREVVRGRQGDAVRRLEGMAQGRVGTGLVKKEGHEQEEEREREREEEEEEEGERPRITLRGLASMQPAEKAAVLYAPPVDQFGLLQAFCEKVRDVFKEAELMVDEDRPLLLHATVVNTTYVKGNRGEGGGSRGKGGRGRRGGKKWERLVFDARGIIDRYEDQVWLENMPLDKVAICRMGATKIMVNGEEDEAYEVEAEVNF

SEQ ID NO: 1477 - DNA, 1701 bp, Myceliophthora thermophilia
atgccgactctggccaccactaacttcaacattcttctcagcgtgctgggcggttggttgtcgctcttcggctcggtctcgtacctcttcaaggggagcttctacctctccgaggcccccatctccctcctcgtcggcgtcgccctctctccgcgcgccgccaacttcatccgcccgctcgagtacgccctcggctcccccgataagctcgcctccatcacgctggccttgtcgcggctcgtgctcggcgtccagctggtgctggctggcgtccagctgcccagccgctacctcaggaggcagtggaggccgctagcgctgctggtcgggcccgtcatggccgccatgtggatcgtcgccagcctgctggtctgggccctcgtgccggacctccccctcctccacgccctcgccgtcggcgcctgcgtcgcccccaccgaccccgtgctgtccagcctcatcatgaagggccgcttcgccgaccgcaaccaccccaagggcctgcaggacctcgtggtcgccgaggcgggggcgaacggcgcgcttgcgtatccgttcctcttccttgccctgtacttgatcaagtgcctcggggacgggagcggggacggttctgcggctgagcaccacggcggcggcggcggcggcgcgagggcggcggtggggcagtggttcggcgaggcctggggctacgccgtgctgctgggcatcgtgtacggcgcggtggtgggctggctggccagggagctgctgcgccgggccgaggagcgccggttcgtcgaccgccagggcttcctcgtgccggccgtctccctcgccctcttcgtcgtcgggacgtgcggcatgatcggcagcgacgacgcgctcgcctgcttcgcggcgggcagcgcgttcgcgtgggacgaccggttccgcctcgacgccctcgacgactcgctgcagccgaccgccgacatgctcctcaccgtccccgtcttcctgtggtacggcgccgtgtgcccctgggaggcgttccgcgccagccccgtcgtcccgctcggcaagctggtcgcgctcgcggtcctggtgctgctggcgcgccgcctgccctgggtgtttctgctgcactggttcatcccgccgatcgggcaggcgcggcaagccgtcttcgtgggcttcttcggccccgtcggcgtctcggccattttttacctctatgtcgccctgggtttcctgcgtacgctggacgtggacgggaaacccagggccgatgtcaggttgctacccgaggcggtgaccgtggtggtgtggttcactaccatttgcagcaccttcatccacggtctgagcatcccgttcggaaaaataggtcattttctaccagggactgcctcccgcgacccgtcgccgcccttcggacctctcggaagcccggcttcctctgcgcacggagacgaacccggcaccgggctgaggcgttctgttttcagggccaggggatcatccgggcccaaggttcagcctaggccgggagaggctgtgcctgatcggcggaaggcatcgcattacggcaaggacgttctagtcgacgtggtggaagccagtcaagtcgcgccggcccatgcctccgtgccgtgcgagcggcggatgattcggctccccgacgagccgacgatggccggaacccgggaaacgtgcggacatggccgcgctgagcgctaa

SEQ ID NO: 1478 - protein, 566 aa, Myceliophthora thermophilia
MPTLATTNFNILLSVLGGWLSLFGSVSYLFKGSFYLSEAPISLLVGVALSPRAANFIRPLEYALGSPDKLASITLALSRLVLGVQLVLAGVQLPSRYLRRQWRPLALLVGPVMAAMWIVASLLVWALVPDLPLLHALAVGACVAPTDPVLSSLIMKGRFADRNHPKGLQDLVVAEAGANGALAYPFLFLALYLIKCLGDGSGDGSAAEHHGGGGGGARAAVGQWFGEAWGYAVLLGIVYGAVVGWLARELLRRAEERRFVDRQGFLVPAVSLALFVVGTCGMIGSDDALACFAAGSAFAWDDRFRLDALDDSLQPTADMLLTVPVFLWYGAVCPWEAFRASPVVPLGKLVALAVLVLLARRLPWVFLLHWFIPPIGQARQAVFVGFFGPVGVSAIFYLYVALGFLRTLDVDGKPRADVRLLPEAVTVVVWFTTICSTFIHGLSIPFGKIGHFLPGTASRDPSPPFGPLGSPASSAHGDEPGTGLRRSVFRARGSSGPKVQPRPGEAVPDRRKASHYGKDVLVDVVEASQVAPAHASVPCERRMIRLPDEPTMAGTRETCGHGRAER

SEQ ID NO: 1479 - protein, 539 aa, Myceliophthora thermophilia
YLFKGSFYLSEAPISLLVGVALSPRAANFIRPLEYALGSPDKLASITLALSRLVLGVQLVLAGVQLPSRYLRRQWRPLALLVGPVMAAMWIVASLLVWALVPDLPLLHALAVGACVAPTDPVLSSLIMKGRFADRNHPKGLQDLVVAEAGANGALAYPFLFLALYLIKCLGDGSGDGSAAEHHGGGGGGARAAVGQWFGEAWGYAVLLGIVYGAVVGWLARELLRRAEERRFVDRQGFLVPAVSLALFVVGTCGMIGSDDALACFAAGSAFAWDDRFRLDALDDSLQPTADMLLTVPVFLWYGAVCPWEAFRASPVVPLGKLVALAVLVLLARRLPWVFLLHWFIPPIGQARQAVFVGFFGPVGVSAIFYLYVALGFLRTLDVDGKPRADVRLLPEAVTVVVWFTTICSTFIHGLSIPFGKIGHFLPGTASRDPSPPFGPLGSPASSAHGDEPGTGLRRSVFRARGSSGPKVQPRPGEAVPDRRKASHYGKDVLVDVVEASQVAPAHASVPCERRMIRLPDEPTMAGTRETCGHGRAER

SEQ ID NO: 1480 - DNA, 993 bp, Myceliophthora thermophilia
atggcctcatcatctgccacgccgtcggcattaccatctttgtcagcaactgaagcggtcgcgaaactagcagcggccggtaccgagacagagacggggccagcggccgcggccgcggctgaggcacaagcggaggcttacgagcgcgcacacgtccacggcgtctacgaggcgatcgccccacacttctcggccacccgctacaagccatggcccgccgtcggatcgttcctgcggtctcaggcacccggcgccgttgggctcgacgtcggctgcggcaatggcaaatacctgggcgtgaacccagacgtcttcatggtgggctccgatcggagccactcgctcatctcgctcgccagggaccgctgcatgcaaccccagacacggcagggcgacgcagcaggggcgggaaccggaggggaagctgggcgcggcggccgccctgtggtgggtgccgacgtgctcgtggctgacgggctgtcgctgcccttccgcgagcatgctgcagatttcgtcatctgcgtggccgtcatccaccacttgtcgactcgggcgaggcggcaagaggccatccggcagctcctgcgatgtgtcaagctcggagaggctgaccggaccggcggtcaggtactcgtctacgtctgggccctcgagcagggcaccagccgacgcggatgggacgagggcggtgagcaagacctgctggtgccttgggtactcaagtctcagcagaagaagcagccgaagccgcaaaagtcgcccagaggagacaaggcccaggctgtcggcgaccgcggctcggcgactcagagcggtgacgcaggctctgaccccgtattccagcgctactaccacctctaccgcaaaggcgagctggaagaggatgtcctcgcagcagggggtgtagtcgtatcgagcggttacgagagagacaactggtgggtcatggctaccaataagcctattcaacaggttcaacaacaacaacaataa

SEQ ID NO: 1481 - protein, 330 aa, Myceliophthora thermophilia
MASSSATPSALPSLSATEAVAKLAAAGTETETGPAAAAAAEAQAEAYERAHVHGVYEAIAPHFSATRYKPWPAVGSFLRSQAPGAVGLDVGCGNGKYLGVNPDVFMVGSDRSHSLISLARDRCMQPQTRQGDAAGAGTGGEAGRGGRPVVGADVLVADGLSLPFREHAADFVICVAVIHHLSTRARRQEAIRQLLRCVKLGEADRTGGQVLVYVWALEQGTSRRGWDEGGEQDLLVPWVLKSQQKKQPKPQKSPRGDKAQAVGDRGSATQSGDAGSDPVFQRYYHLYRKGELEEDVLAAGGVVVSSGYERDNWWVMATNKPIQQVQQQQQ

SEQ ID NO: 1482 - protein, 305 aa, Myceliophthora thermophilia
AGTETETGPAAAAAAEAQAEAYERAHVHGVYEAIAPHFSATRYKPWPAVGSFLRSQAPGAVGLDVGCGNGKYLGVNPDVFMVGSDRSHSLISLARDRCMQPQTRQGDAAGAGTGGEAGRGGRPVVGADVLVADGLSLPFREHAADFVICVAVIHHLSTRARRQEAIRQLLRCVKLGEADRTGGQVLVYVWALEQGTSRRGWDEGGEQDLLVPWVLKSQQKKQPKPQKSPRGDKAQAVGDRGSATQSGDAGSDPVFQRYYHLYRKGELEEDVLAAGGVVVSSGYERDNWWVMATNKPIQQVQQQQQ

SEQ ID NO: 1483 - DNA, 951 bp, Myceliophthora thermophilia
atgtccgccgctgtcgcccccgccccggcttccgcgccgaagaagctggagaagaagcccatcaagttctccaacttgctgctgggcgctgggctcaacttgtttgaggtcaccaccctcggtcagcccttggaggtcaccaagaccaccatggcggctcaccgcggcgatggcttcgcggcagctctgggccgcatctggaaccgtggtggtatcctcggcttctaccagggtctgatcccctgggcgtggatcgaagcgtcgaccaagggcgccgtgctgctcttcgtcgcctccgaggccgagtactatgcccgccttgcgggcgccagcgagttcggtggcggcatcattggcggcatgactggcggtgttgttcaggcctacgcgaccatgggcttttgcacctgcatgaagacggtcgagatcaccaagcacaaggtggcggcctccggtcagaaggtgcccggcacctgggctaccttcatggacatctaccgccgcgagggcatccgcggcatcaacaagggcgtcaacgccgtcgctatccgccagatgaccaactggggctcccgcttcggcctgagccggctcgccgagcagggcatccgcaagatcacgggcaaggagcacggcgaaaagctgaacgcgttcgagaagatcctcgcctcggcccttggcggcggtctctcggcctggaaccagccgattgaggttattcgtgtcgagatgcagagcaagaaggatgaccccaaccgtcccaagaagatgacggtcggcaacacgttcaagtacatttacgagaccaacggcatcaagggtctgtaccgtggtgtcacgccccgcattggtttgagcgtctggcagacggtgtgcatggttgccctgggtgacatggcgaagacgtatgtcgagaagcttacgggagagaaggttacggcaaagcattaa

SEQ ID NO: 1484 - protein, 316 aa, Myceliophthora thermophilia
MSAAVAPAPASAPKKLEKKPIKFSNLLLGAGLNLFEVTTLGQPLEVTKTTMAAHRGDGFAAALGRIWNRGGILGFYQGLIPWAWIEASTKGAVLLFVASEAEYYARLAGASEFGGGIIGGMTGGVVQAYATMGFCTCMKTVEITKHKVAASGQKVPGTWATFMDIYRREGIRGINKGVNAVAIRQMTNWGSRFGLSRLAEQGIRKITGKEHGEKLNAFEKILASALGGGLSAWNQPIEVIRVEMQSKKDDPNRPKKMTVGNTFKYIYETNGIKGLYRGVTPRIGLSVWQTVCMVALGDMAKTYVEKLTGEKVTAKH

SEQ ID NO: 1485 - protein, 275 aa, Myceliophthora thermophilia
QPLEVTKTTMAAHRGDGFAAALGRIWNRGGILGFYQGLIPWAWIEASTKGAVLLFVASEAEYYARLAGASEFGGGIIGGMTGGVVQAYATMGFCTCMKTVEITKHKVAASGQKVPGTWATFMDIYRREGIRGINKGVNAVAIRQMTNWGSRFGLSRLAEQGIRKITGKEHGEKLNAFEKILASALGGGLSAWNQPIEVIRVEMQSKKDDPNRPKKMTVGNTFKYIYETNGIKGLYRGVTPRIGLSVWQTVCMVALGDMAKTYVEKLTGEKVTAKH

SEQ ID NO: 1486 - DNA, 1608 bp, Myceliophthora thermophilia
atgaaggcggcttacctcacgctcggcctcttcgccgctctcacgcccgccgcctccgcctacagcaagaggcacccccggtacatgcgtctccgccagagattcaacaatggaactgcgggcatcattgtctcgccggaggatgaccctgctgccatctcggattccacctccgccaccgcctctgttcccctgtccaccggggtctcttcggacacggcaagcctcgtcaccagtgccccccctttcccgaccaacggcaccggaagcggcattaccaccctgaccgtgtcgactacctcgatccataccgtcacctcttgcttgccggaggtggttgactgccctgcaaggacagaggatctcaccaacctccctactgaggctctcactactgccatcgttactgacactatcgttctcactacgaccgtctgccctgttaccgctgtaccctctatcacctcgagcgtcctgtctgaacactctaagggcatcatcactggcagcaccttgagccccgccaagacttctaccgccgcccctgcttccgcgactaccggggtctcttcggacgcggcaagcctcgtcactagcgccgccccttccctgactaccggtactggaagcggcgttaccaccctgaccgtgtcgactacctcggtccataccgtcacctcgtgcttgccggaggtgattgactgccctgcaaggacagaggatctcaccaacctccctactgaggctctcactaccgctatcgttaccgacactatcgtccttactacgactgtctgccctgtcactgctgtgccctctattacctcgagtgtcctatccgaacactccaagggtgtcatcaccggcagcaccttgagccccgtcgaaacttctaccactgccgctgagacggacacaaccaccaccgcgaccatcaccacgaccggcacccgcactgtcaccgtcaagaggcccaccgctaccgccgccaccaccgtgggcgtttcgcccggcagcggcagcggcagcggcaatggcaatggcaacggcaacggcaacggcagcggtagcggcaccgtgtgcaactgcgatgccgccgcggccaccgtgaccgtcaccgaggccgctgtgaccgtgaccgctcccgcctccaccgtctttgtcacggtcgccggcgccgactgccaggccaccgcgtccccgtcctcggcctcggcccaagacggcaacggcaacggcaacggcagcggcagcggcagcaagacgaccagcgtcgcgtcctcggcctcggccacctcgaccgcctcgcccaccggcactggtgagaccggcagcggcgatgacgaggaggacgcctgcccgaccgacgaggttgatgacgccgtcaccgcctccgcaaccaccgcctccgctactgcttccgtcaccgcctccaccaccgagtcggccgctcccagccagacctccggtacgtcgacgggcgaggacgcgggcaacagcgacgatgatgacaactgcccggatgacgaggttgtcaccgtgaccgcgtccgaggaggcgccgtcggctaccacctcgagcggcagtgctgcaacttcggggctgtaa

SEQ ID NO: 1487 - protein, 535 aa, Myceliophthora thermophilia
MKAAYLTLGLFAALTPAASAYSKRHPRYMRLRQRFNNGTAGIIVSPEDDPAAISDSTSATASVPLSTGVSSDTASLVTSAPPFPTNGTGSGITTLTVSTTSIHTVTSCLPEVVDCPARTEDLTNLPTEALTTAIVTDTIVLTTTVCPVTAVPSITSSVLSEHSKGIITGSTLSPAKTSTAAPASATTGVSSDAASLVTSAAPSLTTGTGSGVTTLTVSTTSVHTVTSCLPEVIDCPARTEDLTNLPTEALTTAIVTDTIVLTTTVCPVTAVPSITSSVLSEHSKGVITGSTLSPVETSTTAAETDTTTTATITTTGTRTVTVKRPTATAATTVGVSPGSGSGSGNGNGNGNGNGSGSGTVCNCDAAAATVTVTEAAVTVTAPASTVFVTVAGADCQATASPSSASAQDGNGNGNGSGSGSKTTSVASSASATSTASPTGTGETGSGDDEEDACPTDEVDDAVTASATTASATASVTASTTESAAPSQTSGTSTGEDAGNSDDDDNCPDDEVVTVTASEEAPSATTSSGSAATSGL

SEQ ID NO: 1488 - protein, 515 aa, Myceliophthora thermophilia
YSKRHPRYMRLRQRFNNGTAGIIVSPEDDPAAISDSTSATASVPLSTGVSSDTASLVTSAPPFPTNGTGSGITTLTVSTTSIHTVTSCLPEVVDCPARTEDLTNLPTEALTTAIVTDTIVLTTTVCPVTAVPSITSSVLSEHSKGIITGSTLSPAKTSTAAPASATTGVSSDAASLVTSAAPSLTTGTGSGVTTLTVSTTSVHTVTSCLPEVIDCPARTEDLTNLPTEALTTAIVTDTIVLTTTVCPVTAVPSITSSVLSEHSKGVITGSTLSPVETSTTAAETDTTTTATITTTGTRTVTVKRPTATAATTVGVSPGSGSGSGNGNGNGNGNGSGSGTVCNCDAAAATVTVTEAAVTVTAPASTVFVTVAGADCQATASPSSASAQDGNGNGNGSGSGSKTTSVASSASATSTASPTGTGETGSGDDEEDACPTDEVDDAVTASATTASATASVTASTTESAAPSQTSGTSTGEDAGNSDDDDNCPDDEVVTVTASEEAPSATTSSGSAATSGL

SEQ ID NO: 1489 - DNA, 759 bp, Myceliophthora thermophilia
atgagggccgctctggtgtcggcggccgttgtcatcagcttcttcgctgcggccctcgccaacaccgaaaagaccatcttcctcgggcctgaagccgtcaacgttccgctcgcgcacccgaccctctccgatctccgcctgcgcaccctcacaccgaccaacaacaccctccggacccggctccccgcccggttcccctctgcagaccaaccccaagggcccgccacatggctcctcctcgaccacctcacgcctaagcagcgttatgaagtgcgtgtctgctggccggccacgcaacccaccgatttcaccgtctcaacctttcccctcgccacggtatgggacacgccggagctgatggcctctctgcgcgcctactccgtctcgcgggagcagtcgctcgctcccgagggtggtccgccgccacccggcagcggcaacggcagcggcaacgggagcgacagcggccccagtgagcgggaggcctccgttctcttgctgcgcatcctggccgcggccgactactacaccaccgatgcctcgctcatgagcagcgttccccccgtcgacgtggacatcatcctggacccgttcctcttcaaccttctaccccggtcgctagccggtacggcgtgctatatcgtcgctgtcgccgtcgcagcgtatctcctttctcggaggatcgtttccggcatccaccgactgattgcttcggctgacgctgacgtacgacaggaggctatcaagaagagacagtaa

SEQ ID NO: 1490 - protein, 252 aa, Myceliophthora thermophilia
MRAALVSAAVVISFFAAALANTEKTIFLGPEAVNVPLAHPTLSDLRLRTLTPTNNTLRTRLPARFPSADQPQGPATWLLLDHLTPKQRYEVRVCWPATQPTDFTVSTFPLATVWDTPELMASLRAYSVSREQSLAPEGGPPPPGSGNGSGNGSDSGPSEREASVLLLRILAAADYYTTDASLMSSVPPVDVDIILDPFLFNLLPRSLAGTACYIVAVAVAAYLLSRRIVSGIHRLIASADADVRQEAIKKRQ

SEQ ID NO: 1491 - protein, 232 aa, Myceliophthora thermophilia
NTEKTIFLGPEAVNVPLAHPTLSDLRLRTLTPTNNTLRTRLPARFPSADQPQGPATWLLLDHLTPKQRYEVRVCWPATQPTDFTVSTFPLATVWDTPELMASLRAYSVSREQSLAPEGGPPPPGSGNGSGNGSDSGPSEREASVLLLRILAAADYYTTDASLMSSVPPVDVDIILDPFLFNLLPRSLAGTACYIVAVAVAAYLLSRRIVSGIHRLIASADADVRQEAIKKRQ

SEQ ID NO: 1492 - DNA, 318 bp, Myceliophthora thermophilia
atgcacacaaggccaccgttgtttgcgtctctctgcgtgagggcttttgttcggcctcgctcggctaccaggaaccgagcgggcacgccaacattacgggcatctgacagcacaccactttccctccgccagatctgctcaggggagggggccaagcgagactgcgcgggcgttccgcatttgcgtgcgccgattcttcctcggacccagcttagcgtatccaccagaacaggcgcgtcatccgatggcttctcacagaccaagtggccgggaaagcgggatggtgctcagcatgtgccttgtttcgaggttgcgtag

SEQ ID NO: 1493 - protein, 105 aa, Myceliophthora thermophilia
MHTRPPLFASLCVRAFVRPRSATRNRAGTPTLRASDSTPLSLRQICSGEGAKRDCAGVPHLRAPILPRTQLSVSTRTGASSDGFSQTKWPGKRDGAQHVPCFEVA

SEQ ID NO: 1494 - protein, 83 aa, Myceliophthora thermophilia
TRNRAGTPTLRASDSTPLSLRQICSGEGAKRDCAGVPHLRAPILPRTQLSVSTRTGASSDGFSQTKWPGKRDGAQHVPCFEVA

SEQ ID NO: 1495 - DNA, 1851 bp, Myceliophthora thermophilia
atgggccgccaactactttacggagccgccctcttgggcgcctctgttcaggcattcgcttttctgcccctgccaaccaaccgctaccaggcactccctctcgaagacggctggaatcccaagccgacccaacctccagacgctcacttagttcgacggcaaatgagccgcccctcaagctatctcgtcgccccggataacacatgcggcttcatcgaaggcaattcaagatcggcatatgcatgtttggacgatagcatgcaatgcgtcttcatcccacaatctggaaagtcgcccggcgccgttggctgctgcgatggcgacgactgtaccttccgttcatcatgcgtcaacaggagtgaacgggatgactgcgacgaggattgtcaagaagatccctcaacgctgaaatgcaccggcttgctccagaggtactgcaacaccgtcgccttcccgggcggcgtgacggactactactgcgccttaacgaaggggtctgttctcacggcccagacagcggccaagggtgataagagcaggagcttctccgaggtcaagcccaccagtacctcgaccaagaagacgacgacgacaacgacgagctcaaccacgtccaagaaaacttcctcgtcttcgtcttcctcttcgacttcgacctcgtcttcaacgacgtccaagtcctcaacccgatccacatccgagacgtcgtccgaggttctgccctccaccaccgaacctaccatcaccgcgtctaccaccgacgccgatcgtgccggcgcggccacttcttcgacaccgcccgaggcctcgaccactcaatctaccccggtcggcgccattgtcgggggtgtcctgggtggtatcgccctcatcgccttgtgcatatttggcgcaatcttcctccgccagcagaggaagaagagccaagcgatggctgaaatgcctccttcccagcctttcatggccgaacccacattgcccagcactcaaccccccgttcccccctacgggcaaggcatgggatcttccggcatgactggctaccccccgtcgtctgccgctgggacctcgccgcagatgttcgccactccaacggccgccgcagctggcgcgactgctggcgcggtggcggcggcagcagcatcagcacgaggagcctccggcccctaccacaaccgtccgccaagcaccctcaccactaccaccaccgccgccaacaacacctactacgacccgagccctttgaccacgcccggcggcagcccacagatgcagtatgcacatcagatgcacccaccaccgccccttcccacgccggcctactacaaccacccttcacaagacgcttaccaggggggagacggagcatgggctggaggcggcagcaccaacgccggcgccgccgcggagccgcccgaccgccattcgacctccaccccggtctcgacgtacaacggcgccacccccgtcaccccggcctctgcgctgggtccgatgccgggtgagcctcagcagcacgcaccggcgggcgggggcggtggtggcagtggcagcgacgggaacggggtgcccctgattctgcagccgggcatgggatatcggccatacaggccgcccggtgccggtggcagcagcagcacgcgaagcgcagggggccggaatgcaaccgcgagcgcgagcggaagcgaaagcccgactgtgaggaccgcgacggtcgccatggtggtgccccggaaggttgtcccagcatcgtccgcgccgccctcgacggagcagtcgcggagccaagggcaatcacaaggggccgcggctcctggggatcagcagactgctgctgtcgagctgccgtga

SEQ ID NO: 1496 - protein, 616 aa, Myceliophthora thermophilia
MGRQLLYGAALLGASVQAFAFLPLPTNRYQALPLEDGWNPKPTQPPDAHLVRRQMSRPSSYLVAPDNTCGFIEGNSRSAYACLDDSMQCVFIPQSGKSPGAVGCCDGDDCTFRSSCVNRSERDDCDEDCQEDPSTLKCTGLLQRYCNTVAFPGGVTDYYCALTKGSVLTAQTAAKGDKSRSFSEVKPTSTSTKKTTTTTTSSTTSKKTSSSSSSSSTSTSSSTTSKSSTRSTSETSSEVLPSTTEPTITASTTDADRAGAATSSTPPEASTTQSTPVGAIVGGVLGGIALIALCIFGAIFLRQQRKKSQAMAEMPPSQPFMAEPTLPSTQPPVPPYGQGMGSSGMTGYPPSSAAGTSPQMFATPTAAAAGATAGAVAAAAASARGASGPYHNRPPSTLTTTTTAANNTYYDPSPLTTPGGSPQMQYAHQMHPPPPLPTPAYYNHPSQDAYQGGDGAWAGGGSTNAGAAAEPPDRHSTSTPVSTYNGATPVTPASALGPMPGEPQQHAPAGGGGGGSGSDGNGVPLILQPGMGYRPYRPPGAGGSSSTRSAGGRNATASASGSESPTVRTATVAMVVPRKVVPASSAPPSTEQSRSQGQSQGAAAPGDQQTAAVELP

SEQ ID NO: 1497 - protein, 596 aa, Myceliophthora thermophilia
FLPLPTNRYQALPLEDGWNPKPTQPPDAHLVRRQMSRPSSYLVAPDNTCGFIEGNSRSAYACLDDSMQCVFIPQSGKSPGAVGCCDGDDCTFRSSCVNRSERDDCDEDCQEDPSTLKCTGLLQRYCNTVAFPGGVTDYYCALTKGSVLTAQTAAKGDKSRSFSEVKPTSTSTKKTTTTTTSSTTSKKTSSSSSSSSTSTSSSTTSKSSTRSTSETSSEVLPSTTEPTITASTTDADRAGAATSSTPPEASTTQSTPVGAIVGGVLGGIALIALCIFGAIFLRQQRKKSQAMAEMPPSQPFMAEPTLPSTQPPVPPYGQGMGSSGMTGYPPSSAAGTSPQMFATPTAAAAGATAGAVAAAAASARGASGPYHNRPPSTLTTTTTAANNTYYDPSPLTTPGGSPQMQYAHQMHPPPPLPTPAYYNHPSQDAYQGGDGAWAGGGSTNAGAAAEPPDRHSTSTPVSTYNGATPVTPASALGPMPGEPQQHAPAGGGGGGSGSDGNGVPLILQPGMGYRPYRPPGAGGSSSTRSAGGRNATASASGSESPTVRTATVAMVVPRKVVPASSAPPSTEQSRSQGQSQGAAAPGDQQTAAVELP

SEQ ID NO: 1498 - DNA, 684 bp, Myceliophthora thermophilia
atgtcggagctcaattcggtcgtcgtcgtcacgaccagcatcgtcgccttcatcaccggcttcggcctgggcgtctacgcgatccgcggctacctcatctctcccgacctggccgcccagcgccacgcgtacctcaacgaccccgtcgagagcgaggagtcggacgtggacgaggaggagacgctgctggaccacgcgcccaactgggccaacggacccgaggccgaccggaggcagggcctgcgggtgggcggtgccggaccggcgacccgcggccgggccgcggggctccaggtgagcgggaacgaggagtgcaagctggtgctggtcgtccggacggacttgggaatgaccaagggcaagatcgcggcgcagtgctcgcacgcgacgctcgcgtgctacaagtccctcttccgcgccgcgcagcaggacgcgctgtcgcccgaggccaagatcctgcggcagtgggagcgcatggggcaggccaagatcgcggtgcaggtcaagagcgaggacgagctgctcgagctgatgggcaaggcgcgaagcctggggctgacggccgaggtgatcgccgacgcggggcggacgcagatcgcttccgggagcaggacggtcctgggcgtcgggccggcgcccaagagcttggtggatcaggtcacgggccacctcaagctcttgtga

SEQ ID NO: 1499 - protein, 227 aa, Myceliophthora thermophilia
MSELNSVVVVTTSIVAFITGFGLGVYAIRGYLISPDLAAQRHAYLNDPVESEESDVDEEETLLDHAPNWANGPEADRRQGLRVGGAGPATRGRAAGLQVSGNEECKLVLVVRTDLGMTKGKIAAQCSHATLACYKSLFRAAQQDALSPEAKILRQWERMGQAKIAVQVKSEDELLELMGKARSLGLTAEVIADAGRTQIASGSRTVLGVGPAPKSLVDQVTGHLKLL

SEQ ID NO: 1500 - protein, 200 aa, Myceliophthora thermophilia
IRGYLISPDLAAQRHAYLNDPVESEESDVDEEETLLDHAPNWANGPEADRRQGLRVGGAGPATRGRAAGLQVSGNEECKLVLVVRTDLGMTKGKIAAQCSHATLACYKSLFRAAQQDALSPEAKILRQWERMGQAKIAVQVKSEDELLELMGKARSLGLTAEVIADAGRTQIASGSRTVLGVGPAPKSLVDQVTGHLKLL

SEQ ID NO: 1501 - DNA, 3456 bp, Myceliophthora thermophilia
atgacggatgttgcgggactcgtcgtcggcgtcgctgccatgtggcagacggccgtcgctgtttatgacctggtcgattcctcgcggcagtttggcatggactacgagattctcaacgtaaagttcgaggttgagcgtgtccggttgatctgctggggcgacgcggttgggttgaagagcttgatagtctcacgagactcgaacgagccccacgcatcgaaccaagtgtcgaatccgaagccggatccacgactcaaccgcgaggagatacgggtcgccgtgatccgtgtgctcggctgcattcagcaggcattcgaagacacgagccgcctgcaggagcgatacggactgcaacccgccagcggtcccggtgccgcgaccgtcctggaatccgaggagacgggcattccgccgtcgcagacacagcgcatcctccatggcgtcttcaagcgtgcctacgaaaacatgcgcagggtcgcgcgggaacggcagcgcgacacgccgctcgcgcgcaggacggtgtgggcggtgcgcgaccgcaaaaagttcacggtcctcgtcgccgaactgcgcgccttcaacgacagtctcgagagcctcttccccgatgcccaagcgcgggcggccgaggccatgaggagcgacatcgacgccgcggtggaggtgcgtgagttggccctcctgcaagaggcgacggcaggcgagcatggggcgctctccgagtgcgcgagcatgcgtctcgacgaattgggtgtgtcactgtcggccaggaccgagctgctgtccgtatcgagggcccggagcgacgcggacagcgaagacacggtcgagaacgtcgcaaacgcacgcgaggaagcagacgaggagatcaagcggcatgatcaggagggtgaccgggagacagaacctgaaatgaccgagctggagaagcgactgaacgacctagagttgttcgtcgggaagaaaaactctggtgcgctgaccacgagcatcatcggcccattttctagtctggcccgcgtctcggctcatgtctactgggacggcgaaaaggaggataaggattggccgccctcgtggatggagagggaaaggggatttgtgggcgtgtcgcacgcggctttcgaaatgtacaagaggaaaaagtatatgaagaagccccgtcggtccgagtacgagtcacccgactcggaggactacgtactgcttgatcctgagagccacgccaagctggagaatgtcaatcccggaactgtcacggttgaagggtttggcatcgagtgctgggactttgaggagacaaaaccaaggaaccagactatcatgatcaaccactcgaagctcccggttctccgcgcgtccaaactgctacgccggctaaatgagatccaaaaaaaatcgggcaagtttggatggtacccaacccaggaggagttgaatctcaaggagtttgttggcactctcggcatcgtctactacgaccagaaatacgccaaagacccggaacgatggatcggcgatctctacagcgtcttgaaccgcagcgacatctttgccaactttctgacggaatccagcgttggcctgcaatgggctggccccgcgaacgacgattgcatcggcatttggaacttcctccggcagatcatcctgagctgggagctggcggtgaggctggagcacctcgaccgcggccgctctcactcgggatttaccgagcgaatccttgccaaccttatcgtatccgacctatggctcaaacacgtcgagatcatcctcaccgaccaaaagatcccgacggagggcttgaaaaggcccgagacggccgaggagaaagccaaagctgaagacttcaaggagaaaggcaatgacgcaatgaagcgcggtgaataccaaaaggctgtcgatctgtacaccgaggccatcaagatcgatctcggtaacgccgtgtaccgatgcaaccggtcggcagcgctcatcgggataaacgagttcgaagcggccgaggaggacgcctacgtcgcgacccagctggaccccaaatacgccaaggcgtggtcccgcatgggcatggccatccttaagcaggggcaaggaaagcgggcaaagagggcatacgagaaggcactgcgggttgccggcaaggacgcaagcccggccatgcgcaaggggctggctgatgccgaggcgagaatcaaggaagccgtcgaggccatcaacacggaacccgacgaggagaaggcgcacaacctgcggtccgcctttctcgacgaagactgggagattatgggcaagacgccggagctgcactcgctcgtgcacgagcagcaggtcgagggtcttctccacttcgccgagcgcatcaagtggcccttcatcaacgaggttcgcgactatgccgaggacgcgtacagcaccatccgcggcggcggcaccatcaacatccacctgcatgactggctctatggcctcaccctcccggggaaatggttcgccttcaagatcatgacggccctgatcctctgcactccgagcatccgggacgaggtcggcatcgcccattactacgagtgcggcctgtcgctgcccacccgctcgtactggcgggtcaggacagtgctgggccgcgtgctgggctgtctgcccggtgtcatctccctctgcggttggatcggaccctgcccgcccgtccagttcgaaccccccttacccgccaaaccccgccacatccgcatcaaaacccgtcgcgtctcccccatcgagcatccggccgactcggaggacggcgtggtcaacctcggcgggccccccgaccgctggtcggccacacgcatccggcccgacgaggaaatcaacccctatctcgccgacatgaaggactcgtccaaatggatcatcccggagccgcccgtgcgcgacataagcacctgctccatcgagtccatcaaactcaccaagctgccgctccgcaccgacatcgctcagaaggccgccaccgcttccgcggataacgagtcggaaatgttagacatcgaaaacgagacagaataccgtgccagcatcgtcttccgccgcgacgataacacgcccgaccccatcacctacaagctctacaccaacccggtcttcgttaccccgcctgcctgccaccccgggccaaagggcacctcccacgaggtccacatgcgcgagctgaaatactaccggaacatctggtccatcgagcggctgaaggagcatacgcccgaggccgatctcgacgagaatgacggcgaggcgccggtgatggtgatcaatgccacggggaagggcgccgaggtgctggcgagggcgtggtgttctgagcggggccgcaacgcggtcatcagacgggcgggaggcccgtgttttgtttgtgcggtcagggcggccgggaagggcgggctgggtacaggagtactgatctggactgagtga

SEQ ID NO: 1502 - protein, 1151 aa, Myceliophthora thermophilia
MTDVAGLVVGVAAMWQTAVAVYDLVDSSRQFGMDYEILNVKFEVERVRLICWGDAVGLKSLIVSRDSNEPHASNQVSNPKPDPRLNREEIRVAVIRVLGCIQQAFEDTSRLQERYGLQPASGPGAATVLESEETGIPPSQTQRILHGVFKRAYENMRRVARERQRDTPLARRTVWAVRDRKKFTVLVAELRAFNDSLESLFPDAQARAAEAMRSDIDAAVEVRELALLQEATAGEHGALSECASMRLDELGVSLSARTELLSVSRARSDADSEDTVENVANAREEADEEIKRHDQEGDRETEPEMTELEKRLNDLELFVGKKNSGALTTSIIGPFSSLARVSAHVYWDGEKEDKDWPPSWMERERGFVGVSHAAFEMYKRKKYMKKPRRSEYESPDSEDYVLLDPESHAKLENVNPGTVTVEGFGIECWDFEETKPRNQTIMINHSKLPVLRASKLLRRLNEIQKKSGKFGWYPTQEELNLKEFVGTLGIVYYDQKYAKDPERWIGDLYSVLNRSDIFANFLTESSVGLQWAGPANDDCIGIWNFLRQIILSWELAVRLEHLDRGRSHSGFTERILANLIVSDLWLKHVEIILTDQKIPTEGLKRPETAEEKAKAEDFKEKGNDAMKRGEYQKAVDLYTEAIKIDLGNAVYRCNRSAALIGINEFEAAEEDAYVATQLDPKYAKAWSRMGMAILKQGQGKRAKRAYEKALRVAGKDASPAMRKGLADAEARIKEAVEAINTEPDEEKAHNLRSAFLDEDWEIMGKTPELHSLVHEQQVEGLLHFAERIKWPFINEVRDYAEDAYSTIRGGGTINIHLHDWLYGLTLPGKWFAFKIMTALILCTPSIRDEVGIAHYYECGLSLPTRSYWRVRTVLGRVLGCLPGVISLCGWIGPCPPVQFEPPLPAKPRHIRIKTRRVSPIEHPADSEDGVVNLGGPPDRWSATRIRPDEEINPYLADMKDSSKWIIPEPPVRDISTCSIESIKLTKLPLRTDIAQKAATASADNESEMLDIENETEYRASIVFRRDDNTPDPITYKLYTNPVFVTPPACHPGPKGTSHEVHMRELKYYRNIWSIERLKEHTPEADLDENDGEAPVMVINATGKGAEVLARAWCSERGRNAVIRRAGGPCFVCAVRAAGKGGLGTGVLIWTE

SEQ ID NO: 1503 - protein, 1131 aa, Myceliophthora thermophilia
VYDLVDSSRQFGMDYEILNVKFEVERVRLICWGDAVGLKSLIVSRDSNEPHASNQVSNPKPDPRLNREEIRVAVIRVLGCIQQAFEDTSRLQERYGLQPASGPGAATVLESEETGIPPSQTQRILHGVFKRAYENMRRVARERQRDTPLARRTVWAVRDRKKFTVLVAELRAFNDSLESLFPDAQARAAEAMRSDIDAAVEVRELALLQEATAGEHGALSECASMRLDELGVSLSARTELLSVSRARSDADSEDTVENVANAREEADEEIKRHDQEGDRETEPEMTELEKRLNDLELFVGKKNSGALTTSIIGPFSSLARVSAHVYWDGEKEDKDWPPSWMERERGFVGVSHAAFEMYKRKKYMKKPRRSEYESPDSEDYVLLDPESHAKLENVNPGTVTVEGFGIECWDFEETKPRNQTIMINHSKLPVLRASKLLRRLNEIQKKSGKFGWYPTQEELNLKEFVGTLGIVYYDQKYAKDPERWIGDLYSVLNRSDIFANFLTESSVGLQWAGPANDDCIGIWNFLRQIILSWELAVRLEHLDRGRSHSGFTERILANLIVSDLWLKHVEIILTDQKIPTEGLKRPETAEEKAKAEDFKEKGNDAMKRGEYQKAVDLYTEAIKIDLGNAVYRCNRSAALIGINEFEAAEEDAYVATQLDPKYAKAWSRMGMAILKQGQGKRAKRAYEKALRVAGKDASPAMRKGLADAEARIKEAVEAINTEPDEEKAHNLRSAFLDEDWEIMGKTPELHSLVHEQQVEGLLHFAERIKWPFINEVRDYAEDAYSTIRGGGTINIHLHDWLYGLTLPGKWFAFKIMTALILCTPSIRDEVGIAHYYECGLSLPTRSYWRVRTVLGRVLGCLPGVISLCGWIGPCPPVQFEPPLPAKPRHIRIKTRRVSPIEHPADSEDGVVNLGGPPDRWSATRIRPDEEINPYLADMKDSSKWIIPEPPVRDISTCSIESIKLTKLPLRTDIAQKAATASADNESEMLDIENETEYRASIVFRRDDNTPDPITYKLYTNPVFVTPPACHPGPKGTSHEVHMRELKYYRNIWSIERLKEHTPEADLDENDGEAPVMVINATGKGAEVLARAWCSERGRNAVIRRAGGPCFVCAVRAAGKGGLGTGVLIWTE

SEQ ID NO: 1504 - DNA, 279 bp, Myceliophthora thermophilia
atgcaagatctcattctgcttgtcttcaacctcggtatcttgaccagggtcctcacgctgatgttcaccaacgtgtcggcccctggttgtgccgagctcggatgcacgtccttcgccgacattatcggaatcctcttggccatatttgggggcatttttatgatgctcggttacggccggacccgtgaatgtggcaccgatgactgcgatgctctccgctcctacccggcaggcccagcccgagacacggcctcgttcttgctgtatgctgcttcgtga

SEQ ID NO: 1505 - protein, 92 aa, Myceliophthora thermophilia
MQDLILLVFNLGILTRVLTLMFTNVSAPGCAELGCTSFADIIGILLAIFGGIFMMLGYGRTRECGTDDCDALRSYPAGPARDTASFLLYAAS

SEQ ID NO: 1506 - protein, 73 aa, Myceliophthora thermophilia
LMFTNVSAPGCAELGCTSFADIIGILLAIFGGIFMMLGYGRTRECGTDDCDALRSYPAGPARDTASFLLYAAS

SEQ ID NO: 1507 - DNA, 726 bp, Myceliophthora thermophilia
atgttcagaatcttgttctccctgcatctcatcatcgtctctcttctcctttcatccttcacacgagctcttccctcttccggcggctatattggcggcgagaacaggtggtatccgaggcgcatcctaggcggaatctcggtcgtcgacacccctatcgtgcgggccgcagacgcgttcgccaagcgacacgcgcaggacttcgtgtacaagcatgtcatgcgttcgtggctgttcggtgcactcgttgtccagcacaacgaaacgctgcgggcaaccgtcgaccccgaggtgcatgctgtcgccgcgctcctgcatgacctgggatgggaccagaccgaaggctccccgttcgtcagccccgaccgtcgatttgaagtcgatggcgccatcgccgcgcgcgactttctccgggctcacgaggacggcaaacggtgggaggaacgtcgagtgcagctggtttgggattccattgcgttgcatacagaggggagcatcgcgctgttcaaggagctaggcgtccaggtcgtgtacaacgggatcatgctcgactttcagggtccgaagttcggcgtcacggaggatgagtacgctgctgtcgtcaaggagttccccagggacgacctgatgcaaggtaccaacgagaccttcatctggctgtgcaggacgaagcctgcgaccacgtatggtgagtgtattacgggtttcggctcgtatccgctgtga

SEQ ID NO: 1508 - protein, 241 aa, Myceliophthora thermophilia
MFRILFSLHLIIVSLLLSSFTRALPSSGGYIGGENRWYPRRILGGISVVDTPIVRAADAFAKRHAQDFVYKHVMRSWLFGALVVQHNETLRATVDPEVHAVAALLHDLGWDQTEGSPFVSPDRRFEVDGAIAARDFLRAHEDGKRWEERRVQLVWDSIALHTEGSIALFKELGVQVVYNGIMLDFQGPKFGVTEDEYAAVVKEFPRDDLMQGTNETFIWLCRTKPATTYGECITGFGSYPL

SEQ ID NO: 1509 - protein, 218 aa, Myceliophthora thermophilia
LPSSGGYIGGENRWYPRRILGGISVVDTPIVRAADAFAKRHAQDFVYKHVMRSWLFGALVVQHNETLRATVDPEVHAVAALLHDLGWDQTEGSPFVSPDRRFEVDGAIAARDFLRAHEDGKRWEERRVQLVWDSIALHTEGSIALFKELGVQVVYNGIMLDFQGPKFGVTEDEYAAVVKEFPRDDLMQGTNETFIWLCRTKPATTYGECITGFGSYPL

SEQ ID NO: 1510 - DNA, 831 bp, Myceliophthora thermophilia
atgatcgtccggctggggacttgggccgatctcgaggccatgacggccgtcctgatcgcggcctcgccgctcgacccggtctacccgtaccgcttcccggaccggcacctgtaccctgctgaattcgcggccgtctgccggcagaagtgcgtcgagtacctcgagaccagcaccgtggtcgtctgcgagctgcccgtcgacgcctacggctccgcctccgaggttgtcgccttcagcgcgtgggacctgcctctggcagcgcagcctgcgaacgccccccgccgcagctctgtcgaaccatcatcccccacgtccgccgcgttcgcccgctccccaaccaccgtcggcaacctgacacgacagtcggcgttccgcgccgccctggccgagcacaagcagaccctcttcgacgcgcgctacggctacggcgggcacgtcttcctgcggatcctgctgacccacccgcggcaccagcggcgcggcgcgggcaccgcgctggcctcgtggggcgtcgggcgcgcgcgggccctgggcgcctacgccaccgtgttcgagaacaacatgggcctgcgcctgtaccggcgcctcggcttccgcgaggtggggcggtgccgcatccgcgtcgagggcgacgccgagacgctcgagctccccgcgctggccaggccgcccggccccacgggcgccatgcgcgaagccaccgagggcgtcgccgccaagctggacgggctcgtctgcgggcgcagggtgagcgagtgcgccgtcggtggcggtggcggcggcggctgggacgggagggacgggagggatgccagcacggtgtgtggttga

SEQ ID NO: 1511 - protein, 276 aa, Myceliophthora thermophilia
MIVRLGTWADLEAMTAVLIAASPLDPVYPYRFPDRHLYPAEFAAVCRQKCVEYLETSTVVVCELPVDAYGSASEVVAFSAWDLPLAAQPANAPRRSSVEPSSPTSAAFARSPTTVGNLTRQSAFRAALAEHKQTLFDARYGYGGHVFLRILLTHPRHQRRGAGTALASWGVGRARALGAYATVFENNMGLRLYRRLGFREVGRCRIRVEGDAETLELPALARPPGPTGAMREATEGVAAKLDGLVCGRRVSECAVGGGGGGGWDGRDGRDASTVCG

SEQ ID NO: 1512 - protein, 255 aa, Myceliophthora thermophilia
SPLDPVYPYRFPDRHLYPAEFAAVCRQKCVEYLETSTVVVCELPVDAYGSASEVVAFSAWDLPLAAQPANAPRRSSVEPSSPTSAAFARSPTTVGNLTRQSAFRAALAEHKQTLFDARYGYGGHVFLRILLTHPRHQRRGAGTALASWGVGRARALGAYATVFENNMGLRLYRRLGFREVGRCRIRVEGDAETLELPALARPPGPTGAMREATEGVAAKLDGLVCGRRVSECAVGGGGGGGWDGRDGRDASTVCG

SEQ ID NO: 1513 - DNA, 357 bp, Myceliophthora thermophilia
atgcgttctcgcattttgttttctgatctgttcatatttccgcgcaccgtcttgatcatgttcgccatccagcactttgtttctggggggggatatgcccggccagcaaagtgggaatatccatcagtttcagctcatttgatgtccaagtctgaagcatttgttgatcttgaatgtttgctaccggtgataaggagcttcgacggtctagagaacgcttctaatagcttcccaagaccgggccctcacctcatgtctcccctttcggcgccccttctgaccgggtcgttcccctccacatccccggcttccctcttatcctcccctgacctgatgagcagcacgacctctcgctaa

SEQ ID NO: 1514 - protein, 118 aa, Myceliophthora thermophilia
MRSRILFSDLFIFPRTVLIMFAIQHFVSGGGYARPAKWEYPSVSAHLMSKSEAFVDLECLLPVIRSFDGLENASNSFPRPGPHLMSPLSAPLLTGSFPSTSPASLLSSPDLMSSTTSR

SEQ ID NO: 1515 - protein, 85 aa, Myceliophthora thermophilia
RPAKWEYPSVSAHLMSKSEAFVDLECLLPVIRSFDGLENASNSFPRPGPHLMSPLSAPLLTGSFPSTSPASLLSSPDLMSSTTSR

SEQ ID NO: 1516 - DNA, 804 bp, Myceliophthora thermophilia
atgaagttctacatcctcgccgctctcgcctctatcctggcccctgccgccgcctaccccgtcaccgccaacagcggccttagctgccgctccggccccggcaccagctaccccgtcaagaagacctacaagaagggtttcgatatcaagattagctgccagactacgggtacctcggtgaatggctacaacatctgggataagacccaggatggctgctacgtctccgactactacgtcaagaccggcaagagcggcttcgtcaccacgaagtgcggctccagcggcggcggcggcggctcgacctgcgctgctcccaagtcgaactcggcgaccgttgacctgatcgccaagtctgagggcttccgctccaagatctacaccgatgctaccggccacgctacggtcggctacggccacatgtgcaccaagcccaagtgcgccgaagtcaagtacaagatcccgctctccacggctgacggcaagaagctgctggccgaagacatgaggaaattcgagaagtgcatcaccaacatgctcaacagcaaggcggtcctcaactacaaccagttcggtgccctcgtcagctggtccttcaacgtcggctgcggcgccgcccagagctcccagctcgtcaagcgtctcaacaagggcgagaacgtcaacaaggtcctcagcgaggagctccccaagtgggtccacggcggcggcaaggtcctgcccggcctcgtcactcgccgcaagaacgaggtcgccctggccaagaagcccggctccagcaaggccctgcccgtcaagtgctaa

SEQ ID NO: 1517 - protein, 267 aa, Myceliophthora thermophilia
MKFYILAALASILAPAAAYPVTANSGLSCRSGPGTSYPVKKTYKKGFDIKISCQTTGTSVNGYNIWDKTQDGCYVSDYYVKTGKSGFVTTKCGSSGGGGGSTCAAPKSNSATVDLIAKSEGFRSKIYTDATGHATVGYGHMCTKPKCAEVKYKIPLSTADGKKLLAEDMRKFEKCITNMLNSKAVLNYNQFGALVSWSFNVGCGAAQSSQLVKRLNKGENVNKVLSEELPKWVHGGGKVLPGLVTRRKNEVALAKKPGSSKALPVKC

SEQ ID NO: 1518 - protein, 249 aa, Myceliophthora thermophilia
YPVTANSGLSCRSGPGTSYPVKKTYKKGFDIKISCQTTGTSVNGYNIWDKTQDGCYVSDYYVKTGKSGFVTTKCGSSGGGGGSTCAAPKSNSATVDLIAKSEGFRSKIYTDATGHATVGYGHMCTKPKCAEVKYKIPLSTADGKKLLAEDMRKFEKCITNMLNSKAVLNYNQFGALVSWSFNVGCGAAQSSQLVKRLNKGENVNKVLSEELPKWVHGGGKVLPGLVTRRKNEVALAKKPGSSKALPVKC

SEQ ID NO: 1519 - DNA, 780 bp, Myceliophthora thermophilia
atgcgcttctccacaaccgccctgctggcgctgccggtcctggcgtctgcggccgctgagagcccgttcgagcaatacaaggccaagttccagaacttcctcagcagcttcggcgcggcgatacccaacgcgggccaggccgccgaccaggccgctggtgcggcttccagcgccgcggcgggcaaggcgggcaaggccaagaaggtggtggagcccaagaagatcgagacgctcacgctcgagaactggaaggacacgctgtacgggcccgtgcaggccgacgcgaccaagcctgaggagtggttggttctgttgaccgggcggaacaagacgtgctacggccagtgcggcaagatcgaggcggccttcaacgagtcggcgctccccttcgcggcgctcccggcgtcgcagccgtcgccgcacctggcatcggtcaactgcgacgaccagccggtgctctgcaacagctggtcggccagcacgggcgggctgtggctcttccaggtggcggcgccgccggcgcccgtcgagatcctggccaagcgcgtgaacctgacgacggtcacggcccaggacgtcgtcgacgcgtacacggccgccaaccgcaccgaggccggctggcgcaccatcccgcccgacggctacttccacccgaccgagggcaagctcgccaagctcgggctcgccgtgcccctgggctacgtcttctgggccctgaacgccatcccgtcgtggggcatgatgttgctggtgtcgttcctcagcaggaccatgatgtag

SEQ ID NO: 1520 - protein, 259 aa, Myceliophthora thermophilia
MRFSTTALLALPVLASAAAESPFEQYKAKFQNFLSSFGAAIPNAGQAADQAAGAASSAAAGKAGKAKKVVEPKKIETLTLENWKDTLYGPVQADATKPEEWLVLLTGRNKTCYGQCGKIEAAFNESALPFAALPASQPSPHLASVNCDDQPVLCNSWSASTGGLWLFQVAAPPAPVEILAKRVNLTTVTAQDVVDAYTAANRTEAGWRTIPPDGYFHPTEGKLAKLGLAVPLGYVFWALNAIPSWGMMLLVSFLSRTMM

SEQ ID NO: 1521 - protein, 240 aa, Myceliophthora thermophilia
ESPFEQYKAKFQNFLSSFGAAIPNAGQAADQAAGAASSAAAGKAGKAKKVVEPKKIETLTLENWKDTLYGPVQADATKPEEWLVLLTGRNKTCYGQCGKIEAAFNESALPFAALPASQPSPHLASVNCDDQPVLCNSWSASTGGLWLFQVAAPPAPVEILAKRVNLTTVTAQDVVDAYTAANRTEAGWRTIPPDGYFHPTEGKLAKLGLAVPLGYVFWALNAIPSWGMMLLVSFLSRTMM

SEQ ID NO: 1522 - DNA, 1458 bp, Myceliophthora thermophilia
atgaggatctcgacgttccaggccgccatcggctcggcctcggttctgttcaccgcccagtcggcttccgccagcatcggtcaccgacacgcacatgttgaatatgcgaggaggcatgcccatggacacaatcatgatgcccgccaggcggaggaggcggccaacgccaccgagatcgtcgcgaggaaggctacctgcacgctgccagaccatcccgatctggtctacgtcccgggccaagataacaatgggttcgccctgagccccgatcagtcttgcaacgatggagactattgcccgattgcctgtgtgtctggcaaggtcatggcgcagtggaaaccaggcacgacgtatacgtatcccgagtccatttacggcggactctactgcaacggcgggaaggcagagaagccgttcgaggaccggccatattgtgtggatggcaccggcgcggtgaaggccgtgaacaaggcgggcagcatcgtgtcgttttgccagacggtactgccgggcaacgaggccatgatcatcccgaccgatgtcacagacacggcaacaattgccgtaccggggccggattattgggacggaaccgctgcgcactactacatcaatccgcccgggatcccctcctccgttggctgcgtttggggagtcatcactaaggcactcggcaactggaccccttatgtcgccggcgcaaacaccatggccaatggcgagacctttgtgaagatcgcgtggaaccccgagtacctgaagacgcccctggccaagagcatcccgacctacggtctcaagattgagtgccccgacggcggctgcaacggcctgccctgcgtgatcgacccctccaagggcggcattaacagcgttgatagccccgtcagcaccagcggcgtcggtgacgccaacttctgcgtcgtcactgtgcccaagggcaagaccgccaacattgtggtttttaacacggacggttcttcaggcggcggcggcggcgatgataacgacagcgatgatgacgacaaggacgacggcggcgacaagccctcgccctcgccctcgccctcgcccacgcccgagcccaagccctcctcctcttcaaaggcgcccgaaccgcccaagatcactagcgactccgacgtcccgactaccacggcggcgccgtcctcgtcgcgcgccgcgtccacgtccactccctccgactcgtcctcctcctcctccacctcttcggaggccttctacggcgccatgttccacgagcaggacgtgcggggcagcaccttgtcgaacgagacggccccggccacggcgcccgagcccgtcaaggcctcggcgtctgaggcagcgaaggagcccgtgtcgaccacatcgaagaacgagggcgctgctgccgagggcggctcggcgattgccgggctcgtggtcgcgcttgttgccgccgcggcccttctctag

SEQ ID NO: 1523 - protein, 485 aa, Myceliophthora thermophilia
MRISTFQAAIGSASVLFTAQSASASIGHRHAHVEYARRHAHGHNHDARQAEEAANATEIVARKATCTLPDHPDLVYVPGQDNNGFALSPDQSCNDGDYCPIACVSGKVMAQWKPGTTYTYPESIYGGLYCNGGKAEKPFEDRPYCVDGTGAVKAVNKAGSIVSFCQTVLPGNEAMIIPTDVTDTATIAVPGPDYWDGTAAHYYINPPGIPSSVGCVWGVITKALGNWTPYVAGANTMANGETFVKIAWNPEYLKTPLAKSIPTYGLKIECPDGGCNGLPCVIDPSKGGINSVDSPVSTSGVGDANFCVVTVPKGKTANIVVFNTDGSSGGGGGDDNDSDDDDKDDGGDKPSPSPSPSPTPEPKPSSSSKAPEPPKITSDSDVPTTTAAPSSSRAASTSTPSDSSSSSSTSSEAFYGAMFHEQDVRGSTLSNETAPATAPEPVKASASEAAKEPVSTTSKNEGAAAEGGSAIAGLVVALVAAAALL

SEQ ID NO: 1524 - protein, 461 aa, Myceliophthora thermophilia
SIGHRHAHVEYARRHAHGHNHDARQAEEAANATEIVARKATCTLPDHPDLVYVPGQDNNGFALSPDQSCNDGDYCPIACVSGKVMAQWKPGTTYTYPESIYGGLYCNGGKAEKPFEDRPYCVDGTGAVKAVNKAGSIVSFCQTVLPGNEAMIIPTDVTDTATIAVPGPDYWDGTAAHYYINPPGIPSSVGCVWGVITKALGNWTPYVAGANTMANGETFVKIAWNPEYLKTPLAKSIPTYGLKIECPDGGCNGLPCVIDPSKGGINSVDSPVSTSGVGDANFCVVTVPKGKTANIVVFNTDGSSGGGGGDDNDSDDDDKDDGGDKPSPSPSPSPTPEPKPSSSSKAPEPPKITSDSDVPTTTAAPSSSRAASTSTPSDSSSSSSTSSEAFYGAMFHEQDVRGSTLSNETAPATAPEPVKASASEAAKEPVSTTSKNEGAAAEGGSAIAGLVVALVAAAALL

SEQ ID NO: 1525 - DNA, 516 bp, Myceliophthora thermophilia
atgaaggccatcgctgctcttaccctcgctcttgccggcgccgtcgtcgcccaggacggtctcggcctccctgaatgcgctcaatcatgcgcgagctctttcctcgccggcggcattggcaactgcgggagggatgtgaagtgcatctgccaggagaagagcttcctcagtgacatcgcgtgctgcctagctggcgattgcagcgctcaggaccaggcacaggccgtcagcgttgccgccaacctctgccgcggtgtcggcgtgaccgacctgccgagctcggtctcctgcgcgaccgcctccacctcggcgaccggctccgccgccagcgccccgaccaccggctcggcctcgaccacggcctcgggctccggcacgaccttcggtcctaccaacaccgccaccgccgccgccaccgagacttcgacccagtccagcaacctcggcccccgcccgactgctgccgccggcctcggcgccatcggcggcatcattgctgccgtcgcccttctctaa

SEQ ID NO: 1526 - protein, 171 aa, Myceliophthora thermophilia
MKAIAALTLALAGAVVAQDGLGLPECAQSCASSFLAGGIGNCGRDVKCICQEKSFLSDIACCLAGDCSAQDQAQAVSVAANLCRGVGVTDLPSSVSCATASTSATGSAASAPTTGSASTTASGSGTTFGPTNTATAAATETSTQSSNLGPRPTAAAGLGAIGGIIAAVALL

SEQ ID NO: 1527 - protein, 154 aa, Myceliophthora thermophilia
QDGLGLPECAQSCASSFLAGGIGNCGRDVKCICQEKSFLSDIACCLAGDCSAQDQAQAVSVAANLCRGVGVTDLPSSVSCATASTSATGSAASAPTTGSASTTASGSGTTFGPTNTATAAATETSTQSSNLGPRPTAAAGLGAIGGIIAAVALL

SEQ ID NO: 1528 - DNA, 1653 bp, Myceliophthora thermophilia
atgaaggcagctgtgatggccgccgctgcggcggttctcgccaatggcgtgagcgcggcccgggttcacgggcaccgccatgcgcacgccctatttaagaggggcgacaccggtgaagtgtgcactccgggctgcaccaccatctactccaccatcaccggtgaaccgacccttctcccgcctgcgccgactcccacgaccacggccgctcccgagcccaccacgacgagcgggcccgtcctcgtcccgacgccgatccagcagacctgcccgactcccggcacctacaccatccccgcgacgaccgtcgtcctgaccgagacgaccaccgtctgcggcgcgtcttcgaccgaggtcccgagcggcacccacaccctcggcggcgtcaccaccgtcgtcgagacggccaccacggtcgtctgccccgtggccaccaccgagacccagaatggcgtcgttaccagcgtcatcaagaccaccacctacgtctgcccgtcggccggtacctacaccattgcccccatcaccaccgtcgtccccagcgtcaccaccgtggtcgtgcccgtcgtcgagacgtactgcccgggtacctacaccgccccggagctcgtcaccaccgtcaccgagaccagcgtgatcgtcacctgccccttcacttcggtcacccccgccgagcccacttcggccccggttcccacttcggagcccgctgagcccacttcggcccctgctcccacttcggagcccgctgagccggcccctgcccctccctcgtcgtcgtccaaggtggctccgtccccatctccgtccccttcgtccccgtccaagggccctaatcccgacaacaacggcaagcggtgggccatgacctacaccccgtacgccgagactgctgagggtggctgcaagagcgcctccgaggtaatggacgatgtcgccgccattgccaaggcgggtttcaaggccctccgtgtctactcgaccgactgcgacaccctgcccaacgttggtgccgctgctcgcgcccacggcctccgcctgattgtcggcatcttcatcggcaaggtcggctgcgacaacaacagccccgacgttgccgaccagatcagcgccctcaaggagtggaaggagtgggatctcgttgacctgtgcgtcgtcggcaacgaggccctcttcaacggcttctgctccgtctccgagctcgccagcctcatcggccgcgtcaagtcggagctcggctcggtcggttataacggccccttcaccaccaccgacgtcgtcgccgcctggaccaacaacgacgtctcggccatctgcgacgccatcgacgtcaccgccaccaacgcccacgcctacttcaatgccgacaccgagcccgccgatgccggcaagttcgtcgccggccagctggccattgtcgagaaggtctgcggcaagcccggctacgtcatggagaccggctggccctcggccggcaactgcaacggcgtcgcctgcgccggcgaggctgagcaggccaccgccatccactccatcgagcaggagctcggcaacaaggccgtcttcttctccttccgcaacgacccgtggaagcagcccggcgagtgcaactgcgagcagcactggggctgcgccaacgtcttcggcgtttaa

SEQ ID NO: 1529 - protein, 550 aa, Myceliophthora thermophilia
MKAAVMAAAAAVLANGVSAARVHGHRHAHALFKRGDTGEVCTPGCTTIYSTITGEPTLLPPAPTPTTTAAPEPTTTSGPVLVPTPIQQTCPTPGTYTIPATTVVLTETTTVCGASSTEVPSGTHTLGGVTTVVETATTVVCPVATTETQNGVVTSVIKTTTYVCPSAGTYTIAPITTVVPSVTTVVVPVVETYCPGTYTAPELVTTVTETSVIVTCPFTSVTPAEPTSAPVPTSEPAEPTSAPAPTSEPAEPAPAPPSSSSKVAPSPSPSPSSPSKGPNPDNNGKRWAMTYTPYAETAEGGCKSASEVMDDVAAIAKAGFKALRVYSTDCDTLPNVGAAARAHGLRLIVGIFIGKVGCDNNSPDVADQISALKEWKEWDLVDLCVVGNEALFNGFCSVSELASLIGRVKSELGSVGYNGPFTTTDVVAAWTNNDVSAICDAIDVTATNAHAYFNADTEPADAGKFVAGQLAIVEKVCGKPGYVMETGWPSAGNCNGVACAGEAEQATAIHSIEQELGNKAVFFSFRNDPWKQPGECNCEQHWGCANVFGV

SEQ ID NO: 1530 - protein, 531 aa, Myceliophthora thermophilia
ARVHGHRHAHALFKRGDTGEVCTPGCTTIYSTITGEPTLLPPAPTPTTTAAPEPTTTSGPVLVPTPIQQTCPTPGTYTIPATTVVLTETTTVCGASSTEVPSGTHTLGGVTTVVETATTVVCPVATTETQNGVVTSVIKTTTYVCPSAGTYTIAPITTVVPSVTTVVVPVVETYCPGTYTAPELVTTVTETSVIVTCPFTSVTPAEPTSAPVPTSEPAEPTSAPAPTSEPAEPAPAPPSSSSKVAPSPSPSPSSPSKGPNPDNNGKRWAMTYTPYAETAEGGCKSASEVMDDVAAIAKAGFKALRVYSTDCDTLPNVGAAARAHGLRLIVGIFIGKVGCDNNSPDVADQISALKEWKEWDLVDLCVVGNEALFNGFCSVSELASLIGRVKSELGSVGYNGPFTTTDVVAAWTNNDVSAICDAIDVTATNAHAYFNADTEPADAGKFVAGQLAIVEKVCGKPGYVMETGWPSAGNCNGVACAGEAEQATAIHSIEQELGNKAVFFSFRNDPWKQPGECNCEQHWGCANVFGV

SEQ ID NO: 1531 - DNA, 1266 bp, Myceliophthora thermophilia
atgcagggactcgtcaagacggcgctcgcggcagctctcgttgccagcgttgctgcccaacctcacaaccatggccatcgccatctgcacgccaagaagcacaaccacttgcagatggagaagcgcgacaccgtgattgtcaccaaggtggttgagggcccgactgttacggagtatgttatggggaatgggaagaaggtcgatgctgccgaggcgaagaagggcctcgagaagggcgatttcatcgtcatgggcgaaaccaagcccaccttcagcgcgccgccccctgtcgtctcgacctcggtggctagtctccctcacggaggccagttctacgagaagacgacctcggtcgccccgagcagcacctcgtccgtcgctcccaagccttctacttcgtccgcacctgcgccggaaccggacctcccaaccggccttgacgcggatttcccgagcggcaaggtcccgtgcgacaaggtcccgaccgagtatggtgcggtcgagattccctgggttggcaccaacggttggacgacgctggccaagtttggcaagtgggtcaagggcgctgcaattgacaacatcgaatcccctaccgatggcacgtgcgagccgggcatgatgtgctcttatgcttgccctcccggttacgagaagacccaatggcccgaggagcagggtgccactggccagtcggttggcggtttgtggtgcaacgaagatggcttcctggagctcacgcggcccaacgtcaccaagatctgcgagcccggtgccggtggcgtctacgttgtgaacaagctcccaggcaccgccgccgtctgccgcaccgactaccccggcaacgaggccatggttatccccctggagacctcccccggcgggaagtaccccctgacgaaccccgactccgcaacatactactggtggaagggccaacccaccactgcccagtactacgtcaaccccctcgacgtcgaggttgaggaggcctgcacgtggcagagcaagaagtaccccgactcggccggcaactgggcgcctaccaacatcggcgtcggcaagagtctgtcgggagagactttcatttccatcttccctaacacgccgaccagcagcgctgtccttgacttcaacatcaagatcgagggtgatggtgtctcgggagaatgctggctgaaggacggcgagtactatggtagctccagtggctgcacagtcggcttgaaggcgggtggcacagccaacatcgtgttctacaagtaa

SEQ ID NO: 1532 - protein, 421 aa, Myceliophthora thermophilia
MQGLVKTALAAALVASVAAQPHNHGHRHLHAKKHNHLQMEKRDTVIVTKVVEGPTVTEYVMGNGKKVDAAEAKKGLEKGDFIVMGETKPTFSAPPPVVSTSVASLPHGGQFYEKTTSVAPSSTSSVAPKPSTSSAPAPEPDLPTGLDADFPSGKVPCDKVPTEYGAVEIPWVGTNGWTTLAKFGKWVKGAAIDNIESPTDGTCEPGMMCSYACPPGYEKTQWPEEQGATGQSVGGLWCNEDGFLELTRPNVTKICEPGAGGVYVVNKLPGTAAVCRTDYPGNEAMVIPLETSPGGKYPLTNPDSATYYWWKGQPTTAQYYVNPLDVEVEEACTWQSKKYPDSAGNWAPTNIGVGKSLSGETFISIFPNTPTSSAVLDFNIKIEGDGVSGECWLKDGEYYGSSSGCTVGLKAGGTANIVFYK

SEQ ID NO: 1533 - protein, 402 aa, Myceliophthora thermophilia
QPHNHGHRHLHAKKHNHLQMEKRDTVIVTKVVEGPTVTEYVMGNGKKVDAAEAKKGLEKGDFIVMGETKPTFSAPPPVVSTSVASLPHGGQFYEKTTSVAPSSTSSVAPKPSTSSAPAPEPDLPTGLDADFPSGKVPCDKVPTEYGAVEIPWVGTNGWTTLAKFGKWVKGAAIDNIESPTDGTCEPGMMCSYACPPGYEKTQWPEEQGATGQSVGGLWCNEDGFLELTRPNVTKICEPGAGGVYVVNKLPGTAAVCRTDYPGNEAMVIPLETSPGGKYPLTNPDSATYYWWKGQPTTAQYYVNPLDVEVEEACTWQSKKYPDSAGNWAPTNIGVGKSLSGETFISIFPNTPTSSAVLDFNIKIEGDGVSGECWLKDGEYYGSSSGCTVGLKAGGTANIVFYK

SEQ ID NO: 1534 - DNA, 1965 bp, Myceliophthora thermophilia
atggcgacggcgaaacggacgattacgactttgcggaacagccagcgtcgccagaccttagccatccttctctttgccctcccgagcttgcccagtcccgccgccggagtcgcgagcgcagattgtggagcaacatttctgttcccgaccctgggcctcaccttcttctacctcgacaccatcgccgtcacataccgctccaacatcgccaatcccacgctgtcgtgttggtgcggcgtccccggccgggcaactccaaagattacaaacaacaatgtcagtccgttcaacgggagcgtacctgtcaccctgaccgttttgtccgacgacccttgttggtttgagctccggtcgtcgtccggtgaatgccggcataccagcgagaccttccatctgtctccgaaacaacgcaccgtgggcgaggacgacggctcctcgcctcggtcgaccgcctctcccgaccccgcattgcgcccttccccgacgacgtcacacccagaagcccgcgcagcaggcgccgtggtttctcagcagcgtaggagcagctccacggaggacagctttagcatcggcgccaaagctgcgttgggcgtcggaatcgcgctcatctgcatcgccatcggcgccatggccgccttcctctacttcaggcgccggcggcgcgccccggacgccgaagtcaccggcggcatgttgagtcacagccgtcgcgggaggaaaggggccgagaagaagcgggcgggtgcctcgtcggaggcttcgggtcattccgacgagccgctctgccccatacagccggtgttcgatggcttccccggctcgatgggctatgaagacgtgcgctccctacactcgaacacgcagtcacactctactacacattcgtactccccgcaatcgcccgcctactctcagaccggcggcttctggacgcaagagcgcagcatcgaacgggaggaactcacagcggcgcgtctgaaatcccagctccagccgtcggggcccacggtggtatcatacgggcccaatcccgtcaccccaacactaacgccccgggtctccccccggccgagcgttcccacagccacgacaccaatgtcctccggaagcatagagcaggtgccgggccacgtgcccatgatgcccattccctcctccgactacgccgactataccaactacagcatccctcccccagcaccccttcccatgtctacgcccgaacctaaaccttcaccaccccgcccgcaagccgccggccccaccgtcgtctcctacggccccaaccgggtcacgcccaccccaaagatcgtcttgcctaccgtaccaccggacgagtccatcgtcaaccgccgctttcaagaagcagccgccaagtcctcggccgcgccgcaccaccacgagcgccagttctcctgggaagccgactctccccttctcggcgcgtcctccatgggcccgctcccgccgtacgcgacgacggaggacttcgaggccatggagaagggcgccgtccgtaagctggccgagccccaggccgacgccgagctgcccccgaccaaggacggcttctaccactacaccacggacacggtcgagtacgagctgcccggagccgcgccgcagcacgaaccgcagctgccgttccggccctatgagcagcagctccagcagcatctccagcagcatctccagcacggccgcgggcacggcgggccgcccggggcccgggagattgacgagcagaagttcttgctggatgacgtggagcttcttagggagaaggccaggggaaaggcgaaagcgggcgatgcctcggcgggggacagcggcggggggtcgagtgcgactaggcggaacgaatacgggggagccgaagaggggtcgtcgaccatcgtgagagtcgtcgtgaaggccgtgtctcccaacaactcccttcactcttgctccctctgctcatcatga

SEQ ID NO: 1535 - protein, 654 aa, Myceliophthora thermophilia
MATAKRTITTLRNSQRRQTLAILLFALPSLPSPAAGVASADCGATFLFPTLGLTFFYLDTIAVTYRSNIANPTLSCWCGVPGRATPKITNNNVSPFNGSVPVTLTVLSDDPCWFELRSSSGECRHTSETFHLSPKQRTVGEDDGSSPRSTASPDPALRPSPTTSHPEARAAGAVVSQQRRSSSTEDSFSIGAKAALGVGIALICIAIGAMAAFLYFRRRRRAPDAEVTGGMLSHSRRGRKGAEKKRAGASSEASGHSDEPLCPIQPVFDGFPGSMGYEDVRSLHSNTQSHSTTHSYSPQSPAYSQTGGFWTQERSIEREELTAARLKSQLQPSGPTVVSYGPNPVTPTLTPRVSPRPSVPTATTPMSSGSIEQVPGHVPMMPIPSSDYADYTNYSIPPPAPLPMSTPEPKPSPPRPQAAGPTVVSYGPNRVTPTPKIVLPTVPPDESIVNRRFQEAAAKSSAAPHHHERQFSWEADSPLLGASSMGPLPPYATTEDFEAMEKGAVRKLAEPQADAELPPTKDGFYHYTTDTVEYELPGAAPQHEPQLPFRPYEQQLQQHLQQHLQHGRGHGGPPGAREIDEQKFLLDDVELLREKARGKAKAGDASAGDSGGGSSATRRNEYGGAEEGSSTIVRVVVKAVSPNNSLHSCSLCSS

SEQ ID NO: 1536 - protein, 620 aa, Myceliophthora thermophilia
AGVASADCGATFLFPTLGLTFFYLDTIAVTYRSNIANPTLSCWCGVPGRATPKITNNNVSPFNGSVPVTLTVLSDDPCWFELRSSSGECRHTSETFHLSPKQRTVGEDDGSSPRSTASPDPALRPSPTTSHPEARAAGAVVSQQRRSSSTEDSFSIGAKAALGVGIALICIAIGAMAAFLYFRRRRRAPDAEVTGGMLSHSRRGRKGAEKKRAGASSEASGHSDEPLCPIQPVFDGFPGSMGYEDVRSLHSNTQSHSTTHSYSPQSPAYSQTGGFWTQERSIEREELTAARLKSQLQPSGPTVVSYGPNPVTPTLTPRVSPRPSVPTATTPMSSGSIEQVPGHVPMMPIPSSDYADYTNYSIPPPAPLPMSTPEPKPSPPRPQAAGPTVVSYGPNRVTPTPKIVLPTVPPDESIVNRRFQEAAAKSSAAPHHHERQFSWEADSPLLGASSMGPLPPYATTEDFEAMEKGAVRKLAEPQADAELPPTKDGFYHYTTDTVEYELPGAAPQHEPQLPFRPYEQQLQQHLQQHLQHGRGHGGPPGAREIDEQKFLLDDVELLREKARGKAKAGDASAGDSGGGSSATRRNEYGGAEEGSSTIVRVVVKAVSPNNSLHSCSLCSS

SEQ ID NO: 1537 - DNA, 993 bp, Myceliophthora thermophilia
atgctttggcacagggcgctcgtcgcctcttttctctcgacaggggcacgggcgggggtgggcggcctcatcgcggacgggttgtcgtacagcaatcaaccggtggagcggaggatggatgcgatggcggaagcaagcctgcaagccaggggctacttggaggctcgacaagaccaagagcaagaaccaatcttggccggcgaaagcaacacgccgctcaatgccgacgggagcctcaacatggaggaatggaacaacatggtggacaaggcatgccaggacgcgttgaggaatgtgaaagtgccaacgaacccgtcaggcacatgcgtctgctacaacctgccgctgctcaacaaccggactggcgcatttgaggcggatctgaggttataccagctcggcgagccgacgggtgacttccagggggtaccgcagaagaacatcgaggtcgagctcagctacaatggtgcttcggtcactccggttaacccgcaaggggggaactccctcaaagcgaggcaggaaggcgaagaaggggagatccgaatgttacagtcgtacatgttcgtcggccaaatcgacaaggacaaaatgtcgggcaaggtcaccagggctcagctcgaggcctgggtcatgcccgtcgtcacgctgaaggcaattgacggcaccggcaaggaagtgaaaacgctcgtgtcgaccaacgaagccgcgttcgtagcgggcgagttcgcgaacgaccaggtcatgacaaaccagcgcctggccgagctcgccgtggagaagatggtggccggtctcgaaaacggcacggtcgcctttgtgcttcccggcgtccagctcctgattttccccatcggccttatcatcaccagcatctggctagccttggggctcgctgcctacggattcgggacctacgagcgttaccactttagggaggcgcacaagagaagagtggcgctggcccagaagggaggaatgccgaggatttga

SEQ ID NO: 1538 - protein, 330 aa, Myceliophthora thermophilia
MLWHRALVASFLSTGARAGVGGLIADGLSYSNQPVERRMDAMAEASLQARGYLEARQDQEQEPILAGESNTPLNADGSLNMEEWNNMVDKACQDALRNVKVPTNPSGTCVCYNLPLLNNRTGAFEADLRLYQLGEPTGDFQGVPQKNIEVELSYNGASVTPVNPQGGNSLKARQEGEEGEIRMLQSYMFVGQIDKDKMSGKVTRAQLEAWVMPVVTLKAIDGTGKEVKTLVSTNEAAFVAGEFANDQVMTNQRLAELAVEKMVAGLENGTVAFVLPGVQLLIFPIGLIITSIWLALGLAAYGFGTYERYHFREAHKRRVALAQKGGMPRI

SEQ ID NO: 1539 - protein, 312 aa, Myceliophthora thermophilia
GVGGLIADGLSYSNQPVERRMDAMAEASLQARGYLEARQDQEQEPILAGESNTPLNADGSLNMEEWNNMVDKACQDALRNVKVPTNPSGTCVCYNLPLLNNRTGAFEADLRLYQLGEPTGDFQGVPQKNIEVELSYNGASVTPVNPQGGNSLKARQEGEEGEIRMLQSYMFVGQIDKDKMSGKVTRAQLEAWVMPVVTLKAIDGTGKEVKTLVSTNEAAFVAGEFANDQVMTNQRLAELAVEKMVAGLENGTVAFVLPGVQLLIFPIGLIITSIWLALGLAAYGFGTYERYHFREAHKRRVALAQKGGMPRI

SEQ ID NO: 1540 - DNA, 2343 bp, Myceliophthora thermophilia
atgctcaaacgactgtccacagcggttctgctggccctcgggctcgcctcctccactcttgccgcaccggcaccggcaccgcggcaagagtcggggtggtgggtggccagcatcgaacggcaaggcgctcccgccttcaacgatgaccccaactataaagtgttccgcaacgtgcgggactacggcgccaagggtgacggtgcgactgacgacaccgaggccatcaacaaggccatcagcgacggcaaccggtgtggtcagggctgctcttcgcagacgacgaccccggcgctcgtgtacttcccgcccggcacctacgtggtcagcaagcccatcatccccttctactacactcagctcgtcggcgacgccgtctctcccccgaccctgaaggcgtccgccgacttctccggcatggccgtcatcgacgcggacccgtacgactcggagggcaacaactggtggacgaaccagaacaacttcttccgccaggtccgcaactttgtcatcgacctgacggccatgcccgtcgaggttggcgccggcatccactggcaggttgcgcaggcgacgagcctgcagaacatcgtcttcaacatgcgcaccgacggcggggaggccaacaagcagcagggcatcttcatggacaacgggtcgggcggtttcatgtcggacctgaccttcaacggcggcaactacggcgccttcttcggcaaccagcagttcaccacccgtaacctgaccttcaacgactgcaggacggccatcttcatgaactggaactgggcctggaccttccaggacgtcaagatcaacaactgcggcgtcggcatcgacatggccaacggcggccccggcggccagaccgtcgggtccgtcctcgtgctcgacagccagttcaccaacacgcccatcggcatcaagacggcctacgacccggcctccccccagaccaacggcacgctcatcctcgacaacgtcgacatgacgggcacgacccaggccgtcgtcaacgagggcaccggcgccgtgatcctcccgggcaaccaaaaggtcagcttcttcgcccagggacgggcctacgatggcgccggcgccggctccggcaaggcggtgcaggctccccaggacccggtgaggaagccggacgtgctgctcgacccggggacgggtaaggtggtgacgcgcagcaagccgcagtacgagaacgtgccggcgggcagcttcgtcagcgtcaaggccaacggggccaagggcgacggcaagacggacgacacggacgcgatccaggcggtcttcgataaggcgacgcccgaccaggtcgtctacttcgaccacggcgcctacatcatcacgcggacggtcaaggtgcccaagcagatccgcatcacgggcgaggcgctgcccctgatcctggcgggcggcgattcgagcttcaaggaccaggcgaacccgcagccggtcttccaggtgggccagccgggcgacaagggcgaggtggagatgtcggacctcatcttcggcacggcgggcccgcagccgggcgccatcatgatggagtggaacgtggcgggcagcaagcccggggcggcggcgctctgggacgtgcacacgcgcatcggcgggtacgcgggcacgcagctggagctggagcagtgcgccaagaacccagacgtgacgaacccggtcaggcccgagtgcttcggcgccttcatgatgctgcacgtgcgcgagggcggcagcgtctacctggagaacacgtggtactgggtggcggaccacgggctggagccgtcggcgcgcgacggccagatcgacgtcttcaacggccgcggcgtcctcttcgagggcgagggcccggtctggggctggggcaccgcctcggagcactcggtcctgtacaactaccagttcaacaaggcctccaacgtcttcctggccctcatccagaccgagacgccgtacttccagggcaacccggacgcgacgcagcccttcgccgtcaacccggactttgcggacccggactttgccaagtcgtgcgcggccgacgacgccggctgcaggcgggcgtggggcgtgcgggcgatcgagtccaaggacatcttcgtgtacggcgccgggctgtactccttcttcgacaactacgcgcaggactgcctccggaccgagtcgtgccagtcccacatggtctcgatcgagggcggcagccgggtgcacatgtacggcctcagcaccaaggccagcgtcaacatggtgacggtcgacggccggggcgccgtcctcgacagggacaaccgcaacaacttctgcgccaccctcgcgttcttccagtcggcatag

SEQ ID NO: 1541 - protein, 780 aa, Myceliophthora thermophilia
MLKRLSTAVLLALGLASSTLAAPAPAPRQESGWWVASIERQGAPAFNDDPNYKVFRNVRDYGAKGDGATDDTEAINKAISDGNRCGQGCSSQTTTPALVYFPPGTYVVSKPIIPFYYTQLVGDAVSPPTLKASADFSGMAVIDADPYDSEGNNWWTNQNNFFRQVRNFVIDLTAMPVEVGAGIHWQVAQATSLQNIVFNMRTDGGEANKQQGIFMDNGSGGFMSDLTFNGGNYGAFFGNQQFTTRNLTFNDCRTAIFMNWNWAWTFQDVKINNCGVGIDMANGGPGGQTVGSVLVLDSQFTNTPIGIKTAYDPASPQTNGTLILDNVDMTGTTQAVVNEGTGAVILPGNQKVSFFAQGRAYDGAGAGSGKAVQAPQDPVRKPDVLLDPGTGKVVTRSKPQYENVPAGSFVSVKANGAKGDGKTDDTDAIQAVFDKATPDQVVYFDHGAYIITRTVKVPKQIRITGEALPLILAGGDSSFKDQANPQPVFQVGQPGDKGEVEMSDLIFGTAGPQPGAIMMEWNVAGSKPGAAALWDVHTRIGGYAGTQLELEQCAKNPDVTNPVRPECFGAFMMLHVREGGSVYLENTWYWVADHGLEPSARDGQIDVFNGRGVLFEGEGPVWGWGTASEHSVLYNYQFNKASNVFLALIQTETPYFQGNPDATQPFAVNPDFADPDFAKSCAADDAGCRRAWGVRAIESKDIFVYGAGLYSFFDNYAQDCLRTESCQSHMVSIEGGSRVHMYGLSTKASVNMVTVDGRGAVLDRDNRNNFCATLAFFQSA

SEQ ID NO: 1542 - protein, 759 aa, Myceliophthora thermophilia
APAPAPRQESGWWVASIERQGAPAFNDDPNYKVFRNVRDYGAKGDGATDDTEAINKAISDGNRCGQGCSSQTTTPALVYFPPGTYVVSKPIIPFYYTQLVGDAVSPPTLKASADFSGMAVIDADPYDSEGNNWWTNQNNFFRQVRNFVIDLTAMPVEVGAGIHWQVAQATSLQNIVFNMRTDGGEANKQQGIFMDNGSGGFMSDLTFNGGNYGAFFGNQQFTTRNLTFNDCRTAIFMNWNWAWTFQDVKINNCGVGIDMANGGPGGQTVGSVLVLDSQFTNTPIGIKTAYDPASPQTNGTLILDNVDMTGTTQAVVNEGTGAVILPGNQKVSFFAQGRAYDGAGAGSGKAVQAPQDPVRKPDVLLDPGTGKVVTRSKPQYENVPAGSFVSVKANGAKGDGKTDDTDAIQAVFDKATPDQVVYFDHGAYIITRTVKVPKQIRITGEALPLILAGGDSSFKDQANPQPVFQVGQPGDKGEVEMSDLIFGTAGPQPGAIMMEWNVAGSKPGAAALWDVHTRIGGYAGTQLELEQCAKNPDVTNPVRPECFGAFMMLHVREGGSVYLENTWYWVADHGLEPSARDGQIDVFNGRGVLFEGEGPVWGWGTASEHSVLYNYQFNKASNVFLALIQTETPYFQGNPDATQPFAVNPDFADPDFAKSCAADDAGCRRAWGVRAIESKDIFVYGAGLYSFFDNYAQDCLRTESCQSHMVSIEGGSRVHMYGLSTKASVNMVTVDGRGAVLDRDNRNNFCATLAFFQSA

SEQ ID NO: 1543 - DNA, 996 bp, Myceliophthora thermophilia
atggctcgaccgcgcctctcggcggctaccatgttggcccttgccatcgttagaacgacggcagcctcgatcgagtatgcgtatgtgacggacatgcctgcgttttccgccccggcatcatgtacgcaggaggccgtgggctataacatccagtcgctgacttacgacgcgtgccccgaggccgtgtcgacactccagtcgtgtgtctgcaccaagagcaacaacttcgccaatctcgtccgggatctcggtgtctcggtcagctacgagtgcggttcaacggccagcgagggccaagcatcggcccagagcgttctcaacgcctattgcaacccgagcaaagacactctcattctcaactccgactgcaaatatgcaacatacaactccactaaccacgaagttccccgatcttgggcacgctgcccaaccgaggcccccgcgctggccagctgcgcctgcaagaagaaccagaactcgttcgtggtcagccagttgatcaacccggccaaatcttggtgcgcggggcacatggccgatgtctcgtccgcccaggccatgtttgccgcctactgtgctatgaacgacgccactaccaaagtttccggtgccgtccaccgccccccaccccgccgggcgacagttcaaccgtacgatctgtgtcccggcggccctcaggctctcgcttcgtgtgtgtgcctcaaggagggcatgaccggcgacgtcttgaagctggtcacctcgtcggtcgagtggcactgctctttgactgccactgaagatatctcgtccgccgttgctcgctgccgaggcaaaggtgactccgccaacccgaaccggccggagttggctggccagtacaacttcccaccgcagcaatcgtcttcacatgcagcaacaacagcagcagcagcatcgctacttgctacatcaagttccctcgcccgcccaatctccccatccccagcggatgcaacccgggtatcaatcatataa

SEQ ID NO: 1544 - protein, 331 aa, Myceliophthora thermophilia
MARPRLSAATMLALAIVRTTAASIEYAYVTDMPAFSAPASCTQEAVGYNIQSLTYDACPEAVSTLQSCVCTKSNNFANLVRDLGVSVSYECGSTASEGQASAQSVLNAYCNPSKDTLILNSDCKYATYNSTNHEVPRSWARCPTEAPALASCACKKNQNSFVVSQLINPAKSWCAGHMADVSSAQAMFAAYCAMNDATTKVSGAVHRPPPRRATVQPYDLCPGGPQALASCVCLKEGMTGDVLKLVTSSVEWHCSLTATEDISSAVARCRGKGDSANPNRPELAGQYNFPPQQSSSHAATTAAAASLLATSSSLARPISPSPADATRVSII

SEQ ID NO: 1545 - protein, 310 aa, Myceliophthora thermophilia
ASIEYAYVTDMPAFSAPASCTQEAVGYNIQSLTYDACPEAVSTLQSCVCTKSNNFANLVRDLGVSVSYECGSTASEGQASAQSVLNAYCNPSKDTLILNSDCKYATYNSTNHEVPRSWARCPTEAPALASCACKKNQNSFVVSQLINPAKSWCAGHMADVSSAQAMFAAYCAMNDATTKVSGAVHRPPPRRATVQPYDLCPGGPQALASCVCLKEGMTGDVLKLVTSSVEWHCSLTATEDISSAVARCRGKGDSANPNRPELAGQYNFPPQQSSSHAATTAAAASLLATSSSLARPISPSPADATRVSII

SEQ ID NO: 1546 - DNA, 1686 bp, Myceliophthora thermophilia
atgcgaaggacaggcgctttggcgcttttgagcgctctcgctcacggcagtcttgcggcagcgaacagcttaccccggggcgttggacctgagtttgccaggttttatacgaacaagtctgccttcacgtgcattagcaacccctccatcacactcgagccggctcagatcaatgacaactcatgcgattgccccgacggctctgatgagccaggaactgctgcttgttcccacattgactccctgtctcctgagcaacccctcccggggtcgataacaggcaccaccaacactacgaatgccctgcccggcttctggtgcgccaatgcaggccatatcggtaactacgtgcctttcatgtacgttaatgacggcgtgtgtgactacgagctgtgctgcgacggcagcgacgagtttgcacatgttggcgggatccagtgcgagaaccgctgcgacgccatcggcaaggaacaccgtcgcctggaggaggaacgcaggcagagcaaggagagatcggccaaacggaaacggaccatggcgaaagaagcccgcgaactgcggcgcagggtggaggccagggtttccaccctgaaagcggaactagaggggcttgagattaagaaggaggagctgcagaagaagtacgaggaagttgaacgctctgagcggaacaaagtagttaaagctggcggccaaggcggaagactcggcgtccttgtcggcctcgcgaaggcccgtgtagccaagctccgcgacgcgctggacaagctgctagaccagcgtgatgacctgcaggatagggtggaacaactcgaagatatcctcaccaagctcaaggaggaatataaccctaatttcaacgatgagggcgttaaggccgccgtcaaggcctgggaggactacgcagctggtcaggccggcgagaagccaagcgagatctcggatacggagatcacggagttgctgaaggaagacggcgaatcatctggtatcaactgggccgagttcgaaaactccgaggagagtgacgcggatgttatctacaactgggaagcttacctcccagggcccgttaacgatttcgtccgcgacaagatcgagttgttgcgagtttgggccattgagaagggtattctggccgacaatcgcagcggagccaaagaatctcgtttggtcacagctgccagggaggcgctaaatgccgtcaagaacgacatctcgtctaaaaaggccaacctggaagagcagcagcgtgacttagagaaggattacggcgtggacgacatcttccgagctctcaaggggaagtgcgttaatagcgacgtcggcgagtacaactatgagctttgctggatggagcgtgcgacgcagaagagcaagaagggacatggcaacaccaatatgggcaacttcgtgcgcattgacaaagaaatcgcagatgaggaggaacggcccgatgggaagagcctgggcaggggcgagagaatggtgctacggtatgagaacggtcagggctgctggaacggcccgcagaggagaaccgacgtgtggcttgcatgtgccgaggtggacgagctttggcgcgttacagagtcggaaaaatgcatctacaagatggaggtgggcacccccgccgcttgcgaagatgtgcaagagccgagggtgaggaccaaggatgagctttag

SEQ ID NO: 1547 - protein, 561 aa, Myceliophthora thermophilia
MRRTGALALLSALAHGSLAAANSLPRGVGPEFARFYTNKSAFTCISNPSITLEPAQINDNSCDCPDGSDEPGTAACSHIDSLSPEQPLPGSITGTTNTTNALPGFWCANAGHIGNYVPFMYVNDGVCDYELCCDGSDEFAHVGGIQCENRCDAIGKEHRRLEEERRQSKERSAKRKRTMAKEARELRRRVEARVSTLKAELEGLEIKKEELQKKYEEVERSERNKVVKAGGQGGRLGVLVGLAKARVAKLRDALDKLLDQRDDLQDRVEQLEDILTKLKEEYNPNFNDEGVKAAVKAWEDYAAGQAGEKPSEISDTEITELLKEDGESSGINWAEFENSEESDADVIYNWEAYLPGPVNDFVRDKIELLRVWAIEKGILADNRSGAKESRLVTAAREALNAVKNDISSKKANLEEQQRDLEKDYGVDDIFRALKGKCVNSDVGEYNYELCWMERATQKSKKGHGNTNMGNFVRIDKEIADEEERPDGKSLGRGERMVLRYENGQGCWNGPQRRTDVWLACAEVDELWRVTESEKCIYKMEVGTPAACEDVQEPRVRTKDEL

SEQ ID NO: 1548 - protein, 542 aa, Myceliophthora thermophilia
AANSLPRGVGPEFARFYTNKSAFTCISNPSITLEPAQINDNSCDCPDGSDEPGTAACSHIDSLSPEQPLPGSITGTTNTTNALPGFWCANAGHIGNYVPFMYVNDGVCDYELCCDGSDEFAHVGGIQCENRCDAIGKEHRRLEEERRQSKERSAKRKRTMAKEARELRRRVEARVSTLKAELEGLEIKKEELQKKYEEVERSERNKVVKAGGQGGRLGVLVGLAKARVAKLRDALDKLLDQRDDLQDRVEQLEDILTKLKEEYNPNFNDEGVKAAVKAWEDYAAGQAGEKPSEISDTEITELLKEDGESSGINWAEFENSEESDADVIYNWEAYLPGPVNDFVRDKIELLRVWAIEKGILADNRSGAKESRLVTAAREALNAVKNDISSKKANLEEQQRDLEKDYGVDDIFRALKGKCVNSDVGEYNYELCWMERATQKSKKGHGNTNMGNFVRIDKEIADEEERPDGKSLGRGERMVLRYENGQGCWNGPQRRTDVWLACAEVDELWRVTESEKCIYKMEVGTPAACEDVQEPRVRTKDEL

SEQ ID NO: 1549 - DNA, 333 bp, Myceliophthora thermophilia
atgaacttcgtggccttaaagatccggtcggtgacaataatggcggtatttaacatgcttttgtttttgtcttttgacctcaggccacccctcaccgtcaagcaggcacaccttccgctactcagatcgcgttcattctccggcgacactagctgggcgaccatgggctcatactaccgcctcaagcacgcacctcggctgcctttctactgtctgagttctggttctcgcaccacatcttccagccagaggctttctcagcagagtatcttgccgctcccctccgttgtagaaggttccggcgtcagagacccgcttagtacccggacatga

SEQ ID NO: 1550 - protein, 110 aa, Myceliophthora thermophilia
MNFVALKIRSVTIMAVFNMLLFLSFDLRPPLTVKQAHLPLLRSRSFSGDTSWATMGSYYRLKHAPRLPFYCLSSGSRTTSSSQRLSQQSILPLPSVVEGSGVRDPLSTRT

SEQ ID NO: 1551 - protein, 84 aa, Myceliophthora thermophilia
LRPPLTVKQAHLPLLRSRSFSGDTSWATMGSYYRLKHAPRLPFYCLSSGSRTTSSSQRLSQQSILPLPSVVEGSGVRDPLSTRT

SEQ ID NO: 1552 - DNA, 1071 bp, Myceliophthora thermophilia
atggctccgaacgtcctctcgctcgccacggccgccctcgccctggcgtcggcagcgcaggcccagtgcggctccgggtccccccacgccacggtgacggggtcgggcaactcatacacggccagggtgggctcgaaccaggtctactcggggtccgactaccgcgaggcgatccagaaggcgctcgactccatcagcagcggccagcgggtggccgtgctggcgtcgggctcgatcggggccagcaccatcaccatcaccagcggcaagacctttgagggctgcggcaccatcgacgtgggcaaccgagccgggcggggcgccatcgagtcgaccgacgcgagcgacgtcaagatcccctacctcagcatgacgggcaacccctacttcggcctgcgcttctcgggcatgcgcggcctaacccttggcaacatcaccatgaacctaagcggcggcctgggcatccgcttcgaccgcgaccgggcgcccagctccgacgtcagcatggacgtcatcacggtcacgggcgccggcagccacgcggtcgagacgtggaatatcgaccgcctgaccatcaacaaggtcatcgcccgcaacgtgggcgagtcgggcctgctgctgcagacgacgaccaacgccagggtcggcctggtcgacggcgacaacgtcggcaccggcacgggctacgccaccttccgcatggccaacaacaacggccagaaggcggacggcagctacggcaccaacgtgttcgtcgaccgcgtcgtctcgcgaggtggtggccgcggcgtcttctgcgtctcgcagtcgggcgccgtcgagatcggctcggtcgacctggccaacaacggcaacaacgcgatcctcatcgagaactgctacaacgtcaacatcaagggcggcagagtcaacggcggcggcgaggtccgcatctcggcccgcagcgagttccccaacaccagggacgtctccatcaccctccaggtcgacaacacctcggtccgcgagtccccctgcggcgaaaacatccgctggtccatcaccggcaatgcccaacagaacatttgctag

SEQ ID NO: 1553 - protein, 356 aa, Myceliophthora thermophilia
MAPNVLSLATAALALASAAQAQCGSGSPHATVTGSGNSYTARVGSNQVYSGSDYREAIQKALDSISSGQRVAVLASGSIGASTITITSGKTFEGCGTIDVGNRAGRGAIESTDASDVKIPYLSMTGNPYFGLRFSGMRGLTLGNITMNLSGGLGIRFDRDRAPSSDVSMDVITVTGAGSHAVETWNIDRLTINKVIARNVGESGLLLQTTTNARVGLVDGDNVGTGTGYATFRMANNNGQKADGSYGTNVFVDRVVSRGGGRGVFCVSQSGAVEIGSVDLANNGNNAILIENCYNVNIKGGRVNGGGEVRISARSEFPNTRDVSITLQVDNTSVRESPCGENIRWSITGNAQQNIC

SEQ ID NO: 1554 - protein, 335 aa, Myceliophthora thermophilia
QCGSGSPHATVTGSGNSYTARVGSNQVYSGSDYREAIQKALDSISSGQRVAVLASGSIGASTITITSGKTFEGCGTIDVGNRAGRGAIESTDASDVKIPYLSMTGNPYFGLRFSGMRGLTLGNITMNLSGGLGIRFDRDRAPSSDVSMDVITVTGAGSHAVETWNIDRLTINKVIARNVGESGLLLQTTTNARVGLVDGDNVGTGTGYATFRMANNNGQKADGSYGTNVFVDRVVSRGGGRGVFCVSQSGAVEIGSVDLANNGNNAILIENCYNVNIKGGRVNGGGEVRISARSEFPNTRDVSITLQVDNTSVRESPCGENIRWSITGNAQQNIC

SEQ ID NO: 1555 - DNA, 2541 bp, Myceliophthora thermophilia
atggtcgccgccgcctgcttcgcctccgcgccgttttcctcgtcgcccgttcccttcccgctctctccccagcgccgcttcgacaaaggcgacggggaagagaccgggatggaaactcaccgcccggagatggctgccgggggctccgttccggctgcggttgcgatggcgcaacctgctgctgctgttgctgctgccggtgctgcgagagcagcaccctcgacgcccgccgggctgtcgtccctccacccgggcgacgcccggcacttgatctccgagatccggaggtccagcggccgctgcggcggcaacgagggggagctccgactcccaaaagcacagttcagctcgcccctggccaggaaaggccaggaagcttataaaaacggcaccactggccaggacagtgaaggcccaaaggcagagagatgggcatcagcggggagccgggcccagaacggtcagagcgaccaagaagtggaggacgccctggacgctgagccggccctgtcaaaggtgaagcggaagctgtacccggcagagaggcttgtaccctcaccctcgtctcccgctggctctgtcgtactgccgccgtcattgcataaagatcagaccgctggtggtgcacatgggaccgaaccgcaggggggcattccggaactgccaagaccttccggatcgcgtgctccggcagacaagaatcaggccggcaaaaagggggccgaagcgagcctcacgttccggaaagcggcgagaaagaggtcccggaagaacatccaggacaagcccgatggcgaccgccgcaacaaagccaggggtcaacccggccctgctttggccggtccttcgaacgttgcagccggacattgtgacgaccaactcaccatcgacgaggctggagtctgcggctcctcacgagccgccaccgaacaacccgaccgtcaaaccgatgattccgccgctaccgagttcacccagaacctcatcgaggccctgttcccgaccgtccccgtggtttttgacgtcggggccatcaggggccgagtctggtcgccgctgaatggcaagggcgagtttgacccccattggacaacctatccgttggacccgtccctccctcttgtcccgggcgaaggctcctgctcccccgcggacctggaccagccggacagcgcgctcccgtcgaccatacacgcgtgggcgctgcaggaggcgcgggaggggacgctgttcgcgtcgacggtggcgcgcgtccgggcgacggcggcggcggtcgagagcggcgccttcgacgccgtcgtcgacgacccgcctcccgtccccccggacctcctcgcccgcctcgtctcgcgccccttccgcttcccgcgcaccggcacgaatccgttcctgggcgccgccatcgccgctgctgctccccacgccaaggatgacgacgacgtcaacggcaacgatgacggcagcgacggcggcaatgacgacgatgacctgctcgtccagccctcatggccgccggcgcctccggcggagggcgtcgaggtcccccctgcgctgccgcacaccatctgcgacgccatacagtttgaccgcggcggcggtgacgacaagacggtggccgcctcgaaccagtacaagcagtcgatagccgcgtcgcgagctgaggcaccttgggatcctccgagctggaagggcaaaggagtggatcgggatatgggtagtgctgcccgagttgctagacagaatgggctcggaagtggtgaggatgcacatgaaaatgacgatgaagcaccaacttgcgacaccgatggtactctccaaagcattacggaggcaatgaggctagcctgcaccggcccggccgtgttgccgagcgcgagatattatcaaagctgccgagtcacggacagtcagatgaatacggaaaggaacaacaacggacaggcgacagctagttttgcgggtggtctgagctacactcccattgaccatctaggggtcatcaacaacattcccaacttgaactcgatttctgaggagattaacgaacctcgggagggagaccagcccaacaacgcgcgtgacgacactgctcctgccgctggaaccggccacaaccgagatcttggcatggaggtcgtcgacaacccaagggggctcacattttctaaccgccataacgacaaagatgaagatgacaagtacggagacgagctcgatgccgagttggcgccgcccaaaagacccgcgactgatgtcagtacctccgtggtcgcgcaatatctgaccgagatgacacccgccgccaacccggccgccaacagcgccattgccagcagcagcaccagcagcagccagccaagcagcgccgcaggtctggtccccccgctggtggccgcgcctgagcagattttcgacttggatggtctgggcgatgacaacgcagtcggccaggcgctcggcttgacgcgggcagaaatggacgccatcctttcaggagggccagccagtcgcccgatttcatttgaccaagggataaattaa

SEQ ID NO: 1556 - protein, 846 aa, Myceliophthora thermophilia
MVAAACFASAPFSSSPVPFPLSPQRRFDKGDGEETGMETHRPEMAAGGSVPAAVAMAQPAAAVAAAGAARAAPSTPAGLSSLHPGDARHLISEIRRSSGRCGGNEGELRLPKAQFSSPLARKGQEAYKNGTTGQDSEGPKAERWASAGSRAQNGQSDQEVEDALDAEPALSKVKRKLYPAERLVPSPSSPAGSVVLPPSLHKDQTAGGAHGTEPQGGIPELPRPSGSRAPADKNQAGKKGAEASLTFRKAARKRSRKNIQDKPDGDRRNKARGQPGPALAGPSNVAAGHCDDQLTIDEAGVCGSSRAATEQPDRQTDDSAATEFTQNLIEALFPTVPVVFDVGAIRGRVWSPLNGKGEFDPHWTTYPLDPSLPLVPGEGSCSPADLDQPDSALPSTIHAWALQEAREGTLFASTVARVRATAAAVESGAFDAVVDDPPPVPPDLLARLVSRPFRFPRTGTNPFLGAAIAAAAPHAKDDDDVNGNDDGSDGGNDDDDLLVQPSWPPAPPAEGVEVPPALPHTICDAIQFDRGGGDDKTVAASNQYKQSIAASRAEAPWDPPSWKGKGVDRDMGSAARVARQNGLGSGEDAHENDDEAPTCDTDGTLQSITEAMRLACTGPAVLPSARYYQSCRVTDSQMNTERNNNGQATASFAGGLSYTPIDHLGVINNIPNLNSISEEINEPREGDQPNNARDDTAPAAGTGHNRDLGMEVVDNPRGLTFSNRHNDKDEDDKYGDELDAELAPPKRPATDVSTSVVAQYLTEMTPAANPAANSAIASSSTSSSQPSSAAGLVPPLVAAPEQIFDLDGLGDDNAVGQALGLTRAEMDAILSGGPASRPISFDQGIN

SEQ ID NO: 1557 - protein, 830 aa, Myceliophthora thermophilia
VPFPLSPQRRFDKGDGEETGMETHRPEMAAGGSVPAAVAMAQPAAAVAAAGAARAAPSTPAGLSSLHPGDARHLISEIRRSSGRCGGNEGELRLPKAQFSSPLARKGQEAYKNGTTGQDSEGPKAERWASAGSRAQNGQSDQEVEDALDAEPALSKVKRKLYPAERLVPSPSSPAGSVVLPPSLHKDQTAGGAHGTEPQGGIPELPRPSGSRAPADKNQAGKKGAEASLTFRKAARKRSRKNIQDKPDGDRRNKARGQPGPALAGPSNVAAGHCDDQLTIDEAGVCGSSRAATEQPDRQTDDSAATEFTQNLIEALFPTVPVVFDVGAIRGRVWSPLNGKGEFDPHWTTYPLDPSLPLVPGEGSCSPADLDQPDSALPSTIHAWALQEAREGTLFASTVARVRATAAAVESGAFDAVVDDPPPVPPDLLARLVSRPFRFPRTGTNPFLGAAIAAAAPHAKDDDDVNGNDDGSDGGNDDDDLLVQPSWPPAPPAEGVEVPPALPHTICDAIQFDRGGGDDKTVAASNQYKQSIAASRAEAPWDPPSWKGKGVDRDMGSAARVARQNGLGSGEDAHENDDEAPTCDTDGTLQSITEAMRLACTGPAVLPSARYYQSCRVTDSQMNTERNNNGQATASFAGGLSYTPIDHLGVINNIPNLNSISEEINEPREGDQPNNARDDTAPAAGTGHNRDLGMEVVDNPRGLTFSNRHNDKDEDDKYGDELDAELAPPKRPATDVSTSVVAQYLTEMTPAANPAANSAIASSSTSSSQPSSAAGLVPPLVAAPEQIFDLDGLGDDNAVGQALGLTRAEMDAILSGGPASRPISFDQGIN

SEQ ID NO: 1558 - DNA, 513 bp, Myceliophthora thermophilia
atgtgggtggctgcaatccttggtagggctggagccctggtgggcccagtccaccataccctctctttggggaagcaaggcacagacgtgaaggaaacagcaggagacaccaaatctcagcactttggaaaacggagtgggttcgatgatggcggccacaatgacgaggctcgcagcatgggagtttcggcaacggcagatgggtcgggagaatggcggcttgtcaacactccctctacaccaccaaggacacccaaaattaaattagctgcggaattttcagccgctgcagccgatatcatgcaatcgaatacgacccttgccagccgcatgccgcctgtcgtcctggatcttgtcggcggaggctgccgaagaaacgtcatagggggacatggcgccgtgacgagtgggaatggagacgctttaacaagcaacgctcctgacccggtacctggaattgaagtggggtctggcgcagctcaaccgacctggctaagctctttgacagggtaa

SEQ ID NO: 1559 - protein, 170 aa, Myceliophthora thermophilia
MWVAAILGRAGALVGPVHHTLSLGKQGTDVKETAGDTKSQHFGKRSGFDDGGHNDEARSMGVSATADGSGEWRLVNTPSTPPRTPKIKLAAEFSAAAADIMQSNTTLASRMPPVVLDLVGGGCRRNVIGGHGAVTSGNGDALTSNAPDPVPGIEVGSGAAQPTWLSSLTG

SEQ ID NO: 1560 - protein, 158 aa, Myceliophthora thermophilia
LVGPVHHTLSLGKQGTDVKETAGDTKSQHFGKRSGFDDGGHNDEARSMGVSATADGSGEWRLVNTPSTPPRTPKIKLAAEFSAAAADIMQSNTTLASRMPPVVLDLVGGGCRRNVIGGHGAVTSGNGDALTSNAPDPVPGIEVGSGAAQPTWLSSLTG

SEQ ID NO: 1561 - DNA, 2247 bp, Myceliophthora thermophilia
atggtccgcttgatgagatggctggcagcgatgccagccagcagctggctcggcgttgcaatggcatcgcctactcctgcccaggaacttcacccacgacaagctaagacaagcttctggtacgccaacattgaccacacgtccgcagaagtccgcggctacgccccggatctcgacggcgactacacatacgaggtcttcaaagcggtcgcccctggagacgggccaggcatccaaagggccatcaacgcagcgaccaacggcaccacgcgccatggacaatggtttgcgagccagccgcgcgtcgtctacatcccgcccggcgaatacgtcgtcagcgagaccatcttcatgaacaccgacaccatcctcatgggcgatgctaccaacccacccattatcaaagcggctcctggcttctcccgtagcggcacgcttctgaacgcccaagacccgacaaccggcgtctcgggcgagctgtcgttcgccgtcagcctcaagaacattgtgctcgacaccaccaacgttccgggcgacgcgcccttcgtggccctgtactggggcgttgctcaggccgcccacctccagaacgtccaaattcgcatgccctcctccgtcaacggcgctggccattccggcatccggatgggccgtggctcgacactggccgtgtcggacgtgcgtatcgaacgcggtcagaatggtatctggtacaacggccaccaacaagccgtcttcaagagcatctacttctaccagaacacggtcggcatgctgatcgacggcggcagcaccatcagcctcatcaacccgacattcgacacggtgggcttcggcgtcgttaacacgggcggctccccctggatcgccctcatcgacgccacgtccaagaactcgggcgtgaccctcaggacgacctcctggccgagctacctcatcgagaacctcagcaaggacaccaacagcaacatagccgagggccccggcgactttgtcctgcccgcccagtcgaacctcgcccagttctcgtacggcaacacggtcggccgcaaccccatctacggccccgtgaacaacggcagccccaaccgcccggccgccctcctgacctcgtccggacggtacccggccatcccggcgcccaactacgccgacgtccccgtcagccagttcctcaacgtcaaggacccggcgcagaacggcggccggcgcgtcctgggcgacaacacggtcgacgagtcggcggcgctcaacgccatcctgcagctggcggcggaccagggcaagatcgcctacttccccttcggcaagtaccgggtcgactcgaccctgctggttcccgcgggcagccggctggtcggcgaggggtgggcgacgatcgtcgggcacggttctcagttcgccgacgcctcgtcgccccgtcccgtcgtgcaggtcgggcggcccggcgacgtgggcgtggcgcagatccaggacatgcgcttcaccatcagccagccgctgccgggcgccatcctggtgcagtggaacatcgccggcgccaagcccggcgacgtggccatctggaacagcctcatcacggtcggcggcacgcgcggggcggcggacctgacgaatacgtgccggaacccgtcgtccccgtgccgggccgcgttcctgggcatgcacctgaccgcgtcgtcgtccgtgtacgtggagaacgtgtggaactgggtggccgaccacatcgccgaggactttgacggcggcagcaacttcgcggccgggcggggcgccctggtcgagtccaccaagggcacctggctgcacgggctcgggtccgagctttttggttgtaccaactacgaccagggagacaacaacccggtgctggtcccggcgccctggacgccggacgaggccggctggggcgacccgaccttctcgcactgcggcgccagcgacaagaggtgccggatggggccggccaactacatcagcggcggcagcggcatccacacctacgcctcggccagctgggccttcttcagcgggccgggctaccagggctgcgccggcaccttccagtgccagaaatacatgcacatcgtgaaccagacgccgactgggctgcaggccttcggcctctgcagcaaggattcctatgccacgctgaggctggccgacggcaccgagattgtcacgcagaacggcttcaccggttcctggcccggaccagtaggcgatgtcggtcgctacacgccctag

SEQ ID NO: 1562 - protein, 748 aa, Myceliophthora thermophilia
MVRLMRWLAAMPASSWLGVAMASPTPAQELHPRQAKTSFWYANIDHTSAEVRGYAPDLDGDYTYEVFKAVAPGDGPGIQRAINAATNGTTRHGQWFASQPRVVYIPPGEYVVSETIFMNTDTILMGDATNPPIIKAAPGFSRSGTLLNAQDPTTGVSGELSFAVSLKNIVLDTTNVPGDAPFVALYWGVAQAAHLQNVQIRMPSSVNGAGHSGIRMGRGSTLAVSDVRIERGQNGIWYNGHQQAVFKSIYFYQNTVGMLIDGGSTISLINPTFDTVGFGVVNTGGSPWIALIDATSKNSGVTLRTTSWPSYLIENLSKDTNSNIAEGPGDFVLPAQSNLAQFSYGNTVGRNPIYGPVNNGSPNRPAALLTSSGRYPAIPAPNYADVPVSQFLNVKDPAQNGGRRVLGDNTVDESAALNAILQLAADQGKIAYFPFGKYRVDSTLLVPAGSRLVGEGWATIVGHGSQFADASSPRPVVQVGRPGDVGVAQIQDMRFTISQPLPGAILVQWNIAGAKPGDVAIWNSLITVGGTRGAADLTNTCRNPSSPCRAAFLGMHLTASSSVYVENVWNWVADHIAEDFDGGSNFAAGRGALVESTKGTWLHGLGSELFGCTNYDQGDNNPVLVPAPWTPDEAGWGDPTFSHCGASDKRCRMGPANYISGGSGIHTYASASWAFFSGPGYQGCAGTFQCQKYMHIVNQTPTGLQAFGLCSKDSYATLRLADGTEIVTQNGFTGSWPGPVGDVGRYTP

SEQ ID NO: 1563 - protein, 726 aa, Myceliophthora thermophilia
SPTPAQELHPRQAKTSFWYANIDHTSAEVRGYAPDLDGDYTYEVFKAVAPGDGPGIQRAINAATNGTTRHGQWFASQPRVVYIPPGEYVVSETIFMNTDTILMGDATNPPIIKAAPGFSRSGTLLNAQDPTTGVSGELSFAVSLKNIVLDTTNVPGDAPFVALYWGVAQAAHLQNVQIRMPSSVNGAGHSGIRMGRGSTLAVSDVRIERGQNGIWYNGHQQAVFKSIYFYQNTVGMLIDGGSTISLINPTFDTVGFGVVNTGGSPWIALIDATSKNSGVTLRTTSWPSYLIENLSKDTNSNIAEGPGDFVLPAQSNLAQFSYGNTVGRNPIYGPVNNGSPNRPAALLTSSGRYPAIPAPNYADVPVSQFLNVKDPAQNGGRRVLGDNTVDESAALNAILQLAADQGKIAYFPFGKYRVDSTLLVPAGSRLVGEGWATIVGHGSQFADASSPRPVVQVGRPGDVGVAQIQDMRFTISQPLPGAILVQWNIAGAKPGDVAIWNSLITVGGTRGAADLTNTCRNPSSPCRAAFLGMHLTASSSVYVENVWNWVADHIAEDFDGGSNFAAGRGALVESTKGTWLHGLGSELFGCTNYDQGDNNPVLVPAPWTPDEAGWGDPTFSHCGASDKRCRMGPANYISGGSGIHTYASASWAFFSGPGYQGCAGTFQCQKYMHIVNQTPTGLQAFGLCSKDSYATLRLADGTEIVTQNGFTGSWPGPVGDVGRYTP

SEQ ID NO: 1564 - DNA, 324 bp, Myceliophthora thermophilia
atgcagttctcaaccaaactcgtcctcttccttaccgctgctgccgctggcgtctttgcgggcccggccgttgacccgggtgccgtcacctccagccaaactgtccaggatggcgatatcctctacgtcggccttgacgagtctgccctcgagcgccgttccaacggcgtcgagaagcggtgcactggcgcttatttgcccccccacgcagattgcaccccgggccagtgccagtgccttggcaacaacggttgctggtcttgcaacggtggccgcacgcagtgccagcccggccccggctcgggcgtgtgctggaccgagtga

SEQ ID NO: 1565 - protein, 107 aa, Myceliophthora thermophilia
MQFSTKLVLFLTAAAAGVFAGPAVDPGAVTSSQTVQDGDILYVGLDESALERRSNGVEKRCTGAYLPPHADCTPGQCQCLGNNGCWSCNGGRTQCQPGPGSGVCWTE

SEQ ID NO: 1566 - protein, 87 aa, Myceliophthora thermophilia
GPAVDPGAVTSSQTVQDGDILYVGLDESALERRSNGVEKRCTGAYLPPHADCTPGQCQCLGNNGCWSCNGGRTQCQPGPGSGVCWTE

SEQ ID NO: 1567 - DNA, 1668 bp, Myceliophthora thermophilia
atggccaagaggccgctcatattcttgcggcttccgcttctcttcctgatattctcgagctgtgcttgggtcggtaatgtggtggcagacgggccggcaccggttattgtgcaggggcgggatggcgttggaggagcgggagggcccgagccggtatgggcaggggtggtcggaggggcggtcggctgggtggaggaggatcgggacggatgccaggccatgatcactccgcccccgtcgctcctgggccggcaggaccagggacagatccaggcgctgagcgagcagctgcagcggatcagcgaccagttccgctcggtcagccaggcgagccaacaggtgagccagtccagtcagcagctcagccagtcgctccagcaagccacgcagcggctcagccagacagagcaagagctggcgagcgcccgcctgcagcagggggccgccgagtctgcctcgcggtccatgtcgcaggcctcggcggaggcgtcgcgccgggcggacgaggcgatcaggtcgatatcgcagagcgccagcagcgccatctcggcgagcatggcgagcctcgcgagctccatgggcgccagcttctcgagcgccctccagctggcaagccagagtgcggccgacgcgtcgaggtctgcggcgagcgtggcacagaaggcgcaggaggacgccacggcgctgagggtaacgtctccatctcggaaacaccaccgacgacgacgtcacgagctaaccaatgtccatcaggatgaagccaactcgcagatccagcgggcccagggcgccgcgctctcggtcacacagacggccctggcggtggtgggcggcatcatcggctcgtcgctgctcaccggcgtcgtcttcgtggtcgtcctccgccgccggcgcacaaagcgccgccaacgcgaccgcgggatgggaagcggcgagggcaacgtcggcaatatcggccatccaccaccgacgggcacctccaacaaggcctactcggtctcctcggccaagaagggctacgcggcaagtgacgacggcaggagcagcagtaggagcaggagcaggagcagcagcagcacctacagtaccgacgccgacgggttccggttccctaccggcgtccaacagccgccggcagccatgactactgatactgggggaggaatatctagaaagcgcatctccccggcagccgccgccagggtgggctacgcggtcagctactacggtctgcgaccctcccgcgcatcccgcgaggaggcggcgggagcaacagcagcagcagcagtatcatcaacgacattccggctcggaaaaccacccccgcctaggggagcaacaggagcatcatcgtcgtcatcatcatcaccatcatcgtcatcgtcatcgtcagcttcagaagcgaagggcggaaagtttaccgtctcacccaactcgggattcaaattcaaccttgaaaacacccaacccagcactacgcaacagcagcagcagcagcagcagcagcagcagcaagagaaggaggagaaggaggatgagaaatcggggaagaggagaaccaccggctcggacgggaatagccagccgagtctgaccctggaccggtggttgcgggacgggacgaacgtcagcccgttcccgatgctgaagggcaaggtgatggattaa

SEQ ID NO: 1568 - protein, 555 aa, Myceliophthora thermophilia
MAKRPLIFLRLPLLFLIFSSCAWVGNVVADGPAPVIVQGRDGVGGAGGPEPVWAGVVGGAVGWVEEDRDGCQAMITPPPSLLGRQDQGQIQALSEQLQRISDQFRSVSQASQQVSQSSQQLSQSLQQATQRLSQTEQELASARLQQGAAESASRSMSQASAEASRRADEAIRSISQSASSAISASMASLASSMGASFSSALQLASQSAADASRSAASVAQKAQEDATALRVTSPSRKHHRRRRHELTNVHQDEANSQIQRAQGAALSVTQTALAVVGGIIGSSLLTGVVFVVVLRRRRTKRRQRDRGMGSGEGNVGNIGHPPPTGTSNKAYSVSSAKKGYAASDDGRSSSRSRSRSSSSTYSTDADGFRFPTGVQQPPAAMTTDTGGGISRKRISPAAAARVGYAVSYYGLRPSRASREEAAGATAAAAVSSTTFRLGKPPPPRGATGASSSSSSSPSSSSSSSASEAKGGKFTVSPNSGFKFNLENTQPSTTQQQQQQQQQQQQEKEEKEDEKSGKRRTTGSDGNSQPSLTLDRWLRDGTNVSPFPMLKGKVMD

SEQ ID NO: 1569 - protein, 526 aa, Myceliophthora thermophilia
DGPAPVIVQGRDGVGGAGGPEPVWAGVVGGAVGWVEEDRDGCQAMITPPPSLLGRQDQGQIQALSEQLQRISDQFRSVSQASQQVSQSSQQLSQSLQQATQRLSQTEQELASARLQQGAAESASRSMSQASAEASRRADEAIRSISQSASSAISASMASLASSMGASFSSALQLASQSAADASRSAASVAQKAQEDATALRVTSPSRKHHRRRRHELTNVHQDEANSQIQRAQGAALSVTQTALAVVGGIIGSSLLTGVVFVVVLRRRRTKRRQRDRGMGSGEGNVGNIGHPPPTGTSNKAYSVSSAKKGYAASDDGRSSSRSRSRSSSSTYSTDADGFRFPTGVQQPPAAMTTDTGGGISRKRISPAAAARVGYAVSYYGLRPSRASREEAAGATAAAAVSSTTFRLGKPPPPRGATGASSSSSSSPSSSSSSSASEAKGGKFTVSPNSGFKFNLENTQPSTTQQQQQQQQQQQQEKEEKEDEKSGKRRTTGSDGNSQPSLTLDRWLRDGTNVSPFPMLKGKVMD

SEQ ID NO: 1570 - DNA, 663 bp, Myceliophthora thermophilia
atgacccccgtttgggtcttcccggcctacccgctgctcctcagtgcccccttcggcggcaacctcatctcggccgccggccgcgccggccggcccgacggcatcaacacggtccctgtcgcactggccgctatcactgcccagggaacgggctttttgattagcttcatgatttgcgccgccttcctgtaccggctcatgacgcagaagctgccgcgcgaccaccaacgaccgggtgtgttcatctcgattgggccgagcgcctttagttctgccggtctagtacaactgggctccctcagtcactccatcttcccgtccgacttcatgggcacggagcacgccgtgcacatccttcgcttgctggcctacatggccggcctctggttgtggggactgagcatctggttcttcctcgtctcggtcggctcgctgtggaagtacctgcggcccgagagcaaggggaagctgcacttccagatgacgtggttctcttttgtctttcccaataccgctctggtagcggccacagaagcactcggcagcgccttcgacagccccggtctccagatctttggctgcgtgctggcgggatgcttggtcctggtgtggatcctggtgttcacaaagatgctgcgctgcttgtggaggagggagctgtga

SEQ ID NO: 1571 - protein, 220 aa, Myceliophthora thermophilia
MTPVWVFPAYPLLLSAPFGGNLISAAGRAGRPDGINTVPVALAAITAQGTGFLISFMICAAFLYRLMTQKLPRDHQRPGVFISIGPSAFSSAGLVQLGSLSHSIFPSDFMGTEHAVHILRLLAYMAGLWLWGLSIWFFLVSVGSLWKYLRPESKGKLHFQMTWFSFVFPNTALVAATEALGSAFDSPGLQIFGCVLAGCLVLVWILVFTKMLRCLWRREL

SEQ ID NO: 1572 - protein, 205 aa, Myceliophthora thermophilia
APFGGNLISAAGRAGRPDGINTVPVALAAITAQGTGFLISFMICAAFLYRLMTQKLPRDHQRPGVFISIGPSAFSSAGLVQLGSLSHSIFPSDFMGTEHAVHILRLLAYMAGLWLWGLSIWFFLVSVGSLWKYLRPESKGKLHFQMTWFSFVFPNTALVAATEALGSAFDSPGLQIFGCVLAGCLVLVWILVFTKMLRCLWRREL

SEQ ID NO: 1573 - DNA, 414 bp, Myceliophthora thermophilia
atgaagttctgcaccgctgttggctttctggctgctctggccaccagcgtcctcgccagcccggcacccgccgtgaccgcggcgccgcgggctccgccggcggcggcggcggcggcggacgacgacggcaagtgcaccaagtacgagacgacgacgtcgttccactacaacttctgcccgatgtactgcctcgagccggacagcccgcggtgcccccccgtggcctgcccggcggtcatcgtcagctgcaagccgggcgagaccaccacccgccccccgctgccggccccgaccaccgtcaccgccaccgtcaccacggactgcgtcgtcacctacgaggccgacgtcggctgcgccccctgcggctgcctcggctgccccacgtgtgcgcccgtcaagactgagacgccttga

SEQ ID NO: 1574 - protein, 137 aa, Myceliophthora thermophilia
MKFCTAVGFLAALATSVLASPAPAVTAAPRAPPAAAAAADDDGKCTKYETTTSFHYNFCPMYCLEPDSPRCPPVACPAVIVSCKPGETTTRPPLPAPTTVTATVTTDCVVTYEADVGCAPCGCLGCPTCAPVKTETP

SEQ ID NO: 1575 - protein, 118 aa, Myceliophthora thermophilia
SPAPAVTAAPRAPPAAAAAADDDGKCTKYETTTSFHYNFCPMYCLEPDSPRCPPVACPAVIVSCKPGETTTRPPLPAPTTVTATVTTDCVVTYEADVGCAPCGCLGCPTCAPVKTETP

SEQ ID NO: 1576 - DNA, 1941 bp, Myceliophthora thermophilia
atgtctggccttggccacgccctcctctgcctcctagcagggtctctcctggggggccccggggtttctgcgcttcccgccgccgagtggcggaagcagtccatctaccaggtcgtcaccgacagattcgcccggaccgacctctcaacgacggcgccctgcaacacggccgatcaggcttactgtgggggcacgtggaaaggactgatatccaagctcgactacatccaagggatggggttcacggccgtgtggatctccccggtcgtgaagcagatcgatggcaactctaaggacgggtcgtcctaccacggctactgggcgcaggacatttgggcggtcaacccggccttcggaactgccgacgacctagtggagctgtctagagagctgcactccaggggcatgtatctcatggtcgacatcgtcacgaaccacatggcgtacatgggttgcggtacatgcgtcgactacagccagtttaaccccttctcctcgacgtctgtcgaagtgtgcgtacgcccggccagactctacccgctcccgccccaagggcgactgctgacacacacggctctaggtgttggcaaggcagcgacattgtcaggtatgctgggccaggatctatgtgattgtatccctcttgtggacctcgaggctcacgtatcccagcttaccggatctgcgcaccgaggaacctccagactggctcttccccgagcacaactcacactccccggcgtttgcagtgacggccttcgagttgatagcgcaaaacacgtcgagacgtccttctggcccggtttctcagacgcagcgggtgtctatctcctgggcgaagtcttccacggagaccccgcatacgtggctccttaccaggactatttcgacggagtgctcgactatcctagagcattccagtccaccagcgggagtattagcgagcttgtttctggtctcaacaatctgcagaatactgcacgagacctcagcctgtacggctcttttctggagaaccacgacgtggagagattcccgtctttcaccaaggataaggcgatcgcctttacgatgctcaaagacggcatcccgatcatttaccaagggcaggagcagtactacgcgggctccggaaccccttcgaaccgcgaggcgctctggacttccggctattcgacgagctcggagttctaccaatggatcaccaaactcaatcagattcgggcacgagccatagcacaggacaaggactatctctcctacaagagcaaatccatctactcggatagccacaccatcgccatgcgcaagggcaacgccgggtaccaggtcgtgagcatattcactaacgttggggcatcatcctcggcgtccgtcactctggcttcgtctgccacgggcttcgaggcgaaccaggcgctcgtcgacgtcctgagctgcaccgcctataccacagactcgaacggcggcctcaccgtgaccctggccgacgggctcccgcgcgtgctgtatcccaaacctcgtctcgccggcagcgacctctgccaggactcggataccggggtcaccacgacccctggagcaacgccggtgccgacaacctccgcaggcggccccgcttgcaccctgtctgccgtcgacatcaccttcaacgaactggtgaccaccgtgtggggggagacggtcaaggtctgtggtagcgtcggcaacgttcccgaactcggcaactggaaccctgccagcgcagtcacactcgacgcgtcgcgatacacatcgagcaatccgctgtggtctgtcgtcgtccggcttgcccccgggacagcgattgagtacaagtacatcaaggtgagccagtccgggacggtgacttgggaggcggatccaaatcgcacctacaatgtcccctgcgcgaccgcaactgtgagcagcacctggagatga

SEQ ID NO: 1577 - protein, 646 aa, Myceliophthora thermophilia
MSGLGHALLCLLAGSLLGGPGVSALPAAEWRKQSIYQVVTDRFARTDLSTTAPCNTADQAYCGGTWKGLISKLDYIQGMGFTAVWISPVVKQIDGNSKDGSSYHGYWAQDIWAVNPAFGTADDLVELSRELHSRGMYLMVDIVTNHMAYMGCGTCVDYSQFNPFSSTSVEVCVRPARLYPLPPQGRLLTHTALGVGKAATLSGMLGQDLCDCIPLVDLEAHVSQLTGSAHRGTSRLALPRAQLTLPGVCSDGLRVDSAKHVETSFWPGFSDAAGVYLLGEVFHGDPAYVAPYQDYFDGVLDYPRAFQSTSGSISELVSGLNNLQNTARDLSLYGSFLENHDVERFPSFTKDKAIAFTMLKDGIPIIYQGQEQYYAGSGTPSNREALWTSGYSTSSEFYQWITKLNQIRARAIAQDKDYLSYKSKSIYSDSHTIAMRKGNAGYQVVSIFTNVGASSSASVTLASSATGFEANQALVDVLSCTAYTTDSNGGLTVTLADGLPRVLYPKPRLAGSDLCQDSDTGVTTTPGATPVPTTSAGGPACTLSAVDITFNELVTTVWGETVKVCGSVGNVPELGNWNPASAVTLDASRYTSSNPLWSVVVRLAPGTAIEYKYIKVSQSGTVTWEADPNRTYNVPCATATVSSTWR

SEQ ID NO: 1578 - protein, 622 aa, Myceliophthora thermophilia
LPAAEWRKQSIYQVVTDRFARTDLSTTAPCNTADQAYCGGTWKGLISKLDYIQGMGFTAVWISPVVKQIDGNSKDGSSYHGYWAQDIWAVNPAFGTADDLVELSRELHSRGMYLMVDIVTNHMAYMGCGTCVDYSQFNPFSSTSVEVCVRPARLYPLPPQGRLLTHTALGVGKAATLSGMLGQDLCDCIPLVDLEAHVSQLTGSAHRGTSRLALPRAQLTLPGVCSDGLRVDSAKHVETSFWPGFSDAAGVYLLGEVFHGDPAYVAPYQDYFDGVLDYPRAFQSTSGSISELVSGLNNLQNTARDLSLYGSFLENHDVERFPSFTKDKAIAFTMLKDGIPIIYQGQEQYYAGSGTPSNREALWTSGYSTSSEFYQWITKLNQIRARAIAQDKDYLSYKSKSIYSDSHTIAMRKGNAGYQVVSIFTNVGASSSASVTLASSATGFEANQALVDVLSCTAYTTDSNGGLTVTLADGLPRVLYPKPRLAGSDLCQDSDTGVTTTPGATPVPTTSAGGPACTLSAVDITFNELVTTVWGETVKVCGSVGNVPELGNWNPASAVTLDASRYTSSNPLWSVVVRLAPGTAIEYKYIKVSQSGTVTWEADPNRTYNVPCATATVSSTWR

SEQ ID NO: 1579 - DNA, 222 bp, Myceliophthora thermophilia
atggagaggatcagcgccgttgatgttgccgctgccgctgccgccgccgccgccgatcggatcgttgagcgatcgaagaccaagatcgaagatcgggggattcccttggcttcgcattcgaacccggcgctggggattcccgccgcgttgcttgcaatctccggtccccctcctcggacacaattcctggcacgctggtgttgcgattctgccctcccctag

SEQ ID NO: 1580 - protein, 73 aa, Myceliophthora thermophilia
MERISAVDVAAAAAAAAADRIVERSKTKIEDRGIPLASHSNPALGIPAALLAISGPPPRTQFLARWCCDSALP

SEQ ID NO: 1581 - protein, 55 aa, Myceliophthora thermophilia
DRIVERSKTKIEDRGIPLASHSNPALGIPAALLAISGPPPRTQFLARWCCDSALP

SEQ ID NO: 1582 - DNA, 7143 bp, Myceliophthora thermophilia
atgactcgtccctccgtcctcactggcacgctccttcttacggttctttctcttccgactttcgtttccggccgcaagttcgacgccagcctgatagactacaatcttaatagaaaccggtcagccacaagcccttacgactactggggatcgcgtcaggatgatgaacccgacttcaagtatgctccgtctccggaaaactggcggatgccattctacactatcttcctggatcgttttgtcaatggcgacccgtcaaacgatgacatctattccactccttacgaaaccgacatgatgagcacccagctccggttcggcggcgatctcgaaggcctcagagattcgctagactatatcactggcatgggaatcaagggtctttacatcgcaggttctcctttcgtcaaccttccgtggggtgcagactcgtactcgcccatcgacctgaccacgctcgataagcacttcggcaccatcaagacatggcaacaggtcattgacgaaatccatgcccgcggcatgtgggtcgtgatggacaacactatggctacgttgggcgacctgatcgggttcgagggctacctgaacgaaagcacaccgttccgtaccgaagaacataaagttctctggaaggatccggaaaggcgctactacgatttcgatatcggcaacgagtacaatgagacgtgcaactatccgcagttctggctggaggacgggactcgaattgacccgccagggctcaaaggttgctatgacagcgatttcgaccagtatggcgatatcgaggccttcggtgtgtaccccgactggcagcgccaactcgccaaattcgcatctgtccaagaccgcctccgcgaatgggagccttcggtagctgctcgcctccagcgcttctcgtgcatggccatccggatgttggatgtcgacggtttccgtattgacaaggccgttcaagtcactgttgatgcgcaggccgcgttcagttctgcgatgcgcaaatgtgcgagtgaggttggcaagaagaactttgtcatctttggagaaattaccagcggcaacgaccttggatccatctatctcgggcgcggccgggaacccaaggtggccaaggaactggagaaacccgacaatgccatcgcccttgaaccatccagttccgattcctctcgtttcttcatccgcgaggccgggaacagcgcgctcgatgccggcgccttccactactcgatataccgcttcttgacccgcttcctcggattgagcggcaatcttgaggctggatacgacttgccgttggattgggtggacgcctggaaccatatggtcatcaccaacgactttttcaaccctaacaacaacaagttcgacccgcgccatctgtatggcgtgaccaaccaggatgtttttcgctggcccgccatcaaactcggggtcgagcgcatgctcctgggctatttcgtcaccaccctcctcatgcccggcgccccgctggtatattacggcgaggagcaagcactgtatgcgttggacggaaccgcttccaactacgtttatggccggcaagcgttcgccccgtccccggcgtggcaagctcacgggtgtttccagcttacgatcggccagtatatcggctggcccattgaacaagggcgccatgggtgcacagatcccggtgtctcccgcgatcatcgggatccgtcagcgcctcttcgcaacatcttccggcacatgtttgctctccgcgactcctttccggtgcttgagcatggctggtttctccagacgctctccaagcgcaccgaattcatcacgctcaatggcagtacaaccccgacagagttcggcatctggagcgtggttcgcgacatgtatcacccgctacagaacgagaccgaaacgccagtgtggctggtataccacaaccgtgaaaagtctgcttcgtacacatttgcctgcgacgacgtgaatgacgccttcgtctcgcctttcgacgagggtaccgaagtcaaggacctcttcagcaacgggaagtccattcgactagaggcttctccgcggaaaaacaatttcacgggaactggcaagagcgccggttgtctctccagcatcgacctcgagcccttcgagttccgggcatacgtgccggccggggaatgggtggcaccgggccccatgattacgaagttcgcacctggtcatgatgtgtctcttgattcgacggatgcaaatggcgagatcgacggcattgtcatcgagtataacgttgagatggattgcgattccttcaaggatgctatgaccgcggtggtcaccacggacggcgcgcacaacgctaccaagctcaccttccagtcgccgaaatgcagcactatcacgccggagaaacggtttggctacacaggagagattcagtctagctggaggttggagacgagcttgaggaacgtgccagatggcgtcatccagatcaccatcgacaaagctctcaccaagggtggcatttccacgaacaccaccgaccgttttctcattcgcttcggcagaatcaacaaccccgtagtcttcccgtctctggccaactattcgcgaacattgctggctggcgaagaaggggataatgtgtacatccagcacagcgcccctggcgccacgcattggcggtacagcacgaactgggcgtcaagttggagcgaatggttcccctatgactcctcggatacgaggcctgtggttcccaagttgaagtgggacggaacggacctgcagaaatggacgggtacgcatatccaggtccagtactacagtaagccgctcggctcctcggccttcatccaacacgccgatagcaacgacgttcagtgggagagatcactcccccatattcgtattcatggcccgtataacaaatggggatacgattccggtttgcctggatccatggacctcatctatcaccacacctggtctttgcacttcatgtacgagtggccagcaaactttcagctcaacgtctggggcatcaatccggacaagcagcccgacgtcaccgccattttcggagatatcgacggagacggcgtggtcgatcgtctgcctcccagcagtctggcaaagaacgtcatcaacattacgaaaccgccacccatgccggcgctcgcttacaagctcgttttcgacgattcggccttcaagttcaggtatgagcctgcaggcaatatgggcctccagatcgtgattttcgtcttgctcgccgtcctgccagtcatcttcgccgtgctagccgggtggatttatgttcgcagcttctatcaagtcaaggtcaacaagtcgggtttcactcgcaagggatggatgcccctggggctcagcagcatctccatgcttgacctcaaatcattcggcaaaggcagcgtcgaaatgaaagccatgactccgtcgccggcccagagcgccgccgccgtcgcccctgttggtgccaccggcagccgccgcaccgtgctcatcgctaccatggagtacaacattgacgacttcggtatcaagatcaagattggtggcctaggcgtcatggcccagctgatgggaagcgcgctctctcatgtcgacctcatttgggttgttcccatggtgggcgatgttgactacccgactgaccgcatgacccgggcagaatccatgttcgtgaacgtcatggggcagccctacgagatagaggtctactactacacgaccaaaaacatcacctacgtcctcctcgatgccccgatctttcgcaagcagaccaaggcgaacccgtacatcgctcgcatggacgacatcgagagcgccattctgtactccgcatggaacagctgcatcgccgagacaatccgtcggttcccggtcgatatctaccatatcaacgactatcacggtgctgccgctccactttatctcctcccgcggaccattccctgctgtctctctcttcacaacgccgaattccaaggtctgtggccgatgcgaacgccggaagaacagaaagaggtctgtgacgtcttcaacctgtcgccggaaatagtcaaggaatacgtacaatacggctcagtcttcaacttgctccacgccggtgccagttacctccggatccatcagcggggcttcggcgcagtgggcgtgtccaaaaagtacggtgaccgctctcttgcacggtaccccatcttctggagcttgaagaatatcggccagctcccgaaccccgacccgtctgacacggccgaatgggatcctaccaaggacgtctcgaagcaatccaaggacattgagatcgaccaggctttcgaggagaagagggccgacctcagacgccaggcgcaagaatgggccggcctggaagttgaccctaccgcagagttgtttgttttcgtcggtcgctggagtttgcagaagggcgtggatctcatcgccgacatcttccccagcattctggagaagtaccccaagacgcagctcatttgcgtcggcccggttatcgacctctacggtcggtttgcggctctgaagctccagaagctgatggagaagtaccccaagcgagtgtttagcaagcccgagttcacccagctgccgccgtatgtcttcagcggcgcagagttcgctctcattccctcgcgggacgagcctttcggtctggtcgctgttgagttcggtcgcaagggcgcgctgggcgtcggcgcacgcgttggaggcctcggccagatgcccggcttctggtacacggtcgagtccatgacgccgtcccatctcctacagcagttcaagcaggccattgtgtcagctttggaatgcaagccttccaagcgcgccctcatgcgcgcctggagcgccaagcaacgcttccctgtcgcgcaatgggtcaagcagctggatgaactgtacagcgagtccatccggatccaccacaaagaggcgagaaagaagaagctcgaggcactcagtcccagcagcccaaatccgtcccggccgccgtcccggctgtcatcccggccgccttccccaacgagcacggccacgtatgttgaccatgggtcctcggcacttagcccagggccagagacacatcttatgccaccacactcgtccgcctcgccggcaccaagggcaatgttgagcccagacctaccaagtccctcggctccgtgggtgacaggcacggctcccagctcgccccgtgattccgccgcaagctccattgcaggaagcatctacgggaatgccacggcaagggaaagcaccatgagtgtcgacagcttcggtgttcgggcacaaaaggatggcatggactcgcccagtttgaccccaaacttcgggctggccccccctcgagccactgtcggacagagccaccgcaacagcagtcttctcagtctccccgacgtcgtcggcgatagacacgacctgaagctgcagcaggttgaccaattctttaacgactccaatggcgagtactatgccatgtttgaggagatgctggagtctctgaccgcgtccaactcggccaacgagctgtgcatcgaggcgttcatcaagaagagcgagaaagaatggttcgccagataccgggatgccaagctgggcaggcactccaggatcggaagcccagcgaacagtcggccggcgtcaagacaaggctcagggaggaacgagtctgttgtcagccgcggccgccaacgccaccggagcataacgccaagcagcctcgccaggtccgccttcgatgtctcgcccccgccgaacgacgtggacgacgagttcctgctgggcgacggctaccaacccccaaccggattgaagaagatcctctccatccgtcttggcgactggccgctctactccttcctcctcgctctttgtcagatcatctcggtcagctcgtatcaaatcgtcctcctcacgggcgagacaacccaaacaccggagaagctctacatggtcgcggccacgtacataggaacctcgctgctctggtgggcgatggagcggaacttcaagtccgtctaccctctgtctctaccgtggttcttcttcggcttcgccttcctgctgatcggcgtcgcgcccttcatccccgactggcgcgtagccaacaagatcgaggacgctgccacctgcttctacgccgccggtgccagcagcggtgcgctgtcgtttgccctaaactttggcgacgaaggcggtgcgcccaccaagcaatggattacgcgcgctctgatcgtttcgggcttcgcccaggtctacagcatcggtctctggtactggggctccatagtagccgacacagacccgacggcgaccgtctttgtcggcacctccaaggtaccgcaggcagtcgtcataggcgtgcccatttgcctcctgtgctgggccatcggcgtcgtgctctacctcgggctgccggacttctaccgccagacccccgccaccatcccgggcttctacatttcgctgtatcgccgcaaggtcgtgccgtggttcttcgtcatgatcatcctgcagaactactggctctcggcgccctacggccgcagctggcagttcttgttcaacacgcagcacgttcccggctggggcatcttcctcctcgcgctcggcttctactgcgggctgtgggcgctggtgctgtacgcattctcgtacttctcggatgagcacacctggctgttgcccatcttcgccatcggcctgtgcgccccgcgctgggcccaggaattctggggcaccagcggcctcggctggtacctgccgtgggccggcggccccgtggggtcgacgatcctgtcgaggtgcctctggctgtggctaggtctgctagacaacatccagggcgtcggaatcggcatgctgttgctcgctacgctgacccggcatcacgtgttgaccgtcctgatcggggcgcaggtggtgggaagcgtgttcactatgctggcgcgcgcgacaagtccgaacgctctctcgccgaacacgacgttcccggatttctctcagggtgtcatgccggggattgcgagcccgttcttctgggtctgcttgatcttccagctgatcattcccatcggcttcttcaaattcttccggaaggagcaggtttccaagccttaa

SEQ ID NO: 1583 - protein, 2380 aa, Myceliophthora thermophilia
MTRPSVLTGTLLLTVLSLPTFVSGRKFDASLIDYNLNRNRSATSPYDYWGSRQDDEPDFKYAPSPENWRMPFYTIFLDRFVNGDPSNDDIYSTPYETDMMSTQLRFGGDLEGLRDSLDYITGMGIKGLYIAGSPFVNLPWGADSYSPIDLTTLDKHFGTIKTWQQVIDEIHARGMWVVMDNTMATLGDLIGFEGYLNESTPFRTEEHKVLWKDPERRYYDFDIGNEYNETCNYPQFWLEDGTRIDPPGLKGCYDSDFDQYGDIEAFGVYPDWQRQLAKFASVQDRLREWEPSVAARLQRFSCMAIRMLDVDGFRIDKAVQVTVDAQAAFSSAMRKCASEVGKKNFVIFGEITSGNDLGSIYLGRGREPKVAKELEKPDNAIALEPSSSDSSRFFIREAGNSALDAGAFHYSIYRFLTRFLGLSGNLEAGYDLPLDWVDAWNHMVITNDFFNPNNNKFDPRHLYGVTNQDVFRWPAIKLGVERMLLGYFVTTLLMPGAPLVYYGEEQALYALDGTASNYVYGRQAFAPSPAWQAHGCFQLTIGQYIGWPIEQGRHGCTDPGVSRDHRDPSAPLRNIFRHMFALRDSFPVLEHGWFLQTLSKRTEFITLNGSTTPTEFGIWSVVRDMYHPLQNETETPVWLVYHNREKSASYTFACDDVNDAFVSPFDEGTEVKDLFSNGKSIRLEASPRKNNFTGTGKSAGCLSSIDLEPFEFRAYVPAGEWVAPGPMITKFAPGHDVSLDSTDANGEIDGIVIEYNVEMDCDSFKDAMTAVVTTDGAHNATKLTFQSPKCSTITPEKRFGYTGEIQSSWRLETSLRNVPDGVIQITIDKALTKGGISTNTTDRFLIRFGRINNPVVFPSLANYSRTLLAGEEGDNVYIQHSAPGATHWRYSTNWASSWSEWFPYDSSDTRPVVPKLKWDGTDLQKWTGTHIQVQYYSKPLGSSAFIQHADSNDVQWERSLPHIRIHGPYNKWGYDSGLPGSMDLIYHHTWSLHFMYEWPANFQLNVWGINPDKQPDVTAIFGDIDGDGVVDRLPPSSLAKNVINITKPPPMPALAYKLVFDDSAFKFRYEPAGNMGLQIVIFVLLAVLPVIFAVLAGWIYVRSFYQVKVNKSGFTRKGWMPLGLSSISMLDLKSFGKGSVEMKAMTPSPAQSAAAVAPVGATGSRRTVLIATMEYNIDDFGIKIKIGGLGVMAQLMGSALSHVDLIWVVPMVGDVDYPTDRMTRAESMFVNVMGQPYEIEVYYYTTKNITYVLLDAPIFRKQTKANPYIARMDDIESAILYSAWNSCIAETIRRFPVDIYHINDYHGAAAPLYLLPRTIPCCLSLHNAEFQGLWPMRTPEEQKEVCDVFNLSPEIVKEYVQYGSVFNLLHAGASYLRIHQRGFGAVGVSKKYGDRSLARYPIFWSLKNIGQLPNPDPSDTAEWDPTKDVSKQSKDIEIDQAFEEKRADLRRQAQEWAGLEVDPTAELFVFVGRWSLQKGVDLIADIFPSILEKYPKTQLICVGPVIDLYGRFAALKLQKLMEKYPKRVFSKPEFTQLPPYVFSGAEFALIPSRDEPFGLVAVEFGRKGALGVGARVGGLGQMPGFWYTVESMTPSHLLQQFKQAIVSALECKPSKRALMRAWSAKQRFPVAQWVKQLDELYSESIRIHHKEARKKKLEALSPSSPNPSRPPSRLSSRPPSPTSTATYVDHGSSALSPGPETHLMPPHSSASPAPRAMLSPDLPSPSAPWVTGTAPSSPRDSAASSIAGSIYGNATARESTMSVDSFGVRAQKDGMDSPSLTPNFGLAPPRATVGQSHRNSSLLSLPDVVGDRHDLKLQQVDQFFNDSNGEYYAMFEEMLESLTASNSANELCIEAFIKKSEKEWFARYRDAKLGRHSRIGSPANSRPASRQGSGRNESVVSRGRQRHRSITPSSLARSAFDVSPPPNDVDDEFLLGDGYQPPTGLKKILSIRLGDWPLYSFLLALCQIISVSSYQIVLLTGETTQTPEKLYMVAATYIGTSLLWWAMERNFKSVYPLSLPWFFFGFAFLLIGVAPFIPDWRVANKIEDAATCFYAAGASSGALSFALNFGDEGGAPTKQWITRALIVSGFAQVYSIGLWYWGSIVADTDPTATVFVGTSKVPQAVVIGVPICLLCWAIGVVLYLGLPDFYRQTPATIPGFYISLYRRKVVPWFFVMIILQNYWLSAPYGRSWQFLFNTQHVPGWGIFLLALGFYCGLWALVLYAFSYFSDEHTWLLPIFAIGLCAPRWAQEFWGTSGLGWYLPWAGGPVGSTILSRCLWLWLGLLDNIQGVGIGMLLLATLTRHHVLTVLIGAQVVGSVFTMLARATSPNALSPNTTFPDFSQGVMPGIASPFFWVCLIFQLIIPIGFFKFFRKEQVSKP

SEQ ID NO: 1584 - protein, 2356 aa, Myceliophthora thermophilia
RKFDASLIDYNLNRNRSATSPYDYWGSRQDDEPDFKYAPSPENWRMPFYTIFLDRFVNGDPSNDDIYSTPYETDMMSTQLRFGGDLEGLRDSLDYITGMGIKGLYIAGSPFVNLPWGADSYSPIDLTTLDKHFGTIKTWQQVIDEIHARGMWVVMDNTMATLGDLIGFEGYLNESTPFRTEEHKVLWKDPERRYYDFDIGNEYNETCNYPQFWLEDGTRIDPPGLKGCYDSDFDQYGDIEAFGVYPDWQRQLAKFASVQDRLREWEPSVAARLQRFSCMAIRMLDVDGFRIDKAVQVTVDAQAAFSSAMRKCASEVGKKNFVIFGEITSGNDLGSIYLGRGREPKVAKELEKPDNAIALEPSSSDSSRFFIREAGNSALDAGAFHYSIYRFLTRFLGLSGNLEAGYDLPLDWVDAWNHMVITNDFFNPNNNKFDPRHLYGVTNQDVFRWPAIKLGVERMLLGYFVTTLLMPGAPLVYYGEEQALYALDGTASNYVYGRQAFAPSPAWQAHGCFQLTIGQYIGWPIEQGRHGCTDPGVSRDHRDPSAPLRNIFRHMFALRDSFPVLEHGWFLQTLSKRTEFITLNGSTTPTEFGIWSVVRDMYHPLQNETETPVWLVYHNREKSASYTFACDDVNDAFVSPFDEGTEVKDLFSNGKSIRLEASPRKNNFTGTGKSAGCLSSIDLEPFEFRAYVPAGEWVAPGPMITKFAPGHDVSLDSTDANGEIDGIVIEYNVEMDCDSFKDAMTAVVTTDGAHNATKLTFQSPKCSTITPEKRFGYTGEIQSSWRLETSLRNVPDGVIQITIDKALTKGGISTNTTDRFLIRFGRINNPVVFPSLANYSRTLLAGEEGDNVYIQHSAPGATHWRYSTNWASSWSEWFPYDSSDTRPVVPKLKWDGTDLQKWTGTHIQVQYYSKPLGSSAFIQHADSNDVQWERSLPHIRIHGPYNKWGYDSGLPGSMDLIYHHTWSLHFMYEWPANFQLNVWGINPDKQPDVTAIFGDIDGDGVVDRLPPSSLAKNVINITKPPPMPALAYKLVFDDSAFKFRYEPAGNMGLQIVIFVLLAVLPVIFAVLAGWIYVRSFYQVKVNKSGFTRKGWMPLGLSSISMLDLKSFGKGSVEMKAMTPSPAQSAAAVAPVGATGSRRTVLIATMEYNIDDFGIKIKIGGLGVMAQLMGSALSHVDLIWVVPMVGDVDYPTDRMTRAESMFVNVMGQPYEIEVYYYTTKNITYVLLDAPIFRKQTKANPYIARMDDIESAILYSAWNSCIAETIRRFPVDIYHINDYHGAAAPLYLLPRTIPCCLSLHNAEFQGLWPMRTPEEQKEVCDVFNLSPEIVKEYVQYGSVFNLLHAGASYLRIHQRGFGAVGVSKKYGDRSLARYPIFWSLKNIGQLPNPDPSDTAEWDPTKDVSKQSKDIEIDQAFEEKRADLRRQAQEWAGLEVDPTAELFVFVGRWSLQKGVDLIADIFPSILEKYPKTQLICVGPVIDLYGRFAALKLQKLMEKYPKRVFSKPEFTQLPPYVFSGAEFALIPSRDEPFGLVAVEFGRKGALGVGARVGGLGQMPGFWYTVESMTPSHLLQQFKQAIVSALECKPSKRALMRAWSAKQRFPVAQWVKQLDELYSESIRIHHKEARKKKLEALSPSSPNPSRPPSRLSSRPPSPTSTATYVDHGSSALSPGPETHLMPPHSSASPAPRAMLSPDLPSPSAPWVTGTAPSSPRDSAASSIAGSIYGNATARESTMSVDSFGVRAQKDGMDSPSLTPNFGLAPPRATVGQSHRNSSLLSLPDVVGDRHDLKLQQVDQFFNDSNGEYYAMFEEMLESLTASNSANELCIEAFIKKSEKEWFARYRDAKLGRHSRIGSPANSRPASRQGSGRNESVVSRGRQRHRSITPSSLARSAFDVSPPPNDVDDEFLLGDGYQPPTGLKKILSIRLGDWPLYSFLLALCQIISVSSYQIVLLTGETTQTPEKLYMVAATYIGTSLLWWAMERNFKSVYPLSLPWFFFGFAFLLIGVAPFIPDWRVANKIEDAATCFYAAGASSGALSFALNFGDEGGAPTKQWITRALIVSGFAQVYSIGLWYWGSIVADTDPTATVFVGTSKVPQAVVIGVPICLLCWAIGVVLYLGLPDFYRQTPATIPGFYISLYRRKVVPWFFVMIILQNYWLSAPYGRSWQFLFNTQHVPGWGIFLLALGFYCGLWALVLYAFSYFSDEHTWLLPIFAIGLCAPRWAQEFWGTSGLGWYLPWAGGPVGSTILSRCLWLWLGLLDNIQGVGIGMLLLATLTRHHVLTVLIGAQVVGSVFTMLARATSPNALSPNTTFPDFSQGVMPGIASPFFWVCLIFQLIIPIGFFKFFRKEQVSKP

SEQ ID NO: 1585 - DNA, 1596 bp, Myceliophthora thermophilia
atgcggacatccatcatcagtaccgcggtggccacggccctggccttcgccggcttgggctcagcagccaacataaccgaatggaagtcccgatccatctaccaggtcatgattgaccggtttgctcgcactgacggttccacggatgcgtcctgcgatgtctcacggttctgcggcggcacctggaagggcctcctgaacaatctggactacattcaggacatgggctttaccgccatccagatcagccccatcgtgaagaacatagaggagcatacctccgtcggcgacgcgtaccatggctattggtcggtcgacaactacgccctgaacgatcgttttggtacgaagcaggattttgaggacctggtggctgagctccacaagcgtgacatgctgctcatggttgacgttgtggtcaacaacatggcccaggctttcgacaacgtcgtcccgcccaagatcgactactccaagttcaatccgtttaacgataagaagtacttccacccttactgcaatgtgacccagtgggagaacgcgaccgactatcagaactgctggttgtacccgtacggcgttgccctggccgatctggccaccgagaccaagccggtgtcggatgagctgggcaggtgggttaaggagcttgtcgccaactactcgatcgacggcatccgtatcgacgctgcgaagcacgttaacgacgggttcctccccggatttgtcgaggcgtctggcgttttcgctttcggcgaggttctcaccgggttgccggaggacatgtgccgctatcagtccctcggcttgctcccgggcatgcccaactacctcgagtactaccagctcaacgaggctttcaacggtggatctatggccgatgttgccgagatgcgcaatgaagcggcttccagctgcaacgacaccgctgcgctaggaagtttcctcgagaaccacgacatgccccggttcgccaaccgcaacgacgacatggcgctcgccaagaatggcatgacgtacattctcctcaacgatggcattcccacagtctaccagggccaggaacaacacttcaagggcaacggcacccccttcaaccgtgagcccctctggtcatccgagtacaacaaggaatcgcctctgtacgtcctcacggcgacactaaacaaagtgcgcaacaatgccatcaagttgtcgtcggattacatctcgacgccctcggagacgctctgggccgatgtgaaccacctctgtctgcgaaagggcccggacggcagccaggtggtgttttgcatcaacaacaagagcagccaaggcgaaagctaccaaataagcgttggcggttttcagaagaatgagaaagttgtcgaggtcttgacttgcaagaccaacacggcggacatctcgggcaatgtcaccatgtacatgaacaagggcgagccgaaagtgtatgttcctcaggcggcactgagcggcacgggcctttgcgacaagactgaggaggatggaccgagcagcggggcggctgcgttgggtttgaccggcagcgtggtgttgactgctgtcatcggatgggcggtagtgctccttgcgtaa

SEQ ID NO: 1586 - protein, 531 aa, Myceliophthora thermophilia
MRTSIISTAVATALAFAGLGSAANITEWKSRSIYQVMIDRFARTDGSTDASCDVSRFCGGTWKGLLNNLDYIQDMGFTAIQISPIVKNIEEHTSVGDAYHGYWSVDNYALNDRFGTKQDFEDLVAELHKRDMLLMVDVVVNNMAQAFDNVVPPKIDYSKFNPFNDKKYFHPYCNVTQWENATDYQNCWLYPYGVALADLATETKPVSDELGRWVKELVANYSIDGIRIDAAKHVNDGFLPGFVEASGVFAFGEVLTGLPEDMCRYQSLGLLPGMPNYLEYYQLNEAFNGGSMADVAEMRNEAASSCNDTAALGSFLENHDMPRFANRNDDMALAKNGMTYILLNDGIPTVYQGQEQHFKGNGTPFNREPLWSSEYNKESPLYVLTATLNKVRNNAIKLSSDYISTPSETLWADVNHLCLRKGPDGSQVVFCINNKSSQGESYQISVGGFQKNEKVVEVLTCKTNTADISGNVTMYMNKGEPKVYVPQAALSGTGLCDKTEEDGPSSGAAALGLTGSVVLTAVIGWAVVLLA

SEQ ID NO: 1587 - protein, 509 aa, Myceliophthora thermophilia
ANITEWKSRSIYQVMIDRFARTDGSTDASCDVSRFCGGTWKGLLNNLDYIQDMGFTAIQISPIVKNIEEHTSVGDAYHGYWSVDNYALNDRFGTKQDFEDLVAELHKRDMLLMVDVVVNNMAQAFDNVVPPKIDYSKFNPFNDKKYFHPYCNVTQWENATDYQNCWLYPYGVALADLATETKPVSDELGRWVKELVANYSIDGIRIDAAKHVNDGFLPGFVEASGVFAFGEVLTGLPEDMCRYQSLGLLPGMPNYLEYYQLNEAFNGGSMADVAEMRNEAASSCNDTAALGSFLENHDMPRFANRNDDMALAKNGMTYILLNDGIPTVYQGQEQHFKGNGTPFNREPLWSSEYNKESPLYVLTATLNKVRNNAIKLSSDYISTPSETLWADVNHLCLRKGPDGSQVVFCINNKSSQGESYQISVGGFQKNEKVVEVLTCKTNTADISGNVTMYMNKGEPKVYVPQAALSGTGLCDKTEEDGPSSGAAALGLTGSVVLTAVIGWAVVLLA

SEQ ID NO: 1588 - DNA, 1875 bp, Myceliophthora thermophilia
atgagcgggttcctcaaccttccctctccaaccctcccaccggccctcgcggctctgcgcacatccgcaatccgccaggagcccggatcgggctactccaccaacatccggcccctccgcaggcgcctcgccccggccaccgcgcacctgcccaaccctctcctggtccccgaccacggcgacggcgacggcgacggccccggttcctgccctgccaacgagaccttgctccagggcttcgagtggcacgtccccgccgacggcgcgcactgggcccggctggagcgggccatgccggccctggcggcgctgggagtgaccaagctgtggatcccgcccgcgtgcaaggcggcggcgggcccggaggggaacgggtacgacgcgtacgacctgtgggacctgggcgagttcgagcagaaggggagccggcgcaccaagtggggcaccaaggaggagctggtccggatggccgaggcggcccggcgcgaaggggtcgcggtcctgttcgacgccgtgctcaaccacaagatgggggcggaccgccgcgagagggcggtcgccacgagggtggaggacagggaccggagggtggaggtggaggcggaggtggagggcgaggagaagcgggagatcggggcgtggaccgggttcgagtttccggggaggaaggggaagtatagcgggatgaggtggagcaaagagcattttaccggggtggactacgatgatctcaagggggagaaaggggtgtggaagttcgaggggaaggagtgggccgaggatgtcgatgaggagctggggaactatgattttttgcaccccgaggtgagggcagacttgttccgctggatcgagtggctcccctcacaggtgcaactgggtgggctacgtctcgatgccatcaagcattacagcttcagtttccttcgagactttgtggcccacgtcagacagcgtgttggccagggatggttcatcgtcggtgagtattggcgggaggactcagagtatctcgccaagtttatcgaattcatggaccaccagatatcactctttgacgttcagttggtgtccaactttagcaaagtgtcagtgttagaagagaagggagacttgagggaaattctggatgatactttagccttgtggaaaccagaaaacgcggtgacttttgttgccaaccatgatactacgcctattgcgcccttcttcatccccttcgcctacgccatcatcctccttcgagccaactgcggcctcccctgtgttttcttcgcagacctgtttggctctgtccgacaagatgcccaatctgacttcgccagcttcgttcctccgacctctggcggtgcgattctccccaagatgatgctggctcgcagattctgggcgtacggttctcagtatgactatttcgatgaccctcactgtgtcggcttcacacgtgtcggacactcttcccaatgcggcggccacgggctagctgtcgtcatgaccaacgcatgggaatacgcgagcaagaggatgttcgtcgggaaacagcacgccggggagatctggacggacctactcaagtggtgcccggggcggatcatcattgacgaggacggatggggtgtgtttcctgtcggccatcgcagcgtcgcggtatgggtcaacacccgggccgtcggcagggaagtcgctgatacattcgcgttaagctcttggtctaactgcgtgatagtcaaggatgatcgtcaagatcagagcccggaggaggagagcctgcagatcagtctgtggctcatacaaaagaaggaaggaaagggcggtctaatacagctacaaaggaagccacaggcacgtggccacacctgccacataagtcgataa

SEQ ID NO: 1589 - protein, 624 aa, Myceliophthora thermophilia
MSGFLNLPSPTLPPALAALRTSAIRQEPGSGYSTNIRPLRRRLAPATAHLPNPLLVPDHGDGDGDGPGSCPANETLLQGFEWHVPADGAHWARLERAMPALAALGVTKLWIPPACKAAAGPEGNGYDAYDLWDLGEFEQKGSRRTKWGTKEELVRMAEAARREGVAVLFDAVLNHKMGADRRERAVATRVEDRDRRVEVEAEVEGEEKREIGAWTGFEFPGRKGKYSGMRWSKEHFTGVDYDDLKGEKGVWKFEGKEWAEDVDEELGNYDFLHPEVRADLFRWIEWLPSQVQLGGLRLDAIKHYSFSFLRDFVAHVRQRVGQGWFIVGEYWREDSEYLAKFIEFMDHQISLFDVQLVSNFSKVSVLEEKGDLREILDDTLALWKPENAVTFVANHDTTPIAPFFIPFAYAIILLRANCGLPCVFFADLFGSVRQDAQSDFASFVPPTSGGAILPKMMLARRFWAYGSQYDYFDDPHCVGFTRVGHSSQCGGHGLAVVMTNAWEYASKRMFVGKQHAGEIWTDLLKWCPGRIIIDEDGWGVFPVGHRSVAVWVNTRAVGREVADTFALSSWSNCVIVKDDRQDQSPEEESLQISLWLIQKKEGKGGLIQLQRKPQARGHTCHISR

SEQ ID NO: 1590 - protein, 607 aa, Myceliophthora thermophilia
ALRTSAIRQEPGSGYSTNIRPLRRRLAPATAHLPNPLLVPDHGDGDGDGPGSCPANETLLQGFEWHVPADGAHWARLERAMPALAALGVTKLWIPPACKAAAGPEGNGYDAYDLWDLGEFEQKGSRRTKWGTKEELVRMAEAARREGVAVLFDAVLNHKMGADRRERAVATRVEDRDRRVEVEAEVEGEEKREIGAWTGFEFPGRKGKYSGMRWSKEHFTGVDYDDLKGEKGVWKFEGKEWAEDVDEELGNYDFLHPEVRADLFRWIEWLPSQVQLGGLRLDAIKHYSFSFLRDFVAHVRQRVGQGWFIVGEYWREDSEYLAKFIEFMDHQISLFDVQLVSNFSKVSVLEEKGDLREILDDTLALWKPENAVTFVANHDTTPIAPFFIPFAYAIILLRANCGLPCVFFADLFGSVRQDAQSDFASFVPPTSGGAILPKMMLARRFWAYGSQYDYFDDPHCVGFTRVGHSSQCGGHGLAVVMTNAWEYASKRMFVGKQHAGEIWTDLLKWCPGRIIIDEDGWGVFPVGHRSVAVWVNTRAVGREVADTFALSSWSNCVIVKDDRQDQSPEEESLQISLWLIQKKEGKGGLIQLQRKPQARGHTCHISR

SEQ ID NO: 1591 - DNA, 1038 bp, Myceliophthora thermophilia
atggcgttattgggcatctctcttatactcgcctctgtcgttcttttctgcatgcgtagaccggtctggctcccggccatttttgggggcgccccgcgtcccccaatagagccgccgtctccggcgagatccgagtgcgagtctgccgatcgcgcctcggacgctgatgcgatcacgagagacggatccgatcatgattctagacgtgccgatggagagaagccaaaccacagtccgatattttccccaccgatagtgcaacacccggccccagaatccgaccaaggcggtcgctcctccgaagatggtgagcagaccacgcccaaggcctccgcagcaacccccgacaaccccgtcccggcattagccctctccgtccccgaaccggcccccgctgcctttcagccgaatggcgcagaccgtgggccttcgactgcaccgacggcagcgtcgaccctaatgcctcctcccccgcgcccaccaaccctccgcccttcaccccgggacaacctctcaccgtccctcgcgcctccgcgagcccgcaacctgcccctccccgcgcgcggaccgggctgctcgaccctcgccccgccgcccacccacagctccgtgcccgccaagccttcgcgtgccgtcgtcctgtcgccgggccactccccgctcgactgggcgcgtctctcgggccacccgacggccgacctgcgcggcctcccgccgggcaccccgtaccttcgcgtgacgccgagcatgctcaagaagatgacggggcggaagggcaaggacgcgtggatcgtcctgggcgggcgcgtctacaacataacgccgtacctgccgttccaccccgggggcgagcccgagctgctgcgaggtgcgggcagagacgggacgcgattatttggggagatccacccatgggtgaattacgaagggatgctggcggcttgtttggtggggatttacgttccagaggaggaaggcggcgatgtaggtacggcagcggccgggggcggtgcaagggatatggaggctatggattga

SEQ ID NO: 1592 - protein, 345 aa, Myceliophthora thermophilia
MALLGISLILASVVLFCMRRPVWLPAIFGGAPRPPIEPPSPARSECESADRASDADAITRDGSDHDSRRADGEKPNHSPIFSPPIVQHPAPESDQGGRSSEDGEQTTPKASAATPDNPVPALALSVPEPAPAAFQPNGADRGPSTAPTAASTLMPPPPRPPTLRPSPRDNLSPSLAPPRARNLPLPARGPGCSTLAPPPTHSSVPAKPSRAVVLSPGHSPLDWARLSGHPTADLRGLPPGTPYLRVTPSMLKKMTGRKGKDAWIVLGGRVYNITPYLPFHPGGEPELLRGAGRDGTRLFGEIHPWVNYEGMLAACLVGIYVPEEEGGDVGTAAAGGGARDMEAMD

SEQ ID NO: 1593 - protein, 321 aa, Myceliophthora thermophilia
PAIFGGAPRPPIEPPSPARSECESADRASDADAITRDGSDHDSRRADGEKPNHSPIFSPPIVQHPAPESDQGGRSSEDGEQTTPKASAATPDNPVPALALSVPEPAPAAFQPNGADRGPSTAPTAASTLMPPPPRPPTLRPSPRDNLSPSLAPPRARNLPLPARGPGCSTLAPPPTHSSVPAKPSRAVVLSPGHSPLDWARLSGHPTADLRGLPPGTPYLRVTPSMLKKMTGRKGKDAWIVLGGRVYNITPYLPFHPGGEPELLRGAGRDGTRLFGEIHPWVNYEGMLAACLVGIYVPEEEGGDVGTAAAGGGARDMEAMD

SEQ ID NO: 1594 - DNA, 981 bp, Myceliophthora thermophilia
atgaagtttctgttgaccacaaccatcgccgccctggccggccttgttgccgcctcgcccacacccacagtcaacatcggcggacagctctacaagcgtgccagcccgaacgacgtttgcgacatcggctacgcctccaccaacggcggcacaactggaggtgcgggcggaacgaccacaaccgtcaccagcttcgccgagttcagtgccgccgccaagggtgacgacaagaagatcatcattgtcgacggcagcatcagcggctctggctccgtcaagatcggcgctaacacgagcgttctcgggaaggccggtgcttccctcaccggcatcaaccttaccatcaagggcgtcaagaacgtcatcgtccgcaacttgaagctcagcaaggtggtgggcggcgactgcatcaccgtccaggaagccaccaacgtctggctcgaccatctcgacctgagcggcgacctgaacgtcgacaaggactactacgacggtctgatcgacatcacccacgccgccgactgggtcaccgtctctaacacccacttccacgaccattggaaggcttcgctggtcggccactctgacagcaacgccgacgaggacacgggcaagctccacgtcacgtacgccaacaacaggtggaccaacatcagcagccgcacgccctcgatccgcttcggcaccggtcacatcttcaacaactactacgacaccatcacgacctcgggcgtcaacacgcgcatgggcgccgtcgtgctggtcgagtcgagcgccttcgtcaacgccaagcgcgccatcacctcgctcgactcggacatcgacggctccgccgccgtcgtcgacgtcgacctcggcggctccaccaacgacgcccccgtcgccaacgccgccccttccatcccctaccggtactccgtcgtcggctccgccaacgtccgcgacgccaccgccaacagcggcgccactctcgccttctaa

SEQ ID NO: 1595 - protein, 326 aa, Myceliophthora thermophilia
MKFLLTTTIAALAGLVAASPTPTVNIGGQLYKRASPNDVCDIGYASTNGGTTGGAGGTTTTVTSFAEFSAAAKGDDKKIIIVDGSISGSGSVKIGANTSVLGKAGASLTGINLTIKGVKNVIVRNLKLSKVVGGDCITVQEATNVWLDHLDLSGDLNVDKDYYDGLIDITHAADWVTVSNTHFHDHWKASLVGHSDSNADEDTGKLHVTYANNRWTNISSRTPSIRFGTGHIFNNYYDTITTSGVNTRMGAVVLVESSAFVNAKRAITSLDSDIDGSAAVVDVDLGGSTNDAPVANAAPSIPYRYSVVGSANVRDATANSGATLAF

SEQ ID NO: 1596 - protein, 308 aa, Myceliophthora thermophilia
SPTPTVNIGGQLYKRASPNDVCDIGYASTNGGTTGGAGGTTTTVTSFAEFSAAAKGDDKKIIIVDGSISGSGSVKIGANTSVLGKAGASLTGINLTIKGVKNVIVRNLKLSKVVGGDCITVQEATNVWLDHLDLSGDLNVDKDYYDGLIDITHAADWVTVSNTHFHDHWKASLVGHSDSNADEDTGKLHVTYANNRWTNISSRTPSIRFGTGHIFNNYYDTITTSGVNTRMGAVVLVESSAFVNAKRAITSLDSDIDGSAAVVDVDLGGSTNDAPVANAAPSIPYRYSVVGSANVRDATANSGATLAF

SEQ ID NO: 1597 - DNA, 753 bp, Myceliophthora thermophilia
atgcatcgctacgccttcctcgccctgctcccggccgtcctcgccaaggtgccccttgtggcccgcgccggagtcacgaccacgctgccggccagcgcgggcgccactgccacgtcggcgcccatcaccgtcaaagccgggcagacgtacgacggcaagatgaagaactttgatcgctccccgagagtctgtgctgagcagacggagacgggtgaggatgacgccatgttcattctcgaggacggtgccactctctccaacgtcatcattggtcccaaccaggcggagggtgtccattgcaggggcacttgcaccctgatcaacgtctggttccaagatgtctgcgaagatgctatcaccctcaagcagtcgagcggcacgtcccggatcatcggcggcggcgccttccatgccgacgacaagattgtgcagttcaacgggttcggcacggtggagatcagcgacttcttcgcgagcgactacggcaaggtggtgcgcagctgcggcaactgcaaggacaacggcggggcgcggcacatcgtcatcgacaacgtcgtcgccgtcgacggcggcgtcctctgcggcatcaacaccaactacggcgacacctgcaagatttccaacagctgccaggacgacggcaagagctgcgaccgcttcaccggcaacaacagcggcaaggagcccaccaagatcggcagcggtcccgacggccagttctgcaccgtcaccaacctgtccaagagctgctaa

SEQ ID NO: 1598 - protein, 250 aa, Myceliophthora thermophilia
MHRYAFLALLPAVLAKVPLVARAGVTTTLPASAGATATSAPITVKAGQTYDGKMKNFDRSPRVCAEQTETGEDDAMFILEDGATLSNVIIGPNQAEGVHCRGTCTLINVWFQDVCEDAITLKQSSGTSRIIGGGAFHADDKIVQFNGFGTVEISDFFASDYGKVVRSCGNCKDNGGARHIVIDNVVAVDGGVLCGINTNYGDTCKISNSCQDDGKSCDRFTGNNSGKEPTKIGSGPDGQFCTVTNLSKSC

SEQ ID NO: 1599 - protein, 227 aa, Myceliophthora thermophilia
GVTTTLPASAGATATSAPITVKAGQTYDGKMKNFDRSPRVCAEQTETGEDDAMFILEDGATLSNVIIGPNQAEGVHCRGTCTLINVWFQDVCEDAITLKQSSGTSRIIGGGAFHADDKIVQFNGFGTVEISDFFASDYGKVVRSCGNCKDNGGARHIVIDNVVAVDGGVLCGINTNYGDTCKISNSCQDDGKSCDRFTGNNSGKEPTKIGSGPDGQFCTVTNLSKSC

SEQ ID NO: 1600 - DNA, 2202 bp, Myceliophthora thermophilia
atggctccgtcggtcctccggctgggcgctgctgccctagcctgtgcctcgagcactcttgctgtcgagacgtaccagctcaaggagtcatataacccgtccaatttctttgacaagttcaccttcttcagctctcccgaccccaaccagggtttcgtcaagtacagaagcaagcaggacgccaccaacctcggccttatccagagcaccaaggacgaggtgaccatcaaggtcgattcgaccggcacggacaaggacggccggagcagtgtcaggatcgagagtgtcaacacctacaactcgggcctgttcattgccgatttctcccactttcccaagccagcatgcggtgcttggcccgcctactggatggttggaccccagtggcctctggacggcgaggtcgacatctacgagggctggaacttgaacacggccaacaaggttgtgcttcacacggacggcccttccgtcgtgggctcttgcactgtcagccaggaggacttcacggcctcgttgcgctacagcaactgctgggacaaggccccggaccagccgggtaacacgggctgcgcggcggacgagcccgatggaacatttggtggcgcggccggaggtgtctacgctactgagtggagtgagaccggcttcaagatctggtcctggacacacgacaacgtcccttcggacgtgaagagcggcaagcccgacccgagcacgtggggcatgcccgtgttcgccgccggaggtagcacttgcgacgtcaccaagaccttcaacaacatgcgcatcatcctgaacatcaacctctgcggcgatgccgccggcggtctctggggcgagacctgccaggcggcgaccggggtggcccagtgcgcccagtacgtgcagcagaacccgaaggcgttcgagcagacctactggaagattcgcggcatcgacgtgtaccagctcgagacggtcaagccgagctcgactgccgcctccagcacgtcaactacaagcagcaagtccagcacttcgaacacctccgctgcttcatctacgagcacctccgacagcaccccgagcagcacgtcgaccaagtcgaccaagtcgaccgctcctacctcgaccactggggcttcgacctcggctacggagacctgcacctcggatgtcaccacggaaagcgccaccgagaccgtgacctcgacctcctcgagcgggcccgctaccgagacggatacggaaagcgactgccctgatgacaataccccctccaccacgttcccacccgacgtcaccggcacctcgggcacggccacggctacggcctcggtctcggccactgagactgcgaccgagaccgagagcgaatgctccgacgacatctccgagacggctaccgtcgggcccaccgactcgtccacgaaggtgacggccaccgccgcgcctaccgactcgttcacggaggtgacggccaccgcctctaccacggagttcaccacgtccaccatctactcgaccgtcacgtccaccataacctcgtgcgcgcccacggtgaccaactgcccggcccgcaccgtcaccagcgtcatcgttatcggcaccaccgtctgccccgtgaccgaggtcaagccgaccgagactggcgggggcgtccccggtaccggtgttcccagtgccagcgccccgggtgccggctccccgagtgccgacgttcccagctccaacgtccccggcaccggcgtcgtccctacttccagcgtccccactgtcagcgtgcccgctcccggcggcccgatcggaggcgacaccaccctccggacgtccaccaccgtctaccgaacgaccactgtcgtcgtcccgcgcccgaccgacggctcggcgggtggcggcgacaacgacaacaacaacaacaacaacaacaacgaggaggagggcagcggcgataacaacgagaccgccagcagctccaccctcgcgcccagcttcgtgtccccgcccgcctcgagctcggccatccccgacgagccggagcaggcgcagccgaccgacacgggcgcgggcgtgccgcccgtcgagatcgtgaccagcaccagcccgtcggccacgagcagcggtctgtcgcccgtcgtaactgccggcgcgggcaaggtggctgccaggagcgcggtgctgatgggcgtcggcgccgtggtggccttggtcaatctctaa

SEQ ID NO: 1601 - protein, 733 aa, Myceliophthora thermophilia
MAPSVLRLGAAALACASSTLAVETYQLKESYNPSNFFDKFTFFSSPDPNQGFVKYRSKQDATNLGLIQSTKDEVTIKVDSTGTDKDGRSSVRIESVNTYNSGLFIADFSHFPKPACGAWPAYWMVGPQWPLDGEVDIYEGWNLNTANKVVLHTDGPSVVGSCTVSQEDFTASLRYSNCWDKAPDQPGNTGCAADEPDGTFGGAAGGVYATEWSETGFKIWSWTHDNVPSDVKSGKPDPSTWGMPVFAAGGSTCDVTKTFNNMRIILNINLCGDAAGGLWGETCQAATGVAQCAQYVQQNPKAFEQTYWKIRGIDVYQLETVKPSSTAASSTSTTSSKSSTSNTSAASSTSTSDSTPSSTSTKSTKSTAPTSTTGASTSATETCTSDVTTESATETVTSTSSSGPATETDTESDCPDDNTPSTTFPPDVTGTSGTATATASVSATETATETESECSDDISETATVGPTDSSTKVTATAAPTDSFTEVTATASTTEFTTSTIYSTVTSTITSCAPTVTNCPARTVTSVIVIGTTVCPVTEVKPTETGGGVPGTGVPSASAPGAGSPSADVPSSNVPGTGVVPTSSVPTVSVPAPGGPIGGDTTLRTSTTVYRTTTVVVPRPTDGSAGGGDNDNNNNNNNNEEEGSGDNNETASSSTLAPSFVSPPASSSAIPDEPEQAQPTDTGAGVPPVEIVTSTSPSATSSGLSPVVTAGAGKVAARSAVLMGVGAVVALVNL

SEQ ID NO: 1602 - protein, 712 aa, Myceliophthora thermophilia
VETYQLKESYNPSNFFDKFTFFSSPDPNQGFVKYRSKQDATNLGLIQSTKDEVTIKVDSTGTDKDGRSSVRIESVNTYNSGLFIADFSHFPKPACGAWPAYWMVGPQWPLDGEVDIYEGWNLNTANKVVLHTDGPSVVGSCTVSQEDFTASLRYSNCWDKAPDQPGNTGCAADEPDGTFGGAAGGVYATEWSETGFKIWSWTHDNVPSDVKSGKPDPSTWGMPVFAAGGSTCDVTKTFNNMRIILNINLCGDAAGGLWGETCQAATGVAQCAQYVQQNPKAFEQTYWKIRGIDVYQLETVKPSSTAASSTSTTSSKSSTSNTSAASSTSTSDSTPSSTSTKSTKSTAPTSTTGASTSATETCTSDVTTESATETVTSTSSSGPATETDTESDCPDDNTPSTTFPPDVTGTSGTATATASVSATETATETESECSDDISETATVGPTDSSTKVTATAAPTDSFTEVTATASTTEFTTSTIYSTVTSTITSCAPTVTNCPARTVTSVIVIGTTVCPVTEVKPTETGGGVPGTGVPSASAPGAGSPSADVPSSNVPGTGVVPTSSVPTVSVPAPGGPIGGDTTLRTSTTVYRTTTVVVPRPTDGSAGGGDNDNNNNNNNNEEEGSGDNNETASSSTLAPSFVSPPASSSAIPDEPEQAQPTDTGAGVPPVEIVTSTSPSATSSGLSPVVTAGAGKVAARSAVLMGVGAVVALVNL

SEQ ID NO: 1603 - DNA, 606 bp, Myceliophthora thermophilia
atgggtctcacgtacggaatcggcgggatagggtcgaccctggcggtcgtgggagcttacatgctcttcactggcagcggtgaatccttcaatgtcggcgccttcctcgagtccgtctccccctacgcgtgggcagacttgggcatcgcgctctgcataggactctcggtggtgggtgcagcatggggcatcttcattaccggctcgtccattctcggcggaggcgtccgggcgccgcggatccgaaccaagaacctaatctccatcattttctgcgaggtcgtggccatctacggagtcatcatggccatcgtgttttcggccaaggtcaacccgttggagggcgaggcggcatggtcgcccgaggcgtactatacaggttacgcgctgttctgggccggcatcaccgtcggcatgtgcaacctcatctgcggcgtttctgtcggtatcaacgggagcggtgccgcattggccgatgctgccgatccctcgctgttcgtcaagatgctggtcatcgagattttcagctcagtcctgggcctgtttggtctgattattggacttctcgtatccaacaaggcgaccgactttggcagcagctcctag

SEQ ID NO: 1604 - protein, 201 aa, Myceliophthora thermophilia
MGLTYGIGGIGSTLAVVGAYMLFTGSGESFNVGAFLESVSPYAWADLGIALCIGLSVVGAAWGIFITGSSILGGGVRAPRIRTKNLISIIFCEVVAIYGVIMAIVFSAKVNPLEGEAAWSPEAYYTGYALFWAGITVGMCNLICGVSVGINGSGAALADAADPSLFVKMLVIEIFSSVLGLFGLIIGLLVSNKATDFGSSS

SEQ ID NO: 1605 - protein, 172 aa, Myceliophthora thermophilia
FNVGAFLESVSPYAWADLGIALCIGLSVVGAAWGIFITGSSILGGGVRAPRIRTKNLISIIFCEVVAIYGVIMAIVFSAKVNPLEGEAAWSPEAYYTGYALFWAGITVGMCNLICGVSVGINGSGAALADAADPSLFVKMLVIEIFSSVLGLFGLIIGLLVSNKATDFGSSS

SEQ ID NO: 1606 - DNA, 2223 bp, Myceliophthora thermophilia
atgcttctcacgaggctcatacagggcctcggggccttgaccgtcattcaatttgcggctgctgccaaggaacccttgttccccagggcaagcgaagctgcagcgtccagtggggaagatcaagctcaggaggatggctatcatgccgacacttggtggtgcaagaaaacagtcacccataccgtcacttgcacggtgaccgaaaccgacacggccactatcaccaaaaccgttccaggccctacggcatcagtgattgtcaccacgacggagacggtcacggacacggagactgtcacagacacggaaacggtcacggaaacggtgagctgggggacgacccagacccaagaggtcactgccactacaaccgtcgtacaagaaaccaccgatgtcatcccaacgaccatagaggtgtccaagaccgtgatcaacaccatcacgactaccgaggttgtgccgacgacgctgacgagcagcacgaccatcaccgagatttccacctctgtcacttcgtacccggtcacggtaactgacagcaccaccatctacacgaccaagacggtgctggttacgacgacctccgtttcgaccttcaccactgttagcacctacacgatggtgagggaggcgacgaacacggtcacggacaccgtcacagatagggtcaccgataccaccacggacagggtcacgaacacggtcacccagatcacaacggttccggcgtccaccatcaccgacgtggtcacgacggtgctccctcccatcaccatcactgtcactgagagcgggacggttatcacgtcggtcatccccgggcccacggtcacgcaaacgacgacgacgactcttccgccagtcaccgtcacacttcccggctcgacggtgatccgggatgtctcggtctgccccgctccgacgaacacggcgcctgttccgcggccgcagactacgcagcggcagctctggggttgcgacccgggatatgtctgcaacttgccaaagccggcggggtgcaacctgtgggccgaaccgcccgacagggatttcgcgtgcgatcccaggtactgccagcttgcgccgcccgtacccaacgtgcagtggcccaagaacggaacgggctacttccccccggtcgaggggtacttcaacctcaaccccaacgcgtttggcttgagctacgagatcttcgagctcaacgaggtcgtcaccaagattggaggcaagaagacgaccatcacgaccggcaactgggtctcgcagacggacctcacgcacttcccgcccgagccgacctcggacgcgacgggcgagaaggcctactacgcccgcgacccgagactctggaagcgcgacgagaccatcgtcccggccgtgtgcttcctcccctgcaacctcgctttcctcgagacccagcgggtcggcctgattcccgagctctgcgaggacggttcccccttccgggaggccaacgacgcgtgcctcagctgtatcgagaccaacggcctcgatctcaagaccacgctccgcgcgtacctgggcgacgagttcttgcagttctgggacttttgcgacatggacccggccgagccgcccgggcagaccacccggccgccgccccagtcgcaggtgacggcgacgcccaccatctcgtccagctcgcaggccccgcccaacagcgagacggagcccgtgcccatcacctccacctccaccaccaccaccaccaccagcagcagcgaggagccgccctcctcgtcctcgacaccgcccgcctcctcgtcgcggtcgtccggcgctccgtccccgccctcgagctcgtccgaagcgcagcccgagccgacgggtccgaccgccacgtcgagcgaaaccgaaaccgagccgaccgcgtcctcttcctcctctgccaccctctcgggctccctgtccacaaccgcttcctcaccttccgagcccggcccagccacgtcatcaccgccagcctccgacagcggcagcggtggtggcggtggtggtggtggtggtggcgcgccgcccctcacggaagggccctcgacgaccctgcgcacctcgacgaccggcctgccggcgaccagctccatcgccaccgcggctgccgggcgggtggccgcgccgccgtcgctcacgatgacaggcctctcctctctgggggccttgctaggcggtgctgtcttcagcttcttcttcctgcttttctaa

SEQ ID NO: 1607 - protein, 740 aa, Myceliophthora thermophilia
MLLTRLIQGLGALTVIQFAAAAKEPLFPRASEAAASSGEDQAQEDGYHADTWWCKKTVTHTVTCTVTETDTATITKTVPGPTASVIVTTTETVTDTETVTDTETVTETVSWGTTQTQEVTATTTVVQETTDVIPTTIEVSKTVINTITTTEVVPTTLTSSTTITEISTSVTSYPVTVTDSTTIYTTKTVLVTTTSVSTFTTVSTYTMVREATNTVTDTVTDRVTDTTTDRVTNTVTQITTVPASTITDVVTTVLPPITITVTESGTVITSVIPGPTVTQTTTTTLPPVTVTLPGSTVIRDVSVCPAPTNTAPVPRPQTTQRQLWGCDPGYVCNLPKPAGCNLWAEPPDRDFACDPRYCQLAPPVPNVQWPKNGTGYFPPVEGYFNLNPNAFGLSYEIFELNEVVTKIGGKKTTITTGNWVSQTDLTHFPPEPTSDATGEKAYYARDPRLWKRDETIVPAVCFLPCNLAFLETQRVGLIPELCEDGSPFREANDACLSCIETNGLDLKTTLRAYLGDEFLQFWDFCDMDPAEPPGQTTRPPPQSQVTATPTISSSSQAPPNSETEPVPITSTSTTTTTTSSSEEPPSSSSTPPASSSRSSGAPSPPSSSSEAQPEPTGPTATSSETETEPTASSSSSATLSGSLSTTASSPSEPGPATSSPPASDSGSGGGGGGGGGGAPPLTEGPSTTLRTSTTGLPATSSIATAAAGRVAAPPSLTMTGLSSLGALLGGAVFSFFFLLF

SEQ ID NO: 1608 - protein, 719 aa, Myceliophthora thermophilia
AKEPLFPRASEAAASSGEDQAQEDGYHADTWWCKKTVTHTVTCTVTETDTATITKTVPGPTASVIVTTTETVTDTETVTDTETVTETVSWGTTQTQEVTATTTVVQETTDVIPTTIEVSKTVINTITTTEVVPTTLTSSTTITEISTSVTSYPVTVTDSTTIYTTKTVLVTTTSVSTFTTVSTYTMVREATNTVTDTVTDRVTDTTTDRVTNTVTQITTVPASTITDVVTTVLPPITITVTESGTVITSVIPGPTVTQTTTTTLPPVTVTLPGSTVIRDVSVCPAPTNTAPVPRPQTTQRQLWGCDPGYVCNLPKPAGCNLWAEPPDRDFACDPRYCQLAPPVPNVQWPKNGTGYFPPVEGYFNLNPNAFGLSYEIFELNEVVTKIGGKKTTITTGNWVSQTDLTHFPPEPTSDATGEKAYYARDPRLWKRDETIVPAVCFLPCNLAFLETQRVGLIPELCEDGSPFREANDACLSCIETNGLDLKTTLRAYLGDEFLQFWDFCDMDPAEPPGQTTRPPPQSQVTATPTISSSSQAPPNSETEPVPITSTSTTTTTTSSSEEPPSSSSTPPASSSRSSGAPSPPSSSSEAQPEPTGPTATSSETETEPTASSSSSATLSGSLSTTASSPSEPGPATSSPPASDSGSGGGGGGGGGGAPPLTEGPSTTLRTSTTGLPATSSIATAAAGRVAAPPSLTMTGLSSLGALLGGAVFSFFFLLF

SEQ ID NO: 1609 - DNA, 1848 bp, Myceliophthora thermophilia
atgcgtttcctcgggttgctggccgtgctggccagctcggcatggctcccggcgagcgggcagacggacgacgtgtgcagggctgaagaccgcacctacagcaccgagaacgtcccggcgggcagccaccagccgttcgagcagctgaaccccttgcttggctctctgagcaccaaattctacatcaccgtcgtcaacctgacgccgcaccgcatcaggctgcagaacacgcactcgtaccagatggacacgttcgagtttggcgacgttccccagggccgcgctcgccagaacaggatcaaataccggggcacctggtcgacgggagacgacgcgggcgaggcctactacgccctcgacggcaccgacaagacctttgtcctgcgggtcaagacgtacgcctcggagccggacccccggcgggtggtgctcgacctcagcggcatgggcctgggccagcgcgagtacgtgttccccggcggggagacggccgtgtcgctggtcatcacggggagcagccggttcggcttccaggcgtcgctccgccacgggcccggcaactggatgcgcaacctgtacgacgtcatcggcgaccgcccggtccggcacctggtcatgccgggcacgcacgacgccgccatgagcaagatcacggacaagctcaccagcatcggcagcgagcccaacacgcagaaccagggcgtcaacatctacgaccagctgcgcgccggctcccgctggttcgacctccgcatcggctcggtccacgacaacaacgacgccgccgtcaacaagggattctgggccatgcacctcagcgacgagatggccaccgtcgccatcggcaacacgggcgagtccctggacgagatcgtcgacgagatcaaccgcttcaccgacgagaacccgggcgaggtcgtcttcctggccatccgctacctggtcgggcggtacgagcggccggaccgcgggcccatcctgtggaccgccgccgtggtgaacgacttcttcgccaagctgcgcggcatcaaaaaccgctgcccggacctcgacgacggcggcaccggcggcctccagaaccgagaggcgtcgtactttatggaccggaaccagggccgcggctgcgtcatcccactgctcaacggccacctagaccgcgacggcgtgccccgcgagtcgcccggcgacggcatctacgacatgggccgggtcatggccgtcagcgaccactggtccaacaagatgcaggcgagcgacatggcgcccgaccagatcgccaactggcgctcggccacccgcggcggcggaggcgactacggcagcctcatgatcgcccagtggctcgtcacgcccgacgccctggcctcgacggcctactcgctgcagagcttcgccatccagcccgccaacccgtccctgtactgggccggcgtcaacggcatggacccggagcactggcccaacgtcctgctggtcgactacatcggcgtccagcagcaagaccgctgggcctgggaccagctcagcgccgagctctacaccctcgccgtcggtctgaacctgtacatgatcagcgagaactgcaacgtcagtccgcaccgttcgcccctgctccgcagcgcccaggaggaagaaggagtcgtggcagccgcagccgcagccgcagccgcagccgccacgctgggcggaagcctccgggcgccgtggaacggcatcgtgttcgccaacggcacgacgctcgataacccgccgcccgatctgcacccgggtcgcatggacgtcctgccgaaagggacgcgtttgggcaacgggacggttctggagcagagcatacccaacccgtggtag

SEQ ID NO: 1610 - protein, 615 aa, Myceliophthora thermophilia
MRFLGLLAVLASSAWLPASGQTDDVCRAEDRTYSTENVPAGSHQPFEQLNPLLGSLSTKFYITVVNLTPHRIRLQNTHSYQMDTFEFGDVPQGRARQNRIKYRGTWSTGDDAGEAYYALDGTDKTFVLRVKTYASEPDPRRVVLDLSGMGLGQREYVFPGGETAVSLVITGSSRFGFQASLRHGPGNWMRNLYDVIGDRPVRHLVMPGTHDAAMSKITDKLTSIGSEPNTQNQGVNIYDQLRAGSRWFDLRIGSVHDNNDAAVNKGFWAMHLSDEMATVAIGNTGESLDEIVDEINRFTDENPGEVVFLAIRYLVGRYERPDRGPILWTAAVVNDFFAKLRGIKNRCPDLDDGGTGGLQNREASYFMDRNQGRGCVIPLLNGHLDRDGVPRESPGDGIYDMGRVMAVSDHWSNKMQASDMAPDQIANWRSATRGGGGDYGSLMIAQWLVTPDALASTAYSLQSFAIQPANPSLYWAGVNGMDPEHWPNVLLVDYIGVQQQDRWAWDQLSAELYTLAVGLNLYMISENCNVSPHRSPLLRSAQEEEGVVAAAAAAAAAAATLGGSLRAPWNGIVFANGTTLDNPPPDLHPGRMDVLPKGTRLGNGTVLEQSIPNPW

SEQ ID NO: 1611 - protein, 595 aa, Myceliophthora thermophilia
QTDDVCRAEDRTYSTENVPAGSHQPFEQLNPLLGSLSTKFYITVVNLTPHRIRLQNTHSYQMDTFEFGDVPQGRARQNRIKYRGTWSTGDDAGEAYYALDGTDKTFVLRVKTYASEPDPRRVVLDLSGMGLGQREYVFPGGETAVSLVITGSSRFGFQASLRHGPGNWMRNLYDVIGDRPVRHLVMPGTHDAAMSKITDKLTSIGSEPNTQNQGVNIYDQLRAGSRWFDLRIGSVHDNNDAAVNKGFWAMHLSDEMATVAIGNTGESLDEIVDEINRFTDENPGEVVFLAIRYLVGRYERPDRGPILWTAAVVNDFFAKLRGIKNRCPDLDDGGTGGLQNREASYFMDRNQGRGCVIPLLNGHLDRDGVPRESPGDGIYDMGRVMAVSDHWSNKMQASDMAPDQIANWRSATRGGGGDYGSLMIAQWLVTPDALASTAYSLQSFAIQPANPSLYWAGVNGMDPEHWPNVLLVDYIGVQQQDRWAWDQLSAELYTLAVGLNLYMISENCNVSPHRSPLLRSAQEEEGVVAAAAAAAAAAATLGGSLRAPWNGIVFANGTTLDNPPPDLHPGRMDVLPKGTRLGNGTVLEQSIPNPW

SEQ ID NO: 1612 - DNA, 1176 bp, Myceliophthora thermophilia
atggcagcctctggtagttatcttttgagtctcaccacgcttgcgcatgctttcacccatacccagctgcacaagcccctcttgtccctcttggctctccatggaacggtgagggggatactcgcccacccgaaccccaaccccaacctccccttcgtgatcaacacgtggtccggccccttcacggcggctaccgacgccgcctactacacgctcaccaacgccaccggcaccgggtcgccaatcgcggcgctcgacgccgtcgtcgccggctgctcggcgtgcgagcagaaccagtgcgacggcacggtcggcttcagcgggtcgccggacgaggcctgcgagacgacgctggacgcactcatcatggacggcacgaccctcaactcgggcgccgtcgcggggctgcggcgcatccgggacgccatcgcggtcgcgcgggccgtgctcgagcggacgcggcactcgctgctggccggtgacctggccacgcgcttcgccgtcgagatgggattcgggcccgagggcgacctgagcaccccggagagcagagcgctgtgcgaggactggcgcaggggcgggtgcaagggcaactacagggtcaatgtcgagcccgacccggagacgtcttgcggtccctaccggccagtgccgctgctggctggcagagggattcggttggaggacgggcaggcgtcgcatgacaccatctcgatggtcgtgattgaccggaatgggacgatggcggcggggacgtcgaccaacggagcgaggttcaaggtcccgggccgtgtcggggacgggcccatcgtcgggagcgggtcatatgtcgacggcgatgtgggcgggtgcggcgcgacgggcgacggggacatcatgatgcgattcttaccttgctatcaggcggtggagaacctgaggttgggcatgacgccgacagaggcagccgaggacgcggtcaggcggatgctacggaaatatccaaccatatcgagcggagtcgtggtggtaaacaacaagggcgagcacggcgcggcagggtcaggttggacatttacatactcatttcgaggcgggaagatggatgcggccgaggttgtgagcgtaccaccactggcgggccttccggttggaaggattaggagggaatcagatgatgccttacgggaattgtaa

SEQ ID NO: 1613 - protein, 391 aa, Myceliophthora thermophilia
MAASGSYLLSLTTLAHAFTHTQLHKPLLSLLALHGTVRGILAHPNPNPNLPFVINTWSGPFTAATDAAYYTLTNATGTGSPIAALDAVVAGCSACEQNQCDGTVGFSGSPDEACETTLDALIMDGTTLNSGAVAGLRRIRDAIAVARAVLERTRHSLLAGDLATRFAVEMGFGPEGDLSTPESRALCEDWRRGGCKGNYRVNVEPDPETSCGPYRPVPLLAGRGIRLEDGQASHDTISMVVIDRNGTMAAGTSTNGARFKVPGRVGDGPIVGSGSYVDGDVGGCGATGDGDIMMRFLPCYQAVENLRLGMTPTEAAEDAVRRMLRKYPTISSGVVVVNNKGEHGAAGSGWTFTYSFRGGKMDAAEVVSVPPLAGLPVGRIRRESDDALREL

SEQ ID NO: 1614 - protein, 349 aa, Myceliophthora thermophilia
HPNPNPNLPFVINTWSGPFTAATDAAYYTLTNATGTGSPIAALDAVVAGCSACEQNQCDGTVGFSGSPDEACETTLDALIMDGTTLNSGAVAGLRRIRDAIAVARAVLERTRHSLLAGDLATRFAVEMGFGPEGDLSTPESRALCEDWRRGGCKGNYRVNVEPDPETSCGPYRPVPLLAGRGIRLEDGQASHDTISMVVIDRNGTMAAGTSTNGARFKVPGRVGDGPIVGSGSYVDGDVGGCGATGDGDIMMRFLPCYQAVENLRLGMTPTEAAEDAVRRMLRKYPTISSGVVVVNNKGEHGAAGSGWTFTYSFRGGKMDAAEVVSVPPLAGLPVGRIRRESDDALREL

SEQ ID NO: 1615 - DNA, 510 bp, Myceliophthora thermophilia
atgactgccttttcgctttctcgggctctcctgctggccgtcctggccgtcctggccgccgccgccgtcaacggcaacccggtcgggctcggctccgacagctcggtcgccgctgcgggccagaagtgcggcgacacgatttgccaggccggcctgacctgctgcaacccatcctgcggcatctgcgtcaagccgggtatgaagtgcacgatgcaggcctgcaccaagtcgtcgccggcaccgcccgtcgtcacaccgcgcgaggacgacaagacgacgcagtgcggccccgcccggtgcaaggaaggcaccgagtgctgcaacgagagctgcggcatctgcgtcgagccgggaaatggctgcaccaagcagctctgcctgcccgccggcgaggtgtgcggcaacaaggtgtgcgccgagggcctggtctgctgcaacgagagctgcggcctctgcgctcctcccgacggcggctgcaccatgcagctgtgtctcgagaaatccaagtaa

SEQ ID NO: 1616 - protein, 169 aa, Myceliophthora thermophilia
MTAFSLSRALLLAVLAVLAAAAVNGNPVGLGSDSSVAAAGQKCGDTICQAGLTCCNPSCGICVKPGMKCTMQACTKSSPAPPVVTPREDDKTTQCGPARCKEGTECCNESCGICVEPGNGCTKQLCLPAGEVCGNKVCAEGLVCCNESCGLCAPPDGGCTMQLCLEKSK

SEQ ID NO: 1617 - protein, 144 aa, Myceliophthora thermophilia
NPVGLGSDSSVAAAGQKCGDTICQAGLTCCNPSCGICVKPGMKCTMQACTKSSPAPPVVTPREDDKTTQCGPARCKEGTECCNESCGICVEPGNGCTKQLCLPAGEVCGNKVCAEGLVCCNESCGLCAPPDGGCTMQLCLEKSK

SEQ ID NO: 1618 - DNA, 1047 bp, Myceliophthora thermophilia
atgagattttcggtcctctccagcatccttgccaacgcgctgtccgcctcggcgggtaccatcctgtgggatggtcgctttaatgaccttagctcctcgaaggacctggaaaaatggtcgtgggccaaccaggtcggcccttaccagtggtacatccacggctcgtcctcggtgacggcctacgtcaacctgtcgcccgattacaagaacccggccgactcgggctccaaacagggtgctaagatcacgctggacaacacagcctactggaacggtcagaacatgcgccggaccgagctgatcccgcagacgagcgccgccatcaaccagggcaaggtgtactaccacttctcgttgatgcgcaagaacaccaaccccccagcgaccacgcgcgagcaccagatcgccttctttgagagccacttcaccgagcttaaatccggcctgctgtcgggcgccccgggcgagtccgactcgctgctgcggtggtgcgtcggcggccagacccagtggagcaccgactgggaagccgacgtgtggcacaacgtcgcgtacgaaatcgacttcagcgccaacacggtcggcttctggcactcgaccggcagcgaccccctgacgcagaaggttgcccccatcagcgcgagcactagtagcaacggcgccgactggcacgtcggcgtgcttgagcttccgcgctcgggctaccccgacaccaccgaggattactactggtctggcgtttacattgagagcggcagcatcaccaccaacatcgcgggccctggtgctccatcggacggcggcagcggcaacagcactactagcgtcactgtggcccccccatcgacaacgcttgctacctcgaccaccaaggcctcctcggccactaccacctcggctcctgccacctccaccactgcgggctccggtggttgcactgcagcgcagtgggcgcagtgcgggggcatcaatttcaccggctgcaccacgtgcgcgtcgccctacaagtgcaacttcatcaacgactactactcacagtgctattaa

SEQ ID NO: 1619 - protein, 348 aa, Myceliophthora thermophilia
MRFSVLSSILANALSASAGTILWDGRFNDLSSSKDLEKWSWANQVGPYQWYIHGSSSVTAYVNLSPDYKNPADSGSKQGAKITLDNTAYWNGQNMRRTELIPQTSAAINQGKVYYHFSLMRKNTNPPATTREHQIAFFESHFTELKSGLLSGAPGESDSLLRWCVGGQTQWSTDWEADVWHNVAYEIDFSANTVGFWHSTGSDPLTQKVAPISASTSSNGADWHVGVLELPRSGYPDTTEDYYWSGVYIESGSITTNIAGPGAPSDGGSGNSTTSVTVAPPSTTLATSTTKASSATTTSAPATSTTAGSGGCTAAQWAQCGGINFTGCTTCASPYKCNFINDYYSQCY

SEQ ID NO: 1620 - protein, 330 aa, Myceliophthora thermophilia
GTILWDGRFNDLSSSKDLEKWSWANQVGPYQWYIHGSSSVTAYVNLSPDYKNPADSGSKQGAKITLDNTAYWNGQNMRRTELIPQTSAAINQGKVYYHFSLMRKNTNPPATTREHQIAFFESHFTELKSGLLSGAPGESDSLLRWCVGGQTQWSTDWEADVWHNVAYEIDFSANTVGFWHSTGSDPLTQKVAPISASTSSNGADWHVGVLELPRSGYPDTTEDYYWSGVYIESGSITTNIAGPGAPSDGGSGNSTTSVTVAPPSTTLATSTTKASSATTTSAPATSTTAGSGGCTAAQWAQCGGINFTGCTTCASPYKCNFINDYYSQCY

SEQ ID NO: 1621 - DNA, 2649 bp, Myceliophthora thermophilia
atgcctcccgcgccgaagggtgacgctgctctccgttccggagccgccccccgtcaagtcggcgcgaggagccttgctggtacccggcgctgtcccggggcccggcgccggcgagcacgtacggccagcacgctcgtcacggcagtgttgggtcttgcagcgcgggcatctgccgagccggtgctgccgtacaccccaaccacgatattgctggcccccgacggtgccgcgggcagtggcgccgcctacatcttcgccccgagcggcgacgaccgagatgcggtcgacttcctggccctcaacgtctccagcctgcgcgcctccgccctcgagccaacgaaactaactcccgaccttccctttctctccaaagacgccgccgattgtgctaccttcgcgccgaccatcctccgcaacggtaccatcgtcgtcctcgcgggcgactgctcctccaccgcagcctccaccctctggagctacaccccgggacagcccgatgcaagatggacacagcaccccgtcgtgccgtctgcctcatgggacaatgcccaggcgggaccctaccacctcggcggactcgtcaacttctcccctcagctcagccccgttctctccgagccgacgctctacttctacggcggcatgtgccctcggaagtcctcctcctccgccgacacctggcagtccaatgctgcctattccaaccgcatgctccgcctgatcccgcctagcccaccgccctcctcctcctcctcctcctcctacacgctggattacgcttccgccgggggacaacaacagcctcccgtggccgaggcgggcttcacctggaccgagctcacgccgtcgctatccaaccgcaccatcatcaccaccacttccgacggtggcggcaaggacggggccggaacggaacaggtgacgacgagcatcatcatcacccagcagaccagccacgagacgtggacttttgtctcgatcgccccgcccccggctgcttcttcttcttcttcttcttcttctgacgacgacgacgacgacgacgacgggagggcggacctcgcgcggcagcgggagcgacaagaagaggaagagaacaacaagaagaagcaaaagacgaagacgaaaaggagactacggcgggaggcggcggctgccgcgccggggatggtggtggacagtcggtccgggcacacgaccgtgctgagcgaggacgggaccaggctggtggtgtacggcggctgggtcggggacgtgagccgggcggccgagccgcagctggccgtggtgaggctcggcgtcgggctcgccgactgggagtgggaggtccccgccgaccaggggagcgccccgtcgtcgtcgtccggaggaggagggggcgtgtacgggcacggcgcggtcgtgctgccggggaacgtcatgatggtgtatggggggtacgagacctccgagggcggcaagatcaggaagagaagaacgggcgggagcatgttctacaacatcacgagcgggagctggtccgatgtgtatgtcagtccgctcgttcaaggaaatagcggaaagagcggtggtgatggtggtgatggtggcggcggcagcacccacggcggcgacgcgggcggcgacagcggtcttggcggcccggccgggaacggaaacagctcgggcgactggacaaaagcgaagcggatcggtctcggagtcggccttggagtcggcttgctcgtcctcagcatcctggcgtgtctcggcgtgtgctggttccgccggagacggcagcgccggagatcccgcgatgagacgctccggggtctctcgcagggactgaacggcccgctggcccgcggcgtcggggaggaggacgacggcgagatgctcgagcgagaccacggtatgggcatgtccttcttcccctggaccgccgcgacggcacgggactggtacatgggcatgggcggggacgacccctacatgcagggccggcgctcgctggggtacgagagcctccggggagggtaccggccttcttcttcttcttcttcttcctccctgtacatgccgccacctccttcggcgtccacgttcagccaccggccgaaggcggccaagggcctccaccaccaaccgagcagctcgtacgacttcaccccgctcacgcgcggccccaaccgcatcgagcccatctacgaagccgacgaggactcggaaggcgacctcggcaagaactacccgctcggcccggacaaagaggagcgcgtcggcaacgacaccgaccacgacgacgacgacgaccccttcctcactcctaccctcagcaccccgaccggcggagctttcccgaggccgcataccgccaactcgagcccgcgcaactccggctcccctacccctcccgccgcgcaacgaaaaaaacaacagcaacaaccagcggaagaaacaaaattagcagcagcagcaggaggaggaggaggccaagagcagcacccggacgtgcaaggctgggtgcacgaggtcgagaacctcgccgcggggccctcgccctctcctccctcgcctacctcctcttcttcccagcccccgtctcctcggacaaaagcctcctcgactatcttgcagttcatcacggtcgccttgacctcggcattttga

SEQ ID NO: 1622 - protein, 882 aa, Myceliophthora thermophilia
MPPAPKGDAALRSGAAPRQVGARSLAGTRRCPGARRRRARTASTLVTAVLGLAARASAEPVLPYTPTTILLAPDGAAGSGAAYIFAPSGDDRDAVDFLALNVSSLRASALEPTKLTPDLPFLSKDAADCATFAPTILRNGTIVVLAGDCSSTAASTLWSYTPGQPDARWTQHPVVPSASWDNAQAGPYHLGGLVNFSPQLSPVLSEPTLYFYGGMCPRKSSSSADTWQSNAAYSNRMLRLIPPSPPPSSSSSSSYTLDYASAGGQQQPPVAEAGFTWTELTPSLSNRTIITTTSDGGGKDGAGTEQVTTSIIITQQTSHETWTFVSIAPPPAASSSSSSSSDDDDDDDDGRADLARQRERQEEEENNKKKQKTKTKRRLRREAAAAAPGMVVDSRSGHTTVLSEDGTRLVVYGGWVGDVSRAAEPQLAVVRLGVGLADWEWEVPADQGSAPSSSSGGGGGVYGHGAVVLPGNVMMVYGGYETSEGGKIRKRRTGGSMFYNITSGSWSDVYVSPLVQGNSGKSGGDGGDGGGGSTHGGDAGGDSGLGGPAGNGNSSGDWTKAKRIGLGVGLGVGLLVLSILACLGVCWFRRRRQRRRSRDETLRGLSQGLNGPLARGVGEEDDGEMLERDHGMGMSFFPWTAATARDWYMGMGGDDPYMQGRRSLGYESLRGGYRPSSSSSSSSLYMPPPPSASTFSHRPKAAKGLHHQPSSSYDFTPLTRGPNRIEPIYEADEDSEGDLGKNYPLGPDKEERVGNDTDHDDDDDPFLTPTLSTPTGGAFPRPHTANSSPRNSGSPTPPAAQRKKQQQQPAEETKLAAAAGGGGGQEQHPDVQGWVHEVENLAAGPSPSPPSPTSSSSQPPSPRTKASSTILQFITVALTSAF

SEQ ID NO: 1623 - protein, 824 aa, Myceliophthora thermophilia
EPVLPYTPTTILLAPDGAAGSGAAYIFAPSGDDRDAVDFLALNVSSLRASALEPTKLTPDLPFLSKDAADCATFAPTILRNGTIVVLAGDCSSTAASTLWSYTPGQPDARWTQHPVVPSASWDNAQAGPYHLGGLVNFSPQLSPVLSEPTLYFYGGMCPRKSSSSADTWQSNAAYSNRMLRLIPPSPPPSSSSSSSYTLDYASAGGQQQPPVAEAGFTWTELTPSLSNRTIITTTSDGGGKDGAGTEQVTTSIIITQQTSHETWTFVSIAPPPAASSSSSSSSDDDDDDDDGRADLARQRERQEEEENNKKKQKTKTKRRLRREAAAAAPGMVVDSRSGHTTVLSEDGTRLVVYGGWVGDVSRAAEPQLAVVRLGVGLADWEWEVPADQGSAPSSSSGGGGGVYGHGAVVLPGNVMMVYGGYETSEGGKIRKRRTGGSMFYNITSGSWSDVYVSPLVQGNSGKSGGDGGDGGGGSTHGGDAGGDSGLGGPAGNGNSSGDWTKAKRIGLGVGLGVGLLVLSILACLGVCWFRRRRQRRRSRDETLRGLSQGLNGPLARGVGEEDDGEMLERDHGMGMSFFPWTAATARDWYMGMGGDDPYMQGRRSLGYESLRGGYRPSSSSSSSSLYMPPPPSASTFSHRPKAAKGLHHQPSSSYDFTPLTRGPNRIEPIYEADEDSEGDLGKNYPLGPDKEERVGNDTDHDDDDDPFLTPTLSTPTGGAFPRPHTANSSPRNSGSPTPPAAQRKKQQQQPAEETKLAAAAGGGGGQEQHPDVQGWVHEVENLAAGPSPSPPSPTSSSSQPPSPRTKASSTILQFITVALTSAF

SEQ ID NO: 1624 - DNA, 273 bp, Myceliophthora thermophilia
atgaccctctttccctttcgactgctcgcccttctcgcgaccaccgccgctttcctcacctcgaccctcgcggccccggtggaaagcaatgacaactccgcaacgggcaaggctcctcaggcccaggccgcgtcaaattatggcacgcctcagtgcaagtcggccatgatgaacgacctgtgcatctcgaacaacgccaatgcctactgcgatgtcacaggtttccacaacgacttcatgaagagctgcgcgggcaactgctactgtgcttga

SEQ ID NO: 1625 - protein, 90 aa, Myceliophthora thermophilia
MTLFPFRLLALLATTAAFLTSTLAAPVESNDNSATGKAPQAQAASNYGTPQCKSAMMNDLCISNNANAYCDVTGFHNDFMKSCAGNCYCA

SEQ ID NO: 1626 - protein, 66 aa, Myceliophthora thermophilia
APVESNDNSATGKAPQAQAASNYGTPQCKSAMMNDLCISNNANAYCDVTGFHNDFMKSCAGNCYCA

SEQ ID NO: 1627 - DNA, 1107 bp, Myceliophthora thermophilia
atggtcggctcggctcttgctttgtctctcatcggcctgggtgccgtccaggccctacccgcagcaaggaaggtggaggagcggcaggtctggctcggccccggcaacggcgacttccacccgggtgacggcgacctgcaaccatgcttgacggacgtaccattggagcagcaaccgccctgcctcttgccgcccatcgtcggccccatcaatccaagcaccaagaagagaggattcgataagcggcagatctggatctggccgggaacgggagacttccacccgggcgacggcgacttgaagccctgcctgaccgatgtccccttggagacgcaaccgccttgcatcctgccacccatcgtcggtcccatcaacccaagcacgaagaagagaggactcgataagcggcagatctggctctggccgggaaccggggacttccacccgggcgacggcgacccgaagccatgcttgatcaatatccccctgcagcagcagccgccctgtcttcttccccccatcgttggccccattgaaccgagcaccaaaaagaagcgacaagcagtcatcggcgatccgtcaggaggtgacatcacaccgggccagggcgacctgcccccttgcctgaccgatactcccctggaccagcagccaccctgccttttgccacccatcgtcggcggcatcgatccaagcaccaaaaagcgcggggtcatgctcccgcccgactatgccacgaatcccaagggggccgtcgagcagctggagaaggaacttatccggctgcagaacaagagcaagaagaccaagaaggacctcgaggatatcgcggccatcaaggcagccctcaggtacatcgcgggcatcaccaacatcagcgcgccgccgggaacgggcaccaccttcacccccggcaagcgggatgccgcgcagtgctcgaacctcgaggccgccgagctcgctctcgagagcctcctgcacaaggacaagctgacggccgaggagaaggccgccaagaagaagctgaccgccttcctcaagagttgcggcatcaccatcatcaagtcgcctgacgggacaaccaccatcatcaagccttccgactag

SEQ ID NO: 1628 - protein, 368 aa, Myceliophthora thermophilia
MVGSALALSLIGLGAVQALPAARKVEERQVWLGPGNGDFHPGDGDLQPCLTDVPLEQQPPCLLPPIVGPINPSTKKRGFDKRQIWIWPGTGDFHPGDGDLKPCLTDVPLETQPPCILPPIVGPINPSTKKRGLDKRQIWLWPGTGDFHPGDGDPKPCLINIPLQQQPPCLLPPIVGPIEPSTKKKRQAVIGDPSGGDITPGQGDLPPCLTDTPLDQQPPCLLPPIVGGIDPSTKKRGVMLPPDYATNPKGAVEQLEKELIRLQNKSKKTKKDLEDIAAIKAALRYIAGITNISAPPGTGTTFTPGKRDAAQCSNLEAAELALESLLHKDKLTAEEKAAKKKLTAFLKSCGITIIKSPDGTTTIIKPSD

SEQ ID NO: 1629 - protein, 350 aa, Myceliophthora thermophilia
LPAARKVEERQVWLGPGNGDFHPGDGDLQPCLTDVPLEQQPPCLLPPIVGPINPSTKKRGFDKRQIWIWPGTGDFHPGDGDLKPCLTDVPLETQPPCILPPIVGPINPSTKKRGLDKRQIWLWPGTGDFHPGDGDPKPCLINIPLQQQPPCLLPPIVGPIEPSTKKKRQAVIGDPSGGDITPGQGDLPPCLTDTPLDQQPPCLLPPIVGGIDPSTKKRGVMLPPDYATNPKGAVEQLEKELIRLQNKSKKTKKDLEDIAAIKAALRYIAGITNISAPPGTGTTFTPGKRDAAQCSNLEAAELALESLLHKDKLTAEEKAAKKKLTAFLKSCGITIIKSPDGTTTIIKPSD

SEQ ID NO: 1630 - DNA, 2826 bp, Myceliophthora thermophilia
atgttcgctcgcctcgcgggcgtgtgtctctcttgtgtggcttgtcgctctactctgaccgacatcctcgagcatttccggacacaaacttgcctgacagatgctcttcctgtgccgttcctgagttttccttcctttgacatttctccgactctccccactccctcgcagacggccctgaggatcgccatgttcggcccgggcctcgtcgcctggttgacgacgctctcggccccagtcgccctggcacaagcggtatggcaacccaaccaggtttccacaaggatatgctactggcagcagcttcgagcggccgtccttcatgacacggtctatctagacggtggggctctgtactgggagccaaggttcgcggacggctctgcaggagtgccgaccttcgacagtctcatttacaccctcaacttcagcacgcccttcaacacgacccagaacatctcggccatcctgggcacgctggaaaccggcgggggcgacaccaacagccgcgccccaaactacctagatggtgccctcctcggcaacgattccgagttctgcctctacggcggcatgagcgcgccgtcgacgggctcctcagatccgccgggggactcggtcctatgctaccaagcgtatcagtatggcgcagacaagccccgcttcagaccgggcttcatagacagagatctcggcgagaacgtgacccgctacgttgcctacggcggcgccgccagcgcgccctctgagaatctcgcctggtacttttccggtctgcgctcccccacttggggcaagatctatatgcccccttacgatggcggcggtgccacttctgccaataccgtctctaaccggctcatcacgatggatatggctaatccggtgagcgtgaccttcaccaacgacacgctaccccgcaacattcccgggcgtgcgaatccggaactggtctgggttccggtgggtttccgcggtgttctcgtcgccctcggaggcgtcgtgtatccggattgggtcaacgcttcgaacccacgctcagccaacgaaacagctagcagagagcaaagccccgagttcatgtccaccatcgacatctacgacgtggagagccgcgagtggtatcggcagaagaccaccggtggacccggccagctcgcgcgcgggtgtgccgtcgtcgcccgcgcgcaggacggctcgagcttcaatatctactactatggtggctacgacggcattcacatgacggaacgctacaatgacgacgtctgggtcctgtcgctgccgtcattcacctgggtcaagctaacgtcgagccaagtagacgggcgcgctgggcacaagtgtgtctcgccgtaccccgaccagatgctggtcatcggaggatacccatccctccagggatatctccccagctgtctccgggaaacgatcagggtgtttaacctctccacgggcgagtggctggaccggtacgaccctgccgtctacgccaactacaccgtccccagcgccgtcgtcgccaagatcggcgggtccggcaccgggggcgccacggcgacgagcccgagtccgtcctgggacgcgaccgaactggcgagcatctttgccaaggagtatccgacgagcaagatcacgacgtactacccgtacgcctcaaacgccccggtcgacaacaccaacccgagtgtgccaacaaccccggccgacaaggacgaaggtggtggcgtgccgtcgttccttccgcccgtccttggcgtcgtgctcggattggtcttcgtgaccatggtggctgtcctgatcctcctctggaggcgccgtaggctgctgcgtaaaggcggcggcgctatgagcgaggctggcaccatagacaccaacaaaaaccgcatagccttgtggctgcgcggtcagaacaacgcgtcgcccgaggtcaaggctccgacggtggccacctcatctgactatttgcctgtgaattcgacagaacccacagaccacagccctggtactaatgcgacccccttgtcgattgccgagatgatggacaccggagtgcagaggccggtcgaactgccagcagacacagccaggccagcggagctccagtcctccaagccctccccggaggcagcagtcgccatgcaagcttccctcaacaaccacgcgtactaccagtccacccaccagaccggccacgccaactcgtccgcgtattacacggctccccccgtcccgcaggaggagtcccccatcctgcaccgcccggactcggacgccctgggccgcgcgcccgcgactagcagcgccaccaccccgacgtcggccggcacgtcccccgtaacgacgggggccccggcacagggagcgagcggccggtccaacaaggtggtctcgggcatctcgagcctctcggagcgcgaccgcgcccacctgcggcagatcagcgacaccaccgtgtcgtcggtgacgaccgcccccgtcgggccgagcggcaccaccgccgccgccactactaccgccaacaatgccaacaaccttgttaccggcagcggcgggagggagacggtggtcagcaacgtgagcttgctcagcagcccgggaggcgggccgccgacggtggtggagagccccgcagccgtgtcgcccccgacggcgacggccgggcccggcgaagggggggactacctgggcatcaggccgccgactgggtctcagcagcagcagggtgggccgggaccgtcgagtccgtcgaggcggagcgtcttctcggagaatctggatagcgggacgaccggggacacgggaggacagcggcaagggagatga

SEQ ID NO: 1631 - protein, 941 aa, Myceliophthora thermophilia
MFARLAGVCLSCVACRSTLTDILEHFRTQTCLTDALPVPFLSFPSFDISPTLPTPSQTALRIAMFGPGLVAWLTTLSAPVALAQAVWQPNQVSTRICYWQQLRAAVLHDTVYLDGGALYWEPRFADGSAGVPTFDSLIYTLNFSTPFNTTQNISAILGTLETGGGDTNSRAPNYLDGALLGNDSEFCLYGGMSAPSTGSSDPPGDSVLCYQAYQYGADKPRFRPGFIDRDLGENVTRYVAYGGAASAPSENLAWYFSGLRSPTWGKIYMPPYDGGGATSANTVSNRLITMDMANPVSVTFTNDTLPRNIPGRANPELVWVPVGFRGVLVALGGVVYPDWVNASNPRSANETASREQSPEFMSTIDIYDVESREWYRQKTTGGPGQLARGCAVVARAQDGSSFNIYYYGGYDGIHMTERYNDDVWVLSLPSFTWVKLTSSQVDGRAGHKCVSPYPDQMLVIGGYPSLQGYLPSCLRETIRVFNLSTGEWLDRYDPAVYANYTVPSAVVAKIGGSGTGGATATSPSPSWDATELASIFAKEYPTSKITTYYPYASNAPVDNTNPSVPTTPADKDEGGGVPSFLPPVLGVVLGLVFVTMVAVLILLWRRRRLLRKGGGAMSEAGTIDTNKNRIALWLRGQNNASPEVKAPTVATSSDYLPVNSTEPTDHSPGTNATPLSIAEMMDTGVQRPVELPADTARPAELQSSKPSPEAAVAMQASLNNHAYYQSTHQTGHANSSAYYTAPPVPQEESPILHRPDSDALGRAPATSSATTPTSAGTSPVTTGAPAQGASGRSNKVVSGISSLSERDRAHLRQISDTTVSSVTTAPVGPSGTTAAATTTANNANNLVTGSGGRETVVSNVSLLSSPGGGPPTVVESPAAVSPPTATAGPGEGGDYLGIRPPTGSQQQQGGPGPSSPSRRSVFSENLDSGTTGDTGGQRQGR

SEQ ID NO: 1632 - protein, 921 aa, Myceliophthora thermophilia
DILEHFRTQTCLTDALPVPFLSFPSFDISPTLPTPSQTALRIAMFGPGLVAWLTTLSAPVALAQAVWQPNQVSTRICYWQQLRAAVLHDTVYLDGGALYWEPRFADGSAGVPTFDSLIYTLNFSTPFNTTQNISAILGTLETGGGDTNSRAPNYLDGALLGNDSEFCLYGGMSAPSTGSSDPPGDSVLCYQAYQYGADKPRFRPGFIDRDLGENVTRYVAYGGAASAPSENLAWYFSGLRSPTWGKIYMPPYDGGGATSANTVSNRLITMDMANPVSVTFTNDTLPRNIPGRANPELVWVPVGFRGVLVALGGVVYPDWVNASNPRSANETASREQSPEFMSTIDIYDVESREWYRQKTTGGPGQLARGCAVVARAQDGSSFNIYYYGGYDGIHMTERYNDDVWVLSLPSFTWVKLTSSQVDGRAGHKCVSPYPDQMLVIGGYPSLQGYLPSCLRETIRVFNLSTGEWLDRYDPAVYANYTVPSAVVAKIGGSGTGGATATSPSPSWDATELASIFAKEYPTSKITTYYPYASNAPVDNTNPSVPTTPADKDEGGGVPSFLPPVLGVVLGLVFVTMVAVLILLWRRRRLLRKGGGAMSEAGTIDTNKNRIALWLRGQNNASPEVKAPTVATSSDYLPVNSTEPTDHSPGTNATPLSIAEMMDTGVQRPVELPADTARPAELQSSKPSPEAAVAMQASLNNHAYYQSTHQTGHANSSAYYTAPPVPQEESPILHRPDSDALGRAPATSSATTPTSAGTSPVTTGAPAQGASGRSNKVVSGISSLSERDRAHLRQISDTTVSSVTTAPVGPSGTTAAATTTANNANNLVTGSGGRETVVSNVSLLSSPGGGPPTVVESPAAVSPPTATAGPGEGGDYLGIRPPTGSQQQQGGPGPSSPSRRSVFSENLDSGTTGDTGGQRQGR

SEQ ID NO: 1633 - DNA, 579 bp, Myceliophthora thermophilia
atgcgtcacacgacactctcaccccttctatcctctctcctcctggttggaagactggccacggctgcacccgtggtcaacgccgatggggattgcgtcccgtataccatttgcgtcgacggcgtcaacgcatgcggaatcagatggggcgaatgctacaatgtctgtgacgcctcagctaagcccgttgcgccgccttgcccgggcacggaggaacccccgtcgcccaccaccagggtcactaccaaggtgaccaccctcgagcccaaacccacgactaccaaggcaagcacaaccaagggacataccgtcacaaagaccgtcaagcccccagtcaccccaaccccgaccaaattcactaccagtaccaccaggccttccagcacctgcagcaccgacgtcacggtctgctgggacggcatcaacgaatgcggcatgatgtacggaggatgctttcccgactgcaagccgtggcccaccttcacgcctccgccgtgcccgaccaccaccaccaagcagaccccgactgtgatcaccagtgttacgatgctgccaatcttgacggtgccgcacccctaa

SEQ ID NO: 1634 - protein, 192 aa, Myceliophthora thermophilia
MRHTTLSPLLSSLLLVGRLATAAPVVNADGDCVPYTICVDGVNACGIRWGECYNVCDASAKPVAPPCPGTEEPPSPTTRVTTKVTTLEPKPTTTKASTTKGHTVTKTVKPPVTPTPTKFTTSTTRPSSTCSTDVTVCWDGINECGMMYGGCFPDCKPWPTFTPPPCPTTTTKQTPTVITSVTMLPILTVPHP

SEQ ID NO: 1635 - protein, 170 aa, Myceliophthora thermophilia
APVVNADGDCVPYTICVDGVNACGIRWGECYNVCDASAKPVAPPCPGTEEPPSPTTRVTTKVTTLEPKPTTTKASTTKGHTVTKTVKPPVTPTPTKFTTSTTRPSSTCSTDVTVCWDGINECGMMYGGCFPDCKPWPTFTPPPCPTTTTKQTPTVITSVTMLPILTVPHP

SEQ ID NO: 1636 - DNA, 882 bp, Myceliophthora thermophilia
atgcactccaccaccacgctcctcagcctcctctccgcagccgcggcagccaacggcgcctccctgccccgggacagcgtgtgcggcgcggccgccgagatccagtgccccatcgtctttgacggccgggtcagcgccgacgcccagccgaccgacttcgacagcgccagcacctccatcttcaacccggactacgtcaagggcaacaacctcaagtggagcgatatcctgcagttccccgacgccggaaccacccacttcgacaacgagacccacaagcccttcgaggtcaccctcagcgacgagagcattttccagtcccagcagggcttccgccgcgccggcctgcagttcaacggcgacaccaacaacggcagccccggctcccagggcgtcaagaccatccacttcagtgtcaagatcgacccccagcggggcctgaacctgagccacgagtatatcctcgtctggcacgaagcggctgattactcggccaaccagttcaacttcgagaccggcaccattatcggtcaggagggtctcccaaaagacacctacaaggtccttaaccgcaacaaccagcagatctggtcgacgcccatcctcgaggaccaatggcagaactttgccatcactctcgacttcaaccagaacactctccaagtgtactactccgaggccgacgaacccctcgagagcgtcaccgacgtcgtgtccaacaacaacgcgggagagggtcagtaccagatcggcctgctcaagaagcccaccggcaccgacgacgtcgtcaactcgggataccaggagagcggcatcgacgagggtctcatctacggcagcctgttcgtcgaggacagcgccaacgggtgtgtctcgctgtaa

SEQ ID NO: 1637 - protein, 293 aa, Myceliophthora thermophilia
MHSTTTLLSLLSAAAAANGASLPRDSVCGAAAEIQCPIVFDGRVSADAQPTDFDSASTSIFNPDYVKGNNLKWSDILQFPDAGTTHFDNETHKPFEVTLSDESIFQSQQGFRRAGLQFNGDTNNGSPGSQGVKTIHFSVKIDPQRGLNLSHEYILVWHEAADYSANQFNFETGTIIGQEGLPKDTYKVLNRNNQQIWSTPILEDQWQNFAITLDFNQNTLQVYYSEADEPLESVTDVVSNNNAGEGQYQIGLLKKPTGTDDVVNSGYQESGIDEGLIYGSLFVEDSANGCVSL

SEQ ID NO: 1638 - protein, 274 aa, Myceliophthora thermophilia
ASLPRDSVCGAAAEIQCPIVFDGRVSADAQPTDFDSASTSIFNPDYVKGNNLKWSDILQFPDAGTTHFDNETHKPFEVTLSDESIFQSQQGFRRAGLQFNGDTNNGSPGSQGVKTIHFSVKIDPQRGLNLSHEYILVWHEAADYSANQFNFETGTIIGQEGLPKDTYKVLNRNNQQIWSTPILEDQWQNFAITLDFNQNTLQVYYSEADEPLESVTDVVSNNNAGEGQYQIGLLKKPTGTDDVVNSGYQESGIDEGLIYGSLFVEDSANGCVSL

SEQ ID NO: 1639 - DNA, 642 bp, Myceliophthora thermophilia
atggtgcgaatcgccatccccacgcttgccctcgcggcgacgacagtgaccgccctgtctaagtccaagggcttcaacctggtcgcgcacgtcgccgacccgggcagcgatctgagcccgtcggtcgagggtctgctgctgacgacggcgcacacgggggccgggttcaacgcggccgtcttcgccgacgccgacgccgggtccgagcgcgtcttctaccagaacggcaccgcagcgcgcccgggggggatgaggagcaagagcaccctgctcaccgacggcggcaccccacccttccccttcagcatgcaggtgcagtcgggcggggagccccgtcgcatcgtcgacatcagcgtcggccagggcacgagccactacgtcgacgcgcgcgggcggctcgtcaacgccgaggacgcgggaagacggggctcctggctcgcctgcaacgccgtcgtgccctactacaacgagaccttcaccacgctccagtacgcctacgactatcatcgtggagactcccctgcgggcctcgaaggctgcgccgccatcgagctggtcgcccgctgcgccgagctgaacgacctccccgacgacgcctactcgactcacgaatttgccgtcgaggtcaggtgcgagaagtga

SEQ ID NO: 1640 - protein, 213 aa, Myceliophthora thermophilia
MVRIAIPTLALAATTVTALSKSKGFNLVAHVADPGSDLSPSVEGLLLTTAHTGAGFNAAVFADADAGSERVFYQNGTAARPGGMRSKSTLLTDGGTPPFPFSMQVQSGGEPRRIVDISVGQGTSHYVDARGRLVNAEDAGRRGSWLACNAVVPYYNETFTTLQYAYDYHRGDSPAGLEGCAAIELVARCAELNDLPDDAYSTHEFAVEVRCEK

SEQ ID NO: 1641 - protein, 195 aa, Myceliophthora thermophilia
LSKSKGFNLVAHVADPGSDLSPSVEGLLLTTAHTGAGFNAAVFADADAGSERVFYQNGTAARPGGMRSKSTLLTDGGTPPFPFSMQVQSGGEPRRIVDISVGQGTSHYVDARGRLVNAEDAGRRGSWLACNAVVPYYNETFTTLQYAYDYHRGDSPAGLEGCAAIELVARCAELNDLPDDAYSTHEFAVEVRCEK

SEQ ID NO: 1642 - DNA, 471 bp, Myceliophthora thermophilia
atgctctctcaatttgtcatcttgctcggcctggccagtgccactctcggccaggtgaccctccagccatcgaccgtcaggacgggccggcctgggctcccgacagtgacggtgacggcgacggcgacggccacggtgaccaagacggaaagctacatccacgagcagactaagaccatcaccacgaccgagactgagaccgagacggagacggagacggagaccatcacgagcgtgtcggtgacgacgcagccctgcagcaccgtcagctgcccgacgctgaccaagacggcgacggcgtgccggtcctgcctggtgccccagtgcacgacgacgtcggtggtgacgcgcccgaacgagtgcgccgccaccgccctgcccaccgcaaccgtctcgttcccctgttccgacccggacgtgtgcggcaagattgggtgcaccaccgtgtacgacatccggtcggcggcctaa

SEQ ID NO: 1643 - protein, 156 aa, Myceliophthora thermophilia
MLSQFVILLGLASATLGQVTLQPSTVRTGRPGLPTVTVTATATATVTKTESYIHEQTKTITTTETETETETETETITSVSVTTQPCSTVSCPTLTKTATACRSCLVPQCTTTSVVTRPNECAATALPTATVSFPCSDPDVCGKIGCTTVYDIRSAA

SEQ ID NO: 1644 - protein, 139 aa, Myceliophthora thermophilia
QVTLQPSTVRTGRPGLPTVTVTATATATVTKTESYIHEQTKTITTTETETETETETETITSVSVTTQPCSTVSCPTLTKTATACRSCLVPQCTTTSVVTRPNECAATALPTATVSFPCSDPDVCGKIGCTTVYDIRSAA

SEQ ID NO: 1645 - DNA, 927 bp, Myceliophthora thermophilia
atgcccgcccgtctcccgtccgtccgcacgggcgtgagactctccggcagcgcgttccggcgcgcaccttctgcgtctgcatacgcatctgcatcatcccaactctgcctgcaccgccggccatactcggccgccgccagcagctcacaagctcccgagtctgaggtacaacctccaccgcccccgccgcgatggatcagcgacctaccggcgcgcatcggcaagtgcctcgcctttggttgcaacgcccggcaggtctcgcaggcggcgggcgttctgcgcacgatagcgaccgagtggaaggagctgctggccgcgagcgaggggttcctcacaggcggacgtcgcgggctggaatcgagggagatcgcctggggcgagatggacagctttgcacacgtcaataacgtcaactattaccgctacgccgagtcggcgcgggtgaattggatcaccaactttgccgtgcatgttgatccgaagcatcgcaagcagtggcgcgagctcatgtctcccatttccacggggctgatcatgcgtagcttgaaggccgatttcaagtttcccatggtctacccggacaagatctcagtttaccacaagttacggaaaaggccggagtcagaccccgccccaagttccttctaccttgactgcgtcgtcctctcacaccggcacaggcggatctcttgccgtttggaggaggatattgtcatctacgattacagaaagggtggcaagacgagcatgcctcaattcatgttagacatgtttgaggagacgtggaagctgcaagaggaggccaaggcgcaggctcggctgcggatatcaaggcttcacgaggaggttgagcagctagagcgcgagacatggaacaggccggatgccgtcgaggacatgggcagcgccgtaggagggagcaagtga

SEQ ID NO: 1646 - protein, 308 aa, Myceliophthora thermophilia
MPARLPSVRTGVRLSGSAFRRAPSASAYASASSQLCLHRRPYSAAASSSQAPESEVQPPPPPPRWISDLPARIGKCLAFGCNARQVSQAAGVLRTIATEWKELLAASEGFLTGGRRGLESREIAWGEMDSFAHVNNVNYYRYAESARVNWITNFAVHVDPKHRKQWRELMSPISTGLIMRSLKADFKFPMVYPDKISVYHKLRKRPESDPAPSSFYLDCVVLSHRHRRISCRLEEDIVIYDYRKGGKTSMPQFMLDMFEETWKLQEEAKAQARLRISRLHEEVEQLERETWNRPDAVEDMGSAVGGSK

SEQ ID NO: 1647 - protein, 263 aa, Myceliophthora thermophilia
ASSSQAPESEVQPPPPPPRWISDLPARIGKCLAFGCNARQVSQAAGVLRTIATEWKELLAASEGFLTGGRRGLESREIAWGEMDSFAHVNNVNYYRYAESARVNWITNFAVHVDPKHRKQWRELMSPISTGLIMRSLKADFKFPMVYPDKISVYHKLRKRPESDPAPSSFYLDCVVLSHRHRRISCRLEEDIVIYDYRKGGKTSMPQFMLDMFEETWKLQEEAKAQARLRISRLHEEVEQLERETWNRPDAVEDMGSAVGGSK

SEQ ID NO: 1648 - DNA, 546 bp, Myceliophthora thermophilia
atgcacccgctcgcaaccctgctctgggcgctcgtgtcctcgctgtcggcagcgaccatcacgttccaggtgcagcggtcgagcaacccgacggcggacgagcaggacgcgtacgcgcggatcgaggcggccatgagcgcggcggcggcgcggtacaaccggctggcgccgcgggcgaacaaggccatcacggtgcagtacgtgccgtcggtgccgacggcggacggcaacttcaacggcaacatccggttcggctccaaccgggcctacatgacggagcgcaccgccctgcacgagaccgcccacaccctcggcgtcggccagacgcgcgccttcgacgaccgctgcgccgccggcagcgccgccggctggccctccgccaccgccctcctccgctcctgggacggtccggacgccgtcatcaactgcggcggcggccacttctggccctacggcctcaactacgagtccgagatgagcgagaccaacgcggaccgccactgcctgctcgtcaacgccatgctcgccgacgggctcgccggttaa

SEQ ID NO: 1649 - protein, 181 aa, Myceliophthora thermophilia
MHPLATLLWALVSSLSAATITFQVQRSSNPTADEQDAYARIEAAMSAAAARYNRLAPRANKAITVQYVPSVPTADGNFNGNIRFGSNRAYMTERTALHETAHTLGVGQTRAFDDRCAAGSAAGWPSATALLRSWDGPDAVINCGGGHFWPYGLNYESEMSETNADRHCLLVNAMLADGLAG

SEQ ID NO: 1650 - protein, 164 aa, Myceliophthora thermophilia
ATITFQVQRSSNPTADEQDAYARIEAAMSAAAARYNRLAPRANKAITVQYVPSVPTADGNFNGNIRFGSNRAYMTERTALHETAHTLGVGQTRAFDDRCAAGSAAGWPSATALLRSWDGPDAVINCGGGHFWPYGLNYESEMSETNADRHCLLVNAMLADGLAG

SEQ ID NO: 1651 - DNA, 402 bp, Myceliophthora thermophilia
atgctgttcagcgcaaccatcgccggattccttctcgcctttctcgcgcagggctcccccgtgcccaccgagcacaacaagattggcggtgtcctgatctgcaacgaccccaatggccaagggcactgcgaatacgccgtctacgagctcgagaagtgttacaacctgccaccagcgctagtgaacaacgccgccaccttcgcgcccgacgatgcgcctttctactgctatccctacctcacggcatgcggcggcgtctgcaagtcgcccacgggctgcaccatgggagcggtctcgtccgactacgagcacaagttcaacctgaccgaagtcgggtggaacaagtacatcacgtcgttcgactgccacctgaacaagactggcgatgcgacttcgcaatga

SEQ ID NO: 1652 - protein, 133 aa, Myceliophthora thermophilia
MLFSATIAGFLLAFLAQGSPVPTEHNKIGGVLICNDPNGQGHCEYAVYELEKCYNLPPALVNNAATFAPDDAPFYCYPYLTACGGVCKSPTGCTMGAVSSDYEHKFNLTEVGWNKYITSFDCHLNKTGDATSQ

SEQ ID NO: 1653 - protein, 115 aa, Myceliophthora thermophilia
SPVPTEHNKIGGVLICNDPNGQGHCEYAVYELEKCYNLPPALVNNAATFAPDDAPFYCYPYLTACGGVCKSPTGCTMGAVSSDYEHKFNLTEVGWNKYITSFDCHLNKTGDATSQ

SEQ ID NO: 1654 - DNA, 747 bp, Myceliophthora thermophilia
atgcttccatcaacgacgacgacactgctcctctcctgccttgtcggagcagtatgcggactcagcgtggatgcaaaatggtggtggcctcatccgaaagccacttgtctagcccctgatgcggtgcaaaccgccagcttctacacgggactggaagagggaacgccgggcatcagacccggtctcagcgagtcgtcaacagacaaggccaacttcatcaacttctgcgccggccgcacgctcaccaacggcaagcagaacgcggccggctcctgcaacggcatccccatgggccgtatccccgccaccaccaacatgatctcgtccatcatcacctacccgcagcccggcgaccgcctcaagcccaacacgacctttaacgtgaccatccagacccgccacctccgtgccggctacctcgtgaacccctcggtcagctactacacggctccccaggacctggatgagaacggcgacatcatcggccactgccacatctcgatccagaacattggcagcctgaggaccctcgacgtgcctgaccccaccgcctttgccttcttcaagggcgtcgacgacgagggtgatggtaagggacgcctgtccaccgaggtcactggtggtctgcccgacggggtataccgggtctgcaccatgatcgccgcgaggaaccatcagccagtggccatgccggttgcccagcgaggcgcccaggacgactgcaccaagttcgaggtcggtttgtga

SEQ ID NO: 1655 - protein, 248 aa, Myceliophthora thermophilia
MLPSTTTTLLLSCLVGAVCGLSVDAKWWWPHPKATCLAPDAVQTASFYTGLEEGTPGIRPGLSESSTDKANFINFCAGRTLTNGKQNAAGSCNGIPMGRIPATTNMISSIITYPQPGDRLKPNTTFNVTIQTRHLRAGYLVNPSVSYYTAPQDLDENGDIIGHCHISIQNIGSLRTLDVPDPTAFAFFKGVDDEGDGKGRLSTEVTGGLPDGVYRVCTMIAARNHQPVAMPVAQRGAQDDCTKFEVGL

SEQ ID NO: 1656 - protein, 228 aa, Myceliophthora thermophilia
LSVDAKWWWPHPKATCLAPDAVQTASFYTGLEEGTPGIRPGLSESSTDKANFINFCAGRTLTNGKQNAAGSCNGIPMGRIPATTNMISSIITYPQPGDRLKPNTTFNVTIQTRHLRAGYLVNPSVSYYTAPQDLDENGDIIGHCHISIQNIGSLRTLDVPDPTAFAFFKGVDDEGDGKGRLSTEVTGGLPDGVYRVCTMIAARNHQPVAMPVAQRGAQDDCTKFEVGL

SEQ ID NO: 1657 - DNA, 1524 bp, Myceliophthora thermophilia
atgattcctctcacaaagcgagccgctgccgctgcgttgctgctgtccggtgtcacagcacaggataccaccacgattgctacggctatcggctcagtcccatcggcatgtgcaacgctgacgccggcttactcgccgcccgtcgtggcaaaggggtggaaggcccagttgattgccacgggtctcaccaggccccgcggcatcaagtccgactcgaatggcggactgctcgtggttgagcaaggcgtcggcctgacgcacctgacgctcaacgacaagggcggtacctgtgtgtctgtcgcgaagaacgtctccgtcatcgaggactcaaagctcaaccatggcctcgagttgtcggaggacggcagaacgctctacgtctcctcgtctgagtacgtcgaccgctaccattatgaccccgacaccgccgtcgtgggcgagcgcacccgcttggtagccaacatgaccaacccgggcggtggccactccactcgcactctcctgctctccaagtcacagcccgacctcctcctcgtttcccgcggcagcgccaccaacatcgacccgcttgctgccgaccagtccaccggcgtctccagcatccgcgccttcaacatctccgacgccgccaccggtgagaacccttacgactacccctccgacggtctgctcgtcggctggggcttgcgcaactcggtcggcgtggccgagcaccccgtcacgggcaccatctggtccgtcgagaactcggccgacaacgtcgcccgcctcgggcaggacatccacgaggacaacccgggcgaggagctcaactaccacggcctcctcaacgacacgtcctccccgctcctcggcgccaactacggctacccctcctgcttcgccctctggaacacgaccgacttcccctcccagggcgacctcgtcgtgggcagccagttctccctcgacaacgacgcgaccatcaacgacacctactgcgccgagagtaccatcccgccgcgcctcaccttcgaggcccacaccgccccgctcgacatcgagttcctgcccggcaacggctcccgcgccttcatctcgttccacggcagctggaaccgcgaccgcccagccggctacaagctggcctacgtccccttcacctcggccggcgagcccgccgacgagagcgacagccgcggcgccgcccgcaacatcctcaccccgcccgacgtcacccaatgctcccgccggggcgcctgcttccgccccgtcgggctggccttcgacgccgccgcccagaggctgttcgtctcgagcgacgcgaccggcgagatctgggtcgtcctgagggacggcgaggaggaggaggagattgaagggaggcggacggccaccgatacctccgcgcagccggggagcacgtcctcgggcgccgcgatgcccggggcggcgcttcgcggtgtggggcccgaagggtgggtggtggttgttgctgtgacggcttggatgatggtagtcgggggccttgggttcatcgtctga

SEQ ID NO: 1658 - protein, 507 aa, Myceliophthora thermophilia
MIPLTKRAAAAALLLSGVTAQDTTTIATAIGSVPSACATLTPAYSPPVVAKGWKAQLIATGLTRPRGIKSDSNGGLLVVEQGVGLTHLTLNDKGGTCVSVAKNVSVIEDSKLNHGLELSEDGRTLYVSSSEYVDRYHYDPDTAVVGERTRLVANMTNPGGGHSTRTLLLSKSQPDLLLVSRGSATNIDPLAADQSTGVSSIRAFNISDAATGENPYDYPSDGLLVGWGLRNSVGVAEHPVTGTIWSVENSADNVARLGQDIHEDNPGEELNYHGLLNDTSSPLLGANYGYPSCFALWNTTDFPSQGDLVVGSQFSLDNDATINDTYCAESTIPPRLTFEAHTAPLDIEFLPGNGSRAFISFHGSWNRDRPAGYKLAYVPFTSAGEPADESDSRGAARNILTPPDVTQCSRRGACFRPVGLAFDAAAQRLFVSSDATGEIWVVLRDGEEEEEIEGRRTATDTSAQPGSTSSGAAMPGAALRGVGPEGWVVVVAVTAWMMVVGGLGFIV

SEQ ID NO: 1659 - protein, 487 aa, Myceliophthora thermophilia
QDTTTIATAIGSVPSACATLTPAYSPPVVAKGWKAQLIATGLTRPRGIKSDSNGGLLVVEQGVGLTHLTLNDKGGTCVSVAKNVSVIEDSKLNHGLELSEDGRTLYVSSSEYVDRYHYDPDTAVVGERTRLVANMTNPGGGHSTRTLLLSKSQPDLLLVSRGSATNIDPLAADQSTGVSSIRAFNISDAATGENPYDYPSDGLLVGWGLRNSVGVAEHPVTGTIWSVENSADNVARLGQDIHEDNPGEELNYHGLLNDTSSPLLGANYGYPSCFALWNTTDFPSQGDLVVGSQFSLDNDATINDTYCAESTIPPRLTFEAHTAPLDIEFLPGNGSRAFISFHGSWNRDRPAGYKLAYVPFTSAGEPADESDSRGAARNILTPPDVTQCSRRGACFRPVGLAFDAAAQRLFVSSDATGEIWVVLRDGEEEEEIEGRRTATDTSAQPGSTSSGAAMPGAALRGVGPEGWVVVVAVTAWMMVVGGLGFIV

SEQ ID NO: 1660 - DNA, 825 bp, Myceliophthora thermophilia
atgaagctcgactccttcgtcgcgaccgccttcctggcctccacggcggcagccattggccccgcgggtccgatcccgcggctgcacgggatcgccgagaagatgaagaactggaagtggccggacccgttcagctcgccgcggcacgaggagttcacggcggcgtgcgaggcgacgggccggttccgggcggcggaacaccctctggacgacctgtcgctggagcattcgcgcggcgggctgctggcctaccgggacgcgctcaagtccgtcttcgcgtcgcgcgagtacccgggcagctgggacggcgtcgacccgcacggctacgaccgcaagctgctcatcatggactacgagaccatgccgctgcgcgtgcgcgagtggatcgagcaccaggagcgcaccaacgggcccggaaaaggcctcttcgccgtctacccgcgcccggcccccggcacccgcgtcatgaaaaccatcaaggtacccgacgaggtccccgtcagcgccgagtggcgcgccaaggatgaccgtcgggtcgccctgttcgcacccggcgccatctacgagcacctgcccctctgggtggctgaggggagcgagtgcgaggaacaactcgccgacctgtccaaatacagcgccgagctcgtcgacgggggcgtggtggcgtaccccgtcgaccacagcagccccggctcgtcgcccctccagcgcgagatcgagtttacgatcaaggcgcaggtactcaagctcaaggagggtgtgcaggcggccgagcagacggagaagaccaaagataccaagagtgccggaaaagaggagctgtga

SEQ ID NO: 1661 - protein, 274 aa, Myceliophthora thermophilia
MKLDSFVATAFLASTAAAIGPAGPIPRLHGIAEKMKNWKWPDPFSSPRHEEFTAACEATGRFRAAEHPLDDLSLEHSRGGLLAYRDALKSVFASREYPGSWDGVDPHGYDRKLLIMDYETMPLRVREWIEHQERTNGPGKGLFAVYPRPAPGTRVMKTIKVPDEVPVSAEWRAKDDRRVALFAPGAIYEHLPLWVAEGSECEEQLADLSKYSAELVDGGVVAYPVDHSSPGSSPLQREIEFTIKAQVLKLKEGVQAAEQTEKTKDTKSAGKEEL

SEQ ID NO: 1662 - protein, 257 aa, Myceliophthora thermophilia
AIGPAGPIPRLHGIAEKMKNWKWPDPFSSPRHEEFTAACEATGRFRAAEHPLDDLSLEHSRGGLLAYRDALKSVFASREYPGSWDGVDPHGYDRKLLIMDYETMPLRVREWIEHQERTNGPGKGLFAVYPRPAPGTRVMKTIKVPDEVPVSAEWRAKDDRRVALFAPGAIYEHLPLWVAEGSECEEQLADLSKYSAELVDGGVVAYPVDHSSPGSSPLQREIEFTIKAQVLKLKEGVQAAEQTEKTKDTKSAGKEEL

SEQ ID NO: 1663 - DNA, 1557 bp, Myceliophthora thermophilia
atgaagacgatccgggctcgtggggccttcttgggcgcgggcctcctcctctcctcggccccggtcgtcgcggccgccgagaggtgtcccgactactcttcctacgcacgctcgcgccacgaacctttctcgaaggggaagcatgccctgtcctacatgcgccctgcggccgcatgccgcaccttcaactcgtccacggtcgagaccgtggtcgccgacatggccgagatcatctcggacccggacttgtaccgcctcttcgagaacaccttccccaacactgttgacactgccatccgctggcggggccatgccgccgacaacccggccgaggaactcgccttcgtcatcacgggcgacatcaacgccatgtggctgcgggacagcgccaaccaactgcaatcgtacctctccgtgctcgagccggacgcggccccgggcgagccggactcgatcgcgagcctataccgcggcgtcatcaacctccaggcccgctacatcctcaccgccccctactgcaactcgttccagccgccccccgagagcggcatcccgccggcccccaacccggccgcatcggacgacgccgtaaccccatcctacgatccggccaaagtgttcgagtgcaagtatgagctcgactcgttggcctccttcctgcagctgagcgccgcctactacgcggccacccacgacgccgccttcttcggcaatgcctcgacctcccccaattggctgcccgccgtccgcgccgtcctcgacgcagccaaggccatgacagacggcacctacgccgacgacggctccgtccgcgtccccgcatacaccttcacccgccgcaccacccgcgccaccgagacgctggccaacgacggcctcggcagccccgcccgccgcaccggcatggtacgcagcgccttccgccccagcgacgacgccaccctgttccccttcctcgttcccgccaacatgcttttcgcccaggcgctgctcgatgccagcctgatcgcggccgcactggggggtaaggagggcggcggcggcaacagcgacgcggccgcgctggccgacgagatggcggccttttcgcgctccatccgcgaggcggtgtccaagtacggcatcgtgcccgtatcctcaaccgggaacggcaccggcgaggggggcggggtcgagaccgtgtacgcgtacgaggtggacgggtacgggtcggcggcgttcatggacgacgccaacctgccgtcgctgctgggcgcgcccgtgtacgactacctggcccggggggacaaggtataccagcggacgcgcgcgaggctgctgagcccggaggggaacccgtacttcatgaccgggtccgttatcaatgccatcgggggcccgcacgccgggcccggcatggcgtggccgatggcgagcatcgtgaggatcctgacgtccgacgacgacgacgagatcgtcaaggtcctgcgggagcttctgagctcgacggacgggctggggctgatccacgagagtatcaactcgaatgacgcgagccagtggacgcgcgagtggtga

SEQ ID NO: 1664 - protein, 518 aa, Myceliophthora thermophilia
MKTIRARGAFLGAGLLLSSAPVVAAAERCPDYSSYARSRHEPFSKGKHALSYMRPAAACRTFNSSTVETVVADMAEIISDPDLYRLFENTFPNTVDTAIRWRGHAADNPAEELAFVITGDINAMWLRDSANQLQSYLSVLEPDAAPGEPDSIASLYRGVINLQARYILTAPYCNSFQPPPESGIPPAPNPAASDDAVTPSYDPAKVFECKYELDSLASFLQLSAAYYAATHDAAFFGNASTSPNWLPAVRAVLDAAKAMTDGTYADDGSVRVPAYTFTRRTTRATETLANDGLGSPARRTGMVRSAFRPSDDATLFPFLVPANMLFAQALLDASLIAAALGGKEGGGGNSDAAALADEMAAFSRSIREAVSKYGIVPVSSTGNGTGEGGGVETVYAYEVDGYGSAAFMDDANLPSLLGAPVYDYLARGDKVYQRTRARLLSPEGNPYFMTGSVINAIGGPHAGPGMAWPMASIVRILTSDDDDEIVKVLRELLSSTDGLGLIHESINSNDASQWTREW

SEQ ID NO: 1665 - protein, 493 aa, Myceliophthora thermophilia
AERCPDYSSYARSRHEPFSKGKHALSYMRPAAACRTFNSSTVETVVADMAEIISDPDLYRLFENTFPNTVDTAIRWRGHAADNPAEELAFVITGDINAMWLRDSANQLQSYLSVLEPDAAPGEPDSIASLYRGVINLQARYILTAPYCNSFQPPPESGIPPAPNPAASDDAVTPSYDPAKVFECKYELDSLASFLQLSAAYYAATHDAAFFGNASTSPNWLPAVRAVLDAAKAMTDGTYADDGSVRVPAYTFTRRTTRATETLANDGLGSPARRTGMVRSAFRPSDDATLFPFLVPANMLFAQALLDASLIAAALGGKEGGGGNSDAAALADEMAAFSRSIREAVSKYGIVPVSSTGNGTGEGGGVETVYAYEVDGYGSAAFMDDANLPSLLGAPVYDYLARGDKVYQRTRARLLSPEGNPYFMTGSVINAIGGPHAGPGMAWPMASIVRILTSDDDDEIVKVLRELLSSTDGLGLIHESINSNDASQWTREW

SEQ ID NO: 1666 - DNA, 372 bp, Myceliophthora thermophilia
atgcgtgccttaatgtctatgcttgtggcggtcctcgccgctcccctctcggtggtcgccgccccgacggggaatattatggccgctaggcaggcgcctgtggcaccgactccctgtgtcagacaggatccgcctcccacacaggaggagacggaggcccgatttaacgactttgtggaaaagtttgttgggcgttccaaaagcattgcaaaggcgtttgagtacattgccgaggactacattaaccataaccccttggcgcaaaacgggttcaagtccgcatgggatattttgagtccgttctgggactccagccctactacctatcttcgccacaccatcgacggttatttctctcccccctccctatag

SEQ ID NO: 1667 - protein, 123 aa, Myceliophthora thermophilia
MRALMSMLVAVLAAPLSVVAAPTGNIMAARQAPVAPTPCVRQDPPPTQEETEARFNDFVEKFVGRSKSIAKAFEYIAEDYINHNPLAQNGFKSAWDILSPFWDSSPTTYLRHTIDGYFSPPSL

SEQ ID NO: 1668 - protein, 103 aa, Myceliophthora thermophilia
APTGNIMAARQAPVAPTPCVRQDPPPTQEETEARFNDFVEKFVGRSKSIAKAFEYIAEDYINHNPLAQNGFKSAWDILSPFWDSSPTTYLRHTIDGYFSPPSL

SEQ ID NO: 1669 - DNA, 753 bp, Myceliophthora thermophilia
atggaacttcgcgccctttttttcgccctcctcgcggcgcagcctacggtgtgggcaaagcagatcttcacgaatcggggcactttggatggctggggcggtaaacaaaccgagcacaagggcgagatcaaagaagtcagcgatgtcttttacgaccagcctccggcgctggtcatgacgcagacgtacgacaagtcctacacgggccggtaccactccgaggtccgcgttttgaatgcctacaagcacggcgacacgcgcttttacggctttgccttccgcctcccgcccgactggcagtttgaaccagcgcagagctacgacctggcccaattcatcgcgccgttcgaccagtgcgactcgtacatgcccagtaccatgttctgggccgaaggcacaaagctcttcacccgcctgaaaaccgggagcgtctgcaatcagaagaccacgaaactgccgctgaacgtgacgcttactgccggcgaatggcacaaggtgatcatcgaggcacgctgggcgagcgactccacggggtacttccgactgtcgtatgacggggagcaggttgttgacgtgcagaacgtcgctaccaccgtctccgaagacgtcccgttccagttccgtgtcggcctgtatgccaatggttggcacgacgacaatgggatgaagggcactcaaggattccgccaggtgttttatgacaagattgcaatcgccacgaccgagaaagaggcagaccccgactcgtggtaa

SEQ ID NO: 1670 - protein, 250 aa, Myceliophthora thermophilia
MELRALFFALLAAQPTVWAKQIFTNRGTLDGWGGKQTEHKGEIKEVSDVFYDQPPALVMTQTYDKSYTGRYHSEVRVLNAYKHGDTRFYGFAFRLPPDWQFEPAQSYDLAQFIAPFDQCDSYMPSTMFWAEGTKLFTRLKTGSVCNQKTTKLPLNVTLTAGEWHKVIIEARWASDSTGYFRLSYDGEQVVDVQNVATTVSEDVPFQFRVGLYANGWHDDNGMKGTQGFRQVFYDKIAIATTEKEADPDSW

SEQ ID NO: 1671 - protein, 231 aa, Myceliophthora thermophilia
KQIFTNRGTLDGWGGKQTEHKGEIKEVSDVFYDQPPALVMTQTYDKSYTGRYHSEVRVLNAYKHGDTRFYGFAFRLPPDWQFEPAQSYDLAQFIAPFDQCDSYMPSTMFWAEGTKLFTRLKTGSVCNQKTTKLPLNVTLTAGEWHKVIIEARWASDSTGYFRLSYDGEQVVDVQNVATTVSEDVPFQFRVGLYANGWHDDNGMKGTQGFRQVFYDKIAIATTEKEADPDSW

SEQ ID NO: 1672 - DNA, 1005 bp, Myceliophthora thermophilia
atgaagtggctcgcactcagccttgccctcgccgggcactcccaggcggcgctgcgcttcgggtgctcgacggtgagcatccagcgcctcgatcccctcgtcgagccgggcaagatcccctcgtcgcacgtgcaccagatcgtgggcggcaacagcttcaacgccacgatggagggcgataggtccgagcacgccacctgcacgacctgcaccttctcggagaacttctccaactactggactgccgtcatgttcttcaagcacagcaacggctcgtacaagcgggtgcccctgatgcagaacacggccctgcccaacggcatcaacggcggcatgaccatctactacacccagcaggacttcttttccaacggcaaccagaagatcactgccttcaagcctggcttccgcatgacggtcggcagcccgacgaacacgggcgaccagggcaacccgggcttgcggttcgtctgcctgcaaaacaagggcacccgcttccccgaactccccaccttccctagccagccctgcccgggtggcatcatgacggtgcaccacttcccagcctgctgggacggcaagaacctcgactcgcccgaccaccagtcgcacatgtacaacacggtgcgcgaggccttcacgccggcgggcgcgtgtccggcgtcgcacccggtgcggatgccgcagctggcgttcgagaccctctgggacacgacgcagttcaacagcatgtggccggcggacgggtcgaacccgttcgtgctcagctacggcgacggcgtcggctacggcacccacgccgactacgtcttcggctggaagggcgacgccctgcagcgcgccatggactccaactgcatgttcaacgcgtgcgagaacggaaacccgctccagagccagagcgtccagcagatgaacgcgtgcactgtcaagagccaggtgaccgaggagctcgatggctggctggatcatctccccggtcaggagaacatgggcaacatgtaa

SEQ ID NO: 1673 - protein, 334 aa, Myceliophthora thermophilia
MKWLALSLALAGHSQAALRFGCSTVSIQRLDPLVEPGKIPSSHVHQIVGGNSFNATMEGDRSEHATCTTCTFSENFSNYWTAVMFFKHSNGSYKRVPLMQNTALPNGINGGMTIYYTQQDFFSNGNQKITAFKPGFRMTVGSPTNTGDQGNPGLRFVCLQNKGTRFPELPTFPSQPCPGGIMTVHHFPACWDGKNLDSPDHQSHMYNTVREAFTPAGACPASHPVRMPQLAFETLWDTTQFNSMWPADGSNPFVLSYGDGVGYGTHADYVFGWKGDALQRAMDSNCMFNACENGNPLQSQSVQQMNACTVKSQVTEELDGWLDHLPGQENMGNM

SEQ ID NO: 1674 - protein, 318 aa, Myceliophthora thermophilia
ALRFGCSTVSIQRLDPLVEPGKIPSSHVHQIVGGNSFNATMEGDRSEHATCTTCTFSENFSNYWTAVMFFKHSNGSYKRVPLMQNTALPNGINGGMTIYYTQQDFFSNGNQKITAFKPGFRMTVGSPTNTGDQGNPGLRFVCLQNKGTRFPELPTFPSQPCPGGIMTVHHFPACWDGKNLDSPDHQSHMYNTVREAFTPAGACPASHPVRMPQLAFETLWDTTQFNSMWPADGSNPFVLSYGDGVGYGTHADYVFGWKGDALQRAMDSNCMFNACENGNPLQSQSVQQMNACTVKSQVTEELDGWLDHLPGQENMGNM

SEQ ID NO: 1675 - DNA, 654 bp, Myceliophthora thermophilia
atgcgttccatcgcgttcctccttcccgcgctcgtcgccgccggccccatcggtccggtcgttggcaatgatggctgggccgatgctccggaccccaaggagatccagatcgtctcggccagcttctctggcaacggatgcccccagggaaccgtgtccaccagcatctcccccgacaagaccgtcatcactttcggcttcgacgcgttccagacctacatcgggcctggcttcaaccccactgagaggagcaagaactgccagctccacttgaacctccagtaccccagcggcttccagtttgccgtgctcgagagcacgtaccacggctacgcacagctcgagacgggcgtgacgggcaccttctacagcacgtactacttcagccaggacgcgtcggccacgacgacgacgcagacgtccatcacgggcggcggcatctgggagcagggccaggtgtacaccaagacggaccagatcccgacggccagctacatcttctcgccgtgcggcgccaatggcatcctcaacatcaacaaccgcattgccctcaccagcaccaactcgtccgccatcggcctcatcactgacgacgatgccaccgttgccctcactcagcagatcaacatcgcgtggcgctcgtgcggcaactaa

SEQ ID NO: 1676 - protein, 217 aa, Myceliophthora thermophilia
MRSIAFLLPALVAAGPIGPVVGNDGWADAPDPKEIQIVSASFSGNGCPQGTVSTSISPDKTVITFGFDAFQTYIGPGFNPTERSKNCQLHLNLQYPSGFQFAVLESTYHGYAQLETGVTGTFYSTYYFSQDASATTTTQTSITGGGIWEQGQVYTKTDQIPTASYIFSPCGANGILNINNRIALTSTNSSAIGLITDDDATVALTQQINIAWRSCGN

SEQ ID NO: 1677 - protein, 195 aa, Myceliophthora thermophilia
NDGWADAPDPKEIQIVSASFSGNGCPQGTVSTSISPDKTVITFGFDAFQTYIGPGFNPTERSKNCQLHLNLQYPSGFQFAVLESTYHGYAQLETGVTGTFYSTYYFSQDASATTTTQTSITGGGIWEQGQVYTKTDQIPTASYIFSPCGANGILNINNRIALTSTNSSAIGLITDDDATVALTQQINIAWRSCGN

SEQ ID NO: 1678 - DNA, 696 bp, Myceliophthora thermophilia
atgaggttcgccgccctccttactggcttccttgccgcggcgcaagccgaaaagaactacttcttccgctactctggcggcaacgacattatcgaccaccagcgcctgcgcagcaacatttcgattcagcacacctccccgggtgtgaccctgccgccgtacaatccaaaggaccactttatgcgcctctatcccaacgcgacggcccacccgccggccgttgcgctggtgatagtgcccaccaacccacacccgccgccggtgccgggctactacgggctgagcgaccgcgagggcgtgccggacgcgtaccggctcgtctattcgtaccgcctggacgaggagggtcccgggttcaagtacgccgggtggcggctgcggccggccggccccggcagcgagccgggcacactgcggctgcggtatcccatcggcgaggggcgtgccgcggcgggcgaggaggaggaggaggaggaggaagaggagggaaagggcgggcacggcaagtggaggtggatcgcggtcaaggagaaggatggcgatggcgactatgacaagtgggtgccctggtacgtcaagcggtgtgccgcaaacggtgccgtgttggctacctgggactacgtaaatgtcgatctggaactggtagaggccaagggcgctgtcaactcgagcgcgcctggcggcgtgaacgagtaa

SEQ ID NO: 1679 - protein, 231 aa, Myceliophthora thermophilia
MRFAALLTGFLAAAQAEKNYFFRYSGGNDIIDHQRLRSNISIQHTSPGVTLPPYNPKDHFMRLYPNATAHPPAVALVIVPTNPHPPPVPGYYGLSDREGVPDAYRLVYSYRLDEEGPGFKYAGWRLRPAGPGSEPGTLRLRYPIGEGRAAAGEEEEEEEEEEGKGGHGKWRWIAVKEKDGDGDYDKWVPWYVKRCAANGAVLATWDYVNVDLELVEAKGAVNSSAPGGVNE

SEQ ID NO: 1680 - protein, 215 aa, Myceliophthora thermophilia
EKNYFFRYSGGNDIIDHQRLRSNISIQHTSPGVTLPPYNPKDHFMRLYPNATAHPPAVALVIVPTNPHPPPVPGYYGLSDREGVPDAYRLVYSYRLDEEGPGFKYAGWRLRPAGPGSEPGTLRLRYPIGEGRAAAGEEEEEEEEEEGKGGHGKWRWIAVKEKDGDGDYDKWVPWYVKRCAANGAVLATWDYVNVDLELVEAKGAVNSSAPGGVNE

SEQ ID NO: 1681 - DNA, 1284 bp, Myceliophthora thermophilia
atggccccattattttgttattctgtcaagacatcggccgcactctgcgccgcgcttctcgtccgagccgccgaagcgacagatggtgccacccgtcgaccagccgagctcgctcagcagcccatgtttggaacccactgcctcccggggccgttccaactcgacgcttatccgacttgcgtgaccgcggcagacgaaggcgatagaccttgggcgccttggacgtctcgtccatactgcgccgacaacaccagctactgcgtcttcaccaactcgcattttcggggcccaaaccggggcgtgagcattattgacgtgcggccgtccggctcggacaatcatgccgcttcggcacttacctccatcgccgaattcctttcgtcacttgccgcttctcctggctcgcgcgccgacgaaccgccatccccgttcgaggtgcgagatatcccgcgaaaagggaaaggactcgtcgccacgcgcaagatcccgcgcggccacagcttcatggtcgactatgccgccatcgtagcagatgcccaactcccacgccttgttcggcgggcccaaggactgcagctcctgaaggaagccgtcgagaggttgccaggggcagatgaggttttgggtctggcaaggagcagctctgaccctgataacgtgcccgtggtcgaggacgtcataaggaccaactccttcactgtggaaatcgccggcaaagactatatggccctgtttccaaggatcgctttaaaaactggcattattaattatgcgcactatccgcagagaatgaaccacgcttgcaagccaagcgccataacccgctttaatgccacgacgctctccaacaccgccattgccttccgcgacatcctgcccggcgaagagatcaccatcagctactccacattcggcctgccttctgaagcccgccaaaagaagctcctgtccacgtggggcttcaactacacgtgtgacctgtgctctcttcccccagacgagatagccgcctccgatgagaggcggacccggatctcgcggctgagtcaagaggtcatcgagctggtggagcgcggcggccaggagaacatggagaaggcggtcggtctttacgccgaagcggtggacgctgtgagggaggaggggctggtcccgcatctgggcgggcattatcaggttttgggacagctgtgggctgctgcgggggatgtcgagaaaggacgggagtggatgaaacgcgggaggcaagagaccgccgcgtttgaggagccaaaggaggcctga

SEQ ID NO: 1682 - protein, 427 aa, Myceliophthora thermophilia
MAPLFCYSVKTSAALCAALLVRAAEATDGATRRPAELAQQPMFGTHCLPGPFQLDAYPTCVTAADEGDRPWAPWTSRPYCADNTSYCVFTNSHFRGPNRGVSIIDVRPSGSDNHAASALTSIAEFLSSLAASPGSRADEPPSPFEVRDIPRKGKGLVATRKIPRGHSFMVDYAAIVADAQLPRLVRRAQGLQLLKEAVERLPGADEVLGLARSSSDPDNVPVVEDVIRTNSFTVEIAGKDYMALFPRIALKTGIINYAHYPQRMNHACKPSAITRFNATTLSNTAIAFRDILPGEEITISYSTFGLPSEARQKKLLSTWGFNYTCDLCSLPPDEIAASDERRTRISRLSQEVIELVERGGQENMEKAVGLYAEAVDAVREEGLVPHLGGHYQVLGQLWAAAGDVEKGREWMKRGRQETAAFEEPKEA

SEQ ID NO: 1683 - protein, 401 aa, Myceliophthora thermophilia
TDGATRRPAELAQQPMFGTHCLPGPFQLDAYPTCVTAADEGDRPWAPWTSRPYCADNTSYCVFTNSHFRGPNRGVSIIDVRPSGSDNHAASALTSIAEFLSSLAASPGSRADEPPSPFEVRDIPRKGKGLVATRKIPRGHSFMVDYAAIVADAQLPRLVRRAQGLQLLKEAVERLPGADEVLGLARSSSDPDNVPVVEDVIRTNSFTVEIAGKDYMALFPRIALKTGIINYAHYPQRMNHACKPSAITRFNATTLSNTAIAFRDILPGEEITISYSTFGLPSEARQKKLLSTWGFNYTCDLCSLPPDEIAASDERRTRISRLSQEVIELVERGGQENMEKAVGLYAEAVDAVREEGLVPHLGGHYQVLGQLWAAAGDVEKGREWMKRGRQETAAFEEPKEA

SEQ ID NO: 1684 - DNA, 2157 bp, Myceliophthora thermophilia
atgcgcgtattcgacgtgacatttttgtttggcgtggccgcgctggtcgttgcccagtcgccaactgtggatgacgacgaggagccgccgaaggaaaccacatacttcaacggaaaagaggtcccgccgatgctcgagctgacaccgagcaactgggacaaagagctgaaggcgtccaagtacttgatggtcaagcattacagcccgtactgcccgcattgtatcgattatgctccgacgttccagacgttgtacgagttctactacacctcatctcccgccggaaacgcgcccaaggatgccagttttaccgacttctatgatttccgatttgccgacgtgaactgcgtcgcatacaacgacctttgcaccaagaacaaagtatcgtcatggccgactaccatcctatacgaggacggcgagcctatcgtgaccttcaagggtgtcaaggccatgaaggtgttaagcagtgcaatcgaggatgcgcttgagaaggctaagccgggaacgcgtccttccgcgatcgagctgccggaacccggcgccaagtcatatcccccatccaacgacgcagcggttgacaagccggaccctgaagggaaacgcacacctgcaaatccaaaagaccaaccggataaaggggcggctcctgcgtcgacgtcgcttgcgtcagagccagcgaccccatcagagtcaacgagccccaaatacctcgtggttccgtttgacccgccccctcaggttgtggtgaagccgacgaccacgcctaaccccaatggtgaatcggttcccctgacggccgagactttccagaacttggtgaccacgacgcacgatccttggttcatcaagttctacgctccttggtgtcaccactgcctgaaggtcaaaccaacctgggatgaacttgcgaaagaggtcaagggcaggctcaacattggcgaggtcaactgcgacgccgaatcccggttgtgcaaggatgtcggcgtcaggggttaccccaccttcctgttcttcaggtccggcgagcatgtcgagtaccagggccttcgcggcctgggcgaccttatccagttcgccgagcaggcaatcgagctggcgagtggcgtccaagacgtcgacgccgactcgttcaaggccctcgaggagaaggagaaagtcatcttcctctacttctacgatcacgccgccacgtccgaggacttcatcgctctcgagcgtctgccgctgaacctgataggccgtgctaaactggtcaagacgcgcgacgtcaggctgtatgagcggttcaagatcactacgtggccgcgactgctcgtctcgcgtgaggggcgtcctacatactacccgccgctcaccccgagggacatgcgcgagacgcatttattgatgaactggatcaggtccgtgtggttaccgttggtgccggagctgacggcctcgaacgcgcgcgagatcatggacggcaagattgtcgttcttggcatcctcaaccgggaaaacgacgagtcgtttcagagcgcgctccgtgagatgaagagcgccgccaacgagtggatggacaagcaaatccagctcttccagctcgagcggcaggagttgcgcgacgccaagcagctgcggatcgaggaagccgaggaccgcggcgacgagcgggcggctcgcaatgctaagaacatccggatcaacatggacaggtcggaccgcaaggaggttacttttgcgtgggtcgacggcgtcttctggcagcggtggatccgcactacatacggcattgatgtaaaggatggcgagagagtcattatcaacgacgaggataaccgccgttactgggaccaaaccagcaccggcaaccccatcgtcccgtcgcgcacctcaatcctggagaccatcaacaaggtcacggccaatccggccaagatcaagccgaagctcaccatcggcttcttcgagaagctcatctttgacgtcaagaccagcttcaaggagcacccgttcctcagctcgggctgcgtcctcggcattgcctttggctgtctctcgtggttacgcggcgggataaggagatcgagggccggccactttaagctcgacgacgctcctagcaacagggcgccgcttctggggctgtcctccgacggcaacaaggtggactag

SEQ ID NO: 1685 - protein, 718 aa, Myceliophthora thermophilia
MRVFDVTFLFGVAALVVAQSPTVDDDEEPPKETTYFNGKEVPPMLELTPSNWDKELKASKYLMVKHYSPYCPHCIDYAPTFQTLYEFYYTSSPAGNAPKDASFTDFYDFRFADVNCVAYNDLCTKNKVSSWPTTILYEDGEPIVTFKGVKAMKVLSSAIEDALEKAKPGTRPSAIELPEPGAKSYPPSNDAAVDKPDPEGKRTPANPKDQPDKGAAPASTSLASEPATPSESTSPKYLVVPFDPPPQVVVKPTTTPNPNGESVPLTAETFQNLVTTTHDPWFIKFYAPWCHHCLKVKPTWDELAKEVKGRLNIGEVNCDAESRLCKDVGVRGYPTFLFFRSGEHVEYQGLRGLGDLIQFAEQAIELASGVQDVDADSFKALEEKEKVIFLYFYDHAATSEDFIALERLPLNLIGRAKLVKTRDVRLYERFKITTWPRLLVSREGRPTYYPPLTPRDMRETHLLMNWIRSVWLPLVPELTASNAREIMDGKIVVLGILNRENDESFQSALREMKSAANEWMDKQIQLFQLERQELRDAKQLRIEEAEDRGDERAARNAKNIRINMDRSDRKEVTFAWVDGVFWQRWIRTTYGIDVKDGERVIINDEDNRRYWDQTSTGNPIVPSRTSILETINKVTANPAKIKPKLTIGFFEKLIFDVKTSFKEHPFLSSGCVLGIAFGCLSWLRGGIRRSRAGHFKLDDAPSNRAPLLGLSSDGNKVD

SEQ ID NO: 1686 - protein, 700 aa, Myceliophthora thermophilia
QSPTVDDDEEPPKETTYFNGKEVPPMLELTPSNWDKELKASKYLMVKHYSPYCPHCIDYAPTFQTLYEFYYTSSPAGNAPKDASFTDFYDFRFADVNCVAYNDLCTKNKVSSWPTTILYEDGEPIVTFKGVKAMKVLSSAIEDALEKAKPGTRPSAIELPEPGAKSYPPSNDAAVDKPDPEGKRTPANPKDQPDKGAAPASTSLASEPATPSESTSPKYLVVPFDPPPQVVVKPTTTPNPNGESVPLTAETFQNLVTTTHDPWFIKFYAPWCHHCLKVKPTWDELAKEVKGRLNIGEVNCDAESRLCKDVGVRGYPTFLFFRSGEHVEYQGLRGLGDLIQFAEQAIELASGVQDVDADSFKALEEKEKVIFLYFYDHAATSEDFIALERLPLNLIGRAKLVKTRDVRLYERFKITTWPRLLVSREGRPTYYPPLTPRDMRETHLLMNWIRSVWLPLVPELTASNAREIMDGKIVVLGILNRENDESFQSALREMKSAANEWMDKQIQLFQLERQELRDAKQLRIEEAEDRGDERAARNAKNIRINMDRSDRKEVTFAWVDGVFWQRWIRTTYGIDVKDGERVIINDEDNRRYWDQTSTGNPIVPSRTSILETINKVTANPAKIKPKLTIGFFEKLIFDVKTSFKEHPFLSSGCVLGIAFGCLSWLRGGIRRSRAGHFKLDDAPSNRAPLLGLSSDGNKVD

SEQ ID NO: 1687 - DNA, 1503 bp, Myceliophthora thermophilia
atgcaccaccccaccctctgcgctgtagcagtcgccctgctgtccgcgctccctggggtgcaggcaggtctctacaccaagaaatcaccggtgttgcaagtggatgccaaggactacgataggctgatcaacaagagcaactacacttctatcgtcgagttttatgctccatggtgcgggcactgccagaacctcaagccggcttacgaaaaagtggccaagaacctcgagggtcttgccaaggttgccgccgtgaactgcgacgatgacgcgaacaagcccctctgcgggtctatgggcgtccaaggcttcccgacgctgaagattgtgcggccaaagaagggtggaggcaagccaatcgtccaagattaccaaggccagcggacagcgagcgctatcgtcgacgccgtcgtccagcatatcaacaattacgtggttaaggtggaagacaagtcgctggacaatttcttagccgacaaggagaagcccaaggcccttctcttcaccgaaaagggtactacatcggcactgctcaagagcatcgccatcgacttcttggatgtcatcaccatcggccaggtgcgaaacaaggaaaccaagacggtcgagacgttcggcatcgagaagttccctactctggtgctcctccccggcggcgatgccccgcacattgtctacgacggagaaatgaagaaagaggcgatggtccagttcctctcacaggccgggcaaccaaaccccgagtcgccacccaagagtaacaacaagaaggacaaggagaacgagactagcaaggcatcggagaagtcaaagtccacttcgacttcgtccaaagcctcgtccgccactgctgggtcggagacggaaacagcaacacaggaagccccggtcattgtcgagaccgcactgccgattccttctattaactcgccggagaagctgatcaaggagtgcttgacagagaagtctcacacctgcgtgttggcctttacctcctcaagcgaggatgaaaaggccaagaaggctctcgagagtctctcgcagttggccttcaagtacgctcagggcaagcgcaacctgtttcccttctacgaggttcccaagagcaacgaaggcgcagcaaacctcctgagggcacttgacctcatcggcgacgtcgaactcgtcgccgtcaacgcccgacgcggatggtggaggcactatgacgcggccgactttggcatcgagagcgttgagagctggatcgacgcgattcgcatgagcgagggggtgaagaagaagctgcccgagggcatcgttgccattgcggtggaggagcctacgtcagccgccccagaggcgtcgtcagaggctcccgatgctacggaggccgccaacagcgaggaggccaccccggtcacccctgaggctagcggcgaggcggcgagcgactctcctgaggctgagccaacccaggccgctgactccactgcggagcccgaaacggctcacgatgagctttga

SEQ ID NO: 1688 - protein, 500 aa, Myceliophthora thermophilia
MHHPTLCAVAVALLSALPGVQAGLYTKKSPVLQVDAKDYDRLINKSNYTSIVEFYAPWCGHCQNLKPAYEKVAKNLEGLAKVAAVNCDDDANKPLCGSMGVQGFPTLKIVRPKKGGGKPIVQDYQGQRTASAIVDAVVQHINNYVVKVEDKSLDNFLADKEKPKALLFTEKGTTSALLKSIAIDFLDVITIGQVRNKETKTVETFGIEKFPTLVLLPGGDAPHIVYDGEMKKEAMVQFLSQAGQPNPESPPKSNNKKDKENETSKASEKSKSTSTSSKASSATAGSETETATQEAPVIVETALPIPSINSPEKLIKECLTEKSHTCVLAFTSSSEDEKAKKALESLSQLAFKYAQGKRNLFPFYEVPKSNEGAANLLRALDLIGDVELVAVNARRGWWRHYDAADFGIESVESWIDAIRMSEGVKKKLPEGIVAIAVEEPTSAAPEASSEAPDATEAANSEEATPVTPEASGEAASDSPEAEPTQAADSTAEPETAHDEL

SEQ ID NO: 1689 - protein, 478 aa, Myceliophthora thermophilia
GLYTKKSPVLQVDAKDYDRLINKSNYTSIVEFYAPWCGHCQNLKPAYEKVAKNLEGLAKVAAVNCDDDANKPLCGSMGVQGFPTLKIVRPKKGGGKPIVQDYQGQRTASAIVDAVVQHINNYVVKVEDKSLDNFLADKEKPKALLFTEKGTTSALLKSIAIDFLDVITIGQVRNKETKTVETFGIEKFPTLVLLPGGDAPHIVYDGEMKKEAMVQFLSQAGQPNPESPPKSNNKKDKENETSKASEKSKSTSTSSKASSATAGSETETATQEAPVIVETALPIPSINSPEKLIKECLTEKSHTCVLAFTSSSEDEKAKKALESLSQLAFKYAQGKRNLFPFYEVPKSNEGAANLLRALDLIGDVELVAVNARRGWWRHYDAADFGIESVESWIDAIRMSEGVKKKLPEGIVAIAVEEPTSAAPEASSEAPDATEAANSEEATPVTPEASGEAASDSPEAEPTQAADSTAEPETAHDEL

SEQ ID NO: 1690 - DNA, 810 bp, Myceliophthora thermophilia
atgttcagcgtcaagcacctctttctcgccgcctccgtgatggtgggcgcgggcgtcatgttcgcgcagccagttgcggccgcgaagggtcctaagatcacccacaaggtctacttcgacattgagcacggtgacgaacctctggggcgcattgtcctgggtctgtatggcaagaccgtccctaagacggtcgaaaacttccgcgccctggctacgggcgagaagggcttcggctacgagggttccacctttcaccgtgtcatcaagaattttatgatccagggtggtgatttcaccaacggtgacggtaccggtggcaagtcgatctacggcaacaagttcgaggacgagaacttcaagctcaagcactccaagaagggcatcctctccatggccaacgcgggcaaagacaccaacggctcccagttcttcatcactaccgttgtcacctcttggctcgatggccgtcatgtcgtctttggcgaggtcctcgagggctacgacgtcgtggagaagatcgagaatgtcgagaccaagccgggcgacaagccggtcaagaccgtcaagatcgtcaagagtggcgagttggaggttcctccggaagacatcgatgggcatgaaggcgggccaaatgtggcgtccggcgcagacgagccagcaactggtgctgctggcgagattgaagatgactggtctttcctggtcaagatggctctcatgggagtcgccgtggcggtcattgcggcctggctgcggttctcgaggggccaaaatcgtgacatggttggttttgagaagaatcgtgcataa

SEQ ID NO: 1691 - protein, 269 aa, Myceliophthora thermophilia
MFSVKHLFLAASVMVGAGVMFAQPVAAAKGPKITHKVYFDIEHGDEPLGRIVLGLYGKTVPKTVENFRALATGEKGFGYEGSTFHRVIKNFMIQGGDFTNGDGTGGKSIYGNKFEDENFKLKHSKKGILSMANAGKDTNGSQFFITTVVTSWLDGRHVVFGEVLEGYDVVEKIENVETKPGDKPVKTVKIVKSGELEVPPEDIDGHEGGPNVASGADEPATGAAGEIEDDWSFLVKMALMGVAVAVIAAWLRFSRGQNRDMVGFEKNRA

SEQ ID NO: 1692 - protein, 242 aa, Myceliophthora thermophilia
AKGPKITHKVYFDIEHGDEPLGRIVLGLYGKTVPKTVENFRALATGEKGFGYEGSTFHRVIKNFMIQGGDFTNGDGTGGKSIYGNKFEDENFKLKHSKKGILSMANAGKDTNGSQFFITTVVTSWLDGRHVVFGEVLEGYDVVEKIENVETKPGDKPVKTVKIVKSGELEVPPEDIDGHEGGPNVASGADEPATGAAGEIEDDWSFLVKMALMGVAVAVIAAWLRFSRGQNRDMVGFEKNRA

SEQ ID NO: 1693 - DNA, 558 bp, Myceliophthora thermophilia
atgcaacacgtcctcttgtcatttttcctgctcgcctcggctgctgttggcgccctggcctctgatgagctgaagattgacgtgacgctccctgttgagtgcgagaggaaaacccaaaagggagacagaatcagtgttcattatcgcggcactctccaatccaatggccagaaattcgatgctagctacgaccgcggatcgcctttcagcttcaagctgggggccgggatggtgattagaggctgggacgagggcttgcttgatatgtgcatcggcgaaaaacggaccctcaccattgctccgagctacggctatggagatcgaagcgtcggtcccatcccagcaggctctaccttagttttcgagactgagttgatgggaatcgagggtgttccccaacctgagtcgattgttacgaagcccgccgctgatagccctgcgtcctcgtctagccaaaaggtggccgagaaggttgcaggcgcagtgagcggagccgcggaggccatcaagaccgtggttgccggtaccgatgatgttcaagagcacaatgaactctaa

SEQ ID NO: 1694 - protein, 185 aa, Myceliophthora thermophilia
MQHVLLSFFLLASAAVGALASDELKIDVTLPVECERKTQKGDRISVHYRGTLQSNGQKFDASYDRGSPFSFKLGAGMVIRGWDEGLLDMCIGEKRTLTIAPSYGYGDRSVGPIPAGSTLVFETELMGIEGVPQPESIVTKPAADSPASSSSQKVAEKVAGAVSGAAEAIKTVVAGTDDVQEHNEL

SEQ ID NO: 1695 - protein, 165 aa, Myceliophthora thermophilia
SDELKIDVTLPVECERKTQKGDRISVHYRGTLQSNGQKFDASYDRGSPFSFKLGAGMVIRGWDEGLLDMCIGEKRTLTIAPSYGYGDRSVGPIPAGSTLVFETELMGIEGVPQPESIVTKPAADSPASSSSQKVAEKVAGAVSGAAEAIKTVVAGTDDVQEHNEL

SEQ ID NO: 1696 - DNA, 1326 bp, Myceliophthora thermophilia
atgcgcctcttgctctcgctctacggagcagccctgtttctgaagggggcgctggctactcctccacacaccccgcatggcgagagcccggatgaggatggaaaatactggatctacggcgagggaatcgcggccgccttcatcccgtacggcgcttccattaccaacctcattattgacgacaagaatggtatcccccgtgacctcgtgatgggcttcgacaaggccagcgactaccccaaggataaatcgcacccccaccttggcggcgtccctggccgctatgcgaaccggatcaagaacagcaccttcgagattgacggcaagacttaccgcgtcacggccaatgagaatcccacccgcaagcaccccgacgggctcgacaccctccacggcggcgtggaagggtgggactggcgagactttgacgtggtctcgcacaccgacgagtccatcaccttctccattgttgaccccgacggcaaggaaggcttccccggcgaggtcatctcgtacatcacttacacgatgggcaacttgacctgggacgccaagatggtggccatcgccacgaccaagaagacgcccatcatgctgagcagccacacgtactggaacctggacggctttgccaatgacgagaccgacaccatctttgaccacacactccaccttccgtacagtggccagaggatcgacgtcgacaacattctgattccgaccggcaagatcctgcccaaccccgagggctctgtcaacgacttttggagcgcccccaagcagatcggcgacggcttcaaagacccggagatccacggcaactgcggcttcgactgcactggctacggtacgccctatcctttcccctccttttcctcccttgcactactagtgcacaccgagcacaccgcactaacactcgccatttcagacaactgctggctcgtcaaccggccgggcccgcacgactggcgcgccgacggagcctacgtcgccagcctgtactcggcctggtccggcatcaggctcgacatttactccgaccaggatgccttccagatgtactcttgcaatggccaggacggcacgttcccgctcaagtcgacccagggcgtcgatgggcgcaacgccgacaagcgccacccccacaaaccagcccagactgtgccgcagtatggctgcgtcgtcctggaggtggaggactacatcgacgggatcaaccaccccgagtggggccggctggggaagcaggtatttgggcccgggagcgatccgtacgtgctgcagattagccaccgcttctcagtagacacggacgacgcatga

SEQ ID NO: 1697 - protein, 441 aa, Myceliophthora thermophilia
MRLLLSLYGAALFLKGALATPPHTPHGESPDEDGKYWIYGEGIAAAFIPYGASITNLIIDDKNGIPRDLVMGFDKASDYPKDKSHPHLGGVPGRYANRIKNSTFEIDGKTYRVTANENPTRKHPDGLDTLHGGVEGWDWRDFDVVSHTDESITFSIVDPDGKEGFPGEVISYITYTMGNLTWDAKMVAIATTKKTPIMLSSHTYWNLDGFANDETDTIFDHTLHLPYSGQRIDVDNILIPTGKILPNPEGSVNDFWSAPKQIGDGFKDPEIHGNCGFDCTGYGTPYPFPSFSSLALLVHTEHTALTLAISDNCWLVNRPGPHDWRADGAYVASLYSAWSGIRLDIYSDQDAFQMYSCNGQDGTFPLKSTQGVDGRNADKRHPHKPAQTVPQYGCVVLEVEDYIDGINHPEWGRLGKQVFGPGSDPYVLQISHRFSVDTDDA

SEQ ID NO: 1698 - protein, 422 aa, Myceliophthora thermophilia
TPPHTPHGESPDEDGKYWIYGEGIAAAFIPYGASITNLIIDDKNGIPRDLVMGFDKASDYPKDKSHPHLGGVPGRYANRIKNSTFEIDGKTYRVTANENPTRKHPDGLDTLHGGVEGWDWRDFDVVSHTDESITFSIVDPDGKEGFPGEVISYITYTMGNLTWDAKMVAIATTKKTPIMLSSHTYWNLDGFANDETDTIFDHTLHLPYSGQRIDVDNILIPTGKILPNPEGSVNDFWSAPKQIGDGFKDPEIHGNCGFDCTGYGTPYPFPSFSSLALLVHTEHTALTLAISDNCWLVNRPGPHDWRADGAYVASLYSAWSGIRLDIYSDQDAFQMYSCNGQDGTFPLKSTQGVDGRNADKRHPHKPAQTVPQYGCVVLEVEDYIDGINHPEWGRLGKQVFGPGSDPYVLQISHRFSVDTDDA

SEQ ID NO: 1699 - DNA, 2643 bp, Myceliophthora thermophilia
atgccccagctgccacgcgaaaatgcgcgcctctggttcttcctcttcctcgtcctggtgacgctcatgtcacgaaatgacgctcccggcctgatcgcagctcccttcttcggcgcgccccgcctcggccgcctatgggccgcccacagcatcttgaacagcaccgagtggggcgacttctctccgggggcagcaaaggatggtgctcccccgtgggaggcaccgcgctatctcaacttgacgggattccgggagacggacggctatgtgtggggtgatctcgactacttcaaggatcggtgccggcaatggagtcgccatgcctatccgccgccgaaaggggctggcgattgggcgcacggtcatgtgtggaagacttggcagaacgccacgggcaccgtgcagggcaaatgggtgcggaggccgggctcggtgaccaagcacgcgaggagctataacctgagcgcgatagcgccgggggtacactgggttgacgacgatgatgcgtggggctggaacgtgaccggctcgcatgggaccatcctgttgcggctgtcagaagatgccagcgaccccgtgtatgaggagaaagaaggcgacgacaaacggcggtcctcagggcgcatggcgcgatcgatctcggtcgaggccacaatccaagacgaagaccactcggcgtccagctttgtcgtgaagctctacggtgttcactggccgagacagggatcgatcctcctcaccacgacaaccgagaagttttctggcattttcggtctgcctcacctcgcccccagcccagagttctatcgctcgggccagatgttgctgaaccgaacagtgggtgaggtcttgagcaggaaagagcaaagcaggttcgccgacgcgagcaacccatggacgcccttggttgaggaggaagtctctgttccagtgccgcgctgcgagtacgtcatgtacctgcagctacacccactcgaccctcgcttcataggaaaggacggggttgacaacaagttcgtccctctgatagaccagatggagagagagcttcggttcccaaccggagcaccctcgagaggcaaggcggagttgcgtatgtcgctcgtcgcctggtctccggactgcgggtattacctcgagtccaagggcccgccgctctttccgtcggtggagggaaaccacctggttggggtaaagtcagaggtgctgctttcacggacgaaatcctggatgttcgcgttcgctgctgttttgatggcgcagctgtggctgttgaaggtgcagatgagggagtccaacacgccctctaccctggcgcgtatcagcttccacacggtggccgtgatgctcctggcagatgggctaatctttgcgtgctcgacaacctggagcctctccgcgtccaacacgttcctcccctcgctcatactcacctttgccgccttcatgtccatgacacttggggcagggttcttgtccgagatatacaagcaccaagaaccagaacgcaggcgcgagcaggcccgagccgctgataccgccagcccgcgaacaaccccagccgccccggcgtcgaccaccgcaacaaccccgggcaccgtcccccctccggcgcccaacaccgcaacccggcctccgtcgccgcccatcatcatcccttccgaccaagacatcgacgcggaaatagccgagaacacagccaggggcgccgctgcactccccaccccggccactgctacaaccacagcggccggcccgttccaagccccggatgtaggcaccttcgcctcgataacaggcgtcttcgttctcgtgggaatcgccatcctcctcctcatagccgtgtccctctcctggccgccccgtgcccgctcgctcttcttccacttcctcgcctttgcctacctgtccctctggatcccgcagatccggcgcaacgtctggcgcaacagccgtcgggccttttcctggcggttcattgtcggtcagtcggtcctgcggctggcgccgtttgcgtatttttacctgagggaggacaacatcctgttcgtggagacagacgtgacggcgtttctggtgctggtcgggtgggtgtggtgccagctcgtggcgctggccgtgcaggacgtgctggggccgaggttcgggctgccgaagagctggatgcccgaagtctgggagtatcacccggtgctgagggagagtgatgtggaggcgggaggcttgccgatcgggttggtcgcttcattgtcatcgccgtacggtggtgaagaaggggacgggagcgggagcgcggcgggttcgcccgttgtcacgacggcggggaggacgaggagctggtctgccggatcgtcgtcgggcgaggttggggcgcagaggagggagagggccaaggagctggagaggcatggtatgatgctgagggagattgattgcgcgatttgcaccgaggtgttggaggtgcctgttgtgcgagccaatgcgagggatccgtcggcggcaggcggtctgtccggggtcctcgcgagacgggcgtacatggtcacgccgtgtcggcatatcttccataccaagtgtctggagggttggttccggtacaagctgcagtgcccgatctgtcgggaggagctgccaccactctga

SEQ ID NO: 1700 - protein, 880 aa, Myceliophthora thermophilia
MPQLPRENARLWFFLFLVLVTLMSRNDAPGLIAAPFFGAPRLGRLWAAHSILNSTEWGDFSPGAAKDGAPPWEAPRYLNLTGFRETDGYVWGDLDYFKDRCRQWSRHAYPPPKGAGDWAHGHVWKTWQNATGTVQGKWVRRPGSVTKHARSYNLSAIAPGVHWVDDDDAWGWNVTGSHGTILLRLSEDASDPVYEEKEGDDKRRSSGRMARSISVEATIQDEDHSASSFVVKLYGVHWPRQGSILLTTTTEKFSGIFGLPHLAPSPEFYRSGQMLLNRTVGEVLSRKEQSRFADASNPWTPLVEEEVSVPVPRCEYVMYLQLHPLDPRFIGKDGVDNKFVPLIDQMERELRFPTGAPSRGKAELRMSLVAWSPDCGYYLESKGPPLFPSVEGNHLVGVKSEVLLSRTKSWMFAFAAVLMAQLWLLKVQMRESNTPSTLARISFHTVAVMLLADGLIFACSTTWSLSASNTFLPSLILTFAAFMSMTLGAGFLSEIYKHQEPERRREQARAADTASPRTTPAAPASTTATTPGTVPPPAPNTATRPPSPPIIIPSDQDIDAEIAENTARGAAALPTPATATTTAAGPFQAPDVGTFASITGVFVLVGIAILLLIAVSLSWPPRARSLFFHFLAFAYLSLWIPQIRRNVWRNSRRAFSWRFIVGQSVLRLAPFAYFYLREDNILFVETDVTAFLVLVGWVWCQLVALAVQDVLGPRFGLPKSWMPEVWEYHPVLRESDVEAGGLPIGLVASLSSPYGGEEGDGSGSAAGSPVVTTAGRTRSWSAGSSSGEVGAQRRERAKELERHGMMLREIDCAICTEVLEVPVVRANARDPSAAGGLSGVLARRAYMVTPCRHIFHTKCLEGWFRYKLQCPICREELPPL

SEQ ID NO: 1701 - protein, 856 aa, Myceliophthora thermophilia
RNDAPGLIAAPFFGAPRLGRLWAAHSILNSTEWGDFSPGAAKDGAPPWEAPRYLNLTGFRETDGYVWGDLDYFKDRCRQWSRHAYPPPKGAGDWAHGHVWKTWQNATGTVQGKWVRRPGSVTKHARSYNLSAIAPGVHWVDDDDAWGWNVTGSHGTILLRLSEDASDPVYEEKEGDDKRRSSGRMARSISVEATIQDEDHSASSFVVKLYGVHWPRQGSILLTTTTEKFSGIFGLPHLAPSPEFYRSGQMLLNRTVGEVLSRKEQSRFADASNPWTPLVEEEVSVPVPRCEYVMYLQLHPLDPRFIGKDGVDNKFVPLIDQMERELRFPTGAPSRGKAELRMSLVAWSPDCGYYLESKGPPLFPSVEGNHLVGVKSEVLLSRTKSWMFAFAAVLMAQLWLLKVQMRESNTPSTLARISFHTVAVMLLADGLIFACSTTWSLSASNTFLPSLILTFAAFMSMTLGAGFLSEIYKHQEPERRREQARAADTASPRTTPAAPASTTATTPGTVPPPAPNTATRPPSPPIIIPSDQDIDAEIAENTARGAAALPTPATATTTAAGPFQAPDVGTFASITGVFVLVGIAILLLIAVSLSWPPRARSLFFHFLAFAYLSLWIPQIRRNVWRNSRRAFSWRFIVGQSVLRLAPFAYFYLREDNILFVETDVTAFLVLVGWVWCQLVALAVQDVLGPRFGLPKSWMPEVWEYHPVLRESDVEAGGLPIGLVASLSSPYGGEEGDGSGSAAGSPVVTTAGRTRSWSAGSSSGEVGAQRRERAKELERHGMMLREIDCAICTEVLEVPVVRANARDPSAAGGLSGVLARRAYMVTPCRHIFHTKCLEGWFRYKLQCPICREELPPL

SEQ ID NO: 1702 - DNA, 3153 bp, Myceliophthora thermophilia
atgtctttgagtatcgcttctaccgtcgcccgtcgcggtcggcagcccaagtccatccggcccgtcgctctcggctcgcttgggagcgccaccgtctcccatggcaatcggcagcaaacacgaggttataagttcggccgcctgtcgtcctacctagaaccttacatccgccaccattcccacaggtatcgcgaggatttctaccgccggcgagcgtgggacaaccaatctctggccgaatatgccaagtcgacgatacaacgagttgtacacaattactggtcgcccgaatgccggggtcgcttcggcgcagggcgttatcttaacacggatgccgctcccaagaagaccccggataaccccaccggtgtccggccggggcagaatatcgaggacgccgagaggggccctctagaacatttactcttcggtgatgcgaagagccagtcggccaagaataccggccggtccggccaggaggacgcgaactccgactatgtcatcgatccgatcacaaaccgaaaggttccccggaagacagtggacacgagctactccaccgcggaccgaggagcggagattcctgtcaggaccaccatgccgtatcgttctcagtttgggtcgctcagaccgcccgaagtcgacaagacccggactcccgtcttctctgacagccccacgtccggaacacagaagcttccttttgtcaatcactacggcacgcctcatggtaccctcctggacacgcttaacttggagcacaaggaagttcggtggcaccgggacgataccattgcgtcggccacgtccatggccgcctcgtggagccgttcgtcggatgttcccgagtatccggacttgcatcgctacacagccgtcagataccaagaacccgacggcaagccggcggataagcagtcagcacaaaagccggcagatctggccaagtacggccccgtcagagctcacgagcccgacggaaagtacaaagccgagtcagcagcaccggcgaaaccagaagacttggacaagtatggccccgtcagagctcacgagccagacggaaagtacaagatcgagtcgaaggcggctgtcgagccacaagagctggacaatcacggcgtcatcgagtcccaccaggcagaggccgaggcgaacgaccgggccgagtcctccgtgagttccgaggaactggggaagtacggcgctgtacgcagccatgagccggatggcaagtacaagctcgactcggaatctccagtgaatccggaagagttggccaagtacaaggccgtgcgcagccatgagccggacggcaaatacaagctcgaatcagagagttccgtggatccggcagaattgaagcagtacggggctgtgcgcagccacgagccggacggcaagtacaaacttcaatcggagtcgtctgtggatcccgaggagttgaggaagtacggagctgtgcggagccatgaacctgatggcaagtacaaactcgaagctgagggtacctcctccgtggatcctgaagaattggcaaagtacggggctgtgcgcagccatgagccggacggcaagtacaaggatgcggccgagtatattgagaccccggacgaggcggagctggcagcgtaccggaagcccgttctcgcccacgagcctgacggtttgtacgccgcgaaccacgttcagcctgagtacgacgccgaagagctggccaagtaccaacaacctttcttttcccacgagcccgacggcaagtatgcagcttcttacgttgagccgcctagggacgaggccgaactcttcaagtacggtgccttccgcagccatgaacccgatggcaagtatgccgccaactacaatgaggaaaagcctgatcccggcgagctggccacgtacggaccctatcgaagccacgagccggatgggatgtacgctctgagaaataatgtttcagtctctccagccgaaacccaacgatatcgggctttccgcagccacgaacctgatggcaaatatgctcccgaggcacaggcggctagagaggctcaggacctcgccaaccatgaggcttttacctacgaggacgccgaaacgcggccgttgcctcgatctgaaccaagtaagaatcccccggacatcgagggatacgggacccttcgtcaccaccaaacgagtgcaccgaccgaggctaactcagcctacgaggactatgatccagaagagctgcgcaaataccaggccgtgctgtggaatgaacccgacgggaagcctgtcgagacggatggcactggccagaccctcgtggaggacagccccatcggcgacaccgccaagcaggagcagaaacctttccgcagaaaggtacaggaactgatggcccaggccgcagccgaatctgatgccttggaagcggacaagcaagccacccaagaggccaacatcaagaacaatcgtgaccagaagcggagacatttgacgggaaactacgtccgagactttccagaggagttctccaagtcctgggcaaccgagattccccaggcttcctcttcgcctctgtcactagagcaaaagtcctccgaaagcaccattcaacccgcgctggatcgctacaatagcaaggactcgggggatgggcgcttatcctcctccaggaaatccgaccccacctcgccggtcctctacaaagttctcgtctacgaccccaccacggagtgcattaggactgccgaaacggcgtccaccgtccgcgagagcaccgccccgctgacgccagccgagattctcctccgcatctccaacccggccaagttcttcccgcacttcgggcctcttcaggcccagggctttgagatggtctcggggagcggggacgtgctcatttttcgcaaggtgcgcgatgccgtcccggctgctgcggaagccaccagcagcactccacacgcgtccgcggccgccgcagcacccatcggcgaagagaggaccccccctcccgccgggatcgtgggcaggaaggggaagcggagtctgcccaaaaaggttgccatgggcgcggcgtgcctggccgggagcgcgtactccgttggggtggtgagcgagtactttaggaatggcggcatcgatggaacggggccgaagggtttctga

SEQ ID NO: 1703 - protein, 1050 aa, Myceliophthora thermophilia
MSLSIASTVARRGRQPKSIRPVALGSLGSATVSHGNRQQTRGYKFGRLSSYLEPYIRHHSHRYREDFYRRRAWDNQSLAEYAKSTIQRVVHNYWSPECRGRFGAGRYLNTDAAPKKTPDNPTGVRPGQNIEDAERGPLEHLLFGDAKSQSAKNTGRSGQEDANSDYVIDPITNRKVPRKTVDTSYSTADRGAEIPVRTTMPYRSQFGSLRPPEVDKTRTPVFSDSPTSGTQKLPFVNHYGTPHGTLLDTLNLEHKEVRWHRDDTIASATSMAASWSRSSDVPEYPDLHRYTAVRYQEPDGKPADKQSAQKPADLAKYGPVRAHEPDGKYKAESAAPAKPEDLDKYGPVRAHEPDGKYKIESKAAVEPQELDNHGVIESHQAEAEANDRAESSVSSEELGKYGAVRSHEPDGKYKLDSESPVNPEELAKYKAVRSHEPDGKYKLESESSVDPAELKQYGAVRSHEPDGKYKLQSESSVDPEELRKYGAVRSHEPDGKYKLEAEGTSSVDPEELAKYGAVRSHEPDGKYKDAAEYIETPDEAELAAYRKPVLAHEPDGLYAANHVQPEYDAEELAKYQQPFFSHEPDGKYAASYVEPPRDEAELFKYGAFRSHEPDGKYAANYNEEKPDPGELATYGPYRSHEPDGMYALRNNVSVSPAETQRYRAFRSHEPDGKYAPEAQAAREAQDLANHEAFTYEDAETRPLPRSEPSKNPPDIEGYGTLRHHQTSAPTEANSAYEDYDPEELRKYQAVLWNEPDGKPVETDGTGQTLVEDSPIGDTAKQEQKPFRRKVQELMAQAAAESDALEADKQATQEANIKNNRDQKRRHLTGNYVRDFPEEFSKSWATEIPQASSSPLSLEQKSSESTIQPALDRYNSKDSGDGRLSSSRKSDPTSPVLYKVLVYDPTTECIRTAETASTVRESTAPLTPAEILLRISNPAKFFPHFGPLQAQGFEMVSGSGDVLIFRKVRDAVPAAAEATSSTPHASAAAAAPIGEERTPPPAGIVGRKGKRSLPKKVAMGAACLAGSAYSVGVVSEYFRNGGIDGTGPKGF

SEQ ID NO: 1704 - protein, 1015 aa, Myceliophthora thermophilia
NRQQTRGYKFGRLSSYLEPYIRHHSHRYREDFYRRRAWDNQSLAEYAKSTIQRVVHNYWSPECRGRFGAGRYLNTDAAPKKTPDNPTGVRPGQNIEDAERGPLEHLLFGDAKSQSAKNTGRSGQEDANSDYVIDPITNRKVPRKTVDTSYSTADRGAEIPVRTTMPYRSQFGSLRPPEVDKTRTPVFSDSPTSGTQKLPFVNHYGTPHGTLLDTLNLEHKEVRWHRDDTIASATSMAASWSRSSDVPEYPDLHRYTAVRYQEPDGKPADKQSAQKPADLAKYGPVRAHEPDGKYKAESAAPAKPEDLDKYGPVRAHEPDGKYKIESKAAVEPQELDNHGVIESHQAEAEANDRAESSVSSEELGKYGAVRSHEPDGKYKLDSESPVNPEELAKYKAVRSHEPDGKYKLESESSVDPAELKQYGAVRSHEPDGKYKLQSESSVDPEELRKYGAVRSHEPDGKYKLEAEGTSSVDPEELAKYGAVRSHEPDGKYKDAAEYIETPDEAELAAYRKPVLAHEPDGLYAANHVQPEYDAEELAKYQQPFFSHEPDGKYAASYVEPPRDEAELFKYGAFRSHEPDGKYAANYNEEKPDPGELATYGPYRSHEPDGMYALRNNVSVSPAETQRYRAFRSHEPDGKYAPEAQAAREAQDLANHEAFTYEDAETRPLPRSEPSKNPPDIEGYGTLRHHQTSAPTEANSAYEDYDPEELRKYQAVLWNEPDGKPVETDGTGQTLVEDSPIGDTAKQEQKPFRRKVQELMAQAAAESDALEADKQATQEANIKNNRDQKRRHLTGNYVRDFPEEFSKSWATEIPQASSSPLSLEQKSSESTIQPALDRYNSKDSGDGRLSSSRKSDPTSPVLYKVLVYDPTTECIRTAETASTVRESTAPLTPAEILLRISNPAKFFPHFGPLQAQGFEMVSGSGDVLIFRKVRDAVPAAAEATSSTPHASAAAAAPIGEERTPPPAGIVGRKGKRSLPKKVAMGAACLAGSAYSVGVVSEYFRNGGIDGTGPKGF

SEQ ID NO: 1705 - DNA, 1065 bp, Myceliophthora thermophilia
atggccccgagtacgatcgcggccctgctcgtcggagccgcggtaagctcggcatgcacaatcccgaccgaaccgctcgggaacaacatcacctatccctttcgcgcccaggttcagaacgcgagccggcctgaagtacacaacaagtacatgaacctgttcgaggcgggcggcggtgaccggcatctcttcattggccccgttggtgtgcccacctacgacttgactcttgtcgcgggtgtcatcaaccatgtcccgaacggcgtccgggccgtgatcgggggcgaatactcggaaatcgaccacactaccaagatgttcatgacgggccgggacgaccccagagccatattccagccgacctacgcgtgcaatccagacacggatgggctccagatcgagttgcgctttgtgacatggcagggccagcccgaaggcggccacatctgcgtccgctcgtcctttgatggcagccacgagttccggtactcgcctccaggcaacagactgatcgacgtcaaccgcgaatgcatcaaggtgaccctcgtggtgattcccaccaccgacctgccaccccccggtacgagcacgaccttgtcgaccagcaccacctcagccaggccgacctcgacctcctcctcgaccgccacgtccacgtccacgcccacggggttgccgacgccggcgcccttcacggacctcacggacctcgggttccgcttcgtgggctgcgcgcccgaggagcggtggaccgacgacggcgcgttccgcacgctcccggacgcgaccgagtcgtccgacgacatgaccaaccagcggtgcgtcgccttctgcgccgagcgcgggttccggtacgccggcaccgagtggcggcgcgagtgctggtgcggcgacgaggtggcgcccacgcgccggcccgcgaccacgctcgagagcctggcccgctgcgacgacgggtacctgtgcacgggcgacccggcgcagaactgcgggggcgacgcgtggctgagcctgtacgagcggtgcgaggaaggcgaggcgtgcgagaatgaggtttttacctga

SEQ ID NO: 1706 - protein, 354 aa, Myceliophthora thermophilia
MAPSTIAALLVGAAVSSACTIPTEPLGNNITYPFRAQVQNASRPEVHNKYMNLFEAGGGDRHLFIGPVGVPTYDLTLVAGVINHVPNGVRAVIGGEYSEIDHTTKMFMTGRDDPRAIFQPTYACNPDTDGLQIELRFVTWQGQPEGGHICVRSSFDGSHEFRYSPPGNRLIDVNRECIKVTLVVIPTTDLPPPGTSTTLSTSTTSARPTSTSSSTATSTSTPTGLPTPAPFTDLTDLGFRFVGCAPEERWTDDGAFRTLPDATESSDDMTNQRCVAFCAERGFRYAGTEWRRECWCGDEVAPTRRPATTLESLARCDDGYLCTGDPAQNCGGDAWLSLYERCEEGEACENEVFT

SEQ ID NO: 1707 - protein, 336 aa, Myceliophthora thermophilia
CTIPTEPLGNNITYPFRAQVQNASRPEVHNKYMNLFEAGGGDRHLFIGPVGVPTYDLTLVAGVINHVPNGVRAVIGGEYSEIDHTTKMFMTGRDDPRAIFQPTYACNPDTDGLQIELRFVTWQGQPEGGHICVRSSFDGSHEFRYSPPGNRLIDVNRECIKVTLVVIPTTDLPPPGTSTTLSTSTTSARPTSTSSSTATSTSTPTGLPTPAPFTDLTDLGFRFVGCAPEERWTDDGAFRTLPDATESSDDMTNQRCVAFCAERGFRYAGTEWRRECWCGDEVAPTRRPATTLESLARCDDGYLCTGDPAQNCGGDAWLSLYERCEEGEACENEVFT

SEQ ID NO: 1708 - DNA, 993 bp, Myceliophthora thermophilia
atgaagctacttgctcttgcttcgctcctggcactgacagcggcctcgccgaccccgactcagcccgagtccggaacgccccgcctggccaaaagggcggggatctcagatgctgccgacattggttacgccacgcttaacgggggcacgaagggaggtgcaggcggcaccgtgacaacggtatcaacactggcccagttcacagccgccgtcaacgagaagaacagcgacccggccattgttgtcgtcaaaggcatcattagcggaaacgagaaggtgcgggttggcagcaacaagagcatcatcggcctgcctggatcaggcttcaagggtgttggcctccatttccggcgccagagcaacctgatcttgcgcaacatcgtctcttccttcgtggaggccgacaatggagacgggctgaagattgaggaaagcaccaacgtctgggtcgaccactgcgagttcttctcgaccctcgacgtcgacaaggattactacgacggcctggtggactcgtcacacggctccgacttcatcaccatttcccacacgtacttccacgaccattggaaggcatcccttgccgggcacagcgacagcaacggtagccaagaccggggcaagctccatctgacgtacgccaacaactactggaagaacatcaactcgcgcggaccgctgctccgcttcgggacgggacacatctacaactcgtactttgaaaacatgagcacggcaatcaacacacggatgggcgcccaggtgctggttcagagcaacgtcttcaggaacgtgacggtccccgtcaccagccgcgactcggacgaagttggatacgcgacggtcatcgacacggacctcggcggcggtctcaacgatgcgcccgagggcaacatggtgccggactcggtcgggtacgagtactcgctgctcggctccggcgcggtggcggggaaggttcccggcgaggcgggagccattctgaccttctga

SEQ ID NO: 1709 - protein, 330 aa, Myceliophthora thermophilia
MKLLALASLLALTAASPTPTQPESGTPRLAKRAGISDAADIGYATLNGGTKGGAGGTVTTVSTLAQFTAAVNEKNSDPAIVVVKGIISGNEKVRVGSNKSIIGLPGSGFKGVGLHFRRQSNLILRNIVSSFVEADNGDGLKIEESTNVWVDHCEFFSTLDVDKDYYDGLVDSSHGSDFITISHTYFHDHWKASLAGHSDSNGSQDRGKLHLTYANNYWKNINSRGPLLRFGTGHIYNSYFENMSTAINTRMGAQVLVQSNVFRNVTVPVTSRDSDEVGYATVIDTDLGGGLNDAPEGNMVPDSVGYEYSLLGSGAVAGKVPGEAGAILTF

SEQ ID NO: 1710 - protein, 315 aa, Myceliophthora thermophilia
SPTPTQPESGTPRLAKRAGISDAADIGYATLNGGTKGGAGGTVTTVSTLAQFTAAVNEKNSDPAIVVVKGIISGNEKVRVGSNKSIIGLPGSGFKGVGLHFRRQSNLILRNIVSSFVEADNGDGLKIEESTNVWVDHCEFFSTLDVDKDYYDGLVDSSHGSDFITISHTYFHDHWKASLAGHSDSNGSQDRGKLHLTYANNYWKNINSRGPLLRFGTGHIYNSYFENMSTAINTRMGAQVLVQSNVFRNVTVPVTSRDSDEVGYATVIDTDLGGGLNDAPEGNMVPDSVGYEYSLLGSGAVAGKVPGEAGAILTF

SEQ ID NO: 1711 - DNA, 1206 bp, Myceliophthora thermophilia
atgcggacttcctacggcgtcgctttcgccctctccgccggcttccggctggcgaccgccgccccggtctgtggcggcggcagcgcttcagatctcctctgggtcaccacttaccccgcgggtgagggcgcgcagggcaagctcctcaccctcaagctggacgggtccaagctggaagtcgttgccgagtccgacacttgcggcccctatccttcttggttgacccaggctggtgacgttctctactgcgtcgacgaagcctggggcggcgaccacggcaccctgcactcgctcaagatcaatgacgatcatagcttcaccaacctgagccaacatgagaccgttggaggcccagtgagcaccgtcatctacggcaaggacggccttggattggcagtggctgattatgccggaggcggtatcgatacattcaacattgccgatcccgctgcgattaagctgatcaagtccctcgtgtacccggccccgaccgacggccttcccgacccgcagaactcagcccggcctcatgaggccatcctggatcccacgggcgagttcctcgtcttccccgacctgggcgccgatcagattcgcgtcctgaaggtggacaaagagacgctggagtacgtcgagaagccgagctacaccgactttgaccgtggcactggtcctaggcacggcgccttcttcaagtctggcgacaagaccttcttctacctcgtcggcgagctctcgaacctgctccagggcttctccgtcgcgtacaatgacgacgatagcctcaccttcacccggatccacaactccacaacccacggtgacgacaagccgctcccggaggacacggctgcggccgagctttggatcgcccccgggagcaacttccttaccctctcgtctcgctttgagagctcgctagagtacacggttgccaacggcaccaaggtgccctcggacccgctcatcaccttctccatcgacaaggagacgggcgccctcacccacgtgcagtcggcccctgcgggcggcatcaacccgcgtcacttctccttcaacagcgacggcacccgcgttgcttctgcgctgcagtccgacggccgcgtcgtcgtctttgagcgcgacccttctactggcaagataggcaaggccactgccgaaggagatgtcgaggggatgcccaactttgccacgtttaagcagtag

SEQ ID NO: 1712 - protein, 401 aa, Myceliophthora thermophilia
MRTSYGVAFALSAGFRLATAAPVCGGGSASDLLWVTTYPAGEGAQGKLLTLKLDGSKLEVVAESDTCGPYPSWLTQAGDVLYCVDEAWGGDHGTLHSLKINDDHSFTNLSQHETVGGPVSTVIYGKDGLGLAVADYAGGGIDTFNIADPAAIKLIKSLVYPAPTDGLPDPQNSARPHEAILDPTGEFLVFPDLGADQIRVLKVDKETLEYVEKPSYTDFDRGTGPRHGAFFKSGDKTFFYLVGELSNLLQGFSVAYNDDDSLTFTRIHNSTTHGDDKPLPEDTAAAELWIAPGSNFLTLSSRFESSLEYTVANGTKVPSDPLITFSIDKETGALTHVQSAPAGGINPRHFSFNSDGTRVASALQSDGRVVVFERDPSTGKIGKATAEGDVEGMPNFATFKQ

SEQ ID NO: 1713 - protein, 381 aa, Myceliophthora thermophilia
APVCGGGSASDLLWVTTYPAGEGAQGKLLTLKLDGSKLEVVAESDTCGPYPSWLTQAGDVLYCVDEAWGGDHGTLHSLKINDDHSFTNLSQHETVGGPVSTVIYGKDGLGLAVADYAGGGIDTFNIADPAAIKLIKSLVYPAPTDGLPDPQNSARPHEAILDPTGEFLVFPDLGADQIRVLKVDKETLEYVEKPSYTDFDRGTGPRHGAFFKSGDKTFFYLVGELSNLLQGFSVAYNDDDSLTFTRIHNSTTHGDDKPLPEDTAAAELWIAPGSNFLTLSSRFESSLEYTVANGTKVPSDPLITFSIDKETGALTHVQSAPAGGINPRHFSFNSDGTRVASALQSDGRVVVFERDPSTGKIGKATAEGDVEGMPNFATFKQ

SEQ ID NO: 1714 - DNA, 531 bp, Myceliophthora thermophilia
atgaggccctcctcgttcctggtcgccctcgcagcgagcgccagcgcccgcaccctcattccccgcgaagaccaggttgcggtcacatttggcaatctcgacgtgcccgggcagaatccgctgaagttctgtgatgccgaccgtgccacagatctcgtcacgattgaggaggtcatcctgacgccaaacccgcccgaagcaggcacgaccctcgtaatcgaggccactggcacggtgaaagagacgatcctccaaggcgcctacgtgaacctcgaggtgaaatatggctatatccgcctgatcaacacccaggcagacctgtgcaaggaaatccagaatgtcgacctcgagtgcccgattgagaagggcaagatttccatcaccaagaccgtcgacctgccgaaagagattcctccaggcaaatataccgtgcaggccgatgtctacactaaggataacgagcatatcacctgcttgactgccactgtgtttttcaacaggaagcctctgggcggagtgttcgacctttag

SEQ ID NO: 1715 - protein, 176 aa, Myceliophthora thermophilia
MRPSSFLVALAASASARTLIPREDQVAVTFGNLDVPGQNPLKFCDADRATDLVTIEEVILTPNPPEAGTTLVIEATGTVKETILQGAYVNLEVKYGYIRLINTQADLCKEIQNVDLECPIEKGKISITKTVDLPKEIPPGKYTVQADVYTKDNEHITCLTATVFFNRKPLGGVFDL

SEQ ID NO: 1716 - protein, 160 aa, Myceliophthora thermophilia
RTLIPREDQVAVTFGNLDVPGQNPLKFCDADRATDLVTIEEVILTPNPPEAGTTLVIEATGTVKETILQGAYVNLEVKYGYIRLINTQADLCKEIQNVDLECPIEKGKISITKTVDLPKEIPPGKYTVQADVYTKDNEHITCLTATVFFNRKPLGGVFDL

SEQ ID NO: 1717 - DNA, 1203 bp, Myceliophthora thermophilia
atgtcgccagtcacccaactgttggccgccgcggcactggcgctggcgccgggcgcgctgggcgcccatctgatcgcgtctcacttctcgggcaccgtctacagcctgtccttcaccagctcatccaactcgacgggcacgctgtccgtcacgtccgagacggacgggtgcggcgccacgcccgcctggctgcagctgtactccgacacgggcaaggtgtactgctttgacgagtcgtggctgggctccggctcgagcgccgagtacgagatcgccgacgacggcagcctcacgctgaccgggactctgcagaccaccggaaacagcgtccacggcgcgctgtacggtggcgccgacggcaagggcttcgtggccacggtcgagtacaccccctcgacgctgacgacgtacaagatgccctttggggggggccagcgattggcgctggaaaagttcaccatggaagggcaagggccgaacccgcggcaggacgttccgcacccgcacgaggcgcaggtcgacccgacgggcaactacatggtcgtgccggacttgggcgccgacctcctacgcgtgttccggatcaacgccgagacgggcgagctgacggcctgctccgagggccaggccggcccgggcgacgggccgcgccacattgtgttctggaagaatgccgagggcctgcagaaggcctacgtcgtcaacgagctcggcaactcggtctcggcctgggacgtcgagtacccggaggacgacgacgacgacgaggcggccgcaggaggctgcctcgcgctcaacaagacgcagacgctgtcgacctacgagcccggcacgagcggggggccgacgaccaaggcggccgagatccgcgtcgtcggcaacttcctgtacgcgagcaaccgggcggacgagacattcggccccgggcaggactcgatcgccacctacaccatcgacgagcagacgggcgagctcgcctggctcggggccgccaactcgtactcgtactacccgcgcaccttcgagttcaaccgcgacggcaccctggtcgccgtcggcggccagacctcgtccaacgtcgccatcatcgcccgcgacccggacaccggcaagttgggcaacctggtcgccaacctcgaggtcggccggaagggccgcgccggccaggaggacggcctgagcgcagtcgtctgggtgcagtaa

SEQ ID NO: 1718 - protein, 400 aa, Myceliophthora thermophilia
MSPVTQLLAAAALALAPGALGAHLIASHFSGTVYSLSFTSSSNSTGTLSVTSETDGCGATPAWLQLYSDTGKVYCFDESWLGSGSSAEYEIADDGSLTLTGTLQTTGNSVHGALYGGADGKGFVATVEYTPSTLTTYKMPFGGGQRLALEKFTMEGQGPNPRQDVPHPHEAQVDPTGNYMVVPDLGADLLRVFRINAETGELTACSEGQAGPGDGPRHIVFWKNAEGLQKAYVVNELGNSVSAWDVEYPEDDDDDEAAAGGCLALNKTQTLSTYEPGTSGGPTTKAAEIRVVGNFLYASNRADETFGPGQDSIATYTIDEQTGELAWLGAANSYSYYPRTFEFNRDGTLVAVGGQTSSNVAIIARDPDTGKLGNLVANLEVGRKGRAGQEDGLSAVVWVQ

SEQ ID NO: 1719 - protein, 379 aa, Myceliophthora thermophilia
AHLIASHFSGTVYSLSFTSSSNSTGTLSVTSETDGCGATPAWLQLYSDTGKVYCFDESWLGSGSSAEYEIADDGSLTLTGTLQTTGNSVHGALYGGADGKGFVATVEYTPSTLTTYKMPFGGGQRLALEKFTMEGQGPNPRQDVPHPHEAQVDPTGNYMVVPDLGADLLRVFRINAETGELTACSEGQAGPGDGPRHIVFWKNAEGLQKAYVVNELGNSVSAWDVEYPEDDDDDEAAAGGCLALNKTQTLSTYEPGTSGGPTTKAAEIRVVGNFLYASNRADETFGPGQDSIATYTIDEQTGELAWLGAANSYSYYPRTFEFNRDGTLVAVGGQTSSNVAIIARDPDTGKLGNLVANLEVGRKGRAGQEDGLSAVVWVQ

SEQ ID NO: 1720 - DNA, 1338 bp, Myceliophthora thermophilia
atggcagatgtagggccagcgacacgggatcgccgctctctttcgtcattgtttcttgctctgcgtctgccgctattcctgctaatcgcgtttcatgtcgcagccgcagcggcatcgtcctcgtggcgctcgacgcaatgtccaaacgagccgggtcggagactccacgaagccgccgagaccaaggactgccccgtcccggggaggatcgggatcgtgcacggcggcggcggcaaggacgatgacggcaacgccatgacctggaccgtgcccccgagatgcctggaccaggcctccaagagggacaactcgccttcccgggtggactgcctcttcacctcggccgagttccgcaacggccacggcatcagcctggtgaccagcaccaccagcgcctcccatctgatcggcctggaagcctttgtcgacaagcccatgccccagccccacgcctcccggaaggaggacgcctcgctcgggcccgcctacgagatcgttcctgttgagggcaaaggcgtgggcgtggtggcgaagcgacggatccgcaggggcgagatcatcatggtcgatgtcccctccgtcctgatcggcatccccttcctggccgatgccaagccgcaccaccggcgccgtatcctcaagcaggcactgaaccagctgcccgaggagaccaggaaccgggtctatacgctcggtcgaggctcgtcgccgtacgaggtggacgccattatgggccccaacacgaacaccgtcgtgatagcggacgacgaagtgcatgtgggcctgttcacagaggtagcgagaatcaaccatgcctgcagaccaaacgcatactaccgcttttctgagcggcgcttgaccatggaagtggtcgctttccgtgccattgaagcgggggaagagattctcatgagctatgtgcccctggagacgccggcggaagagcgccggaggtacctgaggaaccactggggtttcgagtgttcctgctcgctctgccgcgcttcccagctggacctcgacaactccgaggtctggaggagcaaggtcaagagcctgaaggagacgatcctgaacgcgaggagcgagggcttctaccagaacgccatcaccatgaccgaggagtggctcatggtctccgagtgggacatgaccccgcccctgatggccgagtaccacgacacgctcgcggacctgtactttctgaagggggacatggtcaacgccacgagatacgctcgcatggccgtggatggctgggcgcggctgggcagcgtggatgacgagcaactcgagaggtccaggctgtttctccgccgcataatagatattaattag

SEQ ID NO: 1721 - protein, 445 aa, Myceliophthora thermophilia
MADVGPATRDRRSLSSLFLALRLPLFLLIAFHVAAAAASSSWRSTQCPNEPGRRLHEAAETKDCPVPGRIGIVHGGGGKDDDGNAMTWTVPPRCLDQASKRDNSPSRVDCLFTSAEFRNGHGISLVTSTTSASHLIGLEAFVDKPMPQPHASRKEDASLGPAYEIVPVEGKGVGVVAKRRIRRGEIIMVDVPSVLIGIPFLADAKPHHRRRILKQALNQLPEETRNRVYTLGRGSSPYEVDAIMGPNTNTVVIADDEVHVGLFTEVARINHACRPNAYYRFSERRLTMEVVAFRAIEAGEEILMSYVPLETPAEERRRYLRNHWGFECSCSLCRASQLDLDNSEVWRSKVKSLKETILNARSEGFYQNAITMTEEWLMVSEWDMTPPLMAEYHDTLADLYFLKGDMVNATRYARMAVDGWARLGSVDDEQLERSRLFLRRIIDIN

SEQ ID NO: 1722 - protein, 409 aa, Myceliophthora thermophilia
AASSSWRSTQCPNEPGRRLHEAAETKDCPVPGRIGIVHGGGGKDDDGNAMTWTVPPRCLDQASKRDNSPSRVDCLFTSAEFRNGHGISLVTSTTSASHLIGLEAFVDKPMPQPHASRKEDASLGPAYEIVPVEGKGVGVVAKRRIRRGEIIMVDVPSVLIGIPFLADAKPHHRRRILKQALNQLPEETRNRVYTLGRGSSPYEVDAIMGPNTNTVVIADDEVHVGLFTEVARINHACRPNAYYRFSERRLTMEVVAFRAIEAGEEILMSYVPLETPAEERRRYLRNHWGFECSCSLCRASQLDLDNSEVWRSKVKSLKETILNARSEGFYQNAITMTEEWLMVSEWDMTPPLMAEYHDTLADLYFLKGDMVNATRYARMAVDGWARLGSVDDEQLERSRLFLRRIIDIN

SEQ ID NO: 1723 - DNA, 1200 bp, Myceliophthora thermophilia
atggccggcctccctcccgtttacattgtctcggccgcgagaacccccgttggcagcttcctgggcagcctctccagccttagcgccacgcaactgggctcccacgccatcaagtctgccgtcgagcgtgtgccccaaatcaagcctgaggatgttgaggaggtcttctttggaaatgttctttccgccaatctcggtcaggccccggccaggcagtgcgcccttggtgccggcctctcggaggccgttgtctgcacaacagtcaacaaggtgtgcgcctcgggcatgaaggccatcatccttggtgcccagaccatcataactggcaacgcctccatcgtcgtcgctggcggcactgagagcatgtccaacacgccacactacctcacgaacctccgcaccggcaacaagtacggcgacactccactcgtcgacggtgtgcagaaggatggtctccgggatgcttacggcaagcaggagctcatgggcatgcagggcgaactctgcagccaagagcttggcctgacccgagagcagcaggacgagtacgccatcaacacatacaagagggcccaggccgctaccgcggctggccttttcaccgagatcgcccccatcgaggtgagcggcggccgcggcaagccgcctgtcaaggttgaccgggatgaggaggtcaagaacctgaacgaggagaagctcaagacggtccgtcctgccttcattcccaacggtggcacggtcacggccgccaacgccgcccccatcaacgacggtgctgctgcggtggttcttgtctccgaggccaagctcaaggagctcggcatcaagcccattgccaagatcatcggctgggccgacgcggcgcgggacccctctcacttcaccatcgccccggcgctggccatccccaaggcgatcaagcacgctggcctgacggagaaggacgtcgactactacgagatcaacgaggctttctcggtggtggctctggccaacatcaagctgctcaacctcgaccccgagaaggtcaacgtgtttggtggctctgttgccatcggtcaccccctgggcgcttcgggagctcgcatcgtcacgacgctgacgtctgtgctccgcgagaagaagggcaggatcggtgtggcgggtatctgcaacggcggtggcggcgcctccgccttggtgattgagaacctgcagtga

SEQ ID NO: 1724 - protein, 399 aa, Myceliophthora thermophilia
MAGLPPVYIVSAARTPVGSFLGSLSSLSATQLGSHAIKSAVERVPQIKPEDVEEVFFGNVLSANLGQAPARQCALGAGLSEAVVCTTVNKVCASGMKAIILGAQTIITGNASIVVAGGTESMSNTPHYLTNLRTGNKYGDTPLVDGVQKDGLRDAYGKQELMGMQGELCSQELGLTREQQDEYAINTYKRAQAATAAGLFTEIAPIEVSGGRGKPPVKVDRDEEVKNLNEEKLKTVRPAFIPNGGTVTAANAAPINDGAAAVVLVSEAKLKELGIKPIAKIIGWADAARDPSHFTIAPALAIPKAIKHAGLTEKDVDYYEINEAFSVVALANIKLLNLDPEKVNVFGGSVAIGHPLGASGARIVTTLTSVLREKKGRIGVAGICNGGGGASALVIENLQ

SEQ ID NO: 1725 - protein, 363 aa, Myceliophthora thermophilia
IKSAVERVPQIKPEDVEEVFFGNVLSANLGQAPARQCALGAGLSEAVVCTTVNKVCASGMKAIILGAQTIITGNASIVVAGGTESMSNTPHYLTNLRTGNKYGDTPLVDGVQKDGLRDAYGKQELMGMQGELCSQELGLTREQQDEYAINTYKRAQAATAAGLFTEIAPIEVSGGRGKPPVKVDRDEEVKNLNEEKLKTVRPAFIPNGGTVTAANAAPINDGAAAVVLVSEAKLKELGIKPIAKIIGWADAARDPSHFTIAPALAIPKAIKHAGLTEKDVDYYEINEAFSVVALANIKLLNLDPEKVNVFGGSVAIGHPLGASGARIVTTLTSVLREKKGRIGVAGICNGGGGASALVIENLQ

SEQ ID NO: 1726 - DNA, 1824 bp, Myceliophthora thermophilia
atgaagcaagtcgcccttctgtgcgcccttgccggtctggtgctggctgcgcctgagtatcccgttcccggctcggccgagagtaacgacgtgttcgacggctatgtgagctacagcatcgagttcgcgagctttccggactttgcaggaaacaagacgcacccaaacaccttctcggatgtcctcctggataacctcggacaacttcagggacacaagccgtacatacgcgtcggcggaaacactcaggactatgcgctctataaccaatcgctaccctacgccctgaacggcacaactaacccgagccgggctgtagattatcccaccacagtgatcattggaccctcctacttcgagtcctacgacacctggaaggacgtcaagttttcccacggcttcaacctcggcctgggcgggaataggtcaagtggatggcaggcattgctagatacagtgcccttggcttgcaaggccctgggcaacggaaagctgtacgtctgggaatatggtaacgagccggacttgttctcgacctcggctcaggggccagtgaggccagccaactggagcgaggctacctacgtctcccagtggcacaacggcaccaggcaaatcaaggcccttgtgcaggagcattgtcccgagacgttggagtcgggcaaccatggctatatggcgccatcctttgcgggagtcaacaactacctaaaggagcctgcagcgtgggcagccggcctcgacggagaccaggacatcaagctattttccacccacaactacatcagcggcgctacctctccgggcgtgacccttcagggcacattgatgaatcacgccgtgaccaaacgcgcggtcgatgttcacattaccgagtacaacaagatcctctcgcagtcctccgacccggtccctcccctggtctttggcgagaccaactcgctctataaccaaggtcgtcctggtctctccaatacattcggcgctgctctctggggtgtagacttcaacctctactccgcctctgtcggcttcaagcgcgtgcacatgcacatgggcacgaatttccggactgtgcccgccgtaacccagtacgtcgcctggcaacccatcgaaaccgacaaagcaaccttgggcaccaaagcaccctactatggttcgatcgcagtcgccgctgcccttggctcccgtcccgctaccgtccgcgagattcttctgtctacccagatctctggcgcagagctccagccggaagcagcatatgcaatctacactgagactaaccttcactccccagacggcgcggtcctctcccgcctgatgatactcaatctccgatcatacaacacgaccgtcgacggcgccggcctgacgccgctgccctcgccgccgccgcgcggcgcggtcgagtacgccttccggctcgagggcgtcgccccgggcgccgcgatccccgtgcgccggctcgccgccaacggcagcgacgccatcacgggcatcacctgggacgggtggagctacaaccacgagctggacggcggccggcccgtgcgcctgcccaacgtgacggacacctcggagacggagcgggtcgtcgtcggggaggacggggtcgtgacggtgacggtcgaggactcgagcgccgcgttgctggagattggggatgctaagacggggaaaggaaaaggggagggaaagaggtcaaaagaacaatacaaagccatccggcagactggacatatcggaacattcctccttctcctcctcaccaccattcggggacgacttaagcggcccagcctgcagagcagcagcggcccgtag

SEQ ID NO: 1727 - protein, 607 aa, Myceliophthora thermophilia
MKQVALLCALAGLVLAAPEYPVPGSAESNDVFDGYVSYSIEFASFPDFAGNKTHPNTFSDVLLDNLGQLQGHKPYIRVGGNTQDYALYNQSLPYALNGTTNPSRAVDYPTTVIIGPSYFESYDTWKDVKFSHGFNLGLGGNRSSGWQALLDTVPLACKALGNGKLYVWEYGNEPDLFSTSAQGPVRPANWSEATYVSQWHNGTRQIKALVQEHCPETLESGNHGYMAPSFAGVNNYLKEPAAWAAGLDGDQDIKLFSTHNYISGATSPGVTLQGTLMNHAVTKRAVDVHITEYNKILSQSSDPVPPLVFGETNSLYNQGRPGLSNTFGAALWGVDFNLYSASVGFKRVHMHMGTNFRTVPAVTQYVAWQPIETDKATLGTKAPYYGSIAVAAALGSRPATVREILLSTQISGAELQPEAAYAIYTETNLHSPDGAVLSRLMILNLRSYNTTVDGAGLTPLPSPPPRGAVEYAFRLEGVAPGAAIPVRRLAANGSDAITGITWDGWSYNHELDGGRPVRLPNVTDTSETERVVVGEDGVVTVTVEDSSAALLEIGDAKTGKGKGEGKRSKEQYKAIRQTGHIGTFLLLLLTTIRGRLKRPSLQSSSGP

SEQ ID NO: 1728 - protein, 591 aa, Myceliophthora thermophilia
APEYPVPGSAESNDVFDGYVSYSIEFASFPDFAGNKTHPNTFSDVLLDNLGQLQGHKPYIRVGGNTQDYALYNQSLPYALNGTTNPSRAVDYPTTVIIGPSYFESYDTWKDVKFSHGFNLGLGGNRSSGWQALLDTVPLACKALGNGKLYVWEYGNEPDLFSTSAQGPVRPANWSEATYVSQWHNGTRQIKALVQEHCPETLESGNHGYMAPSFAGVNNYLKEPAAWAAGLDGDQDIKLFSTHNYISGATSPGVTLQGTLMNHAVTKRAVDVHITEYNKILSQSSDPVPPLVFGETNSLYNQGRPGLSNTFGAALWGVDFNLYSASVGFKRVHMHMGTNFRTVPAVTQYVAWQPIETDKATLGTKAPYYGSIAVAAALGSRPATVREILLSTQISGAELQPEAAYAIYTETNLHSPDGAVLSRLMILNLRSYNTTVDGAGLTPLPSPPPRGAVEYAFRLEGVAPGAAIPVRRLAANGSDAITGITWDGWSYNHELDGGRPVRLPNVTDTSETERVVVGEDGVVTVTVEDSSAALLEIGDAKTGKGKGEGKRSKEQYKAIRQTGHIGTFLLLLLTTIRGRLKRPSLQSSSGP

SEQ ID NO: 1729 - DNA, 894 bp, Myceliophthora thermophilia
atgcagctcaaccagttcctcgtccttgctggcgtgctcggcgccgccgcacacccgtcggggcacgcccaccttcaccgaagcgccgcgaagcgcgacgttcacgtcaagaacatccacagcgtcgcccctccgcccccgccggttaccaccacctccaaggcggtcccgactccgtccccgtcttcgccgccggcccaggaggttgcggataccggcaagtccaaggtcagcgaagtcgagaccaacgagttcattcccttctgcagcgggtcgtctagaaaggcgaagcgtgtgacgtacgagcagatcatgtacacgggcaacctgggtactagcggcggctgcaaatggaactccaacctgatggtcgttcccaacagcatcgccgacaagtacgactacgtccagacgtacactaacgtcgccgatgagccgtaccaagtcatctgcgcgaacaagatgggcgctgacggcaaactcaccggcctgttcaaggtcgccagccaacagccgctcatcttcaccctcgagcctggcgagaccaagaccgtggtggcgcaagagaacacgcagggcgcctgtgcctttgcgccgagcgaggttccccttaccgagaacggccaatacgcaggcacctgggccgaattcgattttgcgagcgaacccaacaatggctggtccggcggtgactgctcctctcttgttgcccaggctgcggatatggatgtttttggctgccaaatgtcccacaatggcgtcgactcgacaatttaccccggcggtgaagccgacaatgcatacatcaagggcatggaggccctggacggcatcggactcaacattcctcctggcaaggttgagatcgaggtcaaggtcggcttctctaaatag

SEQ ID NO: 1730 - protein, 297 aa, Myceliophthora thermophilia
MQLNQFLVLAGVLGAAAHPSGHAHLHRSAAKRDVHVKNIHSVAPPPPPVTTTSKAVPTPSPSSPPAQEVADTGKSKVSEVETNEFIPFCSGSSRKAKRVTYEQIMYTGNLGTSGGCKWNSNLMVVPNSIADKYDYVQTYTNVADEPYQVICANKMGADGKLTGLFKVASQQPLIFTLEPGETKTVVAQENTQGACAFAPSEVPLTENGQYAGTWAEFDFASEPNNGWSGGDCSSLVAQAADMDVFGCQMSHNGVDSTIYPGGEADNAYIKGMEALDGIGLNIPPGKVEIEVKVGFSK

SEQ ID NO: 1731 - protein, 280 aa, Myceliophthora thermophilia
HPSGHAHLHRSAAKRDVHVKNIHSVAPPPPPVTTTSKAVPTPSPSSPPAQEVADTGKSKVSEVETNEFIPFCSGSSRKAKRVTYEQIMYTGNLGTSGGCKWNSNLMVVPNSIADKYDYVQTYTNVADEPYQVICANKMGADGKLTGLFKVASQQPLIFTLEPGETKTVVAQENTQGACAFAPSEVPLTENGQYAGTWAEFDFASEPNNGWSGGDCSSLVAQAADMDVFGCQMSHNGVDSTIYPGGEADNAYIKGMEALDGIGLNIPPGKVEIEVKVGFSK

SEQ ID NO: 1732 - DNA, 798 bp, Myceliophthora thermophilia
atgcgtttctcaatcaccgcctttctcgcccttgcatccgccgttgtggcccaggaccccaccgagggcttcgatcccatcacgaagcccgccgagggcgagaaggtccccgctggatcaacgtacgacatcgtgtggctgcccagtgaagcctaccctggcgacatcaagattgccctgctcggtggagcctcgccccagactctgaccgtggttgataccattgctgagggtgtcgatgcctcgactggcacctacagctggagcgtgccttccacgctgggcgacctggccacctacggcatcatcgtcaccctcgagtccgaccccagcatcttccagtacggcttccccttcaagattgtcagtggcgacgacagcaacgggggcagcagcagcaacagctctgccacggtcatcagcaccagcaccaccgctagcagcagcagcgccaccagctcgagcaccggccatgccagcactgctacttcgaccacgtctgatgccgaggccacgagctcgaccacccagtccaagaccaagacccacagctcaaccgtgacgagcaccagcctcacggtcccctcgtccaccttggtctcctccaccatccgtaccaacacctcgttcacgacttctgctcctcccctgaccaccattaccagcagcgtcatcgtcgcgaaccccacctcgaccacgagctcgaccagcaccattgccaccaacggcgttccctcgctcgccgctggctcctttgccctgtttggcggtgtcgccatggccgtccttgctctttaa

SEQ ID NO: 1733 - protein, 265 aa, Myceliophthora thermophilia
MRFSITAFLALASAVVAQDPTEGFDPITKPAEGEKVPAGSTYDIVWLPSEAYPGDIKIALLGGASPQTLTVVDTIAEGVDASTGTYSWSVPSTLGDLATYGIIVTLESDPSIFQYGFPFKIVSGDDSNGGSSSNSSATVISTSTTASSSSATSSSTGHASTATSTTSDAEATSSTTQSKTKTHSSTVTSTSLTVPSSTLVSSTIRTNTSFTTSAPPLTTITSSVIVANPTSTTSSTSTIATNGVPSLAAGSFALFGGVAMAVLAL

SEQ ID NO: 1734 - protein, 248 aa, Myceliophthora thermophilia
QDPTEGFDPITKPAEGEKVPAGSTYDIVWLPSEAYPGDIKIALLGGASPQTLTVVDTIAEGVDASTGTYSWSVPSTLGDLATYGIIVTLESDPSIFQYGFPFKIVSGDDSNGGSSSNSSATVISTSTTASSSSATSSSTGHASTATSTTSDAEATSSTTQSKTKTHSSTVTSTSLTVPSSTLVSSTIRTNTSFTTSAPPLTTITSSVIVANPTSTTSSTSTIATNGVPSLAAGSFALFGGVAMAVLAL

SEQ ID NO: 1735 - DNA, 1026 bp, Myceliophthora thermophilia
atggcagccaatggtgggctgattctggtgtgggttcctaccaaaggctctggcatagctcctttcctgccagtgaccaccgagtcctcgatcttcgcaaccctcttccacgcggtcctcttcctctttcgacttccgctgttcttggcgttctcgaccgcctacttcctcgtcctccaacacatccctttcctccccgccgtgatacgtaagctcctgctctggtccctgctcgccattccgggggtctggtgggtcgacctccaactcgacggcgtcaagcgcggctcgctcagccagcagccgcgctcccgcgtgccgggagcacgctccatcatcgccgccaacttcacctccccgatcgacgcgctctacctggccgccgtcttcgaccccgtctttgtcgccgcgcatccttcctcccgcaaggtccgcccgatcggcctcttctcggccatcctcgccgccctctccccctccgcccagctctcgaccctcgcccagtgggaggccgacggcggcgacggcctgaccgacctccgcgccctcgtcgcccgctacccgggccgcgcgatcgccgtcttccccgagtgcggcaccaccaacggccgcgggatcctcccgctcagcccgtgcctgctgacggcccccgccgagagccccatcttcgccgtcagcctgcgctacactcccccggacgtcacgacgcccatcctgggcgcaaagggctcggccgccttcgcgtggaagctgctgggacgcccgacgcactacattagggtccggatcgcggagggcgtgcataataccacggcggcgtcgaacggggtttcggctggctccgcggctgcgggctccgtgcggaggggtgactgggaagggcgtgccgaggaccagcctacggcagaggagcaacagttgctggatcggatcggtgaggcgttggctaggctggggagggcgaagagggttgggctgacgttgaaggagaaggcggcgttcttgaaggcctgggctaagaggtga

SEQ ID NO: 1736 - protein, 341 aa, Myceliophthora thermophilia
MAANGGLILVWVPTKGSGIAPFLPVTTESSIFATLFHAVLFLFRLPLFLAFSTAYFLVLQHIPFLPAVIRKLLLWSLLAIPGVWWVDLQLDGVKRGSLSQQPRSRVPGARSIIAANFTSPIDALYLAAVFDPVFVAAHPSSRKVRPIGLFSAILAALSPSAQLSTLAQWEADGGDGLTDLRALVARYPGRAIAVFPECGTTNGRGILPLSPCLLTAPAESPIFAVSLRYTPPDVTTPILGAKGSAAFAWKLLGRPTHYIRVRIAEGVHNTTAASNGVSAGSAAAGSVRRGDWEGRAEDQPTAEEQQLLDRIGEALARLGRAKRVGLTLKEKAAFLKAWAKR

SEQ ID NO: 1737 - protein, 323 aa, Myceliophthora thermophilia
IAPFLPVTTESSIFATLFHAVLFLFRLPLFLAFSTAYFLVLQHIPFLPAVIRKLLLWSLLAIPGVWWVDLQLDGVKRGSLSQQPRSRVPGARSIIAANFTSPIDALYLAAVFDPVFVAAHPSSRKVRPIGLFSAILAALSPSAQLSTLAQWEADGGDGLTDLRALVARYPGRAIAVFPECGTTNGRGILPLSPCLLTAPAESPIFAVSLRYTPPDVTTPILGAKGSAAFAWKLLGRPTHYIRVRIAEGVHNTTAASNGVSAGSAAAGSVRRGDWEGRAEDQPTAEEQQLLDRIGEALARLGRAKRVGLTLKEKAAFLKAWAKR

SEQ ID NO: 1738 - DNA, 1272 bp, Myceliophthora thermophilia
atgaagctcgtgctgctctgcagcctggccgccacggcgatggccaccgacctcctcctcccgctctaccagtacccggcctccaccgggggcgcgtgggatcccatcaaggcggccctggccgccaacccgtccgtcacggctaccatcatcatcaaccccaacaacgggcccggcgacgccaaccagggcatagatgacccgcagtacgtggccggcaccaaggcgctcgctgcgttacccaacgtccgcctgatcggctacgtgcacacgtcgaccgactggggcgccacccgctgcaacgtcccctggagctccatcacggccgacatccgcaagtggtccacctgggtcgaccgcggcgtgcccatcggcggcatcttcatcgacgaagcccccgccgacacctccaacgactgcgtcaactacatgcgcaacctgaccaccttcatccgcaccgacccggccctccgctcggcggcagcaaccatcaaccccaacaacgggcccggcgacgccaaccagggcatagatgacccgcagtacgtggccggcaccaaggcgctcgctgcgttacccaacgtccgcctgatcggctacgtgcacacgtcgaccgactggggcgccacccgctgcaacgtcccctggagctccatcacggccgacatccgcaagtggtccacctgggtcgaccgcggcgtgcccatcggcggcatcttcatcgacgaagcccccgccgacacctccaacgactgcgtcaactacatgcgcaacctgaccaccttcatccgcaccgacccggccctccgcttcggcggcagcaacgccttcgtcgtctacaacccgggcggcacggggccgagcctgccggcgtattacgacctgcagccgaacctgatcgtggcgctcgagacgtgcttcacggtgcccgagcgcgcgggcgaggactacgaccagtgcccgcgcgcgggcgggtacgagccctacgatcacgccggcccgggccgctccatcgacgacgtcctcttcccggccgccggcgccgccaacgccccccgcaccgccgtcctcgtccacggcttccacgacttcaacggcgccccggccaacctcagcgccacccccgccgtgctcgaccagctggtcgccgccgtcgtccagcgccgcatcggcgccaccttcttcaacacggccggctaccacacctttgaggacggccccgcctcgatcggaaacttcatgggcgtcttggccgccaagaatgccgcatga

SEQ ID NO: 1739 - protein, 423 aa, Myceliophthora thermophilia
MKLVLLCSLAATAMATDLLLPLYQYPASTGGAWDPIKAALAANPSVTATIIINPNNGPGDANQGIDDPQYVAGTKALAALPNVRLIGYVHTSTDWGATRCNVPWSSITADIRKWSTWVDRGVPIGGIFIDEAPADTSNDCVNYMRNLTTFIRTDPALRSAAATINPNNGPGDANQGIDDPQYVAGTKALAALPNVRLIGYVHTSTDWGATRCNVPWSSITADIRKWSTWVDRGVPIGGIFIDEAPADTSNDCVNYMRNLTTFIRTDPALRFGGSNAFVVYNPGGTGPSLPAYYDLQPNLIVALETCFTVPERAGEDYDQCPRAGGYEPYDHAGPGRSIDDVLFPAAGAANAPRTAVLVHGFHDFNGAPANLSATPAVLDQLVAAVVQRRIGATFFNTAGYHTFEDGPASIGNFMGVLAAKNAA

SEQ ID NO: 1740 - protein, 408 aa, Myceliophthora thermophilia
TDLLLPLYQYPASTGGAWDPIKAALAANPSVTATIIINPNNGPGDANQGIDDPQYVAGTKALAALPNVRLIGYVHTSTDWGATRCNVPWSSITADIRKWSTWVDRGVPIGGIFIDEAPADTSNDCVNYMRNLTTFIRTDPALRSAAATINPNNGPGDANQGIDDPQYVAGTKALAALPNVRLIGYVHTSTDWGATRCNVPWSSITADIRKWSTWVDRGVPIGGIFIDEAPADTSNDCVNYMRNLTTFIRTDPALRFGGSNAFVVYNPGGTGPSLPAYYDLQPNLIVALETCFTVPERAGEDYDQCPRAGGYEPYDHAGPGRSIDDVLFPAAGAANAPRTAVLVHGFHDFNGAPANLSATPAVLDQLVAAVVQRRIGATFFNTAGYHTFEDGPASIGNFMGVLAAKNAA

SEQ ID NO: 1741 - DNA, 1209 bp, Myceliophthora thermophilia
atgtttgtcaagcatcttcttcctgccttcgtggcaatcggctcagtagcagcccaatcttcctgctcttccaagacgaccacgatcaatagccaggacgatgtcagcaagatttctggctgcaggaaggtggagggatccgtcgtgctgggttcggagagtggcgctaccatcgatctcacgggccctcgggagatcactggcgacctcattgtccggaacaatggccagatccagaacctgcagagctcgagcttggagtccatcggcggcaagttcgagatcaacaacgcgaccagcctcaacgtgatttcgttcgaaaaactcacctcggccaccaccgtcgagtgggtgtccgtcacccgcctcgacacgctcaccctcgggcctttgaccaaggctaagagcgtccggttgagcgacaccttcctcaacaccctggacggcttcgctctcagcaccgtcaccgacctgaagcttgacaacaaccgccgcctgtccaagtacacgtctgagctgaccagcctggacgggcagctggttatccaggccaacggcttgagtctggaagtggacctgcccaagcttgtctggatcacggagatggccattgccaacgtgaccaagttctctatcccgcagctccaggtcgtcaacggctcggcccgctttgactccaactttttcgagaccttcagtgcccccaacctcacgcacactgaggatggcgacatctcgtttgtcggcaacggtttcctcaagaacatgtcattccccaagttcactgatctgaacggtggtcttctcattgccaacaacaccggcttggaccgcgtcaccttcttccccaagctcgagaaggttaccggtgcgattaagctgcgtggcaacttcactgagatctcgttcccctcgcttgataacgtcaagggcgccgttgatatttccagcaccgcagacattaggaagtcgtgcgagaagctctcggagtttgctcctcgcagccagggcggcgacggcaagatcgagggtgtctttacctgcacggctaacaacgacaaggcgaacgaggatacggaccagtcgacttctggctctggccaggtcgatggctctgatgagaacgacgagaacagcgcttctggtgttgtcctgaatgccgctctgtttggccttgttgccgttgccgctgttgcctcggctctctaa

SEQ ID NO: 1742 - protein, 402 aa, Myceliophthora thermophilia
MFVKHLLPAFVAIGSVAAQSSCSSKTTTINSQDDVSKISGCRKVEGSVVLGSESGATIDLTGPREITGDLIVRNNGQIQNLQSSSLESIGGKFEINNATSLNVISFEKLTSATTVEWVSVTRLDTLTLGPLTKAKSVRLSDTFLNTLDGFALSTVTDLKLDNNRRLSKYTSELTSLDGQLVIQANGLSLEVDLPKLVWITEMAIANVTKFSIPQLQVVNGSARFDSNFFETFSAPNLTHTEDGDISFVGNGFLKNMSFPKFTDLNGGLLIANNTGLDRVTFFPKLEKVTGAIKLRGNFTEISFPSLDNVKGAVDISSTADIRKSCEKLSEFAPRSQGGDGKIEGVFTCTANNDKANEDTDQSTSGSGQVDGSDENDENSASGVVLNAALFGLVAVAAVASAL

SEQ ID NO: 1743 - protein, 384 aa, Myceliophthora thermophilia
QSSCSSKTTTINSQDDVSKISGCRKVEGSVVLGSESGATIDLTGPREITGDLIVRNNGQIQNLQSSSLESIGGKFEINNATSLNVISFEKLTSATTVEWVSVTRLDTLTLGPLTKAKSVRLSDTFLNTLDGFALSTVTDLKLDNNRRLSKYTSELTSLDGQLVIQANGLSLEVDLPKLVWITEMAIANVTKFSIPQLQVVNGSARFDSNFFETFSAPNLTHTEDGDISFVGNGFLKNMSFPKFTDLNGGLLIANNTGLDRVTFFPKLEKVTGAIKLRGNFTEISFPSLDNVKGAVDISSTADIRKSCEKLSEFAPRSQGGDGKIEGVFTCTANNDKANEDTDQSTSGSGQVDGSDENDENSASGVVLNAALFGLVAVAAVASAL

SEQ ID NO: 1744 - DNA, 2508 bp, Myceliophthora thermophilia
atgcgacccgactcgctggcgttggccgccgtggccgctgtggccgctgtggccggcgcatcgacgctaactcccaacgtgttgccgctcatcgttcggaacccgtacttgagcacttggctgaaccacgctcgaggggcgccctgggagcattggcccatgttctacactggggctcatgtgggcaacaaccccgttggcttctcggtcatggcctctgtcccagagacaggcaaggtctatccgctcctcggacgaccgcaggattccctgccgcgcggctacggacgctacgacgtcggatacccggagtatctgggcgccacttttgatgcgtcgacgacgaacctgacgtaccgggtgtcgggaagctcgccgggggattacgtacggctgacgctgtctttcctctcgcccatcacgccgtcatccacattcaggcagtcgatccccgccgcctacctgaccgtcctcgccgagggttgtctcgacgtcagcgtctacaccgacctcaatggcgagtgggtcacggggaacaggggcaacgtggtgacgtgggatttccacagacacaaccgctcagagagcagcggcggctggggcaccgagctgaagacgtggaaggtcgcgcgcgccggtcagcaactcttcaccgagtttgctgaccgcgccgagtgggggacgctgtacttcacgggtccggccgacgctcaccaccagagcggcacgtctgcggttttgcgcaaacagttcgccgagaacggggtcttgagggacgaagtcgacggccggttccgtcgtgtcatggacgaggagcccgtgtttgccttctccaagtctttcggactcgccggcgccggcaagcccgggactgggtgccactggaagaaggggagcgtcacctttacgttcgcgctggtccaggaccctgtggtgcagttcgcgagggccagcgggctgaagcacatgaaaccgctctggaagtcgtacatctcgcacgcagacgagctcgtcacgttccactacgacgacttccacaccgccgcggcccttgccaggaactattcgaactcgctggcgcgcgatgcgtacaactcgggctcgcaggactaccaggacattgccgcgctctcggcccgccaggtcctgggcgccactcagttctccggaactccggagagcccgatcctgtttctgaaggagatctcctccaacggcaacttccaaaccgtagatgtcatcttcccggccttcccattcttcctgtacaccaacccgaagtggctggcatacctcctggagccgctgctggagcaccagctcagcggccagtatccgaacgactatagcatgcacgacctcggcacccacttcccgaacgcgacgggccacccagacgggagagacgagtacatgccggtcgaggagtgcggcaacatgctcatcatggccctcgccttcgccaacgccctgcgttacgacacggagcctgcgttcctcagagcacgcgacggcgtcggcgcagcagcagcaccgcccccgtcgtcctccggccggcacaactcagtcgtcgacaattacggtatcgatctccacagcgaccttgacatggcagacggcagcggcagcggcagcacgggcgacagagctgcccgaaggtggctcgcgcgctcgtacaagctctgggagcagtggacggcctacctcgtgcgcgagtcgctgatcccgcacaaccagctctgcaccgacgactttgccgggtggctggccaaccagacaaacctggcgctcaagggcatcatcggtatcagagccatgagcgagatcgccgatctggtcggcaaggacgaagacgcgaagcgatacagggacatcgcggaagactacatcgccaagtggcaggagtatgggatctcgcgagaccggacgcatgccaagctggcgtatacgtggtacgggtcgtggacgaccatctataacctatacgccgactccctcctgtgtttccacgtcaccgagaacggcgagtccgcgacgacgcgcagcctcgggaggagatggccagaagccgatcgggggtggcgacgggaaggaaaagccttttatccccgacgaggtatatcagatgcagagcgactggtaccacgccgtgctgcaaaaagtgactgggagttctttgctgctgccgtcacgggagagaagacgaggacagagatcctgacggcggtggcgcggtgggtgaatgagactgttgtcgaccgcccattaacggacttgtacgagaccgaaggaaatggcaacttccccggcaacatccgattcatggcgcggccagtcgtgggcggacactttgcctttctagccttggagagggcgtgtggggggaaggctaccgaggcgttgcggttcttggaccgctcgccgcctgccgtcatcgacgtggttaaagtgttgcaggcggagcggcaagagggaatggagacagacgatgagtgggacgatctctag

SEQ ID NO: 1745 - protein, 835 aa, Myceliophthora thermophilia
MRPDSLALAAVAAVAAVAGASTLTPNVLPLIVRNPYLSTWLNHARGAPWEHWPMFYTGAHVGNNPVGFSVMASVPETGKVYPLLGRPQDSLPRGYGRYDVGYPEYLGATFDASTTNLTYRVSGSSPGDYVRLTLSFLSPITPSSTFRQSIPAAYLTVLAEGCLDVSVYTDLNGEWVTGNRGNVVTWDFHRHNRSESSGGWGTELKTWKVARAGQQLFTEFADRAEWGTLYFTGPADAHHQSGTSAVLRKQFAENGVLRDEVDGRFRRVMDEEPVFAFSKSFGLAGAGKPGTGCHWKKGSVTFTFALVQDPVVQFARASGLKHMKPLWKSYISHADELVTFHYDDFHTAAALARNYSNSLARDAYNSGSQDYQDIAALSARQVLGATQFSGTPESPILFLKEISSNGNFQTVDVIFPAFPFFLYTNPKWLAYLLEPLLEHQLSGQYPNDYSMHDLGTHFPNATGHPDGRDEYMPVEECGNMLIMALAFANALRYDTEPAFLRARDGVGAAAAPPPSSSGRHNSVVDNYGIDLHSDLDMADGSGSGSTGDRAARRWLARSYKLWEQWTAYLVRESLIPHNQLCTDDFAGWLANQTNLALKGIIGIRAMSEIADLVGKDEDAKRYRDIAEDYIAKWQEYGISRDRTHAKLAYTWYGSWTTIYNLYADSLLCFHVTENGESATTRSLGRRWPEADRGWRREGKAFYPRRGISDAERLVPRRAAKSDWEFFAAAVTGEKTRTEILTAVARWVNETVVDRPLTDLYETEGNGNFPGNIRFMARPVVGGHFAFLALERACGGKATEALRFLDRSPPAVIDVVKVLQAERQEGMETDDEWDDL

SEQ ID NO: 1746 - protein, 815 aa, Myceliophthora thermophilia
STLTPNVLPLIVRNPYLSTWLNHARGAPWEHWPMFYTGAHVGNNPVGFSVMASVPETGKVYPLLGRPQDSLPRGYGRYDVGYPEYLGATFDASTTNLTYRVSGSSPGDYVRLTLSFLSPITPSSTFRQSIPAAYLTVLAEGCLDVSVYTDLNGEWVTGNRGNVVTWDFHRHNRSESSGGWGTELKTWKVARAGQQLFTEFADRAEWGTLYFTGPADAHHQSGTSAVLRKQFAENGVLRDEVDGRFRRVMDEEPVFAFSKSFGLAGAGKPGTGCHWKKGSVTFTFALVQDPVVQFARASGLKHMKPLWKSYISHADELVTFHYDDFHTAAALARNYSNSLARDAYNSGSQDYQDIAALSARQVLGATQFSGTPESPILFLKEISSNGNFQTVDVIFPAFPFFLYTNPKWLAYLLEPLLEHQLSGQYPNDYSMHDLGTHFPNATGHPDGRDEYMPVEECGNMLIMALAFANALRYDTEPAFLRARDGVGAAAAPPPSSSGRHNSVVDNYGIDLHSDLDMADGSGSGSTGDRAARRWLARSYKLWEQWTAYLVRESLIPHNQLCTDDFAGWLANQTNLALKGIIGIRAMSEIADLVGKDEDAKRYRDIAEDYIAKWQEYGISRDRTHAKLAYTWYGSWTTIYNLYADSLLCFHVTENGESATTRSLGRRWPEADRGWRREGKAFYPRRGISDAERLVPRRAAKSDWEFFAAAVTGEKTRTEILTAVARWVNETVVDRPLTDLYETEGNGNFPGNIRFMARPVVGGHFAFLALERACGGKATEALRFLDRSPPAVIDVVKVLQAERQEGMETDDEWDDL

SEQ ID NO: 1747 - DNA, 744 bp, Myceliophthora thermophilia
atgcatcgtttctcgttggttgctaccgccttgcttggactgaccaagggggtcttgggtgacacagagacctgtggtcaggtaccgtatgacccctcgaagtacgtctgctgggacaatgagttcctctgccctatcacggcgggtgaaccgctgtcctactgcgccggtgcatgctacagcaagttcatgtacacgtgcacaaacaacgtcctgactctcctcccgcctgtcgagaccccgtttacgctcacggccgacaacccgaaccttcccatccacggcaagcctgttaccgctgccaaccagcactgggtagtaaacggcgaaaccgctagctactgccccgaccaagtcggcgacgcctgcccgcccggcaacgagaccgtcatcgtttccgggggcgggactgtttccatgagcgtcatggttcccggcgggcagcaggcctaccttgacccgtactggaacatgggctatacccaggctcactcggcctacatcccccccggaagcattacgacgggctttggcgcttaccagggtggtggcttcgtcaacctcaacggcaacggctggggctgggctgcctgccccccaagggcttccggcggcggcggtccggcctggaacctggtcgcgagaaatgatacgaatgcagagcgatacaaggattgctcgcccatcaacctcaagattcactccctaccgagcggcaccgtgggcgcctggcagtatacataa

SEQ ID NO: 1748 - protein, 247 aa, Myceliophthora thermophilia
MHRFSLVATALLGLTKGVLGDTETCGQVPYDPSKYVCWDNEFLCPITAGEPLSYCAGACYSKFMYTCTNNVLTLLPPVETPFTLTADNPNLPIHGKPVTAANQHWVVNGETASYCPDQVGDACPPGNETVIVSGGGTVSMSVMVPGGQQAYLDPYWNMGYTQAHSAYIPPGSITTGFGAYQGGGFVNLNGNGWGWAACPPRASGGGGPAWNLVARNDTNAERYKDCSPINLKIHSLPSGTVGAWQYT

SEQ ID NO: 1749 - protein, 227 aa, Myceliophthora thermophilia
DTETCGQVPYDPSKYVCWDNEFLCPITAGEPLSYCAGACYSKFMYTCTNNVLTLLPPVETPFTLTADNPNLPIHGKPVTAANQHWVVNGETASYCPDQVGDACPPGNETVIVSGGGTVSMSVMVPGGQQAYLDPYWNMGYTQAHSAYIPPGSITTGFGAYQGGGFVNLNGNGWGWAACPPRASGGGGPAWNLVARNDTNAERYKDCSPINLKIHSLPSGTVGAWQYT

SEQ ID NO: 1750 - DNA, 609 bp, Myceliophthora thermophilia
atgaagttgtttgttctcagtccccttctggggatggcattggccgtacccacgccagtccctactccacccggcatcccttcagcttcgacagccaagagtcagctagccgccctgaccgtcaaggctgcgtacgacgacggcaactacagccgcgacttgttcccccactgggagacggtcagcggtgcctgcaacaccagggagtacgtcttgaagcgagatggcaccaacgtggtgaccgacagtagctgcgccgcccagtcagggacctgggtttccccgtacgacggagctacctggacggcagcctccgacgtcgacatcgaccacatggtgccgttgaagaacgccctggatcgggcgaacacttggtccactgccaagagaacgcaatttgcaaacgacatagatctgcctcagctctgggccgttacggacaatgtgaaccaagcaaagggcgacaagtccccggatgcctggaagccgccctcgacttctttctactgcacgtacgcgaagagctgggtcacagtgaaatattcctacgggctcagcgtcacttctgccgagaagtcggctttgacaagcatgttgaatacgtgctga

SEQ ID NO: 1751 - protein, 202 aa, Myceliophthora thermophilia
MKLFVLSPLLGMALAVPTPVPTPPGIPSASTAKSQLAALTVKAAYDDGNYSRDLFPHWETVSGACNTREYVLKRDGTNVVTDSSCAAQSGTWVSPYDGATWTAASDVDIDHMVPLKNALDRANTWSTAKRTQFANDIDLPQLWAVTDNVNQAKGDKSPDAWKPPSTSFYCTYAKSWVTVKYSYGLSVTSAEKSALTSMLNTC

SEQ ID NO: 1752 - protein, 187 aa, Myceliophthora thermophilia
VPTPVPTPPGIPSASTAKSQLAALTVKAAYDDGNYSRDLFPHWETVSGACNTREYVLKRDGTNVVTDSSCAAQSGTWVSPYDGATWTAASDVDIDHMVPLKNALDRANTWSTAKRTQFANDIDLPQLWAVTDNVNQAKGDKSPDAWKPPSTSFYCTYAKSWVTVKYSYGLSVTSAEKSALTSMLNTC

SEQ ID NO: 1753 - DNA, 1218 bp, Myceliophthora thermophilia
atgaagctcaagatcgtcgcctccttggcgatggtggcttctgccgtcgcgcaaggtgtgaccgagaagattgcacccgagggcgacgctcccagcggttgcagacccaactttgacggcccgttccagatcacggtcgtcccgctgactgacaaagccaagagggacttggctctcgaggtcctccggagagtgacagtgcgatccggtcgacgaggggggatggggggtttgggcgtgacctccaacccggagaaccaatccgacgggtccagatcaaacgcgcactccgataaacgacagcagagtcagatgattgctaaccagggcaccctcccgcaacccaaacagacccgcgccacttgctccggtgaaggcaccctggtcctgcgcctgtccgacggcgtcttgaccgacgcccaggagcgcacgggctacatcgcctccaactaccagttccagttcgacggcccgccgcaggccggggccatttacacggccggcttcaccgcctgcgccaacggctcgctcgccctcggcgactcggccgtcttctggcagtgcgcctcgggcaccttctacaacctgtacgaccgctggtccgccgagcagtgctcccccgtcgacatcgtcgtactcccctgcggcggcgacgccggcgccggcagccaggagggccagaacacggtcggcggtcaggtcatcaccaccaccgtcgtcgtgcccctcagcgacggccagccgcaggtcatcacgaccacgacagtcatccccatctgccagatcgacgacggccagatccaaggccacaccaccccgtgcgcgtccgccccgacgacggcccccggcagccccaaccggccccccgtctctcagatctcggacggccagatccaagtcactcccggcccgcccgtggtctcgcagatctcggacggccagatccaggtgtcggcccgcccgccgtcggagagcaccggcttcgtcaccgccactgccactgccactgccaccgccaccggctcggcctcggcatccgctccgggttcgggtaccgaccaggcgtcgacttcgagccagtccgcgcccaccggcgcgccccccgtcgccaccggcgctgcctctgccgtcctcgctccgggcggcggcgccgggtatcgcactgtggcggccgcagcgatggcctggttgggtgttgcttggatgggttgggtctag

SEQ ID NO: 1754 - protein, 405 aa, Myceliophthora thermophilia
MKLKIVASLAMVASAVAQGVTEKIAPEGDAPSGCRPNFDGPFQITVVPLTDKAKRDLALEVLRRVTVRSGRRGGMGGLGVTSNPENQSDGSRSNAHSDKRQQSQMIANQGTLPQPKQTRATCSGEGTLVLRLSDGVLTDAQERTGYIASNYQFQFDGPPQAGAIYTAGFTACANGSLALGDSAVFWQCASGTFYNLYDRWSAEQCSPVDIVVLPCGGDAGAGSQEGQNTVGGQVITTTVVVPLSDGQPQVITTTTVIPICQIDDGQIQGHTTPCASAPTTAPGSPNRPPVSQISDGQIQVTPGPPVVSQISDGQIQVSARPPSESTGFVTATATATATATGSASASAPGSGTDQASTSSQSAPTGAPPVATGAASAVLAPGGGAGYRTVAAAAMAWLGVAWMGWV

SEQ ID NO: 1755 - protein, 388 aa, Myceliophthora thermophilia
QGVTEKIAPEGDAPSGCRPNFDGPFQITVVPLTDKAKRDLALEVLRRVTVRSGRRGGMGGLGVTSNPENQSDGSRSNAHSDKRQQSQMIANQGTLPQPKQTRATCSGEGTLVLRLSDGVLTDAQERTGYIASNYQFQFDGPPQAGAIYTAGFTACANGSLALGDSAVFWQCASGTFYNLYDRWSAEQCSPVDIVVLPCGGDAGAGSQEGQNTVGGQVITTTVVVPLSDGQPQVITTTTVIPICQIDDGQIQGHTTPCASAPTTAPGSPNRPPVSQISDGQIQVTPGPPVVSQISDGQIQVSARPPSESTGFVTATATATATATGSASASAPGSGTDQASTSSQSAPTGAPPVATGAASAVLAPGGGAGYRTVAAAAMAWLGVAWMGWV

SEQ ID NO: 1756 - DNA, 2286 bp, Myceliophthora thermophilia
atgccgtttcagcaccatcgccgcggggcgccggctcccaacagagccctggctgccaccatctccaccgtgactatcttgctgctcgcgctcttcgcctcagtcctgctcatctcggcccagggcgaggagaagttggcttccagattccagcaccatgatgacgcagataatccgttcctctcgcaccccagggcagcgagagccggcgacaagtatctcatcggggtgggcaaggccgacatcaccggtccggtggtcgagatcaactttgcagggtacgcgaacatggaacaggtcgggactggcttgaggcagcgcatctacgcccgctccttcatcatcggcgaggtggggaccaacaaccggtttgtctacgtcgttctcgacacccagtccggtgacaccgcagtccgcaatggtgttctcgaaggcctcgcagccctgggcccggagtactcggtatatgggcagtcaaacgtggcgataacgggcacgcactctcacagcgggccgggaggctggttcaactacctcctgccgcaggttacgagtctcggtttcgatcgccagggttaccaagccattgtggacggcaccgtgctatcgatcaagcgagcgcacgagtcgctccaggaggggtacctcgactttggaaccaccaccatctccgacgccaacatcaacaggagcctatacgcgtatctggctaatcccgagtcggaaagggcccagtacaccgacgatgtcgacaagacattgacgttgctgcggttcaggagagcgtccgacgggaagagcattggcgttctgacctggtttgcggtccacgggacgtcaatgctgggcaacaacactcacgtctctggagacaacaagggcctcgcggcctatctctttgagcagtcagtaaagggaaccgaccaggctaccgacggattcgttgctggtttctctcaggccaatgtcggagatacgagcccaaatgtccttggtgcgtggtgtgatgacggctctggaagcatgtgcgacttcaaaaccagcacctgtgccgacggcaagtcccagtcgtgccatggcagagggccgttgttccagaagctcgacttgggcgtctctagctgccacgagatctcccggagacagttttcaggagccaaggcgctctatgactcgttcgactccaagtcgacaccggttgtgggctcgactgtcagatcgttccactacttccaagacatgcagtactacacgttccccttggacaacggcaccgtggtgcagacctgtcccgctgctctcgggtactcattcgccgcggggacgtcagactggcccggggcatttgatttcacccagggcgactcaggctcgcccaacaaccctctctggcaggttgtgtcgggacttctccgggcccccagcgctaagcagaaggaatgccaaggtccgaaggccgtccttctggatgtcggagagatggacaccccttacgcgtggagcccgaatatcgttgacgttcaaaccctccgagtgggccagtttatcataatcgtctctccgtctgaggcgaccaccatggctggtcgccgctggcgcaacgccgtgaaggaggctgcgtcagagtactccataaccggcgacagcgagcccttcgtcgtcctcggtggcccagccaactcgtattcccactacgttactactcccgaagagtacgcagtgcagcggtacgaaggcgcaagtacccttttcggccagtgggagctgcctgcctacatcaacctaaccctccgcgccctgccttacctggcccccacagccaaggatagtccgccgcccggccccacgccgccagacaaccgtgaaaagagcctcagctttatcacgggtgtcgtccaggatggcacgcctcccgggaagagctttggcgcggtcatcaagcagcccccaagctcgtcagcgcgcggtgctgtcatcagcgcgaccttccagggtgccaacccgcgaaacaacctgcgcctcgagggcacctttgccgccgtggagaagcttggggacgatggaaagacgtggacgcaagtgttgagcgactacgactggcggttggtgtacacctggaagcgcaccaacttcatgctgggctacagtgaggtgacgatagactgggagaccgacgagcaagatgcgcccgggacgtaccggatcaaatattatggcgactcgaagccgttgattgggagtattaatgcctttactgggacgagcaactcgtttacgctgacgtga

SEQ ID NO: 1757 - protein, 761 aa, Myceliophthora thermophilia
MPFQHHRRGAPAPNRALAATISTVTILLLALFASVLLISAQGEEKLASRFQHHDDADNPFLSHPRAARAGDKYLIGVGKADITGPVVEINFAGYANMEQVGTGLRQRIYARSFIIGEVGTNNRFVYVVLDTQSGDTAVRNGVLEGLAALGPEYSVYGQSNVAITGTHSHSGPGGWFNYLLPQVTSLGFDRQGYQAIVDGTVLSIKRAHESLQEGYLDFGTTTISDANINRSLYAYLANPESERAQYTDDVDKTLTLLRFRRASDGKSIGVLTWFAVHGTSMLGNNTHVSGDNKGLAAYLFEQSVKGTDQATDGFVAGFSQANVGDTSPNVLGAWCDDGSGSMCDFKTSTCADGKSQSCHGRGPLFQKLDLGVSSCHEISRRQFSGAKALYDSFDSKSTPVVGSTVRSFHYFQDMQYYTFPLDNGTVVQTCPAALGYSFAAGTSDWPGAFDFTQGDSGSPNNPLWQVVSGLLRAPSAKQKECQGPKAVLLDVGEMDTPYAWSPNIVDVQTLRVGQFIIIVSPSEATTMAGRRWRNAVKEAASEYSITGDSEPFVVLGGPANSYSHYVTTPEEYAVQRYEGASTLFGQWELPAYINLTLRALPYLAPTAKDSPPPGPTPPDNREKSLSFITGVVQDGTPPGKSFGAVIKQPPSSSARGAVISATFQGANPRNNLRLEGTFAAVEKLGDDGKTWTQVLSDYDWRLVYTWKRTNFMLGYSEVTIDWETDEQDAPGTYRIKYYGDSKPLIGSINAFTGTSNSFTLT

SEQ ID NO: 1758 - protein, 719 aa, Myceliophthora thermophilia
EEKLASRFQHHDDADNPFLSHPRAARAGDKYLIGVGKADITGPVVEINFAGYANMEQVGTGLRQRIYARSFIIGEVGTNNRFVYVVLDTQSGDTAVRNGVLEGLAALGPEYSVYGQSNVAITGTHSHSGPGGWFNYLLPQVTSLGFDRQGYQAIVDGTVLSIKRAHESLQEGYLDFGTTTISDANINRSLYAYLANPESERAQYTDDVDKTLTLLRFRRASDGKSIGVLTWFAVHGTSMLGNNTHVSGDNKGLAAYLFEQSVKGTDQATDGFVAGFSQANVGDTSPNVLGAWCDDGSGSMCDFKTSTCADGKSQSCHGRGPLFQKLDLGVSSCHEISRRQFSGAKALYDSFDSKSTPVVGSTVRSFHYFQDMQYYTFPLDNGTVVQTCPAALGYSFAAGTSDWPGAFDFTQGDSGSPNNPLWQVVSGLLRAPSAKQKECQGPKAVLLDVGEMDTPYAWSPNIVDVQTLRVGQFIIIVSPSEATTMAGRRWRNAVKEAASEYSITGDSEPFVVLGGPANSYSHYVTTPEEYAVQRYEGASTLFGQWELPAYINLTLRALPYLAPTAKDSPPPGPTPPDNREKSLSFITGVVQDGTPPGKSFGAVIKQPPSSSARGAVISATFQGANPRNNLRLEGTFAAVEKLGDDGKTWTQVLSDYDWRLVYTWKRTNFMLGYSEVTIDWETDEQDAPGTYRIKYYGDSKPLIGSINAFTGTSNSFTLT

SEQ ID NO: 1759 - DNA, 1563 bp, Myceliophthora thermophilia
atgaacactgggaccaaaagcaactttcacgtgcatggcattcttggggctgctttgtttccaaggttggtttcttgggttgcagcttcaacacagaataatatactcgccaatgtactcgccaatgcgccgtcgcttgcccaagccaggcgaaccctcgttgccgtcatcgatgttgcgacacgccgcgtcaaccgttttaccgccgacgtcgtctcctctcgcctgttgcagcagacggtgatagcaaccacgctgctcgccattgcgggagtcctgctctacatcccggcggcacttggctatctgttcctgtactacaagtatcttccggagctggtgaccacggtgccggtgcatttacaatatggagtcggccctaaccccttcggcatcgcctcgctcgagggcatcgcaaaccgccaaccctatgacatcaccgtctcactctccctcccgcgctccccggcgaaccttgaccgcggcaacttcatgatcgccctgcacctcctctccccggttccgaccgccgactccaccaaaccacagaccagcagtggcctgacgctcccctacctcccgcccgccaatccgaggccagacgcgtcctcctcctcgtcctcgtcctcgtcctcgtcctggcactccctcgacaccctcctccagccgacccgcctcgacctcccctccttcctcgcctcccacaccatcgtgcacacgaccacccgcccggccctcattccctacgtcgacccgctcgcctcgcaagcgacccggatcctcttgctcttctaccacatgctctccccacgcgccgccgccaccgtgcacctcgacgtccccatggccgagggcctgtccttcccctcccggcgccgccgccccgacagcgccgccccgccgttgccggagagcctgctgctggaggtccaggccggccaggggatccaggtgtacgacgcccgcgtgacgctcgtggcgaggctgaagggcctgcgcgggctcatgtaccggtggaaggtcaccgccttcgtcgtgattacgggggcgttttgggcggggagcatggcgatgctggcatgcgtgtttgttatcgtgggggtcaaactgggggacggatgggaaggaggaggggtcaaggactccgcgcatgattccgagcagcaggcgagtgacgatgaaggcgggaagggcggcggtcggcgctacacgaagggagagagggctgaggatggggagaggagatccaaggctgggatctcgccttcttctgcctctgacagaggcgaggtggctgagaagtcggtcaagaaagaggaagggagtgatgaaggggacgcgatggcgagagtgcctcagttcgagacgggacacagcaccgaagccgatgatgaagctgaatctgagcctgggaagccgaagaaagggaaaggcaaggagaaggaggtgaaggaggtgaaggtggaggaggtaggggccgagtcggaggactcgggtatcggtaccagctacagcggtcaagcgagcaaggagggcatcaggaggaggaacacccccgcttga

SEQ ID NO: 1760 - protein, 520 aa, Myceliophthora thermophilia
MNTGTKSNFHVHGILGAALFPRLVSWVAASTQNNILANVLANAPSLAQARRTLVAVIDVATRRVNRFTADVVSSRLLQQTVIATTLLAIAGVLLYIPAALGYLFLYYKYLPELVTTVPVHLQYGVGPNPFGIASLEGIANRQPYDITVSLSLPRSPANLDRGNFMIALHLLSPVPTADSTKPQTSSGLTLPYLPPANPRPDASSSSSSSSSSSWHSLDTLLQPTRLDLPSFLASHTIVHTTTRPALIPYVDPLASQATRILLLFYHMLSPRAAATVHLDVPMAEGLSFPSRRRRPDSAAPPLPESLLLEVQAGQGIQVYDARVTLVARLKGLRGLMYRWKVTAFVVITGAFWAGSMAMLACVFVIVGVKLGDGWEGGGVKDSAHDSEQQASDDEGGKGGGRRYTKGERAEDGERRSKAGISPSSASDRGEVAEKSVKKEEGSDEGDAMARVPQFETGHSTEADDEAESEPGKPKKGKGKEKEVKEVKVEEVGAESEDSGIGTSYSGQASKEGIRRRNTPA

SEQ ID NO: 1761 - protein, 491 aa, Myceliophthora thermophilia
STQNNILANVLANAPSLAQARRTLVAVIDVATRRVNRFTADVVSSRLLQQTVIATTLLAIAGVLLYIPAALGYLFLYYKYLPELVTTVPVHLQYGVGPNPFGIASLEGIANRQPYDITVSLSLPRSPANLDRGNFMIALHLLSPVPTADSTKPQTSSGLTLPYLPPANPRPDASSSSSSSSSSSWHSLDTLLQPTRLDLPSFLASHTIVHTTTRPALIPYVDPLASQATRILLLFYHMLSPRAAATVHLDVPMAEGLSFPSRRRRPDSAAPPLPESLLLEVQAGQGIQVYDARVTLVARLKGLRGLMYRWKVTAFVVITGAFWAGSMAMLACVFVIVGVKLGDGWEGGGVKDSAHDSEQQASDDEGGKGGGRRYTKGERAEDGERRSKAGISPSSASDRGEVAEKSVKKEEGSDEGDAMARVPQFETGHSTEADDEAESEPGKPKKGKGKEKEVKEVKVEEVGAESEDSGIGTSYSGQASKEGIRRRNTPA

SEQ ID NO: 1762 - DNA, 2091 bp, Myceliophthora thermophilia
atgcggttcctgatcatgctcgccgctacggcagccatgaccgtcggacttgccgctgccgcatcgtctttcacaccggcgagaccaccggcggtccccctagctgtgaggtcgccttacctgaacgcctggcttcaaggcgagtcgggggacaccctccctggcgcctggccccggcattggacggggagcattctgggctggcaaggtctcgtggccgtggatggcgagacttacaactggatgggcggggcaccgggcccagccctcgtggaccaggtctctctcgaatacacgtcgaccaagagcatcttcaccttcgatgtggccggcaaagtcacgctgaccgtcacctttctgtcgccggtgtacccggatgacatggcgcggcagtcgcagcagttatcctacatctctgccaaggccaagtcctctgacggcaattctcacaaagtccagatctacatggatgtctctggtgaatgggctagcggagacacttcccaagtcgttgagtgggacaacgccaggtctggcaagatagtctaccacaagttttttcgccaaacacaggaagagttcaaagaagcgggtgagattgccagctggggcaattggtacctggccaccagtgccgatgacggcttgacctggcaaatcggtgccgacacagcggtgcgaggccaatttgcggaccacagggtcttgtcaaacgccaaagagtccaacttcaggccggtgaacgatcaatggccagtatttgccttctcccacgatctgggcgacgtggaagcatccgaagtggagcgtgtctttaccctcggtctgatccaggaccaggtcatcaacttcgccggcaagagcggccagttggaggcggtaccaggcctctggtcatcctattacaaggaccaagtctcggcgctcgtcgcgttctacgacgactaccagcacgccatcgaagcatccgccgccctcgatgagcggatccggcgcgactcggaggctgctgccggagccgactacgccattgtcaccacgctcgccgtccgccagacttttggcgcgctccagtacgcgggcaccgcctccaagccgtacatcttcttgaaggaaatcagctccaacagcgacatccagaccgtcgacgtcatcttccccgcgtaccccatcttcatgtatctcaacgccagcctcgggaggtacctgctcgacccgctgttcgagaaccaggagagcggggcgtatcccaacaagtatgccgagcatgacctcgggaccttcccggtagctaggggctaccccgacggaaacgacgagccgatgcccttggaggagtgcggcaacatgatcatcatgaccctggcctacgcccagcgcactggcgacactgcctacctctcggaccactacccgatcctgtcgcaatgggccgagttcttgatagaagagtctctcattccggctaatcagctgagcaccgatgattttgcgggaactctggccaaccagaccaacctggccataaagggcatcatcggtctcaaggccatgtcccagattgcccagttgacaaacaacgaggacaaatatggggaggtagccgacaggtacctgaagggctggaaagatctgggcatcaacaccaaggcagatccaccgcacacgaccctcagctacggagatgacgacagccacggccttctctacaacatctacgccgacaagctgctcgacctccacttcgtcgaccagtccgtcttcgacatgcagagcgagttctacccgacggtcgcaagcgactacggcgtcgccctcgacacccggcacacctggaccaagagcgactgggagatgtttgtggccgccgtgtccagccggtcgacgcgggacatgttcatctccaagctggcccggtgggtggggacgacatcgtccaaccgggccatgacggacctgtacgactcggtgacgggcggctacccccagaacgggccgaccttcgttgcgcggcccgtggtgggggactacaaggctatgattcatgcggttgatcctgaaattcctggatacaccctccttagttcttaa

SEQ ID NO: 1763 - protein, 696 aa, Myceliophthora thermophilia
MRFLIMLAATAAMTVGLAAAASSFTPARPPAVPLAVRSPYLNAWLQGESGDTLPGAWPRHWTGSILGWQGLVAVDGETYNWMGGAPGPALVDQVSLEYTSTKSIFTFDVAGKVTLTVTFLSPVYPDDMARQSQQLSYISAKAKSSDGNSHKVQIYMDVSGEWASGDTSQVVEWDNARSGKIVYHKFFRQTQEEFKEAGEIASWGNWYLATSADDGLTWQIGADTAVRGQFADHRVLSNAKESNFRPVNDQWPVFAFSHDLGDVEASEVERVFTLGLIQDQVINFAGKSGQLEAVPGLWSSYYKDQVSALVAFYDDYQHAIEASAALDERIRRDSEAAAGADYAIVTTLAVRQTFGALQYAGTASKPYIFLKEISSNSDIQTVDVIFPAYPIFMYLNASLGRYLLDPLFENQESGAYPNKYAEHDLGTFPVARGYPDGNDEPMPLEECGNMIIMTLAYAQRTGDTAYLSDHYPILSQWAEFLIEESLIPANQLSTDDFAGTLANQTNLAIKGIIGLKAMSQIAQLTNNEDKYGEVADRYLKGWKDLGINTKADPPHTTLSYGDDDSHGLLYNIYADKLLDLHFVDQSVFDMQSEFYPTVASDYGVALDTRHTWTKSDWEMFVAAVSSRSTRDMFISKLARWVGTTSSNRAMTDLYDSVTGGYPQNGPTFVARPVVGDYKAMIHAVDPEIPGYTLLSS

SEQ ID NO: 1764 - protein, 676 aa, Myceliophthora thermophilia
ASSFTPARPPAVPLAVRSPYLNAWLQGESGDTLPGAWPRHWTGSILGWQGLVAVDGETYNWMGGAPGPALVDQVSLEYTSTKSIFTFDVAGKVTLTVTFLSPVYPDDMARQSQQLSYISAKAKSSDGNSHKVQIYMDVSGEWASGDTSQVVEWDNARSGKIVYHKFFRQTQEEFKEAGEIASWGNWYLATSADDGLTWQIGADTAVRGQFADHRVLSNAKESNFRPVNDQWPVFAFSHDLGDVEASEVERVFTLGLIQDQVINFAGKSGQLEAVPGLWSSYYKDQVSALVAFYDDYQHAIEASAALDERIRRDSEAAAGADYAIVTTLAVRQTFGALQYAGTASKPYIFLKEISSNSDIQTVDVIFPAYPIFMYLNASLGRYLLDPLFENQESGAYPNKYAEHDLGTFPVARGYPDGNDEPMPLEECGNMIIMTLAYAQRTGDTAYLSDHYPILSQWAEFLIEESLIPANQLSTDDFAGTLANQTNLAIKGIIGLKAMSQIAQLTNNEDKYGEVADRYLKGWKDLGINTKADPPHTTLSYGDDDSHGLLYNIYADKLLDLHFVDQSVFDMQSEFYPTVASDYGVALDTRHTWTKSDWEMFVAAVSSRSTRDMFISKLARWVGTTSSNRAMTDLYDSVTGGYPQNGPTFVARPVVGDYKAMIHAVDPEIPGYTLLSS

SEQ ID NO: 1765 - DNA, 612 bp, Myceliophthora thermophilia
atgcgttccttcagcatcgctgctgccgccgccactctggcaggcttcgccgttgccgccgacaacagcaccagctccggcaatagcgtcgagctcttcatcgacgacgccctgggcggccagggcctctacgctgcttcgatcctgaacgcctgcaaggaccataccgtctacgctatccagtgtaccagcgccaggaatgatatcgtcgacgacaccatctgcggtgactccgctccgggcccaagcctgtactcggtcgcgtactcgacggcgaccagcacgctcgggcacaaggccgaagtctcggtcggcgagtcgtgcaacctcaacatcgagtccagggaggccttctgcgtcgccaccgtctccgtctccctcgacggcacctccaccgtcacctcgacctccacctccgtcaccggctccgacttccaccgctaccaggtccccatcaccgccggcgcccaaaagaccgccagcgccacgggcgcctgcacggccggcggcgacggcgacgacgccaatgctgccgccggcaccggcgcgaacgtggtccgggctatcggcgccgcgctcgcggtcggcctcgcgggtgtgattgctttgtaa

SEQ ID NO: 1766 - protein, 203 aa, Myceliophthora thermophilia
MRSFSIAAAAATLAGFAVAADNSTSSGNSVELFIDDALGGQGLYAASILNACKDHTVYAIQCTSARNDIVDDTICGDSAPGPSLYSVAYSTATSTLGHKAEVSVGESCNLNIESREAFCVATVSVSLDGTSTVTSTSTSVTGSDFHRYQVPITAGAQKTASATGACTAGGDGDDANAAAGTGANVVRAIGAALAVGLAGVIAL

SEQ ID NO: 1767 - protein, 184 aa, Myceliophthora thermophilia
ADNSTSSGNSVELFIDDALGGQGLYAASILNACKDHTVYAIQCTSARNDIVDDTICGDSAPGPSLYSVAYSTATSTLGHKAEVSVGESCNLNIESREAFCVATVSVSLDGTSTVTSTSTSVTGSDFHRYQVPITAGAQKTASATGACTAGGDGDDANAAAGTGANVVRAIGAALAVGLAGVIAL

SEQ ID NO: 1768 - DNA, 1128 bp, Myceliophthora thermophilia
atgagatcctccgccatctggtccaccgccttcgcggcgttggcacacactgccgccgccgtcactggtgctgccgagggcttcgccaaaggggtcacgggaggtggcaatgcgactcccgtctatcccaaaaccacggccgagctggtctcgtacctgggtgactcggagcctcgtgtcatcatgctggaccggacattcgacttcaccggaaccgagggcaccgcgaccgagacgggctgcgccccctggggcaccggctcgggctgccagctggccctgaacaagaacgactggtgcacccgggagcagccgaacgcgcccaaagtgagcatcacgtacgacaaggccggcattctcggcatcaccgtcaagtccaacaagtccctcatcggcgtcggcaacaagggcgtcatcaagggcaaaggcatccgcatggtcagcggcaccagcaacgtcatcatccagaacatccacatcaccaacctcaacccgcagtacgtctggggcggcgacgccatcacgctcgacaataccgagatgatctggatcgaccacgtcaccacctccctcatcggccgccagcacgtcgtcctgggtaacaacccgagcggccgcgtcaccatctccaacagcaagttcgacggccagacctcctggtccgccacctgcaacacctaccactactggggcctgtactttacagggtccaacgacatgatcaccttcaagaacaacctcatcacccacatgtcgggccgcagccccaaggtggcgggcaacacgctgctgcacgcggtcaacaactactggtacgacagcaagggccacaacttcgagctggacgcgggggccatggtgctcgtcgagggcagcgtgttccagaacgtcgaggcgccgctccagtccggcggcgccggccggctcttcgccagctccggcaccgcctcggcctgcgccccgtacctcggccgcgtgtgccaggccaacggcttcggcagctccggctccctctccggctccgacacctccttcctgcagtacttccagaacaagaacatcgccggcgcgacagactacaacacggccaagaacgtcctcgacaccgccggatttggcacaatctga

SEQ ID NO: 1769 - protein, 375 aa, Myceliophthora thermophilia
MRSSAIWSTAFAALAHTAAAVTGAAEGFAKGVTGGGNATPVYPKTTAELVSYLGDSEPRVIMLDRTFDFTGTEGTATETGCAPWGTGSGCQLALNKNDWCTREQPNAPKVSITYDKAGILGITVKSNKSLIGVGNKGVIKGKGIRMVSGTSNVIIQNIHITNLNPQYVWGGDAITLDNTEMIWIDHVTTSLIGRQHVVLGNNPSGRVTISNSKFDGQTSWSATCNTYHYWGLYFTGSNDMITFKNNLITHMSGRSPKVAGNTLLHAVNNYWYDSKGHNFELDAGAMVLVEGSVFQNVEAPLQSGGAGRLFASSGTASACAPYLGRVCQANGFGSSGSLSGSDTSFLQYFQNKNIAGATDYNTAKNVLDTAGFGTI

SEQ ID NO: 1770 - protein, 355 aa, Myceliophthora thermophilia
VTGAAEGFAKGVTGGGNATPVYPKTTAELVSYLGDSEPRVIMLDRTFDFTGTEGTATETGCAPWGTGSGCQLALNKNDWCTREQPNAPKVSITYDKAGILGITVKSNKSLIGVGNKGVIKGKGIRMVSGTSNVIIQNIHITNLNPQYVWGGDAITLDNTEMIWIDHVTTSLIGRQHVVLGNNPSGRVTISNSKFDGQTSWSATCNTYHYWGLYFTGSNDMITFKNNLITHMSGRSPKVAGNTLLHAVNNYWYDSKGHNFELDAGAMVLVEGSVFQNVEAPLQSGGAGRLFASSGTASACAPYLGRVCQANGFGSSGSLSGSDTSFLQYFQNKNIAGATDYNTAKNVLDTAGFGTI

SEQ ID NO: 1771 - DNA, 3231 bp, Myceliophthora thermophilia
atgcttaccgcgggcgtgaagggagccctctggctcgccttcggctcggtggtggccgctctgggacaggagagcatcatctcgaccaacgcccatggcgcccacttccagatcgccggcggccacgtgggcaagggccagattctggtctcgagcaacgactactggggtgtcatccgcgctgccggtgacctcgccgtcgacttcggccgcgtcacgggaacgaactacacgctcagcaacggtgagaggaacgcggcccccgcgacgtacacgtaccatccggtcaacaacaagaataacacttactattccacgaccgggaccgccaacttcaccggcccggcctacgcagaccccgacccggagaaggtggtgatcattgccggcaccattggccactccaaggtaatcgacaagctgattgcgtcgcggtccctcgacgtgtcgcgcgtcaagggcaagtgggagtcgttcaccagccagctggtcaagaacccggtgccgggatgcaagcaggcgctcgtggtagccggaagcgacccccgcggcaccatctacggcatctacgacatcagcgagcagatcggcgtcagcccgtggtacttctgggccgacagcccgcccaggaagcacaagaacctctatgtcacgaccaagaagaaggtccagggcccgccgtccgtcaagtaccgcggtttcttcctgaacgacgagcagccggcgttgacgaactgggtcgcctcccactggcaggacaccccctacggccccggctatggcgcagccttctacggcctcatcttcgagctgctgctccgcctccgcgccaactacctgtggcccgccatctgggcgaccatgttcgaggttgacgaccccgcgaaccagcccctggccgacgccttcgaggtcgtcatcggatcctcgcacacggagcccctgatgcgcgcacagaacgagttcggccacttctacgagggcccgtgggcctacaacctcaacaacaagaccatcgacgactacttccggtacggcgtccagcgcgccaagccgtacgcccgcaacagcctgtggaccatgggcatgcgcggaaccggcgacacggccatcgagggcctcggcgtcgagtacattgtcgagatgctgcagaccctggtcaagaaccagcgccagatcatggccgagggcctcggcatcaaggacatcaccacggtacctcagatgtggtgcctctacaaggaggtcatgtcctacctctcggccggcctgcaggttcccgacgacgtgacgctgctgtgggccgacgacaactggggcaacgtgcgccggctgccgctgcggaacgagacgcagcgccacggcggcgccggcatctactaccacttcgactacgtcggcgggccgcgcgactacaagtggatcaacacgatccagctgaccaagacggccgagcagatgcacatggcctacgcccgcggcgccgacaggatctggatcgtcaacgtcggcgacatgaaggcgctcgagatccccatcagccacttcttcgatctcggctacgacgccgagcgctggcacgtcgacagcacccgggaatgggccgaggcctgggccgcccgcgagttcgggcccgcccgcgcccgcgagatcgccgacgtcatgatgaagtacggcatgtacgcggcccgccgcaagtacgagctggtcgagccctgggtctactcggtcatcaactacaacgaggccgaggcggtgctgcagcagtgggccgagctcgtcgccgacgcccaggccatctacgacgagctccccgccgaggccaagcccgccttcttccagaccgtcctccacccggccctcgccggcgagatcgtgcaccagatcaacgtcggcggcgcccggaacatgctgtacgccggccagaagcgcaacgccgccaacaaggccatccaggacgtcctcgcttactcggccgccgacgcgaacctcactcgccgctgggatgctctcctcgatgggaagtggaagcacttcatggaccaaacacatctcggctacgacggctactggcaacagcccatgcgtaacgcgctcccgcccatggtgtatgtccagaccgacttcacctccctcgctggtgagatcggcatcggtgtcgagggctccaacgccaccgtcaagggcgacgacaggtggcacgccaacagcggcaacgacctcaccctgccgcccctcgacccgtacggcccggccacgcgctacatcgacatcttctctcgcggctccgaggagtgttcctggaccttatcctcctccaaaccctggctcaagctgtcccagtccacgggcgtcgtcgggcccaaccgcccggacacccgcgtcctcgtctcggtcgactggaagtccgccccgcccgccccgtactccgaaacggtccagatcaacatcaccacccagtgcacgggaatggaccggtacggcttcggcgacccgcacgtccttgtgcccgtgacggtgcgcggtgtgcccaagtcgttcaagcgcggcttcgtcgagtcggacggcaccgtcgccttcgccgccgagcactacagcaggatcgtcgagcccgctagcaagggcaacggtaagggtaagggtaagggcaacgacgaggacgtcacctaccacaccttcgcctcgtacggccgcacctcgtccggcgtcggcctggtcccgctgggcgccgagaagctcgcgcgcgaggaggcgcccgcgctcgagtacgacctctacctcttcaccaacacctcggccgccaacgtgacgctgtacctgtccccggcgctcaactacctcggcgacgccaccccgctcgagtacgccgtcgccctgttccccgcttcctcctcctccggcccctcaccggaggacgacgacgacgcagttgccgtcaagcacgtccagcccgtcggcgccaccgagggcggcaacatgccgcgcggctgggacggcgcggtcgccgacggcgtctggggcctcacgggcggctacaccaccagctcgttcgaggtcgcccgcgagggcgcctacaagctgcgcgtgtgggccctcatgcccggcgtggtggtccagaaggtcgtcgtcgacctcggcggcgtccggcccagctacctgggcccgcccgagagcttcctcgtgggcagggaccggatcggagcgaggaacggaaccagcttcctggggtga

SEQ ID NO: 1772 - protein, 1076 aa, Myceliophthora thermophilia
MLTAGVKGALWLAFGSVVAALGQESIISTNAHGAHFQIAGGHVGKGQILVSSNDYWGVIRAAGDLAVDFGRVTGTNYTLSNGERNAAPATYTYHPVNNKNNTYYSTTGTANFTGPAYADPDPEKVVIIAGTIGHSKVIDKLIASRSLDVSRVKGKWESFTSQLVKNPVPGCKQALVVAGSDPRGTIYGIYDISEQIGVSPWYFWADSPPRKHKNLYVTTKKKVQGPPSVKYRGFFLNDEQPALTNWVASHWQDTPYGPGYGAAFYGLIFELLLRLRANYLWPAIWATMFEVDDPANQPLADAFEVVIGSSHTEPLMRAQNEFGHFYEGPWAYNLNNKTIDDYFRYGVQRAKPYARNSLWTMGMRGTGDTAIEGLGVEYIVEMLQTLVKNQRQIMAEGLGIKDITTVPQMWCLYKEVMSYLSAGLQVPDDVTLLWADDNWGNVRRLPLRNETQRHGGAGIYYHFDYVGGPRDYKWINTIQLTKTAEQMHMAYARGADRIWIVNVGDMKALEIPISHFFDLGYDAERWHVDSTREWAEAWAAREFGPARAREIADVMMKYGMYAARRKYELVEPWVYSVINYNEAEAVLQQWAELVADAQAIYDELPAEAKPAFFQTVLHPALAGEIVHQINVGGARNMLYAGQKRNAANKAIQDVLAYSAADANLTRRWDALLDGKWKHFMDQTHLGYDGYWQQPMRNALPPMVYVQTDFTSLAGEIGIGVEGSNATVKGDDRWHANSGNDLTLPPLDPYGPATRYIDIFSRGSEECSWTLSSSKPWLKLSQSTGVVGPNRPDTRVLVSVDWKSAPPAPYSETVQINITTQCTGMDRYGFGDPHVLVPVTVRGVPKSFKRGFVESDGTVAFAAEHYSRIVEPASKGNGKGKGKGNDEDVTYHTFASYGRTSSGVGLVPLGAEKLAREEAPALEYDLYLFTNTSAANVTLYLSPALNYLGDATPLEYAVALFPASSSSGPSPEDDDDAVAVKHVQPVGATEGGNMPRGWDGAVADGVWGLTGGYTTSSFEVAREGAYKLRVWALMPGVVVQKVVVDLGGVRPSYLGPPESFLVGRDRIGARNGTSFLG

SEQ ID NO: 1773 - protein, 1056 aa, Myceliophthora thermophilia
LGQESIISTNAHGAHFQIAGGHVGKGQILVSSNDYWGVIRAAGDLAVDFGRVTGTNYTLSNGERNAAPATYTYHPVNNKNNTYYSTTGTANFTGPAYADPDPEKVVIIAGTIGHSKVIDKLIASRSLDVSRVKGKWESFTSQLVKNPVPGCKQALVVAGSDPRGTIYGIYDISEQIGVSPWYFWADSPPRKHKNLYVTTKKKVQGPPSVKYRGFFLNDEQPALTNWVASHWQDTPYGPGYGAAFYGLIFELLLRLRANYLWPAIWATMFEVDDPANQPLADAFEVVIGSSHTEPLMRAQNEFGHFYEGPWAYNLNNKTIDDYFRYGVQRAKPYARNSLWTMGMRGTGDTAIEGLGVEYIVEMLQTLVKNQRQIMAEGLGIKDITTVPQMWCLYKEVMSYLSAGLQVPDDVTLLWADDNWGNVRRLPLRNETQRHGGAGIYYHFDYVGGPRDYKWINTIQLTKTAEQMHMAYARGADRIWIVNVGDMKALEIPISHFFDLGYDAERWHVDSTREWAEAWAAREFGPARAREIADVMMKYGMYAARRKYELVEPWVYSVINYNEAEAVLQQWAELVADAQAIYDELPAEAKPAFFQTVLHPALAGEIVHQINVGGARNMLYAGQKRNAANKAIQDVLAYSAADANLTRRWDALLDGKWKHFMDQTHLGYDGYWQQPMRNALPPMVYVQTDFTSLAGEIGIGVEGSNATVKGDDRWHANSGNDLTLPPLDPYGPATRYIDIFSRGSEECSWTLSSSKPWLKLSQSTGVVGPNRPDTRVLVSVDWKSAPPAPYSETVQINITTQCTGMDRYGFGDPHVLVPVTVRGVPKSFKRGFVESDGTVAFAAEHYSRIVEPASKGNGKGKGKGNDEDVTYHTFASYGRTSSGVGLVPLGAEKLAREEAPALEYDLYLFTNTSAANVTLYLSPALNYLGDATPLEYAVALFPASSSSGPSPEDDDDAVAVKHVQPVGATEGGNMPRGWDGAVADGVWGLTGGYTTSSFEVAREGAYKLRVWALMPGVVVQKVVVDLGGVRPSYLGPPESFLVGRDRIGARNGTSFLG

SEQ ID NO: 1774 - DNA, 1068 bp, Myceliophthora thermophilia
atgaagcgcgcagtctttctactcgctgccgcctcggccatccgggggagtctggctcaggtccgggtccctccaaattttgaggtcggggtcaagtggcagatcgtcatccagagcaccatcgacgttaaccccccccttgaacccgccgacgcggtcgtctgggaccttgatctctaccacgtcgcccgtactccggaagtcgtcagccatctccgagaaaacaaccccaacaccatcctcatctgctacttcaacgccgggctcacccaaaagagcgactgtgactacgagacgagatgggagaagagcgggctgctgggcaacgtgtacgacccggaagagccccagtttgacgacgagcgatgggtcaacatcaagaaccagacggcccgcgactggatcaaggagcgcatcacgctcgcccgcgacgtcggctgcgacggggtcgacccggacaacatcgacggctaccacaacgacgaggacggcaacaacggcacgggctgggacctgtcgcgggacgactacgtctccttcgtccgcgagctcgccgagcacgcccacggcctgaccaccaagcgcaactacacgctgctcatcgggcagaagaacgcgcccgacctcgtggaggacgtcggcgacctcctcgactttgccgtgctcgaggactgcaagtcgctcaacggcggcggcggcgacgacgacgacgacaacgacgacaacaacgacgacgcccccttctgcggcgagttccagcactacatcgagaggggccgccccgtattcagcatcgagtacccgtccacgctcggggacgacgagacgggcgagtgcaacgccggcggcgcgagcaaggcccagtacgaggcctcgtgcgacgccagcaccgccaggggcaactcggacttcagcaccgtcctcaagatccagggcggcgtcggcgagctcaacggctgcacccagtactgcgacgggctccagcccggcacgggaatcgtcgtgacggcgacggactcggagctcgacggcaacgagtgccctcccgaggcgaccgggagcagctag

SEQ ID NO: 1775 - protein, 355 aa, Myceliophthora thermophilia
MKRAVFLLAAASAIRGSLAQVRVPPNFEVGVKWQIVIQSTIDVNPPLEPADAVVWDLDLYHVARTPEVVSHLRENNPNTILICYFNAGLTQKSDCDYETRWEKSGLLGNVYDPEEPQFDDERWVNIKNQTARDWIKERITLARDVGCDGVDPDNIDGYHNDEDGNNGTGWDLSRDDYVSFVRELAEHAHGLTTKRNYTLLIGQKNAPDLVEDVGDLLDFAVLEDCKSLNGGGGDDDDDNDDNNDDAPFCGEFQHYIERGRPVFSIEYPSTLGDDETGECNAGGASKAQYEASCDASTARGNSDFSTVLKIQGGVGELNGCTQYCDGLQPGTGIVVTATDSELDGNECPPEATGSS

SEQ ID NO: 1776 - protein, 336 aa, Myceliophthora thermophilia
QVRVPPNFEVGVKWQIVIQSTIDVNPPLEPADAVVWDLDLYHVARTPEVVSHLRENNPNTILICYFNAGLTQKSDCDYETRWEKSGLLGNVYDPEEPQFDDERWVNIKNQTARDWIKERITLARDVGCDGVDPDNIDGYHNDEDGNNGTGWDLSRDDYVSFVRELAEHAHGLTTKRNYTLLIGQKNAPDLVEDVGDLLDFAVLEDCKSLNGGGGDDDDDNDDNNDDAPFCGEFQHYIERGRPVFSIEYPSTLGDDETGECNAGGASKAQYEASCDASTARGNSDFSTVLKIQGGVGELNGCTQYCDGLQPGTGIVVTATDSELDGNECPPEATGSS

SEQ ID NO: 1777 - DNA, 417 bp, Myceliophthora thermophilia
atgtcgggcgaggcgtggctatacctcttcgccgtcatcataaatgcggtcaacctgttcctgcaggtgtttttcaccatcatgtacagcgatctggaatgcgactacattaacccgattgacctctgcaaccgcctcaatacatacatcattcccgaagttgctgtccacggattcctgaccttcctgttcttgatcaacggatactggcttccgctgattctcaacctacccctggttgcgtacaatgccaagaagatcatcgacaacactcatctcctcgacgccactgagatcttcaggaagctcaacgttcacaagaaggagtccttcacaaagctcggcttccatctcgttctgttcttcttctacctgtatagcatgattgtcgctctgatcaaggacgaggctcactag

SEQ ID NO: 1778 - protein, 138 aa, Myceliophthora thermophilia
MSGEAWLYLFAVIINAVNLFLQVFFTIMYSDLECDYINPIDLCNRLNTYIIPEVAVHGFLTFLFLINGYWLPLILNLPLVAYNAKKIIDNTHLLDATEIFRKLNVHKKESFTKLGFHLVLFFFYLYSMIVALIKDEAH

SEQ ID NO: 1779 - protein, 104 aa, Myceliophthora thermophilia
DYINPIDLCNRLNTYIIPEVAVHGFLTFLFLINGYWLPLILNLPLVAYNAKKIIDNTHLLDATEIFRKLNVHKKESFTKLGFHLVLFFFYLYSMIVALIKDEAH

SEQ ID NO: 1780 - DNA, 924 bp, Myceliophthora thermophilia
atggcgcgcctcaacacctccgccctgctgcttctaacagcagccgtagcgacggctgcccctcgcgcgccgtccttcaggaactcgacagcgccgtccttcagaaactcgacagcgccgtccttccggaactcgacagggccgtcctcgggggggaatcttaccgggccgccggcaggggcgccgaccttctcggcggcggcggcgccgtcgccgcccaaggcgctgccgcagcgggcgacggccaacgacctccggtggcagccgtcgctcgacttcgacacggacgggtgctacaacgtgccggcgatcgacgccgagggcaacgtggcggagggcctgccgtacgagtgggtgggcctgtcgagcgactgccgggacgagtcggacctggacaacaacaacgtgtacgcgcggcagcggtgcaacagcggctggtgcgtgtacctgtacggctactacttcgagaaggacgtgccggtggcctacttcttcggcggcggccaccgccacgactgggagcacatcgccgtctgggtcagcgacgccaccggccgcgccgagtacgtcgccgcctcccagcacggcaactacgaggtccgcccggccgccgacgtccgctgggacggcgaccaccccaagatggtctaccacaaggacggcgccagcacgcactgcttccggttcgcgaacgaggcggacgacaacatcgagaatcacaaggggatatggttccgtggcgacttggtctcgtacaatggcttcccctcgaccgagataagggacaagctgttcgcctacgatttcggcaaggcgacgatcgacttcaaggattcgacgttccccggtgctatcggaagggcgaagccagcgggcatcacctttgacgtgaacctggatgagggatctccggggacgccctga

SEQ ID NO: 1781 - protein, 307 aa, Myceliophthora thermophilia
MARLNTSALLLLTAAVATAAPRAPSFRNSTAPSFRNSTAPSFRNSTGPSSGGNLTGPPAGAPTFSAAAAPSPPKALPQRATANDLRWQPSLDFDTDGCYNVPAIDAEGNVAEGLPYEWVGLSSDCRDESDLDNNNVYARQRCNSGWCVYLYGYYFEKDVPVAYFFGGGHRHDWEHIAVWVSDATGRAEYVAASQHGNYEVRPAADVRWDGDHPKMVYHKDGASTHCFRFANEADDNIENHKGIWFRGDLVSYNGFPSTEIRDKLFAYDFGKATIDFKDSTFPGAIGRAKPAGITFDVNLDEGSPGTP

SEQ ID NO: 1782 - protein, 288 aa, Myceliophthora thermophilia
APRAPSFRNSTAPSFRNSTAPSFRNSTGPSSGGNLTGPPAGAPTFSAAAAPSPPKALPQRATANDLRWQPSLDFDTDGCYNVPAIDAEGNVAEGLPYEWVGLSSDCRDESDLDNNNVYARQRCNSGWCVYLYGYYFEKDVPVAYFFGGGHRHDWEHIAVWVSDATGRAEYVAASQHGNYEVRPAADVRWDGDHPKMVYHKDGASTHCFRFANEADDNIENHKGIWFRGDLVSYNGFPSTEIRDKLFAYDFGKATIDFKDSTFPGAIGRAKPAGITFDVNLDEGSPGTP

SEQ ID NO: 1783 - DNA, 567 bp, Myceliophthora thermophilia
atgaagctctccgccgccgtcctctctctcttcgccgccgcgtcctgggcggcccccacgagcagcccgcgcaggttctccgtcatggccctccgttccgcctcgcccatccactttgcgaccgtcagcgcgaccaagaaccagctggtgttgaacctgcccggggacaaggtcgactcgcagtgcgccgacggcgagacccacaccgctgccaccctctacatcaaggacggcgagctgttcctctacggccccgatgaccaggtgcagcagttctttgtcgaccgttccggcatgggccagggagtcgtgcagtacttcaaccggaccgagaacaacgtccccggcggcaggctggagctcaagggctgggccgtggacgagaacgacaacctcaacttcgacggcaacagcctgctggcctgccccagccagaccgactcctcctggaccgtctggctcgccctcggcatcgaccggcccggcggcaacgagggctgcctcggcttcaccgctcgcaccctgaccagccaggatcccgtcccgtgcacgtacagcagccactga

SEQ ID NO: 1784 - protein, 188 aa, Myceliophthora thermophilia
MKLSAAVLSLFAAASWAAPTSSPRRFSVMALRSASPIHFATVSATKNQLVLNLPGDKVDSQCADGETHTAATLYIKDGELFLYGPDDQVQQFFVDRSGMGQGVVQYFNRTENNVPGGRLELKGWAVDENDNLNFDGNSLLACPSQTDSSWTVWLALGIDRPGGNEGCLGFTARTLTSQDPVPCTYSSH

SEQ ID NO: 1785 - protein, 171 aa, Myceliophthora thermophilia
APTSSPRRFSVMALRSASPIHFATVSATKNQLVLNLPGDKVDSQCADGETHTAATLYIKDGELFLYGPDDQVQQFFVDRSGMGQGVVQYFNRTENNVPGGRLELKGWAVDENDNLNFDGNSLLACPSQTDSSWTVWLALGIDRPGGNEGCLGFTARTLTSQDPVPCTYSSH

SEQ ID NO: 1786 - DNA, 1386 bp, Myceliophthora thermophilia
atggcgccgagtgtggctttcggggccacaggcatactactggctctagccagcaacgtgggcgccgttccggtcgtgtccgagccgaccactaccgtcttctcggagcccaccaatctgccgtctccctacgccatctcacatcacaacgtgacttctcacgggccctatgacggcccaccggccaccacgacaggggcgctctctaccagcgtcctggcaccctccatcgcaccggcgccgcccccgcctcagattgtcgagtatgaggccgacggcaagctccatggcgaccagccgatgccctacacgcccagcggcggcatcggcactaacggctcggaccccatctacaaggtagccagcgactttgattaccagtctctcgcgctggcgctttaccacgagtggatcgagctcgacctgttccactggggactggcgaccttctcggatgaggaattcgaggcgtacggcatcacgggcgaggaccgccacctgctgcagcacatggccgaccaggagatcgggcacgcgtccgtcgtggccaacatgctcggccccagcgcgcccaagcagtgcacgtacaactacccgggtaagctcacccgctgggccgaggcgggcgtgtacggcttcctgccgcacctcaactcgggcccggccgccaacatgctgctccagagcatcacggtcgaggcccggcagcagctcatcttccgccagttcggcggccagttccccatgcccgagtggcacaccccgggcatcccgcagagctgggcctggaccctcctggccccctacatcagctcctgcccgcacaaccagacgcgcctggtctggcagaacttcccggccctgcacatcctcaaccagcccaacccggcccgcatcgacggctccgccgtgtggggcgagaccacgggcgggtacgccaacacgctctcgaccgagggcatccccgaggacgagctctgcgtcaacgcgaccgacgacgagctgtcggactgcccggccgccatctcgcagaaccggtcgatcccgctctcgtacccgggccgcgaggtgttcctccgctgggacgcgcccgggcagctggtgggccccaacaacagctacgtgacgacgacgagcgcggccgagcccaggttcgccgcctggctgtcccagctcaacgtcacctacacgcccctgctcggcgtcagcctcgagcaccgcaccgcctacaccatccagcccaacgtctcgacctggaagaacgacccggccgtcaacggcaccatgttcctcgccctgaccgacgtcgacctgtacgtcacgccctacaacgtctccatgatcaacccgcacgttgccgccctggccgtgtaccaggccggttga

SEQ ID NO: 1787 - protein, 461 aa, Myceliophthora thermophilia
MAPSVAFGATGILLALASNVGAVPVVSEPTTTVFSEPTNLPSPYAISHHNVTSHGPYDGPPATTTGALSTSVLAPSIAPAPPPPQIVEYEADGKLHGDQPMPYTPSGGIGTNGSDPIYKVASDFDYQSLALALYHEWIELDLFHWGLATFSDEEFEAYGITGEDRHLLQHMADQEIGHASVVANMLGPSAPKQCTYNYPGKLTRWAEAGVYGFLPHLNSGPAANMLLQSITVEARQQLIFRQFGGQFPMPEWHTPGIPQSWAWTLLAPYISSCPHNQTRLVWQNFPALHILNQPNPARIDGSAVWGETTGGYANTLSTEGIPEDELCVNATDDELSDCPAAISQNRSIPLSYPGREVFLRWDAPGQLVGPNNSYVTTTSAAEPRFAAWLSQLNVTYTPLLGVSLEHRTAYTIQPNVSTWKNDPAVNGTMFLALTDVDLYVTPYNVSMINPHVAALAVYQAG

SEQ ID NO: 1788 - protein, 439 aa, Myceliophthora thermophilia
VPVVSEPTTTVFSEPTNLPSPYAISHHNVTSHGPYDGPPATTTGALSTSVLAPSIAPAPPPPQIVEYEADGKLHGDQPMPYTPSGGIGTNGSDPIYKVASDFDYQSLALALYHEWIELDLFHWGLATFSDEEFEAYGITGEDRHLLQHMADQEIGHASVVANMLGPSAPKQCTYNYPGKLTRWAEAGVYGFLPHLNSGPAANMLLQSITVEARQQLIFRQFGGQFPMPEWHTPGIPQSWAWTLLAPYISSCPHNQTRLVWQNFPALHILNQPNPARIDGSAVWGETTGGYANTLSTEGIPEDELCVNATDDELSDCPAAISQNRSIPLSYPGREVFLRWDAPGQLVGPNNSYVTTTSAAEPRFAAWLSQLNVTYTPLLGVSLEHRTAYTIQPNVSTWKNDPAVNGTMFLALTDVDLYVTPYNVSMINPHVAALAVYQAG

SEQ ID NO: 1789 - DNA, 1452 bp, Myceliophthora thermophilia
atgcttattcactcggcgctcctggcgctcggcgcaaccctcgccgcagctgtccagcccctcgaggttcagggccagtacttcgtcaaccccaagacgggcaaccgcttccagattgtcggcgttgcctatcagcccggcggctctgctggctacgacaaggcggccggccgtgaccccctgagcgaccccgatatctgcctgcgcgatgccgccctgctccagatcctcggcgtcaataccatccgcgtctacaatgtgaatcccgacgtgaaccatgacgagtgcgccagcatcttcaacgccgccggcatgtacatgatcctcgacgtcaactcgcccctggtgggcgagtccctgactagctacaacccctgggagtcgtactatgccgcctatctcaaccgcaccttcgccgtcgtcgaggccttcaaggactatcccaacaccctggccttcttctccggtaacgaggtcatcaatgacgagaagagcggcgctgatgtgccgccctatatgcgtgccgtcacccgcgacatcaagaactacgtcaagaaccacgcctcgcgtcccatcccggtcggctactccgccgctgacgtccgcgacatcctcttcgacacgttcaactacttcgagtgctcgctggagggcgacgatgacgacatgagcaagggcgacatctttgccctcaacagctacagctggtgcggcgacagcagcttcaagaaggccagctacgaccagctcgtcagcggcttcaagggcagctctgtccccatcttcttctcggaatatggctgcaacaccccctctccccgtatcttcaccgaggtcggcaccatctacggcgaccagatgacgggcgtcttctcgggcggcgtcgtctacgagtacacccaggagaagaacaactacggcctggtctcgatggaggacgacggctccgcccagctcaggagcgactacgtctcgctcgagaagcagtacagcaagctcgactttgcctccatccagggccagaagcccccctcggactcgaccaacaaggcccccgtctgcagctccaagctcatcaccaccgataacttcaacaacaacttcaccctccccgtcccgccccccggcgcccagaagatcattgacgagggcgtcaagcccgcccccaagggcaagctcgtcgagatctccaactggaaggtcaagttcaccgtcaagaaccccgacggctccgtcatcaccaacctcgccgtcaagccgcttgaagacgacgcgatcaacagccccggtaccaacactgaggccggcactcagacctccgctgaggagaccactggcaccgacagctcggcgtcccccagcgacaccaacgccgccgccgggctggatgctcgtgtcctgcctgccgtggccatgggcgctcttgccctcgctgctgccgctgccttctaa

SEQ ID NO: 1790 - protein, 483 aa, Myceliophthora thermophilia
MLIHSALLALGATLAAAVQPLEVQGQYFVNPKTGNRFQIVGVAYQPGGSAGYDKAAGRDPLSDPDICLRDAALLQILGVNTIRVYNVNPDVNHDECASIFNAAGMYMILDVNSPLVGESLTSYNPWESYYAAYLNRTFAVVEAFKDYPNTLAFFSGNEVINDEKSGADVPPYMRAVTRDIKNYVKNHASRPIPVGYSAADVRDILFDTFNYFECSLEGDDDDMSKGDIFALNSYSWCGDSSFKKASYDQLVSGFKGSSVPIFFSEYGCNTPSPRIFTEVGTIYGDQMTGVFSGGVVYEYTQEKNNYGLVSMEDDGSAQLRSDYVSLEKQYSKLDFASIQGQKPPSDSTNKAPVCSSKLITTDNFNNNFTLPVPPPGAQKIIDEGVKPAPKGKLVEISNWKVKFTVKNPDGSVITNLAVKPLEDDAINSPGTNTEAGTQTSAEETTGTDSSASPSDTNAAAGLDARVLPAVAMGALALAAAAAF

SEQ ID NO: 1791 - protein, 466 aa, Myceliophthora thermophilia
VQPLEVQGQYFVNPKTGNRFQIVGVAYQPGGSAGYDKAAGRDPLSDPDICLRDAALLQILGVNTIRVYNVNPDVNHDECASIFNAAGMYMILDVNSPLVGESLTSYNPWESYYAAYLNRTFAVVEAFKDYPNTLAFFSGNEVINDEKSGADVPPYMRAVTRDIKNYVKNHASRPIPVGYSAADVRDILFDTFNYFECSLEGDDDDMSKGDIFALNSYSWCGDSSFKKASYDQLVSGFKGSSVPIFFSEYGCNTPSPRIFTEVGTIYGDQMTGVFSGGVVYEYTQEKNNYGLVSMEDDGSAQLRSDYVSLEKQYSKLDFASIQGQKPPSDSTNKAPVCSSKLITTDNFNNNFTLPVPPPGAQKIIDEGVKPAPKGKLVEISNWKVKFTVKNPDGSVITNLAVKPLEDDAINSPGTNTEAGTQTSAEETTGTDSSASPSDTNAAAGLDARVLPAVAMGALALAAAAAF

SEQ ID NO: 1792 - DNA, 2034 bp, Myceliophthora thermophilia
atgcgtttccagcccgccgcccgctgtctcgccgtcgctcagcagttccgaggcccttgttggagccgatccttcttcttctcagcaacattcaccaaccccgctgccgccttcgccaccatggccgcgcccaacggctcttcgtcgcctccccgcggcggcagcagagacgagggggtcacactcgccgccctccccaagtcctggcacttcacgtcctcgcttcccgccgacccgcagttcccgacgcccgccgacagccacaaggcgtcgcgcgaggacctcgggccccgccaggtgcgcggcgccctgttcacgtgggtccgcccggagacgcaggaggagcccgagctgctggccgtctcgccggcggccatgcgcgacctcggcctggcccagtccgaggccgagacggacgagttccggcaggtggtcgccggcaataagatcctcggctgggatcccgagacgctctccgggccgggctacccctgggcgcagtgctacggcggcttccacctgttcgaagccaccaacccgcggaccggccgccggtacgaggtccagctcaagggcgccggcatcaccccctacagccgtttcgccgacggcaaggccgtcctgcgcagcagcatccgcgagttcatcgtcagcgaggccctgcacgccctcggcatccccaccaccagggccctggccatcagcctgctgccgcacagccgcgtccgccgcgagcgcgtcgagccgggcgccgtcgtcgtccgcttcgccgagagctggctgcgcttcggcaccttcgacctcctccgcgcccgcggagaccgcgccctcctccgccgcctggccacctacgtggccgaggacgtcctcggcagctgggagaacctgccggcgcgcctcgacgacccggacgacccggccaagacgccggcgcccgcccgcaacgtgccccgcgacgcggtccagggccccccgggcgccgaggagaaccggttcgcgcggctgtaccgggagatcgcgcggcggagcgcgctggccgtggccaagtggcaggtctacggcttcatgaacggcgtgctcaacaccgacaacacgtccgtcctgggcctctcgatggactacggccccttcgccttcatggacgccttcgacccggcctacacgcccaaccacgacgactacatgctccgctacagctaccgcaaccaaccgaccgtcatctggtggaacctggtccggctgggcgaggccctcggcgagctgctgggcgcgggcccggacgtcgacgcggacgacttcgtcgccacggggccgaccgaggccgccgcgcccgcgctcgtcgcccgcgccgagcgcctcatcaacgccgccggcgaggagtacaaggccgtcttcctggccgagtacaagcggctcttcgccgcccgcatcggcctgcgcggcgggccccgccccgccgacttcgacgccctcttctccccgctcctcgacaccctcgaggccctctcgctcgacttcaacctcttcttccgccgcctctccgacctgcgcctgcgcgacatctcgaccccggaagaccgcctcgcccaggccggccgcttcttctaccaggaccaggaccaaaaccagagcggccggcagcgcgtcgccgactggctcgccgtgtggcgcgagcgcgtcgtccaggactggggcacgctcgaggactgggggtcctccttttcttccgccgacggctccggcgccgtgtccgacaaggccgatgcggagcgcatggcagccatgaagcgggtcaaccccaactttgtgccgcgcggctggatcctcgacgaggtcatccggcgcgtggagaaggacggcgagagggacgtgctgaagagggccctgcacatggccctgcaccccttcgaggacgagtgggcggggagagtttttgacggtgtggtctatgagggcgacagagaggaggaggtgcggtggaccggcgatgtacccaagaccgggagggcgatgcaatgcagttgcagttcctga

SEQ ID NO: 1793 - protein, 677 aa, Myceliophthora thermophilia
MRFQPAARCLAVAQQFRGPCWSRSFFFSATFTNPAAAFATMAAPNGSSSPPRGGSRDEGVTLAALPKSWHFTSSLPADPQFPTPADSHKASREDLGPRQVRGALFTWVRPETQEEPELLAVSPAAMRDLGLAQSEAETDEFRQVVAGNKILGWDPETLSGPGYPWAQCYGGFHLFEATNPRTGRRYEVQLKGAGITPYSRFADGKAVLRSSIREFIVSEALHALGIPTTRALAISLLPHSRVRRERVEPGAVVVRFAESWLRFGTFDLLRARGDRALLRRLATYVAEDVLGSWENLPARLDDPDDPAKTPAPARNVPRDAVQGPPGAEENRFARLYREIARRSALAVAKWQVYGFMNGVLNTDNTSVLGLSMDYGPFAFMDAFDPAYTPNHDDYMLRYSYRNQPTVIWWNLVRLGEALGELLGAGPDVDADDFVATGPTEAAAPALVARAERLINAAGEEYKAVFLAEYKRLFAARIGLRGGPRPADFDALFSPLLDTLEALSLDFNLFFRRLSDLRLRDISTPEDRLAQAGRFFYQDQDQNQSGRQRVADWLAVWRERVVQDWGTLEDWGSSFSSADGSGAVSDKADAERMAAMKRVNPNFVPRGWILDEVIRRVEKDGERDVLKRALHMALHPFEDEWAGRVFDGVVYEGDREEEVRWTGDVPKTGRAMQCSCSS

SEQ ID NO: 1794 - protein, 640 aa, Myceliophthora thermophilia
FATMAAPNGSSSPPRGGSRDEGVTLAALPKSWHFTSSLPADPQFPTPADSHKASREDLGPRQVRGALFTWVRPETQEEPELLAVSPAAMRDLGLAQSEAETDEFRQVVAGNKILGWDPETLSGPGYPWAQCYGGFHLFEATNPRTGRRYEVQLKGAGITPYSRFADGKAVLRSSIREFIVSEALHALGIPTTRALAISLLPHSRVRRERVEPGAVVVRFAESWLRFGTFDLLRARGDRALLRRLATYVAEDVLGSWENLPARLDDPDDPAKTPAPARNVPRDAVQGPPGAEENRFARLYREIARRSALAVAKWQVYGFMNGVLNTDNTSVLGLSMDYGPFAFMDAFDPAYTPNHDDYMLRYSYRNQPTVIWWNLVRLGEALGELLGAGPDVDADDFVATGPTEAAAPALVARAERLINAAGEEYKAVFLAEYKRLFAARIGLRGGPRPADFDALFSPLLDTLEALSLDFNLFFRRLSDLRLRDISTPEDRLAQAGRFFYQDQDQNQSGRQRVADWLAVWRERVVQDWGTLEDWGSSFSSADGSGAVSDKADAERMAAMKRVNPNFVPRGWILDEVIRRVEKDGERDVLKRALHMALHPFEDEWAGRVFDGVVYEGDREEEVRWTGDVPKTGRAMQCSCSS

SEQ ID NO: 1795 - DNA, 666 bp, Myceliophthora thermophilia
atgaagagaaccatcaccgcgattttcgccgttgccggcgctgccaccgtggctgccgtcgactttccttccaacatgccagattgtggcaggctttgcggcaccaacatgtttggcaaagcggccgagcttggttgccaggagaacgacattgcttgcttgtgccggaacaaggacttcggtttcggtattcacgactgtaccattcaggtctgcgacagtgtcgaccaggccaacgtggccatcgactggggcaacagcctctgcgcaggtgtcaacgttccggccaatattccctcggctacctctgtcgccggtcccactggcggctctggttcagcctcgagcgcccctgtcaccagcgagtcgagcgagagcggcgaggctagtgccatcaccaccagcacctggacctcgaccttgtccagcaattcggccaccaccaccgtcattggcgagaccaccatcacgggcactggcggcgcgggtggtgctacctcggcggttgagtccaccgtcacttcacctattgtctcgacgcggactgctgtgacctcggtttctgagccttcaacgaccacaagcagcgcacaggccccccaaatgaccgcggctccggctctcggtgccctcgccgccgccggcattgcgtttgcctttttctag

SEQ ID NO: 1796 - protein, 221 aa, Myceliophthora thermophilia
MKRTITAIFAVAGAATVAAVDFPSNMPDCGRLCGTNMFGKAAELGCQENDIACLCRNKDFGFGIHDCTIQVCDSVDQANVAIDWGNSLCAGVNVPANIPSATSVAGPTGGSGSASSAPVTSESSESGEASAITTSTWTSTLSSNSATTTVIGETTITGTGGAGGATSAVESTVTSPIVSTRTAVTSVSEPSTTTSSAQAPQMTAAPALGALAAAGIAFAFF

SEQ ID NO: 1797 - protein, 202 aa, Myceliophthora thermophilia
VDFPSNMPDCGRLCGTNMFGKAAELGCQENDIACLCRNKDFGFGIHDCTIQVCDSVDQANVAIDWGNSLCAGVNVPANIPSATSVAGPTGGSGSASSAPVTSESSESGEASAITTSTWTSTLSSNSATTTVIGETTITGTGGAGGATSAVESTVTSPIVSTRTAVTSVSEPSTTTSSAQAPQMTAAPALGALAAAGIAFAFF

SEQ ID NO: 1798 - DNA, 939 bp, Myceliophthora thermophilia
atggtgtccttcagcttcacggcgctcgcggcgctcgcggcgttcgcggcgtcggtcgtctcggcgacggtgcccagctcggcccggttcgacctatccaagccgtcgtacgacctctaccgcaacaagccgctgcacgacgacacggtgcagcagggcttcgccttcgacaacgtcaaccggcggctgttcgtgtcgcagcgcaagaacggcgcgggcgagacgtcgggcgacctctgcatcacccagctcgacttctccggcaacgaggtgggccacatgtacctcgaggggttcggccacggcgtctcgttcggcgcgcaggcggacgggtcggcgacgtacctgtggaccgaggtggacgccaacgacaacggctacggcaagcagctggcgcggttcaagttcacgagcggcaagacgctgaccaagtcgtcgagcgagctcaggaagttcaagccggtggcggcggccacggagcacacgtgcgccgtcgacccggtgcacaaccggctggtggtgcgctaccacctcgagggctcgggcaagcacatcgccgtctacgacctcgcggccgccaccaagggcgacttctcgtccccgctggccgacttcaagcagccgctgcccaagaccaagggcaagaacttccagggctacaccgcctacggccggtacctctacctgctctggggcgactcgtacgacgtcagcgccgagctcaactcggaggtcgccagcgtcgacatgaacacgggcgaggtcgtccagggccccctcatcaccaaggccggctccaccctcagcttccgcgagcccgagggcctggccatctacaagacggccgccggccaggtccgcctcttcctcggcttcgcctccggtaaggctggcgaccggaggtccaacctcttctacaagaacgtgaccgtttcttga

SEQ ID NO: 1799 - protein, 312 aa, Myceliophthora thermophilia
MVSFSFTALAALAAFAASVVSATVPSSARFDLSKPSYDLYRNKPLHDDTVQQGFAFDNVNRRLFVSQRKNGAGETSGDLCITQLDFSGNEVGHMYLEGFGHGVSFGAQADGSATYLWTEVDANDNGYGKQLARFKFTSGKTLTKSSSELRKFKPVAAATEHTCAVDPVHNRLVVRYHLEGSGKHIAVYDLAAATKGDFSSPLADFKQPLPKTKGKNFQGYTAYGRYLYLLWGDSYDVSAELNSEVASVDMNTGEVVQGPLITKAGSTLSFREPEGLAIYKTAAGQVRLFLGFASGKAGDRRSNLFYKNVTVS

SEQ ID NO: 1800 - protein, 290 aa, Myceliophthora thermophilia
TVPSSARFDLSKPSYDLYRNKPLHDDTVQQGFAFDNVNRRLFVSQRKNGAGETSGDLCITQLDFSGNEVGHMYLEGFGHGVSFGAQADGSATYLWTEVDANDNGYGKQLARFKFTSGKTLTKSSSELRKFKPVAAATEHTCAVDPVHNRLVVRYHLEGSGKHIAVYDLAAATKGDFSSPLADFKQPLPKTKGKNFQGYTAYGRYLYLLWGDSYDVSAELNSEVASVDMNTGEVVQGPLITKAGSTLSFREPEGLAIYKTAAGQVRLFLGFASGKAGDRRSNLFYKNVTVS

SEQ ID NO: 1801 - DNA, 651 bp, Myceliophthora thermophilia
atggcgtcctcttccacgccagcgacgccgctgctctatgcctgcatcgcgcacaacacaaccatcctggccgagtgcacgacgtcggccagctcgcagacgtcgtcactcgcctcgctgatcctgcccaagatcgaccacgcgagcccgcagaagctgacgtacacgcacggggcgcaccacatccactacatcgccgcctccccctccgagtacccgccggcgcggccgacggcgggcgggctgacctgcgcgcccgggtcctggccgcgcacccgcccgagacgaccgacttcgcggacctgcccaactacggctgcgccggcttcgccgccgacctgttgcgcgctcatggtccgcctcggcgccggcgccgccgccgccgacgacgccatcggcaacgtccgccgcgagatcgacgacgtccgcggcgtcatgacccgcaacatcgagggcctcctcgagcgcggcgagcgcatcgacctgctcgtcgacaagacggaccggctcggccagggcgccagcgagttccgcgtcaggagccgcggcctcaagaggaagatgtggtggaagaacgtcaagctgatgggcctgctgggcttcgtcctgatcctgatcctcgtgacaattgtcgtgtcggtgaggagttaa

SEQ ID NO: 1802 - protein, 216 aa, Myceliophthora thermophilia
MASSSTPATPLLYACIAHNTTILAECTTSASSQTSSLASLILPKIDHASPQKLTYTHGAHHIHYIAASPSEYPPARPTAGGLTCAPGSWPRTRPRRPTSRTCPTTAAPASPPTCCALMVRLGAGAAAADDAIGNVRREIDDVRGVMTRNIEGLLERGERIDLLVDKTDRLGQGASEFRVRSRGLKRKMWWKNVKLMGLLGFVLILILVTIVVSVRS

SEQ ID NO: 1803 - protein, 192 aa, Myceliophthora thermophilia
ECTTSASSQTSSLASLILPKIDHASPQKLTYTHGAHHIHYIAASPSEYPPARPTAGGLTCAPGSWPRTRPRRPTSRTCPTTAAPASPPTCCALMVRLGAGAAAADDAIGNVRREIDDVRGVMTRNIEGLLERGERIDLLVDKTDRLGQGASEFRVRSRGLKRKMWWKNVKLMGLLGFVLILILVTIVVSVRS

SEQ ID NO: 1804 - DNA, 600 bp, Myceliophthora thermophilia
atgttcgacatcgattggagggggcttctgctgcccctagcgtatctggtggtcttggtcggcacattcatgactttctcaacagtctaccgcaagaggaaagcagtccaaagcgcaaacctggcgccatggttcgggccacatcttcaacgcaacatctacctgtcgctgctgcacatggagcccgaggaagggtccgagaaggcgcccaaggtccctgatagcgtcattcgggcggccctcctgcggcgcgccgtcgaggacatccatcgcatcatccagatccgtaccgccaagcaagcctgcagctcgttgctgcaacgagggagtgtcggcgacgacctgtggcagcggtttcagcgcgccgagaaggagatggaggaggagctgcgggacgtcgtgatggaggcaaacgctctcgtcccgggttggggtcaaatcattttccagtccgccaacgagattgccgcaaacaaagttctgcgcgaccggctcggggagattgagaaacagacggagcgcgacaaggagtggtgggagaagcgccgggccagcatcaagaacgagtttatgaaggaactggacgaggaggccaagtag

SEQ ID NO: 1805 - protein, 199 aa, Myceliophthora thermophilia
MFDIDWRGLLLPLAYLVVLVGTFMTFSTVYRKRKAVQSANLAPWFGPHLQRNIYLSLLHMEPEEGSEKAPKVPDSVIRAALLRRAVEDIHRIIQIRTAKQACSSLLQRGSVGDDLWQRFQRAEKEMEEELRDVVMEANALVPGWGQIIFQSANEIAANKVLRDRLGEIEKQTERDKEWWEKRRASIKNEFMKELDEEAK

SEQ ID NO: 1806 - protein, 177 aa, Myceliophthora thermophilia
FMTFSTVYRKRKAVQSANLAPWFGPHLQRNIYLSLLHMEPEEGSEKAPKVPDSVIRAALLRRAVEDIHRIIQIRTAKQACSSLLQRGSVGDDLWQRFQRAEKEMEEELRDVVMEANALVPGWGQIIFQSANEIAANKVLRDRLGEIEKQTERDKEWWEKRRASIKNEFMKELDEEAK

SEQ ID NO: 1807 - DNA, 1638 bp, Myceliophthora thermophilia
atgtcgatcgtggcgtggggcgcccgcaaggcgacgatcgccacgacgctcgtcgccgttctgatcttcctcgcttggtacctgccacaggtactcaacccaacgccgcctgatccggaggagcgcgagcgagacaaacactgggtcgacacgtcgccgagctgggtcgaccgccaggcatgccgctggttggggttatgcggcttgcagcacatacgatgggatgctccctcgcgcggcgacagtgataggccgtccacctgggacgagcttaagtcgctggcgttgggtttgagcacgcactgggagtttggagagaagtcagggcagagcgactgggaagaggcaccggcggaaacggaccttaggcgcggccctcgggcacatagcgccgccagtgcgcgaattctcgaggaggtgcccgactacgtcctggaccatgccccgctggtgcatctctactcgggcgagcacttctggcccgccgacattgccgaacacatccgtcacatgcaaccttatctgaggggtgagttggtcaacaccagcgggcctctaaatctgcaaactctcgcggggctcaacgccctgggaggcactgttttcgtaaccagcgaggacgacgtggagtcgcggcccagctggctgcatagttggacagggatcccagcacccttcaggagcggcggtggctcagggggagatggcggggacgatcaggatcctccgcgatggccggatgacgatggttcatggcaagacgtggacagggatcacccgccgcaccgcatcgttcccccgagggattcgtccgggaggcacagggacctccggcggagacggtccctgtcgagcgctcagcagcccatggtatggacgaactcggacagcagctgggaggacaacaagccgactcgcggcggctactccaaggcgccggccgttctcatcctcgtcgacaagggagcgggcatcctggatgccttctggttcttcttttatagctacaacctggggcagacggtgctcaacatacggttcgggaatcacgtgggcgactgggagcactgcatggttcgctttcagcacggcacgccgcgagccatgttcctcagcgagcatgcaggcggcaaggcgtacctgtggaaggcgctcgagaagcggactcagaaggacggcaagccggcccgtcccgtcatctactcggctgttggcagccatgccatgtacgcgtcgccggggatgcacccgtacgtcctgccgttcaagctgctcaaggacgtgaccgacaagggcccgctctgggatccttcgctgaaccactacgcctactggtacgactacgaggtgggccgggacgaggaggggaactcgacggtgcgagagtacagcagcctggtgcccgccgcatccaacccggacttgccgacttcctggttccatttcgaagggtactggggcgatgacatctatccgctcagcgatcggcgccaatggaggttgtttggcgagtatcactacatcacggggccgctgggaccgaaggcgaagtggttggatcggaggaaggtctgccagacagagaagtgcatcatcgtcgacagcatcgaggcggggaagaagtcgacctggtactaa

SEQ ID NO: 1808 - protein, 545 aa, Myceliophthora thermophilia
MSIVAWGARKATIATTLVAVLIFLAWYLPQVLNPTPPDPEERERDKHWVDTSPSWVDRQACRWLGLCGLQHIRWDAPSRGDSDRPSTWDELKSLALGLSTHWEFGEKSGQSDWEEAPAETDLRRGPRAHSAASARILEEVPDYVLDHAPLVHLYSGEHFWPADIAEHIRHMQPYLRGELVNTSGPLNLQTLAGLNALGGTVFVTSEDDVESRPSWLHSWTGIPAPFRSGGGSGGDGGDDQDPPRWPDDDGSWQDVDRDHPPHRIVPPRDSSGRHRDLRRRRSLSSAQQPMVWTNSDSSWEDNKPTRGGYSKAPAVLILVDKGAGILDAFWFFFYSYNLGQTVLNIRFGNHVGDWEHCMVRFQHGTPRAMFLSEHAGGKAYLWKALEKRTQKDGKPARPVIYSAVGSHAMYASPGMHPYVLPFKLLKDVTDKGPLWDPSLNHYAYWYDYEVGRDEEGNSTVREYSSLVPAASNPDLPTSWFHFEGYWGDDIYPLSDRRQWRLFGEYHYITGPLGPKAKWLDRRKVCQTEKCIIVDSIEAGKKSTWY

SEQ ID NO: 1809 - protein, 511 aa, Myceliophthora thermophilia
TPPDPEERERDKHWVDTSPSWVDRQACRWLGLCGLQHIRWDAPSRGDSDRPSTWDELKSLALGLSTHWEFGEKSGQSDWEEAPAETDLRRGPRAHSAASARILEEVPDYVLDHAPLVHLYSGEHFWPADIAEHIRHMQPYLRGELVNTSGPLNLQTLAGLNALGGTVFVTSEDDVESRPSWLHSWTGIPAPFRSGGGSGGDGGDDQDPPRWPDDDGSWQDVDRDHPPHRIVPPRDSSGRHRDLRRRRSLSSAQQPMVWTNSDSSWEDNKPTRGGYSKAPAVLILVDKGAGILDAFWFFFYSYNLGQTVLNIRFGNHVGDWEHCMVRFQHGTPRAMFLSEHAGGKAYLWKALEKRTQKDGKPARPVIYSAVGSHAMYASPGMHPYVLPFKLLKDVTDKGPLWDPSLNHYAYWYDYEVGRDEEGNSTVREYSSLVPAASNPDLPTSWFHFEGYWGDDIYPLSDRRQWRLFGEYHYITGPLGPKAKWLDRRKVCQTEKCIIVDSIEAGKKSTWY

SEQ ID NO: 1810 - DNA, 837 bp, Myceliophthora thermophilia
atggttaatttcaagtggtcttctctcgccctgctcgccctgcgtgtcgctaccgccttcgccgcggacgatgccgatgctgagcccgtcacctcggtgccggtcgaggaacccgagctgaaggccgacattgagacgaccttcccggatgccgacatcttcggcgtcaagatcgtcaacggtcatgtcaccaaggctctggtcgagattaccaatcacgaagagacgccgatcgacgtcgccttcatcggcggcgcgctcaagaccactaagccgctgcccgaggatgcccccgcctccgccgccatcctgcgcaacctgacggccgtccggtacgacgtctcgatccctcccggcgagaagcatcagcttcccttccagttcgtcctcgacatgatgcctcaggacgtcattatcgaactcgttgccatcatcaccaacgccgccaccaaccagatcttccaggtccaggcccacagcggcactgcgagcattgtcgagccgcccaccagcctgtttgaccctcaaatcatcttcctctatctcttcctgaccggcgtcttcggcgcgaccctgtactttgtctacaagacctggatcgaggcgctcttcccgcaggccaagaaggctggcggacgcgccggcggcaagaagggccgcaagggggccgccgccgccgccgcagatgccgatcccctctcgggcaacgagtcggccggcgccaccagcggcggcgagggctccaagagctacgacgagagctggatcccgccccaccacatcaaccgccccgtcgcgcgccgcgtcaagagcggcgccagcggcaaatcgaaataa

SEQ ID NO: 1811 - protein, 278 aa, Myceliophthora thermophilia
MVNFKWSSLALLALRVATAFAADDADAEPVTSVPVEEPELKADIETTFPDADIFGVKIVNGHVTKALVEITNHEETPIDVAFIGGALKTTKPLPEDAPASAAILRNLTAVRYDVSIPPGEKHQLPFQFVLDMMPQDVIIELVAIITNAATNQIFQVQAHSGTASIVEPPTSLFDPQIIFLYLFLTGVFGATLYFVYKTWIEALFPQAKKAGGRAGGKKGRKGAAAAAADADPLSGNESAGATSGGEGSKSYDESWIPPHHINRPVARRVKSGASGKSK

SEQ ID NO: 1812 - protein, 257 aa, Myceliophthora thermophilia
ADDADAEPVTSVPVEEPELKADIETTFPDADIFGVKIVNGHVTKALVEITNHEETPIDVAFIGGALKTTKPLPEDAPASAAILRNLTAVRYDVSIPPGEKHQLPFQFVLDMMPQDVIIELVAIITNAATNQIFQVQAHSGTASIVEPPTSLFDPQIIFLYLFLTGVFGATLYFVYKTWIEALFPQAKKAGGRAGGKKGRKGAAAAAADADPLSGNESAGATSGGEGSKSYDESWIPPHHINRPVARRVKSGASGKSK

SEQ ID NO: 1813 - DNA, 489 bp, Myceliophthora thermophilia
atgtcttcagacgcttgccccgtttacgcgcccttcttcggtgccatgggctgcacagcagccatcgtcttcacctgcctcggcgcctcgtacggcacggccaagtcgggtgtcggcatcgccgccatgggtgtcctgcggcctgatctcatcgtcaagaacattgttcccgtcattatggccggtatcattggtatctacggcctcgtggtgtcggttcttatctcggatggccttaagcaagacaattacgcgctcttcacgggcttcattcagctcggcgctggtcttgcggtcggtctagcgggcatggctgctggtttcgccatcggcattgtcggtgatgctggcgtccgcggcacagcgcagcaaccacgcctgttcgtcggcatgatcctgattctcattttcgccgaagtcttgggtctctatggcttgatcgtcgcgctgctcatgaactccaaggccacgatcaacattacctgctaa

SEQ ID NO: 1814 - protein, 162 aa, Myceliophthora thermophilia
MSSDACPVYAPFFGAMGCTAAIVFTCLGASYGTAKSGVGIAAMGVLRPDLIVKNIVPVIMAGIIGIYGLVVSVLISDGLKQDNYALFTGFIQLGAGLAVGLAGMAAGFAIGIVGDAGVRGTAQQPRLFVGMILILIFAEVLGLYGLIVALLMNSKATINITC

SEQ ID NO: 1815 - protein, 134 aa, Myceliophthora thermophilia
ASYGTAKSGVGIAAMGVLRPDLIVKNIVPVIMAGIIGIYGLVVSVLISDGLKQDNYALFTGFIQLGAGLAVGLAGMAAGFAIGIVGDAGVRGTAQQPRLFVGMILILIFAEVLGLYGLIVALLMNSKATINITC

SEQ ID NO: 1816 - DNA, 2118 bp, Myceliophthora thermophilia
atgagcaccgactacgcctacgacgaggagggcgtcctctggccctttttcgtcttcaccctcgccctgattgtcaccatccccctcacattccttctagtcaagcggtcgcgagacccagcagcctccttcccgcgcatccagacgagcttcaagcatgcccacacagacacggtcgactccctgcgtaagcaagagaggcgcaaggataggaagatctggctcctgttcgccgtcatcgcgggctgggccgtcatgggctacatgctctatctcatccaaacgaccgacgcgccgacccacaagatttggaacccctatgagatcctgaaccttcccgagacggcgaccgagaagcagatcaagagcacctacaagaagctctccctccgcctgcaccccgacaaggcgaaaccggacccctccaagaacgagacgatcgaagacctgaccgcccgctacgtcgagatctccaaggcgtaccaggctctgacggacgaggagatccgtaacaactacatccagtacggcaacccggacggcaagcagggttacagcatcaacattgcgctgccaaaggtcatcgtgtcggacggcaacggcaagtacgtcgtcctcctctactcggccctcttcggcgtcctgcttccctacttggtcgggtcctggtggtacggcactctccggcgctccaaggagggcgtcctgatggagagcgccaaccggatcttccgcgagtacagggacaacatcgatgagggcggcgtcgtgaccgcgctcagcaccggaaaggaattcgaggagctcttcaagggggacaaggccgagtcgggcctctccaaggtggaatcgcgcatcttggccgaaggcgagttgactccgctggttggcggtctgtccgtcaaggacaaggagacgctggaggatctcgacaacggcccccgaaggaagacgctagcactgctctgggcttacctgggccggatcgagctggatgatgccgagctcaacagggccaagtttgccgtcgccccgatcgcgcactccctcaacaaggccttcaacgccatcgcgctcgcctacatgaacaccggcccgctcctcgcctcttactacaccagccagctcctgatccaggcgctccctcccaagtcgtcgcccctcctccagttgccctacttcaccccggccgtcgtcagagctgtcgagggcgattcgcggatccataccagcgttcaagacttcatggacaggccagacgcgaagcggcgcagtttggtcgtcggcaagggcctcctgagcgaagaacaataccgggaagctgtcagcgtagccaagcagctccccttcctgcgcgttgccaaggcctacttcaaggtcacgggcgagcgcttcatcgtcccctcctcgctcgtcacgctcgttgtgaagggtcgttttgtgccacccgggagcgagaaggtccctgacatcgaccccaacgatctggaggacgtcgacccggccgaagacgatctcgaggccatctcggggcgcaagacgcaaagactcgtcggcaaggacgagaagacgggcaagcccatctacgagtccgtcgaggccgaacacattcccgcccctctcgccgccgctcccttctttgcgcgcgaccacagccctcgctggcacgtgttcctgaccgactcgaagcaggggcgcgtcgcggtcccgcccttcacgtttgcgcagtttgaccgccccatcttcgaggccgacggccggacgcccacgttcgccatgcagacgctcaaggcgcagttccaggcgccgccgcaggccggtcactacacgtttgtcatgcacgtcgtgtgcgacagctacgtcgggttcgacaccaagatggaggtgacgctcattgtggaggaggcgagcaaggctgccgcgatggcggccgaggacgagatcagtgagccagatgaggactccatcgcgggcatcatgcacgccgcaaagggcggccagacgaagaagaggcaaccagctagcgacgatgatgaggactcggacgaggaaagtggaacggacgacgacgatgatgataccagcgtcacaaacacggacaccgagccggagaattag

SEQ ID NO: 1817 - protein, 705 aa, Myceliophthora thermophilia
MSTDYAYDEEGVLWPFFVFTLALIVTIPLTFLLVKRSRDPAASFPRIQTSFKHAHTDTVDSLRKQERRKDRKIWLLFAVIAGWAVMGYMLYLIQTTDAPTHKIWNPYEILNLPETATEKQIKSTYKKLSLRLHPDKAKPDPSKNETIEDLTARYVEISKAYQALTDEEIRNNYIQYGNPDGKQGYSINIALPKVIVSDGNGKYVVLLYSALFGVLLPYLVGSWWYGTLRRSKEGVLMESANRIFREYRDNIDEGGVVTALSTGKEFEELFKGDKAESGLSKVESRILAEGELTPLVGGLSVKDKETLEDLDNGPRRKTLALLWAYLGRIELDDAELNRAKFAVAPIAHSLNKAFNAIALAYMNTGPLLASYYTSQLLIQALPPKSSPLLQLPYFTPAVVRAVEGDSRIHTSVQDFMDRPDAKRRSLVVGKGLLSEEQYREAVSVAKQLPFLRVAKAYFKVTGERFIVPSSLVTLVVKGRFVPPGSEKVPDIDPNDLEDVDPAEDDLEAISGRKTQRLVGKDEKTGKPIYESVEAEHIPAPLAAAPFFARDHSPRWHVFLTDSKQGRVAVPPFTFAQFDRPIFEADGRTPTFAMQTLKAQFQAPPQAGHYTFVMHVVCDSYVGFDTKMEVTLIVEEASKAAAMAAEDEISEPDEDSIAGIMHAAKGGQTKKRQPASDDDEDSDEESGTDDDDDDTSVTNTDTEPEN

SEQ ID NO: 1818 - protein, 673 aa, Myceliophthora thermophilia
LVKRSRDPAASFPRIQTSFKHAHTDTVDSLRKQERRKDRKIWLLFAVIAGWAVMGYMLYLIQTTDAPTHKIWNPYEILNLPETATEKQIKSTYKKLSLRLHPDKAKPDPSKNETIEDLTARYVEISKAYQALTDEEIRNNYIQYGNPDGKQGYSINIALPKVIVSDGNGKYVVLLYSALFGVLLPYLVGSWWYGTLRRSKEGVLMESANRIFREYRDNIDEGGVVTALSTGKEFEELFKGDKAESGLSKVESRILAEGELTPLVGGLSVKDKETLEDLDNGPRRKTLALLWAYLGRIELDDAELNRAKFAVAPIAHSLNKAFNAIALAYMNTGPLLASYYTSQLLIQALPPKSSPLLQLPYFTPAVVRAVEGDSRIHTSVQDFMDRPDAKRRSLVVGKGLLSEEQYREAVSVAKQLPFLRVAKAYFKVTGERFIVPSSLVTLVVKGRFVPPGSEKVPDIDPNDLEDVDPAEDDLEAISGRKTQRLVGKDEKTGKPIYESVEAEHIPAPLAAAPFFARDHSPRWHVFLTDSKQGRVAVPPFTFAQFDRPIFEADGRTPTFAMQTLKAQFQAPPQAGHYTFVMHVVCDSYVGFDTKMEVTLIVEEASKAAAMAAEDEISEPDEDSIAGIMHAAKGGQTKKRQPASDDDEDSDEESGTDDDDDDTSVTNTDTEPEN

SEQ ID NO: 1819 - DNA, 2406 bp, Myceliophthora thermophilia
atgcctggtgcaagcgtggcggtaatgccagcctcggctgcatcaacaccggctacccggaagacctcactcgccccagagagaaagtacaagtgccagttttgcaacagggcctttagcaggagcgagcacaggagcaggcatgagcgatctcacaccaaagagcggccgttcaagtgcatgaagtgccgtagcactttcgtgcgacgcgatctacttctccgccacgaccgtaccgtccatgccaaagacggaggtgttcccctccacagcgatggcaagcgtcgcggcggccccaagacggccagacctgctagcggcccttctaaatcggccatcgccatcgatacttcaaccctcgagcagattgaagctagcagcgacggcgtcttcgacgtcgagaccgcagccatgcttgttgctgacctgcaccagaaggcgaccgcggcggccaaggcgaacggtcactacgacggcaactcgagcatgtccttctcacagaacgagtcggcgatgatggagccctcggtcacgtaccccaacggcgcgatcggcctgccgcagtgggaaggcttcgtgtcccaggagcacaaggcgcactcggtcagctcggctgcttcgacatcgttcgattcccagaacaccagccagctgcgttctcttgctggacagaacgccaacgtaatggctccggggctgcaggcgctcgtcaactcgctccctccttcagccgcaggcactcctgcccctcagtcgcccttccaggcccagcgcagccatacgccggccgacgcgtcccagcagccttcctcaggcttcaaggctcctcagattcacggtgacgaggaacggaacatggtccttgacaatatccgcaacagcgatagagagcacgccatccctgagggcttccgcgttcccaacctgccctccttgaaccggtatctggctacctacttcggcctgttccaccatcacctgccgtttctgcacccggcttccttcgagccgacccgggtctcgccagcgctgcttctcgctgtcctttccatcggcgccctgtacgcgtttgaccaagagcaggcctacatgctccacattgggtccaaggtgttggtcaatcagttcctgcagaacaaggagaactttagctcccgaaagtgccccctctggacgatgcagagctcgcttctgaacatgatctttgccagctggagcggcgatcccaagggcctcgaatgggcatgctcgatcaagagcttgctcgccaacatggttgcaggaaaccgttacgaactgaagcttcgacaggaagctcgcgagggtcgcgccccgacccgtgccgagtgggtcgaagacgaaggttgccgtcgtacatactacgccgtctacatcttcttcggtttgttgacgttgacctacaaccacacgccggccatgagctttaacgagttcgaggatctcgagctcccgtccaccgagggtctgtggaacatgaaggtctcggaggatgcctggcaagatcacctcaaggtgtcgcgcagcgtcaccttcatgatggcccacgacaacctgttccagggcgagacgctcaagtatagcgcctttgcgactcgcgtcatgatcaacgcgctcttcctcgaggtctggtatcacaagcgcagccccgaggcgctgcaggacgtggtgaccgagtacaagctgcggcttgccctggagacgtgggagaagtccctcgacctctgcgagcccgaggctttctcggtgccgctgagcgcgcctcacaagggtcaccctctgctcttcaacgcgaaggccatgttccgcaacgctcgggcccggctcgaggtggacctgaagacggttcaggaggcgctgcgataccacgactcgtacgaggtcgccgcggccatgtcgaactcgagggatcgcgtcaagcgctcgagcgagatgctcaaggtgattcaggagtgctacgactgcatcgagacggcggttctgcaaggcgtccgctgggtggcccgcacgtcgccgacgaactggagcatcgaacacccgctgtgcggtatggatctcatgatcatcctcagcttgtggctgtatcgtctggaacatgacgaagaaccggccaccgaggaggagttggtcatgtacaaccgtatccgccagctgttcgacaaggatctcgatgagacttacgtgacccacctgagttctgtcgtggcccgtctctggggctcaatgctggacgaggtggttgtctggggcatcactcggctgatgggtgaatccttccgtctccactcgcaggccttgatcggctatgtggacgatgttgctgcctccccgagcgtctcgacgccgtctatgacttctcagggtgcggacgaggacagcgtgtattaa

SEQ ID NO: 1820 - protein, 801 aa, Myceliophthora thermophilia
MPGASVAVMPASAASTPATRKTSLAPERKYKCQFCNRAFSRSEHRSRHERSHTKERPFKCMKCRSTFVRRDLLLRHDRTVHAKDGGVPLHSDGKRRGGPKTARPASGPSKSAIAIDTSTLEQIEASSDGVFDVETAAMLVADLHQKATAAAKANGHYDGNSSMSFSQNESAMMEPSVTYPNGAIGLPQWEGFVSQEHKAHSVSSAASTSFDSQNTSQLRSLAGQNANVMAPGLQALVNSLPPSAAGTPAPQSPFQAQRSHTPADASQQPSSGFKAPQIHGDEERNMVLDNIRNSDREHAIPEGFRVPNLPSLNRYLATYFGLFHHHLPFLHPASFEPTRVSPALLLAVLSIGALYAFDQEQAYMLHIGSKVLVNQFLQNKENFSSRKCPLWTMQSSLLNMIFASWSGDPKGLEWACSIKSLLANMVAGNRYELKLRQEAREGRAPTRAEWVEDEGCRRTYYAVYIFFGLLTLTYNHTPAMSFNEFEDLELPSTEGLWNMKVSEDAWQDHLKVSRSVTFMMAHDNLFQGETLKYSAFATRVMINALFLEVWYHKRSPEALQDVVTEYKLRLALETWEKSLDLCEPEAFSVPLSAPHKGHPLLFNAKAMFRNARARLEVDLKTVQEALRYHDSYEVAAAMSNSRDRVKRSSEMLKVIQECYDCIETAVLQGVRWVARTSPTNWSIEHPLCGMDLMIILSLWLYRLEHDEEPATEEELVMYNRIRQLFDKDLDETYVTHLSSVVARLWGSMLDEVVVWGITRLMGESFRLHSQALIGYVDDVAASPSVSTPSMTSQGADEDSVY

SEQ ID NO: 1821 - protein, 783 aa, Myceliophthora thermophilia
TRKTSLAPERKYKCQFCNRAFSRSEHRSRHERSHTKERPFKCMKCRSTFVRRDLLLRHDRTVHAKDGGVPLHSDGKRRGGPKTARPASGPSKSAIAIDTSTLEQIEASSDGVFDVETAAMLVADLHQKATAAAKANGHYDGNSSMSFSQNESAMMEPSVTYPNGAIGLPQWEGFVSQEHKAHSVSSAASTSFDSQNTSQLRSLAGQNANVMAPGLQALVNSLPPSAAGTPAPQSPFQAQRSHTPADASQQPSSGFKAPQIHGDEERNMVLDNIRNSDREHAIPEGFRVPNLPSLNRYLATYFGLFHHHLPFLHPASFEPTRVSPALLLAVLSIGALYAFDQEQAYMLHIGSKVLVNQFLQNKENFSSRKCPLWTMQSSLLNMIFASWSGDPKGLEWACSIKSLLANMVAGNRYELKLRQEAREGRAPTRAEWVEDEGCRRTYYAVYIFFGLLTLTYNHTPAMSFNEFEDLELPSTEGLWNMKVSEDAWQDHLKVSRSVTFMMAHDNLFQGETLKYSAFATRVMINALFLEVWYHKRSPEALQDVVTEYKLRLALETWEKSLDLCEPEAFSVPLSAPHKGHPLLFNAKAMFRNARARLEVDLKTVQEALRYHDSYEVAAAMSNSRDRVKRSSEMLKVIQECYDCIETAVLQGVRWVARTSPTNWSIEHPLCGMDLMIILSLWLYRLEHDEEPATEEELVMYNRIRQLFDKDLDETYVTHLSSVVARLWGSMLDEVVVWGITRLMGESFRLHSQALIGYVDDVAASPSVSTPSMTSQGADEDSVY

SEQ ID NO: 1822 - DNA, 1479 bp, Myceliophthora thermophilia
atggggaaagtgttcaacatctgccttgcggcctttgccgctaccgggtcgttcctcttcggctacgactcgggtgtgatgaccgatgtcattgcgtccgatgacttcctcagcttcttcaacacaagcaccggaagccccatcatcggggccatcaacagcaccttctccggcggcgccgtctttggttcgctgatgggcggtctcacgatggataggttcggccgcaggaagaccatcatgatcggggccatgattgcccttgtcggctccatcctgcaggccgccgcccggaacctccccatgatcctcgtcggccgcatcatcgccgggtgggcggtcgggctgctgagcatgtcggttcccgtctaccagtccgagtgtgcccaccccaggatccgtggtctgattgttggcttgtctcagcagatgattggtgttggcttcatcgtgtccacctgggtgggatacggatcctcgtatgcgtccggaggcttgagccagttccagtggaggttcccgctcgctttccaggccgcgccggcgctgctccttgtttgcggcatcatgttcttcccggaatctccccgccatctgatggagaaggataacgaggaagaagcgatgcgggtcctgcgcaagctgcactacgacggcaccaacgacgaatggatccggcaagagttccacgagatcaagacgaccatcgccgccgagaaggccatcacggttccggggtggaggatcatgttcacggtgccgcagtggcgcacccggctcatgcacggcgttgccgtccaggtcttcacccagttcaccggcatcaacgtcatcgggtactatcagacgcagatgtacgaggccctcggcgtcaccgggaaccgggccctgctggtggcgggcatctacaactgcctgggccccctcgccaacctcatcttcatcatcttcatcatcgaccgcgtcgggcgccggcgtcccctcctctggggcactgtcgccatcgtcatcgctctgatctgcgagtcggccatcaacagccgtatcgacaagagcaatccggaccacgcgctctccatcggcggcgtcttcttcctcttctgcgtcaccgtcatcttctcgtggtcctggggccccatcagttgggtctacatgtccgaggtcatgcccatgcagatccgggcccgggggaatgctttcgccaccggcctcggcaactggctggtgtcgaccttttggtctcagctctcccccatggcgcttaagaagctggagtggaagttctactttcttttcgttgcatgggacgtcttggtcaccattccggtcgtctttttcttcttcaaggagacaaaacagctctccctggaggagatagacctgttgttcggcgaaaggtctctgggtaccttgccaaaggaccttaataaggggaccctggatcagccggaagtaacagcagaggagaaggtagcataa

SEQ ID NO: 1823 - protein, 492 aa, Myceliophthora thermophilia
MGKVFNICLAAFAATGSFLFGYDSGVMTDVIASDDFLSFFNTSTGSPIIGAINSTFSGGAVFGSLMGGLTMDRFGRRKTIMIGAMIALVGSILQAAARNLPMILVGRIIAGWAVGLLSMSVPVYQSECAHPRIRGLIVGLSQQMIGVGFIVSTWVGYGSSYASGGLSQFQWRFPLAFQAAPALLLVCGIMFFPESPRHLMEKDNEEEAMRVLRKLHYDGTNDEWIRQEFHEIKTTIAAEKAITVPGWRIMFTVPQWRTRLMHGVAVQVFTQFTGINVIGYYQTQMYEALGVTGNRALLVAGIYNCLGPLANLIFIIFIIDRVGRRRPLLWGTVAIVIALICESAINSRIDKSNPDHALSIGGVFFLFCVTVIFSWSWGPISWVYMSEVMPMQIRARGNAFATGLGNWLVSTFWSQLSPMALKKLEWKFYFLFVAWDVLVTIPVVFFFFKETKQLSLEEIDLLFGERSLGTLPKDLNKGTLDQPEVTAEEKVA

SEQ ID NO: 1824 - protein, 464 aa, Myceliophthora thermophilia
DVIASDDFLSFFNTSTGSPIIGAINSTFSGGAVFGSLMGGLTMDRFGRRKTIMIGAMIALVGSILQAAARNLPMILVGRIIAGWAVGLLSMSVPVYQSECAHPRIRGLIVGLSQQMIGVGFIVSTWVGYGSSYASGGLSQFQWRFPLAFQAAPALLLVCGIMFFPESPRHLMEKDNEEEAMRVLRKLHYDGTNDEWIRQEFHEIKTTIAAEKAITVPGWRIMFTVPQWRTRLMHGVAVQVFTQFTGINVIGYYQTQMYEALGVTGNRALLVAGIYNCLGPLANLIFIIFIIDRVGRRRPLLWGTVAIVIALICESAINSRIDKSNPDHALSIGGVFFLFCVTVIFSWSWGPISWVYMSEVMPMQIRARGNAFATGLGNWLVSTFWSQLSPMALKKLEWKFYFLFVAWDVLVTIPVVFFFFKETKQLSLEEIDLLFGERSLGTLPKDLNKGTLDQPEVTAEEKVA

SEQ ID NO: 1825 - DNA, 1521 bp, Myceliophthora thermophilia
atgtacaaggcccagaagttcgctctcggcctgctcgccgcggcggcagttgccacggcttcggatgttgtccagctgaagaaggacaccttcgacgacttcatcaagtccaacgaccttgtcctcgctgagttctttgccccgtggtgtggtcactgcaaggcgctcgctcccgagtacgaagaagctgcgacctcgctcaaggagaagaacatcaagctcgtcaaggtcgactgcacagaagagaccgagctctgccaacagcatggcgttgagggctacccgaccctgaaggtcttccgcggcctcgacaacgtcgccccctacaagggccagcgcaaggctgctgccatcacctcctacatggtcaagcagtcgctgcccgccgtctctgaggttaccaaggacaccctcgaggagttcaagaaggccgacaaggttgttatcgtggcctacgttgatgccgatgataagacgtccagcgaagtcttcaccaagaccgcggagaagctccgtgacaactaccccttcggtctcagcaccgacgctgccctggccgaggccgagggcgtcaaggctcccgccatcgtcctctacaaggactttgatgagggcaaggctgtcttcaccgagaaattcgaccttgaggagattgagaagtttgccaagaccgcggccaccccgctcattggcgagattggccccgagacctactcggactacatgtcggctggcatccccctcgcctacatcttcgccgagacggccgaggagcgcaaggagatcagcgagaagctcaagcccatcgctgaggcccagcgtggtgtcatcaacttcggtaccattgacgccaaggcgttcggtgcccacgctggcaacctgaacctgaagacggacaagttccccgctttcgccattcaggagaccactaagaaccagaagttcccctttgaccaggacaaggagatcacgttcgagtccatcaaggctttcgttgacgactttgttgccggcaagatcgagcccagcatcaagtcggagcccatcccggagaagcaggagggccccgtgaccgttgtcgtcgccaagagctacaacgacattgtccttgacgacaccaaggatgtcctgattgagttctacgccccgtggtgcggtcactgcaaggctctggctcccaagtacgagaagctcggctctctgtatgccgccagcgagttcaaggacaaggtcgtcatcgccaaggttgatgccactgccaacgacgtccccgatgagatccagggcttccctaccatcaagctctaccccgctggtgacaaggccaaccccgtcacctactctggctctcgcactgtcgaggacctcatcaagttcgttgccgagaacggcaagtacaaggccagcatctccgaggagcctgaggagaagacttcttcgtcgtcggccgccagcgagtctgccagcgccagcgagaccaagtcggaggaggctaaggagacggaccacgacgagctctaa

SEQ ID NO: 1826 - protein, 506 aa, Myceliophthora thermophilia
MYKAQKFALGLLAAAAVATASDVVQLKKDTFDDFIKSNDLVLAEFFAPWCGHCKALAPEYEEAATSLKEKNIKLVKVDCTEETELCQQHGVEGYPTLKVFRGLDNVAPYKGQRKAAAITSYMVKQSLPAVSEVTKDTLEEFKKADKVVIVAYVDADDKTSSEVFTKTAEKLRDNYPFGLSTDAALAEAEGVKAPAIVLYKDFDEGKAVFTEKFDLEEIEKFAKTAATPLIGEIGPETYSDYMSAGIPLAYIFAETAEERKEISEKLKPIAEAQRGVINFGTIDAKAFGAHAGNLNLKTDKFPAFAIQETTKNQKFPFDQDKEITFESIKAFVDDFVAGKIEPSIKSEPIPEKQEGPVTVVVAKSYNDIVLDDTKDVLIEFYAPWCGHCKALAPKYEKLGSLYAASEFKDKVVIAKVDATANDVPDEIQGFPTIKLYPAGDKANPVTYSGSRTVEDLIKFVAENGKYKASISEEPEEKTSSSSAASESASASETKSEEAKETDHDEL

SEQ ID NO: 1827 - protein, 486 aa, Myceliophthora thermophilia
SDVVQLKKDTFDDFIKSNDLVLAEFFAPWCGHCKALAPEYEEAATSLKEKNIKLVKVDCTEETELCQQHGVEGYPTLKVFRGLDNVAPYKGQRKAAAITSYMVKQSLPAVSEVTKDTLEEFKKADKVVIVAYVDADDKTSSEVFTKTAEKLRDNYPFGLSTDAALAEAEGVKAPAIVLYKDFDEGKAVFTEKFDLEEIEKFAKTAATPLIGEIGPETYSDYMSAGIPLAYIFAETAEERKEISEKLKPIAEAQRGVINFGTIDAKAFGAHAGNLNLKTDKFPAFAIQETTKNQKFPFDQDKEITFESIKAFVDDFVAGKIEPSIKSEPIPEKQEGPVTVVVAKSYNDIVLDDTKDVLIEFYAPWCGHCKALAPKYEKLGSLYAASEFKDKVVIAKVDATANDVPDEIQGFPTIKLYPAGDKANPVTYSGSRTVEDLIKFVAENGKYKASISEEPEEKTSSSSAASESASASETKSEEAKETDHDEL

SEQ ID NO: 1828 - DNA, 882 bp, Myceliophthora thermophilia
atgcgcgtttccactcacctctcggtgctgctggctgcggtcaccacccagattttggcccaggagactggcgaactgggagatgccgctgaggtgaccaacaaccccgttggcgtcgtgtacaaggcgactctgcccgactcggccttcttcaagcccgcctaccccgacggcggcaacatccagggcgagatcacggccgaggccaacagcgacggcaagggcgtcaagttcaccgtgaggctcagcaacctgcccaagacgggcggcccattcccctaccatctccacgtagcgcccgttcccgaggacggcaactgcacagagacgctcgcccacctggacccctacatccgcggcgaggacacaccgtgcaacgcggatgcgccggcgacgtgccaggttggcgacttgagcggcaagcacggcaagatcccggcaaacaagaccacgttcgagacgtcatacgtggacctgtacgcgtcgacggtcgagggcatcggcgccttcttcggcaaccgcagcatcgtgtttcacttcccgaataagacgcgcattacctgcgccaactttgagagggtcgacggcggcgccgacctgcccggcgatgacgatgacaatgacgacaacgacgataacgacgacaacgacaatgatggtaacgacaacgacggtgatgatgatgatgataacgccggtggcagcagcccgtcgccgaccaccgccgcgtctccaagtattacctcgggacccagcagcacggagggagcaggtgctccgccgaccgagacgagcgatatcgcgacggctggcgctcccgggctgcgggcgagcgtcgcaggcgccgtggtgctcggcgccgctgtcgcggtcctcctctag

SEQ ID NO: 1829 - protein, 293 aa, Myceliophthora thermophilia
MRVSTHLSVLLAAVTTQILAQETGELGDAAEVTNNPVGVVYKATLPDSAFFKPAYPDGGNIQGEITAEANSDGKGVKFTVRLSNLPKTGGPFPYHLHVAPVPEDGNCTETLAHLDPYIRGEDTPCNADAPATCQVGDLSGKHGKIPANKTTFETSYVDLYASTVEGIGAFFGNRSIVFHFPNKTRITCANFERVDGGADLPGDDDDNDDNDDNDDNDNDGNDNDGDDDDDNAGGSSPSPTTAASPSITSGPSSTEGAGAPPTETSDIATAGAPGLRASVAGAVVLGAAVAVLL

SEQ ID NO: 1830 - protein, 273 aa, Myceliophthora thermophilia
QETGELGDAAEVTNNPVGVVYKATLPDSAFFKPAYPDGGNIQGEITAEANSDGKGVKFTVRLSNLPKTGGPFPYHLHVAPVPEDGNCTETLAHLDPYIRGEDTPCNADAPATCQVGDLSGKHGKIPANKTTFETSYVDLYASTVEGIGAFFGNRSIVFHFPNKTRITCANFERVDGGADLPGDDDDNDDNDDNDDNDNDGNDNDGDDDDDNAGGSSPSPTTAASPSITSGPSSTEGAGAPPTETSDIATAGAPGLRASVAGAVVLGAAVAVLL

SEQ ID NO: 1831 - DNA, 792 bp, Myceliophthora thermophilia
atggcgtctccgaggcgtatccgtgtgattacctatctggtcctggccgctattgtcacgctcctcttcctctcgcaatcccgcagcgccgactcgcaggcgccgcaagatttctacgccaaaaccgtcaacgccatggacagacaccacgcggctgctggccaggctggccagaaacctctcgccgatcatggtgtgggtgcggatggagatatcgatgaggacgacagcgtcctgtccaggcagttggccgaccggctgcggcaggccgagcaagaagcgaaggagaatgcacaagccaagggacccaacaagcccgagacgcccgaagaagtcgttggcgtaggaagttccgcccggggtcaggaaaggcctgcgccggtcgagaaagcccgagaagagcccgagaagaccgagaaggaccacgaggtggaggcggagctgaactccatcctgaagagatccccagtcatcatcttctccaagtcttactgcccgttctccaagatggcgaaaggtatcctccttgacaagtacatcatcgaacccacccctttcgtcgtcgaactggaccagcatcccctgggggccaggattcaggcgacactgggcgagatgacgggcaggcgaacggtccccaatgtcatgatatacgggcagagcatcggcggcggcgacgacatctccgccctggacaaggaaaaaaccctggccgacaagatcgcctcgctcgggcagggtcgaatcagcgtctccctgcggttcgcccagagcgcgcaaaaagctggctag

SEQ ID NO: 1832 - protein, 263 aa, Myceliophthora thermophilia
MASPRRIRVITYLVLAAIVTLLFLSQSRSADSQAPQDFYAKTVNAMDRHHAAAGQAGQKPLADHGVGADGDIDEDDSVLSRQLADRLRQAEQEAKENAQAKGPNKPETPEEVVGVGSSARGQERPAPVEKAREEPEKTEKDHEVEAELNSILKRSPVIIFSKSYCPFSKMAKGILLDKYIIEPTPFVVELDQHPLGARIQATLGEMTGRRTVPNVMIYGQSIGGGDDISALDKEKTLADKIASLGQGRISVSLRFAQSAQKAG

SEQ ID NO: 1833 - protein, 234 aa, Myceliophthora thermophilia
ADSQAPQDFYAKTVNAMDRHHAAAGQAGQKPLADHGVGADGDIDEDDSVLSRQLADRLRQAEQEAKENAQAKGPNKPETPEEVVGVGSSARGQERPAPVEKAREEPEKTEKDHEVEAELNSILKRSPVIIFSKSYCPFSKMAKGILLDKYIIEPTPFVVELDQHPLGARIQATLGEMTGRRTVPNVMIYGQSIGGGDDISALDKEKTLADKIASLGQGRISVSLRFAQSAQKAG

SEQ ID NO: 1834 - DNA, 1110 bp, Myceliophthora thermophilia
atggtgctcctcaagagcttcgtgctcgccggccttacggctgtcgctgccgccaagtcggccgtcctcgacctcatccccgacaacttcgacaaggtagtcctcaagtccggcaagccaacactcgtcgagttctttgccccgtggtgcggccactgcaagaaccttgctcctgtctacgaagagctcgccctcgcattcgagcatgccaaagacaaggtccagatcgccaaggtcgacgccgatgccgagcgggatctcggcaagcggttcggcgtgcagggcttccccacgctgaagttcttcgacggcaagagcgacaagccgaccgagtacaatggcgggcgggacctggagtcgctgtccagcttcatcacggagaagacgggcatccggccgaggaagaaggcggccaaacccagcaacgtggtaatgcttacggattccaccttcaagaaccagattggcggtgacaagaacgttttggtggcgttcactgctccatggtgcggacactgcaagaggcttgcacctacctgggagtcgcttgccgatacctttgccagcgagtccaatgtagtgattgccaaagtcgacgccgacgccgagacgggtaagcgcaccgccgccgagtatggcgtgagcgggtacccgaccatcaagttcttccctgcgggcagcaccacgcccgaggactacaacggcgcacgctccgaggaatctttcgtcacattcttgaatgagaagaccggcactcaccgcgtcgctggtggtggtcttgatgccaccgctggcacggttgaggcgcttgacaccattgttgctaagctggtcggcggcaccgcgctggctgaggcggctgccgaggcgaagaaggttgctgaatccctcacagacgaggtgcaggccaagtatgccaagtactacttgcgtgtgtttgagaagctgagcaagagcgaggagtatgcggccaaggagctcgcgcgcctggagggcatcatcaagaaaggcgggctggtgccgaccaagctggacgagctgacgattaagacgaatgtcctccgcaagttcgtcgagaaggcgaccgatggcgagaaggaggagctgtaa

SEQ ID NO: 1835 - protein, 369 aa, Myceliophthora thermophilia
MVLLKSFVLAGLTAVAAAKSAVLDLIPDNFDKVVLKSGKPTLVEFFAPWCGHCKNLAPVYEELALAFEHAKDKVQIAKVDADAERDLGKRFGVQGFPTLKFFDGKSDKPTEYNGGRDLESLSSFITEKTGIRPRKKAAKPSNVVMLTDSTFKNQIGGDKNVLVAFTAPWCGHCKRLAPTWESLADTFASESNVVIAKVDADAETGKRTAAEYGVSGYPTIKFFPAGSTTPEDYNGARSEESFVTFLNEKTGTHRVAGGGLDATAGTVEALDTIVAKLVGGTALAEAAAEAKKVAESLTDEVQAKYAKYYLRVFEKLSKSEEYAAKELARLEGIIKKGGLVPTKLDELTIKTNVLRKFVEKATDGEKEEL

SEQ ID NO: 1836 - protein, 351 aa, Myceliophthora thermophilia
KSAVLDLIPDNFDKVVLKSGKPTLVEFFAPWCGHCKNLAPVYEELALAFEHAKDKVQIAKVDADAERDLGKRFGVQGFPTLKFFDGKSDKPTEYNGGRDLESLSSFITEKTGIRPRKKAAKPSNVVMLTDSTFKNQIGGDKNVLVAFTAPWCGHCKRLAPTWESLADTFASESNVVIAKVDADAETGKRTAAEYGVSGYPTIKFFPAGSTTPEDYNGARSEESFVTFLNEKTGTHRVAGGGLDATAGTVEALDTIVAKLVGGTALAEAAAEAKKVAESLTDEVQAKYAKYYLRVFEKLSKSEEYAAKELARLEGIIKKGGLVPTKLDELTIKTNVLRKFVEKATDGEKEEL

SEQ ID NO: 1837 - DNA, 2112 bp, Myceliophthora thermophilia
atgcagagcaagatcaccgcccttctcgcctggggcggtctgttgggcctgtctcaggccgcatgcccctttgccgacccggccgcactccagaggagagatgatgctccgccggctgacattctcgaaaagtacaaggtggatgacagcaaaggctacatgtcatctgatgtcggcggtcccatcggggatcaggccagcctcagagccggcggcagaggtccaaccctgctcgaggacttcattttccgccagaagatccagcatttcgatcatgagcgggttcccgaacgagctgtccacgcgcgcggtgccggagctcatggaactttcactagctatgccgactggagcaacctcacggcggcgtcgttcctgagctcggccggcaagaagacgccggtcttcgtccgcttctctaccgtcgccggatccaggggcagcgccgataccgcgcgagacgtccacggcttcgcgactcgattttacaccgatgaaggcaactttgacattgtcggaaacaacattcccgtcttcttcatccaggatgctatccagttccctgacctcatccacgccgttaagccgcggccagacaacgagatccctcaagcggccaccgcccacgactcggcatgggacttcttcagctcgcagcccagcacgttgcacacgctgttctgggccatggctggcaacggcatcccccgcagctaccgtcacatggatggcttcggcatccacacgttccgcctcgtgaaggaagatggctcgtccaagctcgtcaagtggcactggaagactcgtcaggggaaggccagccttgtctgggaggaggctcaggcggtggccggaaagaacgccgacttccaccgtcaggatctctgggacgcgatcgagtccggcaacggccccgagtgggagctcggcgtccaggtggtggacgaggacaaggcgctggctttcggctttgacctgctggacccgaccaagatcatccccgaggagctcgttcccatcacgccgctgggcctcatgaagctggatcgcaacccgaccaactactttgccgagacggagcagatcatgttccagcccggccacgttgtgcgcggcatcgacttctccgaggatcctctgctgcagggccgcctcttctcctacctcgacacccagctgaaccgcaacggcggccccaactttgagcagctgcccatcaacatgccgcgtgcccccatccacaacaacaaccgcgacggcgctgggcagacctttattcacaccaacatctatccctactctcccaacacgctgaacaagggctaccccctgcaagccaaccagaccagcggccgcgggttcttcacggcgccgggccggcgtgtcacgggcgagctcctccgggagctctcgcccacgttcaacgaccactggtcgcagccgcgcctcttctacaactcgctcaagccggtggagcagcagttcctgatcaacgcgatccggttcgagacgagccacatccggtcgacgacggtcaagcagaacgtgctggcgcagctcaaccgggtcagccacgacgtggcggtgcgggtggcggcggcgctggggctggaggcgccggcgccggacgacacgtactaccacgacaacaagacggcgggcctgtccatcttcggcgagccgttgccgaccatcaagacgctgcgggtgggcgtgctggcgagcgtgcagaagaacagcagcgcgctggcgcaggccggccggctcaaggcggcgctcgagaaggacgggctcgtggtgacggtcgtgggcgagtcgctggccgagggcgtcgaccagacctactcggccgccgacgcgaccgcgttcgacgcggtcatcgtggccgagggcgccgagcccgagcgaactggccagatcctgcaagatgcctatcgcttgggcaaacccgtcggtgtgatcggcaaggccgagggcgcctacaagagcgcgggcgtgccggtcggcggcaagggcgtgtacaccgccgccggggtggacgcgatcgtcaaggatctcgaggagggtctgaagacatttaggtttacggaccggttcccgcttgacaactaa

SEQ ID NO: 1838 - protein, 703 aa, Myceliophthora thermophilia
MQSKITALLAWGGLLGLSQAACPFADPAALQRRDDAPPADILEKYKVDDSKGYMSSDVGGPIGDQASLRAGGRGPTLLEDFIFRQKIQHFDHERVPERAVHARGAGAHGTFTSYADWSNLTAASFLSSAGKKTPVFVRFSTVAGSRGSADTARDVHGFATRFYTDEGNFDIVGNNIPVFFIQDAIQFPDLIHAVKPRPDNEIPQAATAHDSAWDFFSSQPSTLHTLFWAMAGNGIPRSYRHMDGFGIHTFRLVKEDGSSKLVKWHWKTRQGKASLVWEEAQAVAGKNADFHRQDLWDAIESGNGPEWELGVQVVDEDKALAFGFDLLDPTKIIPEELVPITPLGLMKLDRNPTNYFAETEQIMFQPGHVVRGIDFSEDPLLQGRLFSYLDTQLNRNGGPNFEQLPINMPRAPIHNNNRDGAGQTFIHTNIYPYSPNTLNKGYPLQANQTSGRGFFTAPGRRVTGELLRELSPTFNDHWSQPRLFYNSLKPVEQQFLINAIRFETSHIRSTTVKQNVLAQLNRVSHDVAVRVAAALGLEAPAPDDTYYHDNKTAGLSIFGEPLPTIKTLRVGVLASVQKNSSALAQAGRLKAALEKDGLVVTVVGESLAEGVDQTYSAADATAFDAVIVAEGAEPERTGQILQDAYRLGKPVGVIGKAEGAYKSAGVPVGGKGVYTAAGVDAIVKDLEEGLKTFRFTDRFPLDN

SEQ ID NO: 1839 - protein, 683 aa, Myceliophthora thermophilia
ACPFADPAALQRRDDAPPADILEKYKVDDSKGYMSSDVGGPIGDQASLRAGGRGPTLLEDFIFRQKIQHFDHERVPERAVHARGAGAHGTFTSYADWSNLTAASFLSSAGKKTPVFVRFSTVAGSRGSADTARDVHGFATRFYTDEGNFDIVGNNIPVFFIQDAIQFPDLIHAVKPRPDNEIPQAATAHDSAWDFFSSQPSTLHTLFWAMAGNGIPRSYRHMDGFGIHTFRLVKEDGSSKLVKWHWKTRQGKASLVWEEAQAVAGKNADFHRQDLWDAIESGNGPEWELGVQVVDEDKALAFGFDLLDPTKIIPEELVPITPLGLMKLDRNPTNYFAETEQIMFQPGHVVRGIDFSEDPLLQGRLFSYLDTQLNRNGGPNFEQLPINMPRAPIHNNNRDGAGQTFIHTNIYPYSPNTLNKGYPLQANQTSGRGFFTAPGRRVTGELLRELSPTFNDHWSQPRLFYNSLKPVEQQFLINAIRFETSHIRSTTVKQNVLAQLNRVSHDVAVRVAAALGLEAPAPDDTYYHDNKTAGLSIFGEPLPTIKTLRVGVLASVQKNSSALAQAGRLKAALEKDGLVVTVVGESLAEGVDQTYSAADATAFDAVIVAEGAEPERTGQILQDAYRLGKPVGVIGKAEGAYKSAGVPVGGKGVYTAAGVDAIVKDLEEGLKTFRFTDRFPLDN

SEQ ID NO: 1840 - DNA, 1605 bp, Myceliophthora thermophilia
atgggcttctttgatggcctgaggggcaactggctgatcgcctgcatcaccgttgtcaacgcgacctccatggcatggtttggatatgatcagggcgtcttctcgggcgtgttgatctcatccgacttcaagcactggtttcccgagaccaacaaagccaacatccctggcatcacctccagctgcttctcgcttggcgctttttgcggagccatcttcgccttcaccctcggcgacaagctcggccgcaaaaagacgatcgccctcggcctcctctgcaatgtcgtcggcgctatcctccagatcgtggcgtggcacctgccgcagatgataattggccgcgtgatcaacgggtttggcatgggcctcacctcctccacgtgtcccgtctaccaagccgagtgctcccgcccggcagttcgcggcaagttggtcgtggtgcagagcgtgtgcaacacggcggccttctgtctctccaactggatgaactacggtctctacttctcgggcggcgctctgcagtggcgcttcccgcttggcttccagctcatcttccccgcggtcgtgtccgtcgccctcctgttcgtccccgagtcgccccgttggctgctcctgcggaaccggcacggtgaggccctcgcggtgatcgcccggcttgaagggaaggacgcgaccattcacgacgacaaggtgacggccgagtacctctcgatccgcacagcgctgcagcacgagcgcaaggaccggccgccgttcagcgacgtcatccggttcagagacaggcagcagaacctgcgccggctgctcctgtcgtgcggcacacagttcatgcagcagttctcgggcgtcaacgcgctggggtactatctgccaaccctgctgcagcaaagcgtcggcttcgacgagcagatgtcgcggttgatgacgggagtgaatggcaccatctaccttggcgccgccctgtgctgcatcctgattattgaccggttcgggcggagaaagatgatgctctacggtgccagcaccatgggtgcctgctatctcgtcgcggccatgtgccttcgagctgggcaggccgggcaagcggacaaaaaacagatgggcaacgctacgacggccatgttcttcctctactacttcttctacggcaccagcttcgccaaggtgccctgggtgtacaactcggaggtgaactcgctcaggtggcgcactcggggcgcggcggcggcgacggcgaccaactggatgggtggcttcatcgtgacgcagttcaccaaggtgggcgtcgacaacctcaagtggggattctacctcatctttgccgtcatctgctgggcctacttccccgtcgtgtactttctgtacccggagacctcgcggcgcacgctcgaagacatggacgagattttcatgtcgaatcccgggccgtttgtgttccacaagcgcgaactgacgcagcgccgtcggccgcaggcgttcatcgacgccgaggctcgtcgtatcgatgagggcgcggcagaggaggccgggacgcgcgttctggacaagcaggctctcgacaacgctgccgcggctcagcaccagggtgtcagcaaggaggcttga

SEQ ID NO: 1841 - protein, 534 aa, Myceliophthora thermophilia
MGFFDGLRGNWLIACITVVNATSMAWFGYDQGVFSGVLISSDFKHWFPETNKANIPGITSSCFSLGAFCGAIFAFTLGDKLGRKKTIALGLLCNVVGAILQIVAWHLPQMIIGRVINGFGMGLTSSTCPVYQAECSRPAVRGKLVVVQSVCNTAAFCLSNWMNYGLYFSGGALQWRFPLGFQLIFPAVVSVALLFVPESPRWLLLRNRHGEALAVIARLEGKDATIHDDKVTAEYLSIRTALQHERKDRPPFSDVIRFRDRQQNLRRLLLSCGTQFMQQFSGVNALGYYLPTLLQQSVGFDEQMSRLMTGVNGTIYLGAALCCILIIDRFGRRKMMLYGASTMGACYLVAAMCLRAGQAGQADKKQMGNATTAMFFLYYFFYGTSFAKVPWVYNSEVNSLRWRTRGAAAATATNWMGGFIVTQFTKVGVDNLKWGFYLIFAVICWAYFPVVYFLYPETSRRTLEDMDEIFMSNPGPFVFHKRELTQRRRPQAFIDAEARRIDEGAAEEAGTRVLDKQALDNAAAAQHQGVSKEA

SEQ ID NO: 1842 - protein, 513 aa, Myceliophthora thermophilia
TSMAWFGYDQGVFSGVLISSDFKHWFPETNKANIPGITSSCFSLGAFCGAIFAFTLGDKLGRKKTIALGLLCNVVGAILQIVAWHLPQMIIGRVINGFGMGLTSSTCPVYQAECSRPAVRGKLVVVQSVCNTAAFCLSNWMNYGLYFSGGALQWRFPLGFQLIFPAVVSVALLFVPESPRWLLLRNRHGEALAVIARLEGKDATIHDDKVTAEYLSIRTALQHERKDRPPFSDVIRFRDRQQNLRRLLLSCGTQFMQQFSGVNALGYYLPTLLQQSVGFDEQMSRLMTGVNGTIYLGAALCCILIIDRFGRRKMMLYGASTMGACYLVAAMCLRAGQAGQADKKQMGNATTAMFFLYYFFYGTSFAKVPWVYNSEVNSLRWRTRGAAAATATNWMGGFIVTQFTKVGVDNLKWGFYLIFAVICWAYFPVVYFLYPETSRRTLEDMDEIFMSNPGPFVFHKRELTQRRRPQAFIDAEARRIDEGAAEEAGTRVLDKQALDNAAAAQHQGVSKEA

SEQ ID NO: 1843 - DNA, 1515 bp, Myceliophthora thermophilia
atggtcctctctcccaagtggtatcagttcctggtgggcgtcttcgcctcgctcgggtctctgctgtacggctacgacctgggtgtcattgcccaggtgattgcctcgcagtccttcaagtcacggttcagtcccagtgacaatgaggaagcagcggtcgtgtccgtcttcacgggcggcgccttctttggtgccatggcggccggccccatgggcgacaagctcggccggcgctggaccatcctctgcggcgccctcgtcttctgcctcggcggcgccctgcagacgggcgcccaggcgctctcgtacctctatgcgggccgctccatcgccggactcggcgtcggcgtgctctgcatgatcgttcccatgtaccaggccgagctcgcccaccccagcatccgcggccgaatcacggctctgcagcagtttatgctcggcatcggcgctctggcggccgcctggatctcgtacggcacgtacgtcggcttcgcccccaccaacgacgggcagtggcggacctcgctggggatccaggtgatccccgccgtcttcctggccgcgctgatcctcctgttccccgagtcgccccggtggctcatcgaccacggcaggtcggaggaggggctcaggacgctggcgcagctgcactcgcacggcgacgtggacgacgcgtgggtgcaggccgagtaccagcagatccgcgagtcggtcgagttcgtgcgcgagaacgaggccaagtcgtacgcggagctgttccgggaccggtcctgcttccggcgcctgttcctggcctgcgccatccaggggtccgtccagatgacgggcgtctcggccatccagtactactcggtcaccatctacggcctcatgggcatcgagggcgacgacacgctcaagtaccaggccatctcgtccatcatcgccctcgtcgcccaggcgctctgcatcctcctcatcgaccggctcggccgccgctggaccctgatcggcggcaacctgggcaactgcgtcaccttcatcatcgccaccgtcatgctggcccgctacccccccggcaccagcagcaacaaggcggccgcctggggcttcatcgtcgtcacctgggtctacaacttcagcttcagcgccacctgcgggcccctctcgtggatcatcccggccgagatcttcgacaccaagacgcgctccaagggcgtctccatcgccaccatgacctccttcgccctcaacaccatgatcggccaggtgacggggccggccatgaagacggtcgggtaccgcttctacctcctcttcgtcgtctgcaacttcacaaacgccctcttcttctgggccttcctgcccgagaccgccaagcggcccctcgaggagatgaaccgcctcttcaccgacgcgcccctcttcgtccccaccatgaaccgctccgactgggccctcaacgacctcgagctccgcgtcgaggaggtcaaggccaagcaggagtcggtcgccgcccacgccgaccgacgttaa

SEQ ID NO: 1844 - protein, 504 aa, Myceliophthora thermophilia
MVLSPKWYQFLVGVFASLGSLLYGYDLGVIAQVIASQSFKSRFSPSDNEEAAVVSVFTGGAFFGAMAAGPMGDKLGRRWTILCGALVFCLGGALQTGAQALSYLYAGRSIAGLGVGVLCMIVPMYQAELAHPSIRGRITALQQFMLGIGALAAAWISYGTYVGFAPTNDGQWRTSLGIQVIPAVFLAALILLFPESPRWLIDHGRSEEGLRTLAQLHSHGDVDDAWVQAEYQQIRESVEFVRENEAKSYAELFRDRSCFRRLFLACAIQGSVQMTGVSAIQYYSVTIYGLMGIEGDDTLKYQAISSIIALVAQALCILLIDRLGRRWTLIGGNLGNCVTFIIATVMLARYPPGTSSNKAAAWGFIVVTWVYNFSFSATCGPLSWIIPAEIFDTKTRSKGVSIATMTSFALNTMIGQVTGPAMKTVGYRFYLLFVVCNFTNALFFWAFLPETAKRPLEEMNRLFTDAPLFVPTMNRSDWALNDLELRVEEVKAKQESVAAHADRR

SEQ ID NO: 1845 - protein, 480 aa, Myceliophthora thermophilia
YDLGVIAQVIASQSFKSRFSPSDNEEAAVVSVFTGGAFFGAMAAGPMGDKLGRRWTILCGALVFCLGGALQTGAQALSYLYAGRSIAGLGVGVLCMIVPMYQAELAHPSIRGRITALQQFMLGIGALAAAWISYGTYVGFAPTNDGQWRTSLGIQVIPAVFLAALILLFPESPRWLIDHGRSEEGLRTLAQLHSHGDVDDAWVQAEYQQIRESVEFVRENEAKSYAELFRDRSCFRRLFLACAIQGSVQMTGVSAIQYYSVTIYGLMGIEGDDTLKYQAISSIIALVAQALCILLIDRLGRRWTLIGGNLGNCVTFIIATVMLARYPPGTSSNKAAAWGFIVVTWVYNFSFSATCGPLSWIIPAEIFDTKTRSKGVSIATMTSFALNTMIGQVTGPAMKTVGYRFYLLFVVCNFTNALFFWAFLPETAKRPLEEMNRLFTDAPLFVPTMNRSDWALNDLELRVEEVKAKQESVAAHADRR

SEQ ID NO: 1846 - DNA, 702 bp, Myceliophthora thermophilia
atgtcttcgactctgcttcgcaccgttcctgtcctgcgtggagctctccgggcttccgcagctcccaagatggccggcgccatggccagcaccagctttgtgcgcgggaaggctacccttccggatctgccgtacgactacagcgccctcgaaccgtacatctcgggcaagatcatggagcttcatcactccaagcatcaccaaacctacgttaacggcctcaacagtgctctcgaggccatcgcagaggccgagagcaagggcgacttcagcaaggctgccacggtcgcacctctcctcaacttccacggcggtggccacctcaaccacagccttttctgggagaaccttgctcccgctagccgcgagggcggtggtgagccggacggagctctcaagaaagccatagattccgactttggttcctttgacaacttccgcaagcagatgaacacggcgctggccggaattcagggcagcggttgggcgtggctggtcaaggacaagacggcgggcactctggggatcgtcacgcgcgccaaccaggatcccgtctcggggccgtacgtgccgctgctgggcatcgatgcctgggagcacgcctactatctgcagtacgagaaccgcaaggccgagtactttgaagccatctggaacgtcctcaactggaagactgctgcgcaacggttcgagaagacttga

SEQ ID NO: 1847 - protein, 233 aa, Myceliophthora thermophilia
MSSTLLRTVPVLRGALRASAAPKMAGAMASTSFVRGKATLPDLPYDYSALEPYISGKIMELHHSKHHQTYVNGLNSALEAIAEAESKGDFSKAATVAPLLNFHGGGHLNHSLFWENLAPASREGGGEPDGALKKAIDSDFGSFDNFRKQMNTALAGIQGSGWAWLVKDKTAGTLGIVTRANQDPVSGPYVPLLGIDAWEHAYYLQYENRKAEYFEAIWNVLNWKTAAQRFEKT

SEQ ID NO: 1848 - protein, 213 aa, Myceliophthora thermophilia
APKMAGAMASTSFVRGKATLPDLPYDYSALEPYISGKIMELHHSKHHQTYVNGLNSALEAIAEAESKGDFSKAATVAPLLNFHGGGHLNHSLFWENLAPASREGGGEPDGALKKAIDSDFGSFDNFRKQMNTALAGIQGSGWAWLVKDKTAGTLGIVTRANQDPVSGPYVPLLGIDAWEHAYYLQYENRKAEYFEAIWNVLNWKTAAQRFEKT

SEQ ID NO: 1849 - DNA, 2001 bp, Myceliophthora thermophilia
atggctcccatgccgctgcctcttcctgttgttgccacggccttcgctgctgcagcagcttatatcaacgcgaagtctcagctatcctacgaccttcgcctcttgaactccatcgtcccgaccgtcgccagattggcctggtggaccaaccgcgggcgaatcaacttcttttaccgcctcgaggatttggccacttccaaatcttccgaggatcgtgtctttttacgcttcgaggacaagagttacacctatgcgcaggtctatgacacggtgctgcgctatgcggattggctaaaggaacggcgcggcgtcaagatgggggagcttgtggccttggactttcagaataccgacaccttcatcttcctcctccttgctctctgggcgttgggagctgtccccgcgctcatcaactacaacctgacaggaaagccgctggcgcattgcgtaaggaaggcaacgacccgccttgttcttgtcgatcctgtggtttctgcgaacattggggaagatgtacgatccgagttgagccaggtcagcttcgaggttgttacgccagaggtcgagcaacagatgctgtctcatgagcccatccgccctccagatgatgtgcggaacgaggccttggccaattccatggccattctcatctatacgagcggaactacgggattgcccaaggctgcgatagtgtcgtggtccaaggttgcggttgtcggcgggttcacgtctcgcttggtcgggacaaccaagaacgacgtcttttacacggtgagtcgtacgccgcccaggcggtggcctgccactgtcagcgagctcttgaaagcttaccgagacatgcaggcaatgccattgtatcatagtacggctatgcttctcggctttctgcacaccctttccgtcggcgccaccttcgccatgagccgcaagttctccaccagcggattctgggacgacgtccggaagcaccgcgccaacatcatccagtatgtcggcgagacgtgccgctacctactctcggcaccaccccgcaccgacccagtcacgggcgagaatctggaccgcaagcacgagttgcgcgttgcattcggaaatggcctccggccagacgtatggaacaagttcaaggaacgcttcggtatcgagaccgtcgccgagttctacggcgctaccgaaggcaactttgcgacgtggaatctcagccgcaacgacttcagcatgggcgccatcggccgcagtggcgcactttacaacctgatccttggccggaccgtcgccgttgttgaagtcgaccatgacacggagcttccctacagggatcctaaaaccggcttctgccgtcgcgccccgcgcggtgaccccggcgagctgctattcaaactcccgccgcaagacgtggagtcgcggtttcaggggtactacggcgataaggaggcaacctcaaaaaagatcatgcgggacgtcttcactaagggcgacgcgtggttccgcaccggcgatgtcgtccgctgggacgccgagaacagggtcttcttcaacgaccgcatcggtgatacgtttcgctggaagagcgagaacgtctcgaccgccgaggtcgcgcaggttgtgggcctgcatccaggcgtgcttgaggcgaatgtttacggtgtgcagctgccgcgccacgagggccgtgccgggtgcgcggccgtggtgttccagaagtcggcactggctggtggcgtcgacggcgtgccgagcgaggaaacactcaggacgctggcgaagcatgtccgggccgggctgcccaagtatgcgctgccattatttttgcgggctgtgaagggtgggagcctgcagacgacggggacaaacaagcaacaaaagacaaacctgcgaagcgaaggggtggagccgagcaagacgggctcagacaatgttttttggctcaagggagatacatatgtcaggttccggccggaggactgggaggctctacaaggcgggagggtaaagctctga

SEQ ID NO: 1850 - protein, 666 aa, Myceliophthora thermophilia
MAPMPLPLPVVATAFAAAAAYINAKSQLSYDLRLLNSIVPTVARLAWWTNRGRINFFYRLEDLATSKSSEDRVFLRFEDKSYTYAQVYDTVLRYADWLKERRGVKMGELVALDFQNTDTFIFLLLALWALGAVPALINYNLTGKPLAHCVRKATTRLVLVDPVVSANIGEDVRSELSQVSFEVVTPEVEQQMLSHEPIRPPDDVRNEALANSMAILIYTSGTTGLPKAAIVSWSKVAVVGGFTSRLVGTTKNDVFYTVSRTPPRRWPATVSELLKAYRDMQAMPLYHSTAMLLGFLHTLSVGATFAMSRKFSTSGFWDDVRKHRANIIQYVGETCRYLLSAPPRTDPVTGENLDRKHELRVAFGNGLRPDVWNKFKERFGIETVAEFYGATEGNFATWNLSRNDFSMGAIGRSGALYNLILGRTVAVVEVDHDTELPYRDPKTGFCRRAPRGDPGELLFKLPPQDVESRFQGYYGDKEATSKKIMRDVFTKGDAWFRTGDVVRWDAENRVFFNDRIGDTFRWKSENVSTAEVAQVVGLHPGVLEANVYGVQLPRHEGRAGCAAVVFQKSALAGGVDGVPSEETLRTLAKHVRAGLPKYALPLFLRAVKGGSLQTTGTNKQQKTNLRSEGVEPSKTGSDNVFWLKGDTYVRFRPEDWEALQGGRVKL

SEQ ID NO: 1851 - protein, 642 aa, Myceliophthora thermophilia
KSQLSYDLRLLNSIVPTVARLAWWTNRGRINFFYRLEDLATSKSSEDRVFLRFEDKSYTYAQVYDTVLRYADWLKERRGVKMGELVALDFQNTDTFIFLLLALWALGAVPALINYNLTGKPLAHCVRKATTRLVLVDPVVSANIGEDVRSELSQVSFEVVTPEVEQQMLSHEPIRPPDDVRNEALANSMAILIYTSGTTGLPKAAIVSWSKVAVVGGFTSRLVGTTKNDVFYTVSRTPPRRWPATVSELLKAYRDMQAMPLYHSTAMLLGFLHTLSVGATFAMSRKFSTSGFWDDVRKHRANIIQYVGETCRYLLSAPPRTDPVTGENLDRKHELRVAFGNGLRPDVWNKFKERFGIETVAEFYGATEGNFATWNLSRNDFSMGAIGRSGALYNLILGRTVAVVEVDHDTELPYRDPKTGFCRRAPRGDPGELLFKLPPQDVESRFQGYYGDKEATSKKIMRDVFTKGDAWFRTGDVVRWDAENRVFFNDRIGDTFRWKSENVSTAEVAQVVGLHPGVLEANVYGVQLPRHEGRAGCAAVVFQKSALAGGVDGVPSEETLRTLAKHVRAGLPKYALPLFLRAVKGGSLQTTGTNKQQKTNLRSEGVEPSKTGSDNVFWLKGDTYVRFRPEDWEALQGGRVKL

SEQ ID NO: 1852 - DNA, 996 bp, Myceliophthora thermophilia
atgggatcgcaacacttcgccccgagatgggcaagcttcggcattgctgcgctgctctgcagcatgagccgggcacagcagcaggcagatggaccttcggttcctcaggtctattgcgctaccgtcaacaccgccgatatggatcctctcttttccaactggcagagcgatggacgctgctacggtaactgcaccgacctcaattacgccctcgctattgtccagaacaagaactgctggtgctcgaacctggtccccaacaaggccgaccgaaagcccctcagtgactgccaaaatccctgcccgggctatcccagtgattactgtggcggcgatggggtctttggctacatgtacgccggcggcagcacgccaacgggaacagcagctcccggcgggtctgccacgggagagccgtcctctagcaccaccggcgccaccacatcgggcccaccatctgtgacaaccatcaccgttggcggaaccatccgaacggtgaccgcccctaccgtccccaccgctaccgatggcacgtccataggcgacgataatggctccggcctcaaaggaggcgccatcgccggtatcgtcgtcggcgtcgtcggcgggttactcgtgctggccgcctttctatggttctgctttgtgaagcggaggaaagaccgcgaggcggccgatctcggattacaaaccggggtcggcgggtcccccggcaggatggcgacgcccaagtcaggcgagatgaccgagagccggtacggcagcacgcccggcggggcagccgcgggcgcctgggactcccagaacaagcgacgcagccacctcatgcctgtcgaccccaggctcgacccattcgcgaccggcctctattccggcgaccagaataggagccgcgagagcctcacttcgctgcaggacaaccaggactattcgagacgcgtgcatcaggcaccgagggttttgagagccacaaatccggatccagaagaggattaa

SEQ ID NO: 1853 - protein, 331 aa, Myceliophthora thermophilia
MGSQHFAPRWASFGIAALLCSMSRAQQQADGPSVPQVYCATVNTADMDPLFSNWQSDGRCYGNCTDLNYALAIVQNKNCWCSNLVPNKADRKPLSDCQNPCPGYPSDYCGGDGVFGYMYAGGSTPTGTAAPGGSATGEPSSSTTGATTSGPPSVTTITVGGTIRTVTAPTVPTATDGTSIGDDNGSGLKGGAIAGIVVGVVGGLLVLAAFLWFCFVKRRKDREAADLGLQTGVGGSPGRMATPKSGEMTESRYGSTPGGAAAGAWDSQNKRRSHLMPVDPRLDPFATGLYSGDQNRSRESLTSLQDNQDYSRRVHQAPRVLRATNPDPEED

SEQ ID NO: 1854 - protein, 306 aa, Myceliophthora thermophilia
QQQADGPSVPQVYCATVNTADMDPLFSNWQSDGRCYGNCTDLNYALAIVQNKNCWCSNLVPNKADRKPLSDCQNPCPGYPSDYCGGDGVFGYMYAGGSTPTGTAAPGGSATGEPSSSTTGATTSGPPSVTTITVGGTIRTVTAPTVPTATDGTSIGDDNGSGLKGGAIAGIVVGVVGGLLVLAAFLWFCFVKRRKDREAADLGLQTGVGGSPGRMATPKSGEMTESRYGSTPGGAAAGAWDSQNKRRSHLMPVDPRLDPFATGLYSGDQNRSRESLTSLQDNQDYSRRVHQAPRVLRATNPDPEED

SEQ ID NO: 1855 - DNA, 516 bp, Myceliophthora thermophilia
atgtgctcgaccgacatctttctcggtcttctcgccgtcattttcccacccgtggcagtctgggtaaagcgcggcctctgctctgccgactccatcatcaacatcctcctctgcgttcttggatacatcccgggcctcctccatgcctggtacatcatcgccaagtaccctgaaccgccctacgactatgagtaccagagcattccgcatgacccggaacacggccgcatctacgtcttcgtgcacaacggcggccacggccagccgcagacccaaggctaccagccgcaggagcccgctcacgctcaggctcccaagccgcagggccacatgaactacggcaccacgggcgcggctgctgcgccccagttccagcccccgcatcagcaccagccacaggagcagggcactgccagcgctgctggtaccgctgccgggccgagcgacgccggtgcgccgccgccgagctacgctcaggttgtcgcgggggattacaaggtccagacgcatgactag

SEQ ID NO: 1856 - protein, 171 aa, Myceliophthora thermophilia
MCSTDIFLGLLAVIFPPVAVWVKRGLCSADSIINILLCVLGYIPGLLHAWYIIAKYPEPPYDYEYQSIPHDPEHGRIYVFVHNGGHGQPQTQGYQPQEPAHAQAPKPQGHMNYGTTGAAAAPQFQPPHQHQPQEQGTASAAGTAAGPSDAGAPPPSYAQVVAGDYKVQTHD

SEQ ID NO: 1857 - protein, 151 aa, Myceliophthora thermophilia
WVKRGLCSADSIINILLCVLGYIPGLLHAWYIIAKYPEPPYDYEYQSIPHDPEHGRIYVFVHNGGHGQPQTQGYQPQEPAHAQAPKPQGHMNYGTTGAAAAPQFQPPHQHQPQEQGTASAAGTAAGPSDAGAPPPSYAQVVAGDYKVQTHD

SEQ ID NO: 1858 - DNA, 963 bp, Myceliophthora thermophilia
atgccttcgttcaggaagactcttgggattgcaatggcgggtctggcggccgtctcatcggcactaccagcgcttccaaagttgagcaaggaccagatgaggatatacgagcacgcaaagcgtcaaaatgaggctgcggcggcgctgggtcttaacgatatcgacatcctgcaatttgcactcacgctcgagtggcttgaagcgaccttttaccagcaagggttcgccaagttcccagcaaccgatttccaagcgctcggcctcgaccagcaacagatcgacgccctcctcaaggtcggcaagacagaacaggagcatgtcgtgctcctgcagagcgccatcgcccaggcaggcgtccagcccgtgcagccgtgcacctataaatttggcttcaccgacgccgccggcatggtcgctacggccgccgttctcgagaacgttggcgtatccgcctacctcggcgccgccgccctcctctcgtccggttccatcctcaccaccgccggctccatcctcaccgtcgaggcccgccaccagaccttcatccgggccgcctcgggcagcatccccgtaccccaggccttcgacaccccgctctcgccccgccaagtcttctccctcgccgcccccttcatcgagagctgcccggagggctccaacctcatcctgaccgccttccccgcgctcgccatgcccgaaggcgcctcccccaaggcggtcgccgcgggtgccaccgtccagctgcgcagcgacgccgccgcctcggctacccactgcgccttcaccaccggcggcatccccggcggcaccactttcacccccttcgaccaggctgccggctgcgtcgtacccgagggcctggccggcatcacctacgtcaacctggccagcgccgccccgctcaacggcgtgctcaccgacgacatcatcgtggctgggcccatggtgatgcaagtctcgtaa

SEQ ID NO: 1859 - protein, 320 aa, Myceliophthora thermophilia
MPSFRKTLGIAMAGLAAVSSALPALPKLSKDQMRIYEHAKRQNEAAAALGLNDIDILQFALTLEWLEATFYQQGFAKFPATDFQALGLDQQQIDALLKVGKTEQEHVVLLQSAIAQAGVQPVQPCTYKFGFTDAAGMVATAAVLENVGVSAYLGAAALLSSGSILTTAGSILTVEARHQTFIRAASGSIPVPQAFDTPLSPRQVFSLAAPFIESCPEGSNLILTAFPALAMPEGASPKAVAAGATVQLRSDAAASATHCAFTTGGIPGGTTFTPFDQAAGCVVPEGLAGITYVNLASAAPLNGVLTDDIIVAGPMVMQVS

SEQ ID NO: 1860 - protein, 297 aa, Myceliophthora thermophilia
ALPKLSKDQMRIYEHAKRQNEAAAALGLNDIDILQFALTLEWLEATFYQQGFAKFPATDFQALGLDQQQIDALLKVGKTEQEHVVLLQSAIAQAGVQPVQPCTYKFGFTDAAGMVATAAVLENVGVSAYLGAAALLSSGSILTTAGSILTVEARHQTFIRAASGSIPVPQAFDTPLSPRQVFSLAAPFIESCPEGSNLILTAFPALAMPEGASPKAVAAGATVQLRSDAAASATHCAFTTGGIPGGTTFTPFDQAAGCVVPEGLAGITYVNLASAAPLNGVLTDDIIVAGPMVMQVS

SEQ ID NO: 1861 - DNA, 3228 bp, Myceliophthora thermophilia
atgagaccggcgctgtcgctcgtcgccctcgcggcctcggccatggctgcccacatccccatcaggggtgagcgcggccttgccgacaggtcggacggctacggccatcacaagcccgacgacgcctacgcgtacggaggggagaaacatgacgacaagaagcacggcaacgggtattacgcgctgccccggccggacggatatgggtacggcaagcccggcgacgtgtgtaagtccggcaaaccggacgacccgtatgagatcggcaaaaagcctaccggaaaaaagcctgacaactcgcacgagagcgagtcgggcagcgactcgggtgagagcgactcggaagacgagtcgtctaaggacccaaagtatcccgaccaggatgacaagtccggcgacaagttcaaggatggcaactatgccgacaagtacgacgacaagttcaaggatggcaagtacgacgacaagcacgacgacaagtacggcgagtcggacagcggctcgggcgagagcgactcggaagacgagtcgtctaaggaccccaagtatcacgaccaggataacaagcacgacgacaagtatggcgacaagcacgacgacaagcatggcgacaagcacgacgacaagcacgacgacaagcacgacgacaagcacgacgacaagcacgacgacaagcacgacgacaagcacgacgacaagcacgaagacaagcacgaagacctgaagcgtgatcttagtgataagcacgaggactcctacggcaaggatgacaagaaggatggggactcctatggcaaggacgacaagaaggacgacaaggaggactcttacggcaaggacgataagaaggacgacaaggaggactcctacggcaaggacgacaaggacgacaaggaggactcctacggcaaggacgataagaaggaagaggactcctatggcaaggacgataagaaggaagaggactcctatggcaaggacgataagaaggacgacaagaaggacgaggactcctacggcaaggacgacaagaaggatgacaaggaggacccctacggcaaggacgacaagaaggacgacaaggaggacccctacggcaaggacgacaagaaggacgacaaggaggacccctacggcaaggacaataagaaggacgacaaggaggactcctatggtaaggacgataagaaggacgacaaggaggactcctacggcaaggacgataagaaggactcctacggtaaggacgataagaaagacgacaagaaggatgacaagaaggatgaggactcctacgacaaggacgacaagaaggactcctacggcaaggatgacaagcaaaaggatgacaaggacttgtatagtggaaagaaggactcgtacaaggacgacaagaaggaacacgaaaaggaggactctaaaggcgaagaatcgggctcagaagaagaagaatcgggctctgaagacgaaaagggcttgttaggagacgatttcgacatttttaatgatgacgcggaagagtctgaagacaagaagaaaaaatcggaaaaggacgacaagaagaaacacgaaaaggaggactctgaagtcgaagaatcgggctctgaagacgaaaagggcttgttaggagacgatttcgacatttttaatgatgacggggaagagtctgaagacaaggagaaaaaatcggaaagggacgacaagaaaggcaaaaaggagggctctgaagacgaagaatcgggctcagaagaatcgggctccgaagacgaaaagggcttgttaggagacgatctaaacatctttgacgaagacgatatcgacattttcagtgataatgggaaagagtctaaagacggggaagagtctgaaaatgagaagaaaaaatcagaaaagaacgataagaaggacaagtataaggacgacaaaaataaggacgtgtataaggacgacaagaaggatacctttaaggacgataagaaggacaagtataaggacgacaagaaagaagacaaggagggctcttccgaagatgaagaagggggctcttctgaagacgaaaagggcttgttcggagacgatctagacctcttcggcgatgacgatttcgacctttttaatgatgatgacgaaaagtctgaagacgagaagtctaaaaaggacaagaagaaggactcgaacaaggacgacaagaaggatatatataaggacgataagaaggacaagtataaggatgataagaaggataagtataaggacgataagaaagacaaggaggaaaaggaggactcttccgaagatgagaaggggagcgcttccgaagatgagaaggggagcgcttccgaagatgagaaggggagcgcttccgaagatgagaaggggagcgcttccgaagatgagaaggggagcgcttccgaagatgagaaggggagcgcttccgaagacgaagagtccgatggcttgtttggagatgacaaggaagaatcgggcgaggaggacgagtcgaaagacgatgcttggcttgagctgcgaagcctgaatgacaggacatacgacgacgacgacggcgacgacgacgaatacggatatggggaggatgagtcgccggaggaggactacgaaaccgttacgactgaggtcatcgcgacttataccaccgtctgccctgtcaccgagacttacactaagcccggccacacctacacttctacctacaccacgactagcacggttaaaacggcggtccccacgaccatcgtcatcaccaagaccgagcccccagtcaccaagacggccggtgaggttgtttattccacccgcactaaactccacccggtcacggagaccaaggtagtcggcggctccacggttgagatcacctggacctcgacctccaccgtcgtcacgaaggtcaggcagaccgagaccatctatacgacttctgtcgcgaccgagtacgagacgacgacgatctcctgcccggtcaccacttacaccacggtgagcaagggctccaccatcgaggtcacaaagacgaacactttcaccgtgaccaacaccgtgccgcaccataaaccgcaccatacgccgtccaagaacgcgacgacctcgtcctaccctacgtacgccccgccgcccatcgtgaccgcgggtgccgacagcttggtcgtcaacggcggcaaggccgtcgcccttctggcgggcatgtttggcgctgttgttctcttctga

SEQ ID NO: 1862 - protein, 1075 aa, Myceliophthora thermophilia
MRPALSLVALAASAMAAHIPIRGERGLADRSDGYGHHKPDDAYAYGGEKHDDKKHGNGYYALPRPDGYGYGKPGDVCKSGKPDDPYEIGKKPTGKKPDNSHESESGSDSGESDSEDESSKDPKYPDQDDKSGDKFKDGNYADKYDDKFKDGKYDDKHDDKYGESDSGSGESDSEDESSKDPKYHDQDNKHDDKYGDKHDDKHGDKHDDKHDDKHDDKHDDKHDDKHDDKHDDKHEDKHEDLKRDLSDKHEDSYGKDDKKDGDSYGKDDKKDDKEDSYGKDDKKDDKEDSYGKDDKDDKEDSYGKDDKKEEDSYGKDDKKEEDSYGKDDKKDDKKDEDSYGKDDKKDDKEDPYGKDDKKDDKEDPYGKDDKKDDKEDPYGKDNKKDDKEDSYGKDDKKDDKEDSYGKDDKKDSYGKDDKKDDKKDDKKDEDSYDKDDKKDSYGKDDKQKDDKDLYSGKKDSYKDDKKEHEKEDSKGEESGSEEEESGSEDEKGLLGDDFDIFNDDAEESEDKKKKSEKDDKKKHEKEDSEVEESGSEDEKGLLGDDFDIFNDDGEESEDKEKKSERDDKKGKKEGSEDEESGSEESGSEDEKGLLGDDLNIFDEDDIDIFSDNGKESKDGEESENEKKKSEKNDKKDKYKDDKNKDVYKDDKKDTFKDDKKDKYKDDKKEDKEGSSEDEEGGSSEDEKGLFGDDLDLFGDDDFDLFNDDDEKSEDEKSKKDKKKDSNKDDKKDIYKDDKKDKYKDDKKDKYKDDKKDKEEKEDSSEDEKGSASEDEKGSASEDEKGSASEDEKGSASEDEKGSASEDEKGSASEDEESDGLFGDDKEESGEEDESKDDAWLELRSLNDRTYDDDDGDDDEYGYGEDESPEEDYETVTTEVIATYTTVCPVTETYTKPGHTYTSTYTTTSTVKTAVPTTIVITKTEPPVTKTAGEVVYSTRTKLHPVTETKVVGGSTVEITWTSTSTVVTKVRQTETIYTTSVATEYETTTISCPVTTYTTVSKGSTIEVTKTNTFTVTNTVPHHKPHHTPSKNATTSSYPTYAPPPIVTAGADSLVVNGGKAVALLAGMFGAVVLF

SEQ ID NO: 1863 - protein, 1059 aa, Myceliophthora thermophilia
AHIPIRGERGLADRSDGYGHHKPDDAYAYGGEKHDDKKHGNGYYALPRPDGYGYGKPGDVCKSGKPDDPYEIGKKPTGKKPDNSHESESGSDSGESDSEDESSKDPKYPDQDDKSGDKFKDGNYADKYDDKFKDGKYDDKHDDKYGESDSGSGESDSEDESSKDPKYHDQDNKHDDKYGDKHDDKHGDKHDDKHDDKHDDKHDDKHDDKHDDKHDDKHEDKHEDLKRDLSDKHEDSYGKDDKKDGDSYGKDDKKDDKEDSYGKDDKKDDKEDSYGKDDKDDKEDSYGKDDKKEEDSYGKDDKKEEDSYGKDDKKDDKKDEDSYGKDDKKDDKEDPYGKDDKKDDKEDPYGKDDKKDDKEDPYGKDNKKDDKEDSYGKDDKKDDKEDSYGKDDKKDSYGKDDKKDDKKDDKKDEDSYDKDDKKDSYGKDDKQKDDKDLYSGKKDSYKDDKKEHEKEDSKGEESGSEEEESGSEDEKGLLGDDFDIFNDDAEESEDKKKKSEKDDKKKHEKEDSEVEESGSEDEKGLLGDDFDIFNDDGEESEDKEKKSERDDKKGKKEGSEDEESGSEESGSEDEKGLLGDDLNIFDEDDIDIFSDNGKESKDGEESENEKKKSEKNDKKDKYKDDKNKDVYKDDKKDTFKDDKKDKYKDDKKEDKEGSSEDEEGGSSEDEKGLFGDDLDLFGDDDFDLFNDDDEKSEDEKSKKDKKKDSNKDDKKDIYKDDKKDKYKDDKKDKYKDDKKDKEEKEDSSEDEKGSASEDEKGSASEDEKGSASEDEKGSASEDEKGSASEDEKGSASEDEESDGLFGDDKEESGEEDESKDDAWLELRSLNDRTYDDDDGDDDEYGYGEDESPEEDYETVTTEVIATYTTVCPVTETYTKPGHTYTSTYTTTSTVKTAVPTTIVITKTEPPVTKTAGEVVYSTRTKLHPVTETKVVGGSTVEITWTSTSTVVTKVRQTETIYTTSVATEYETTTISCPVTTYTTVSKGSTIEVTKTNTFTVTNTVPHHKPHHTPSKNATTSSYPTYAPPPIVTAGADSLVVNGGKAVALLAGMFGAVVLF

SEQ ID NO: 1864 - DNA, 852 bp, Myceliophthora thermophilia
atgacaccaccgccaccactcttccacgccctcctccgcccggccgtcctccagatcctacgcgcaacaggttaccatgccgccaagacctgcgtcatcgactcggtcaccgacctcgccgcgcgctacttcttgcacatatgccacctgacggcagtcttcgcgacacacaacaatgaagggttaccaccctcgccatcaccatcaccatcaccgccactagcaccctcgtcatcatcaccaggagtgccaccaccggcatcgacgtctgtcactgatgctcccccggtaacaacaacgacaacgacaacgacaacggcagcgacgctagtgaacccggccgtccccgcgccgaccatcgtcgacgtgcgaatggcgctgcagcgggcgggcgcgctcctgcctgagcgcatcgcggaggagcaggagtacgtgggcgaggaggacacgcgcggagtggacaacttcatcgcgtgggccatggggccgcttaaccgcgagattgccaggatcgcgctggacggcaacgacgaggcgggggactatctagatgcgctcaagaagaagcacagcaaaaacgacgacgactccaagttcctcggcacgctgctggggaggagcatcgagcacggcgacgtgctggtggaagggggcgagtggccgagcatcctggcctgggaggagcggaggcggctcgcgagcgagaagacgcccgagccgccgcagcggccgcagcagaatcgccacggggatgtcaacggcgacggggacggcgaggaatcgcggccgcctagttccggcctcagctcgctcggtgaccgcagcatcgcggacgagatggatctgtcgtag

SEQ ID NO: 1865 - protein, 283 aa, Myceliophthora thermophilia
MTPPPPLFHALLRPAVLQILRATGYHAAKTCVIDSVTDLAARYFLHICHLTAVFATHNNEGLPPSPSPSPSPPLAPSSSSPGVPPPASTSVTDAPPVTTTTTTTTTAATLVNPAVPAPTIVDVRMALQRAGALLPERIAEEQEYVGEEDTRGVDNFIAWAMGPLNREIARIALDGNDEAGDYLDALKKKHSKNDDDSKFLGTLLGRSIEHGDVLVEGGEWPSILAWEERRRLASEKTPEPPQRPQQNRHGDVNGDGDGEESRPPSSGLSSLGDRSIADEMDLS

SEQ ID NO: 1866 - protein, 261 aa, Myceliophthora thermophilia
TGYHAAKTCVIDSVTDLAARYFLHICHLTAVFATHNNEGLPPSPSPSPSPPLAPSSSSPGVPPPASTSVTDAPPVTTTTTTTTTAATLVNPAVPAPTIVDVRMALQRAGALLPERIAEEQEYVGEEDTRGVDNFIAWAMGPLNREIARIALDGNDEAGDYLDALKKKHSKNDDDSKFLGTLLGRSIEHGDVLVEGGEWPSILAWEERRRLASEKTPEPPQRPQQNRHGDVNGDGDGEESRPPSSGLSSLGDRSIADEMDLS

SEQ ID NO: 1867 - DNA, 903 bp, Myceliophthora thermophilia
atgccggccattgccaacttcaagctcttgtcaaagagcttggccgtgttgctcttctcgctgtcactcatcacttcctctgcggcaggaataatcccccctcgcatcgagtcccagagccgcgaaaatggcgagccttcgaaaccgagccctcgccgtttcggcttcgtccttccccgggccttcgacgcggtggacatcttcgggcccatcgagatcctgcaagccctctcgcggcagacccatctcgagctggcgctcctcggccggaccctcgagccggtcacgacggagccggccaacgcggccatgaacaagttcaactcgtccttctggccgcggatcgtgcccacccacaccttcgccgacagcccggccctcgacgtgctcttcgtccccggcggcgccgccgcccgcagcccggacctggggcccgagatcgcctacgtccgcgacgtcttcccctccctccggtacctcatcaccatctgcaccggcgccggcatcgccgcccaggctggcgtgctcgacggccaccgggccaccaccaacaaggccgcctgggacgaaatcacggccatggggcccaacgtcaagtggtgcgtttccgccttcttttttcctatccgcgcgctcgacggcattcgactgctggctgactttgtatcctcggggatgaaaaacaacagggtctcacccgcccgctgggtcgaggacggtaaagtctggagctcgtcaggcgtcacctccggcatagatctcacctttgagttcgtcaagcaaaaatacgaaaacggcaccgccatcgcgcagatgatcgccgggcgtattgagcacgtcatcgtctcggattggcgagatgaccctttcgccgatcagtttaacgttccgccatccaactaa

SEQ ID NO: 1868 - protein, 300 aa, Myceliophthora thermophilia
MPAIANFKLLSKSLAVLLFSLSLITSSAAGIIPPRIESQSRENGEPSKPSPRRFGFVLPRAFDAVDIFGPIEILQALSRQTHLELALLGRTLEPVTTEPANAAMNKFNSSFWPRIVPTHTFADSPALDVLFVPGGAAARSPDLGPEIAYVRDVFPSLRYLITICTGAGIAAQAGVLDGHRATTNKAAWDEITAMGPNVKWCVSAFFFPIRALDGIRLLADFVSSGMKNNRVSPARWVEDGKVWSSSGVTSGIDLTFEFVKQKYENGTAIAQMIAGRIEHVIVSDWRDDPFADQFNVPPSN

SEQ ID NO: 1869 - protein, 271 aa, Myceliophthora thermophilia
GIIPPRIESQSRENGEPSKPSPRRFGFVLPRAFDAVDIFGPIEILQALSRQTHLELALLGRTLEPVTTEPANAAMNKFNSSFWPRIVPTHTFADSPALDVLFVPGGAAARSPDLGPEIAYVRDVFPSLRYLITICTGAGIAAQAGVLDGHRATTNKAAWDEITAMGPNVKWCVSAFFFPIRALDGIRLLADFVSSGMKNNRVSPARWVEDGKVWSSSGVTSGIDLTFEFVKQKYENGTAIAQMIAGRIEHVIVSDWRDDPFADQFNVPPSN

SEQ ID NO: 1870 - DNA, 792 bp, Myceliophthora thermophilia
atgagactcacgtccttcttcctcgcggcggcgctcctcagcgacgcggccctcggcgccctcggcgcgccgcctcccgtggaccttgcgaagccccagtcggtgcagattcatgagcgcgacgaggcggcgcccgaggagctctggaagcgcaagggcggcggaggcggcggcggtcgcggaggcggtggtggcggtcgcggcggaagcagcggtagtggtggcgggcgcggatcatccggatcgggatcatctctgcaacaaagaaacccttctcgtcccgtcccggcaccggcctacggcggcggcagattctacggcggcggcgcggccacgccctaccgggccggcagccggtcgccgtcgggcatcgtccccgtcttctttgcggccagcgccctcgccttctggccgggcctgtggctctacggcgcccacatctaccgctttgacgacgagtatgagttcttcaacgtgacgtcgcagcgcaccgagtccaagccggtcgagtgcgcctgcgcgcagaacgccgactgcggatgcgacgagaaccgcgacaaggactacctcgacgacctgatcggcaacggcagctacgccgccctcaacaagacgctcgtcaacgtcgccgacgtgaacggcaccagcacgatcctcgtcaacggcaccctccccgacggcaccgccgccttggccgggaacgccgccgggggtggcctgcgtgctctgctgcaccacgccggatggtggcccgtcgtcgccaccgtttgcgctatcgtcctgacggcgtag

SEQ ID NO: 1871 - protein, 263 aa, Myceliophthora thermophilia
MRLTSFFLAAALLSDAALGALGAPPPVDLAKPQSVQIHERDEAAPEELWKRKGGGGGGGRGGGGGGRGGSSGSGGGRGSSGSGSSLQQRNPSRPVPAPAYGGGRFYGGGAATPYRAGSRSPSGIVPVFFAASALAFWPGLWLYGAHIYRFDDEYEFFNVTSQRTESKPVECACAQNADCGCDENRDKDYLDDLIGNGSYAALNKTLVNVADVNGTSTILVNGTLPDGTAALAGNAAGGGLRALLHHAGWWPVVATVCAIVLTA

SEQ ID NO: 1872 - protein, 241 aa, Myceliophthora thermophilia
APPPVDLAKPQSVQIHERDEAAPEELWKRKGGGGGGGRGGGGGGRGGSSGSGGGRGSSGSGSSLQQRNPSRPVPAPAYGGGRFYGGGAATPYRAGSRSPSGIVPVFFAASALAFWPGLWLYGAHIYRFDDEYEFFNVTSQRTESKPVECACAQNADCGCDENRDKDYLDDLIGNGSYAALNKTLVNVADVNGTSTILVNGTLPDGTAALAGNAAGGGLRALLHHAGWWPVVATVCAIVLTA

SEQ ID NO: 1873 - DNA, 1491 bp, Myceliophthora thermophilia
atgaagacgtcggtggtcttctctgccttcctggcgctgctgtcgctggcctcggccgcgagctcagacgggaagagcagctccaccagcaccaccctcccggccaccttcaagccgccccaggtcttcaagaacgccaatctggtccatatcatctccgtcgagaagaactacgtcaaggagaacatcaacgtgctcatccagaatatcgacaaggaggcccaagatgaatactttgtgccgttcacggcggaccagatgtcccggctcggaggggtggaggtgaaggaccgcaaggacagcagcgctgggccattcgtcgcagaggccgtcgagcttgatcaggagagcgacatccagtacctccgcatccgcctcccgaagccgcttgcgcctggcgcgcagcagaccctcggcatcagctactatctcctcaaggcgtacaagccgctccccgcagccatcaagcaggaggagcagcaatacttgtctttctctttctcggcctactgcccctcggcctacacgacgaccaagcaaaagaccgaagtcaaattcccgtcgagcaccatccccgactataccaagctgccggggagcggcgaggttgaagagttcccgcagaagctcggctccaagctcacgtacggcccgttcgacgaacagcccgcgggcgccgtccagcccgtcaacgtgcggtacgagtttaacaagcccgtgacccacgtgtcgcggctggagcgcgacatcgaggtcagccactggggcggcaacgtcgccttcgaggagcgctacactctgcaccaccgcggcgccaatttgtcttcgctcttcaaccgtgtcaagtggcagcagtcgcagtattaccagccctccggcaccttcgcactcaaggagatgaagttcccgttgcgcgtgggcagcgtcgacccgtactacaccgacgtgatcggcaacgtctcgacgtcccggttcaggagcaacaagcgcgaggccctgctcgagatcaagccgcggtaccccgtttttggcgggtggaagtaccccttcacgatcgggtggaactcggacgccaagaacttcttgaggcagacggccaccggcgggtttgtgctcaacgtgcccttcctcgagggcccgaagcagccggaaggtgtcgagtatgagcaggtgcaggtccgggtcatcctgcccgagggcacggaaaacgtgaaatactacaccaccatccccagccagtccatcgtcgaagccggcatcgagatccacaagaccttcctcgacaccattggacggaccgcgctggtcatcaatgcgcgcaacttggtggacgaattgcgggatcgcgagctggtggtcacatacgactacccgctcatgtcggccttgcgcaagccgctgattgtgttcggcagcgctatcgccgtgtttgtgagcacctgggtgttggggcgcgtggagctgaagtttgacacagggaagaagatatag

SEQ ID NO: 1874 - protein, 496 aa, Myceliophthora thermophilia
MKTSVVFSAFLALLSLASAASSDGKSSSTSTTLPATFKPPQVFKNANLVHIISVEKNYVKENINVLIQNIDKEAQDEYFVPFTADQMSRLGGVEVKDRKDSSAGPFVAEAVELDQESDIQYLRIRLPKPLAPGAQQTLGISYYLLKAYKPLPAAIKQEEQQYLSFSFSAYCPSAYTTTKQKTEVKFPSSTIPDYTKLPGSGEVEEFPQKLGSKLTYGPFDEQPAGAVQPVNVRYEFNKPVTHVSRLERDIEVSHWGGNVAFEERYTLHHRGANLSSLFNRVKWQQSQYYQPSGTFALKEMKFPLRVGSVDPYYTDVIGNVSTSRFRSNKREALLEIKPRYPVFGGWKYPFTIGWNSDAKNFLRQTATGGFVLNVPFLEGPKQPEGVEYEQVQVRVILPEGTENVKYYTTIPSQSIVEAGIEIHKTFLDTIGRTALVINARNLVDELRDRELVVTYDYPLMSALRKPLIVFGSAIAVFVSTWVLGRVELKFDTGKKI

SEQ ID NO: 1875 - protein, 477 aa, Myceliophthora thermophilia
ASSDGKSSSTSTTLPATFKPPQVFKNANLVHIISVEKNYVKENINVLIQNIDKEAQDEYFVPFTADQMSRLGGVEVKDRKDSSAGPFVAEAVELDQESDIQYLRIRLPKPLAPGAQQTLGISYYLLKAYKPLPAAIKQEEQQYLSFSFSAYCPSAYTTTKQKTEVKFPSSTIPDYTKLPGSGEVEEFPQKLGSKLTYGPFDEQPAGAVQPVNVRYEFNKPVTHVSRLERDIEVSHWGGNVAFEERYTLHHRGANLSSLFNRVKWQQSQYYQPSGTFALKEMKFPLRVGSVDPYYTDVIGNVSTSRFRSNKREALLEIKPRYPVFGGWKYPFTIGWNSDAKNFLRQTATGGFVLNVPFLEGPKQPEGVEYEQVQVRVILPEGTENVKYYTTIPSQSIVEAGIEIHKTFLDTIGRTALVINARNLVDELRDRELVVTYDYPLMSALRKPLIVFGSAIAVFVSTWVLGRVELKFDTGKKI

SEQ ID NO: 1876 - DNA, 924 bp, Myceliophthora thermophilia
atgcggcttatacagtcaattaccacagcactgctgcttcttgcagcaggcgttgctcaagccgcctctgcttggggttttgacgacggcagcgtgcaggttgctgcaaagaagggcgattccatcaaggagagtcttagtcaaaaaggccctctcgcaaaccccatctccctcggaagcgccgatacactgaagctgatcctgaccgccaaggagaatggcaagggcaagcggccgcaccaagcattcctggtgctgcaggagcgagagtctgggctcgaagcaccatttccgctgacggtgaaggagacagggaaggcggtcgttcagattgtaaggcgccgcgaacacgtttacgagttggggacaagcttgctgatgtttgcgggacaacagtcgcaaaaggacctccccatccagctccgcgtcgctaccgagcccctgaaggcgtccgtcgttctggcctcctttggatcggcccaaggcctcgacgcgcccgttttcgacctcaagatcgagcaggacgccgccatcccacccccaacatacgagaagccccttcgatacggcaagaagcccgagatccatcacatcttccgccccgaccctaagaacccacccaagctggtgtcgctcgtctttggctttgctgtcattgccacgctaccggccctactcatcggctgggtcgcgctcggcggaaatctgaaccacctctccaaggctttcggcgccgcgccgctgtcgcatgctacattttttgggtccgtactggcgatggagtttgtcttcttcttgtactatacgacctggaacctgttccaggtgctaccggtcatgggtgcagtcgcggccgtcaccctgctaagtggtacgagggcgctcggggaggtccagagcaggaggctggccggggagcgctga

SEQ ID NO: 1877 - protein, 307 aa, Myceliophthora thermophilia
MRLIQSITTALLLLAAGVAQAASAWGFDDGSVQVAAKKGDSIKESLSQKGPLANPISLGSADTLKLILTAKENGKGKRPHQAFLVLQERESGLEAPFPLTVKETGKAVVQIVRRREHVYELGTSLLMFAGQQSQKDLPIQLRVATEPLKASVVLASFGSAQGLDAPVFDLKIEQDAAIPPPTYEKPLRYGKKPEIHHIFRPDPKNPPKLVSLVFGFAVIATLPALLIGWVALGGNLNHLSKAFGAAPLSHATFFGSVLAMEFVFFLYYTTWNLFQVLPVMGAVAAVTLLSGTRALGEVQSRRLAGER

SEQ ID NO: 1878 - protein, 283 aa, Myceliophthora thermophilia
WGFDDGSVQVAAKKGDSIKESLSQKGPLANPISLGSADTLKLILTAKENGKGKRPHQAFLVLQERESGLEAPFPLTVKETGKAVVQIVRRREHVYELGTSLLMFAGQQSQKDLPIQLRVATEPLKASVVLASFGSAQGLDAPVFDLKIEQDAAIPPPTYEKPLRYGKKPEIHHIFRPDPKNPPKLVSLVFGFAVIATLPALLIGWVALGGNLNHLSKAFGAAPLSHATFFGSVLAMEFVFFLYYTTWNLFQVLPVMGAVAAVTLLSGTRALGEVQSRRLAGER

SEQ ID NO: 1879 - DNA, 1074 bp, Myceliophthora thermophilia
atgtccatgttgcgcgcatcgcggcagccatggcgttgggtacgggtagcggccgtgttctgcatcgtgctgcttatcctcagcgttgcccgcgatagtcaatcgctctccgcgacgacctgggcctctcaagatgacgaggcctcggacatctgccgcccgcacggctggaaacccttccgcacaaaggaccccggcaaaccacgcaaggtgtacgacctgatgatgttcaacacggagcttgaccacctagagatccgcctcaacagcacgtgggacgaagtcgatttcttcgtcctggtcgagagccgcaagacattcaccagccacgagaagccccttaccctgctcgacaatttcgaccgattcgggccgtaccattccaagatgatataccacgagatcgaatacccgcccgacttcaagccgcgcagggcctgggacatggaggatcaccagcgcaacagcatgctgacccaggtcttcccccgccttacggggcgccacgaaccgcaggagggggacgtgcttgtcgtgtcggacgtggacgagatcccgaagccgtcgacgctgcgcctgctccgggcgtgccacttcccgcggcgcctcacgctctactcgcgcttctactactactcgttccagtggctgcaccgcgggcccgagtggccgcacccgcaggcgacctactaccagggcctgcggcgcacgctgcggcccaacgacctgcgcatcgccgacggcggcatgcggccgtttcgcgagtgggagaagggcgggctggcgaacgcgagctggcactgctcctcgtgcttccagacggtgggcgagctgctgggcaagatggcctcgttctcgcacacgagcctgaacgcggaaaaatatcgggataagcagaggatcgtggatcatgtcagaaaggggatcgacctgtgggatcgtgagggggagatgtttgaccgagtggaagggaataccgatgtgcctccattcctgttggagaatagggagcggtttaggtatatgctcaacagggacgggccgacggcgggattcacagatgtagaggtatag

SEQ ID NO: 1880 - protein, 357 aa, Myceliophthora thermophilia
MSMLRASRQPWRWVRVAAVFCIVLLILSVARDSQSLSATTWASQDDEASDICRPHGWKPFRTKDPGKPRKVYDLMMFNTELDHLEIRLNSTWDEVDFFVLVESRKTFTSHEKPLTLLDNFDRFGPYHSKMIYHEIEYPPDFKPRRAWDMEDHQRNSMLTQVFPRLTGRHEPQEGDVLVVSDVDEIPKPSTLRLLRACHFPRRLTLYSRFYYYSFQWLHRGPEWPHPQATYYQGLRRTLRPNDLRIADGGMRPFREWEKGGLANASWHCSSCFQTVGELLGKMASFSHTSLNAEKYRDKQRIVDHVRKGIDLWDREGEMFDRVEGNTDVPPFLLENRERFRYMLNRDGPTAGFTDVEV

SEQ ID NO: 1881 - protein, 327 aa, Myceliophthora thermophilia
RDSQSLSATTWASQDDEASDICRPHGWKPFRTKDPGKPRKVYDLMMFNTELDHLEIRLNSTWDEVDFFVLVESRKTFTSHEKPLTLLDNFDRFGPYHSKMIYHEIEYPPDFKPRRAWDMEDHQRNSMLTQVFPRLTGRHEPQEGDVLVVSDVDEIPKPSTLRLLRACHFPRRLTLYSRFYYYSFQWLHRGPEWPHPQATYYQGLRRTLRPNDLRIADGGMRPFREWEKGGLANASWHCSSCFQTVGELLGKMASFSHTSLNAEKYRDKQRIVDHVRKGIDLWDREGEMFDRVEGNTDVPPFLLENRERFRYMLNRDGPTAGFTDVEV

SEQ ID NO: 1882 - DNA, 2229 bp, Myceliophthora thermophilia
atgtcggccgatccgcttcaggttcttgccagcgtgggcaagggaaagagcactcgcggtgtgctgcgggtgatcattctcgcgctcattgccgctgccgcaattgccagtcgcctgttctccgtgatactcgacccttggttcaactttcgcgctaccaagtacctcgttgcgaacggcttctacaacttctgggactggttcgatgatcggacatggcaccccctgggtcgtgttaccggaggtaccctctatcccggcctcatggtgacgagcggcgtcatctaccacgccctccgcgccctcacgatccccgtggacatccggaatatctgcgtcctccttgcgccaggattctccggccttaccgcgattgccgcgtacctcctcaccaatgagatgaccccctcgccctcggctggtctgctggcagccctgttcatgggcatcgcccctggctacatctctcggtcggttgctggcagttacgacaacgaagccattgccatctttttgctcgtcttcaccttctacctctggatcaaggcgctgaagcagggctccatgctctggggtgccctctgtgccctctcctacggctacatggttgcctcctggggaggttacgccttcattacctgccttgttcccctgcactcgttcgtcctgatctgcatgggccgctacagcacccggctgtatgttgcgtacaccacctggtatgccctgggaacactggccagcatgcagatccccttcgttggtttcttgcccgtcaagacgagcgagcacatgcccgccttgggcatctttggcttcctccagctgctcggtttcctcgactatgttcgctccgccatccccagccgccagtttcagacattcctatggctctttgccggcgccaccttcggtctcgggctgttgggcctcgtcatcgcgaccagcgccggcttcattgccccgtggagtggccgcttctactcgctgtgggataccggctacgctaagatccacatccccatcatcgcctcggtctcggaacaccagccgaccgcgtggcccgcgttcttcttcgacctcaacctgctcgtttggctcttcccggtcggtgtctatctctgcttccagcaactcgccgacgagcacgtcttcattgtcgtctatgcgctctttgggagctacttcgccggcgtcatggttcgcctgatgctcaccctcacgccggtggtttgcgttgctgccgccatcgcggtttcgaccctcctcgacacatacctcagcaccaagtcgctcaaaccccaagagagccaggcgacagagggccctgagagcaagaaggcggccaagtcctccggcctcaagtcgacgagcaagcctgtagtgggtgtgtacgctctttggggaaagagcatgatggtcggcgcccttgccgtctacctcctgctcttcgtccttcactgcacgtgggtgacatcgaatgcctattcgtccccctcagtcgtcttggccagcaggttgcctgatggcagccagcacatcattgacgattaccgcgaggcgtaccagtggctgcgtcagaacacgcgcgaggacgccaagatcatgtcctggtgggactacggctaccagattggaggcatggcggaccgcccgacgctcgtcgacaacaacacgtggaacaacacgcatattgcgactgtaggcaaggccatgagctcgagagaggaggtcagctatccgatcatgcgccaacacgaagtcgactatgttctggttgtcttcggcggtctcctgggttactctggcgacgatatcaacaagttcttgtggatggtccgcatcgccgagggcatctggcccgatgaggtcaacgagcgttccttcttcactgctcgcggtgagtaccgcgtcgatggcgaggccaccgagaccatgaagaacagcctgatgtacaagatgtcgtattacaactacaacaacctcttccctcctggacaggcggtggaccgcatgcggggcgcccgtcttcccgaggtcggccctacgctcagcaccttggaggaggctttcacgagcgaaaactggattattcgcatctacaaggtcaaagaccttgacaaccttggccgcgaccacatgtcagcggccgcatttgaccggggccacaagaagaagagtaagggcatcaccaagaagaaaggcccgagacagcttcggatagattag

SEQ ID NO: 1883 - protein, 742 aa, Myceliophthora thermophilia
MSADPLQVLASVGKGKSTRGVLRVIILALIAAAAIASRLFSVILDPWFNFRATKYLVANGFYNFWDWFDDRTWHPLGRVTGGTLYPGLMVTSGVIYHALRALTIPVDIRNICVLLAPGFSGLTAIAAYLLTNEMTPSPSAGLLAALFMGIAPGYISRSVAGSYDNEAIAIFLLVFTFYLWIKALKQGSMLWGALCALSYGYMVASWGGYAFITCLVPLHSFVLICMGRYSTRLYVAYTTWYALGTLASMQIPFVGFLPVKTSEHMPALGIFGFLQLLGFLDYVRSAIPSRQFQTFLWLFAGATFGLGLLGLVIATSAGFIAPWSGRFYSLWDTGYAKIHIPIIASVSEHQPTAWPAFFFDLNLLVWLFPVGVYLCFQQLADEHVFIVVYALFGSYFAGVMVRLMLTLTPVVCVAAAIAVSTLLDTYLSTKSLKPQESQATEGPESKKAAKSSGLKSTSKPVVGVYALWGKSMMVGALAVYLLLFVLHCTWVTSNAYSSPSVVLASRLPDGSQHIIDDYREAYQWLRQNTREDAKIMSWWDYGYQIGGMADRPTLVDNNTWNNTHIATVGKAMSSREEVSYPIMRQHEVDYVLVVFGGLLGYSGDDINKFLWMVRIAEGIWPDEVNERSFFTARGEYRVDGEATETMKNSLMYKMSYYNYNNLFPPGQAVDRMRGARLPEVGPTLSTLEEAFTSENWIIRIYKVKDLDNLGRDHMSAAAFDRGHKKKSKGITKKKGPRQLRID

SEQ ID NO: 1884 - protein, 706 aa, Myceliophthora thermophilia
SRLFSVILDPWFNFRATKYLVANGFYNFWDWFDDRTWHPLGRVTGGTLYPGLMVTSGVIYHALRALTIPVDIRNICVLLAPGFSGLTAIAAYLLTNEMTPSPSAGLLAALFMGIAPGYISRSVAGSYDNEAIAIFLLVFTFYLWIKALKQGSMLWGALCALSYGYMVASWGGYAFITCLVPLHSFVLICMGRYSTRLYVAYTTWYALGTLASMQIPFVGFLPVKTSEHMPALGIFGFLQLLGFLDYVRSAIPSRQFQTFLWLFAGATFGLGLLGLVIATSAGFIAPWSGRFYSLWDTGYAKIHIPIIASVSEHQPTAWPAFFFDLNLLVWLFPVGVYLCFQQLADEHVFIVVYALFGSYFAGVMVRLMLTLTPVVCVAAAIAVSTLLDTYLSTKSLKPQESQATEGPESKKAAKSSGLKSTSKPVVGVYALWGKSMMVGALAVYLLLFVLHCTWVTSNAYSSPSVVLASRLPDGSQHIIDDYREAYQWLRQNTREDAKIMSWWDYGYQIGGMADRPTLVDNNTWNNTHIATVGKAMSSREEVSYPIMRQHEVDYVLVVFGGLLGYSGDDINKFLWMVRIAEGIWPDEVNERSFFTARGEYRVDGEATETMKNSLMYKMSYYNYNNLFPPGQAVDRMRGARLPEVGPTLSTLEEAFTSENWIIRIYKVKDLDNLGRDHMSAAAFDRGHKKKSKGITKKKGPRQLRID

SEQ ID NO: 1885 - DNA, 606 bp, Myceliophthora thermophilia
atggtcccgatgctcgttttgtttctcctgggcctcaccgccgccgcaagctcgaggaagcggcaggccactggcgagcacaccatgggattcatcgggtgctccatggccgagaacatcgctcaggggtacgtcgccgtcgggggcacgcacatgtggggaccgtacgggacgggcgggatggtggtgcagtcgtggaccgacaccaactcggcgagctggcgcctgttcgaccagcaggcggcgcggtacggccggccggccgaggtctgggtgcagatctgcatcttccagaaccccggcgccacctacgacgaggtcgagcggctggtcgccaacgcccgcgagcacgccgcccccggcgcccgcatctggatcaccggccagccactctacccggacaacccgtccagctgcttcctcgcggggcccgccggcccccagctcaccgtcgacctcgccaagcgagccgccgccgacgcttcgctcaacgtcacctaccccggcgagttcgtcctgatgaggaacgaggtccaggatggctgtcatgccaacgctgccgggcagcgctctctgggcgagcaggctctggcgttctggggctga

SEQ ID NO: 1886 - protein, 201 aa, Myceliophthora thermophilia
MVPMLVLFLLGLTAAASSRKRQATGEHTMGFIGCSMAENIAQGYVAVGGTHMWGPYGTGGMVVQSWTDTNSASWRLFDQQAARYGRPAEVWVQICIFQNPGATYDEVERLVANAREHAAPGARIWITGQPLYPDNPSSCFLAGPAGPQLTVDLAKRAAADASLNVTYPGEFVLMRNEVQDGCHANAAGQRSLGEQALAFWG

SEQ ID NO: 1887 - protein, 183 aa, Myceliophthora thermophilia
RKRQATGEHTMGFIGCSMAENIAQGYVAVGGTHMWGPYGTGGMVVQSWTDTNSASWRLFDQQAARYGRPAEVWVQICIFQNPGATYDEVERLVANAREHAAPGARIWITGQPLYPDNPSSCFLAGPAGPQLTVDLAKRAAADASLNVTYPGEFVLMRNEVQDGCHANAAGQRSLGEQALAFWG

SEQ ID NO: 1888 - DNA, 1677 bp, Myceliophthora thermophilia
atggggaacgcaaagctacaccgcgcccgactgctgtcgagcgtggccgccgtcatgatttctttggcgtgcggcaccaattacgtctactcggcctgggcgccccagttcgccgataagctgcacctcaccactacccagatcaacctgatcggcctttccggcaacatgggcatgtactccatgggcgtccccgtcggcctcttcgtcgaccaccgcggcccccgcccggccgttctggccggcgccctgtgtctcggtatcggctacgtccccttccggaccgccttcgagaccgcatccggctccgtgcccgccctgtgcttcttcgccttcctcaccggcctgggaggctgcatggcctttgccgccgccgtcaagacgtccgccctgaactggccacatcaccggggcaccgcaaccgccttccctctggccgccttcggcctgagcgccttcttcttctccctctgcggcgccgtcttcttccctggtgacacgggcgccttccttaccctgctcgctgccggcaccttcgccctgatcttcaccggctttttcttcctcaaggtttatccacacacgtcctaccagagcctcccgaccacttcgggcctgtccggctcgcagcacctgcaccgcacgctctccgaggaggccaaaaccacaagactgcaccgccacgggcgacactccttggatgcagaacctggtacgtcgcccaataccaccaccaccacctacacgactcccgccgcgacggccggtccctcccgggagcccctcctcaaccccgcccacgattcggctgatgtcgaggccgctctccctccctcccctgacggtcgatcccacgacgcggacgccgacgaggcctcgtccctcatgtccaagtcgacggcgtcctcggtggccggcgaagtctatgtccagaacagtgttgatatggatcgttcccatcgtgtagatatccgtggttggcgtctgttgcgcaatctcgacttctggcaactcttttccatcatgggtatccttgccggcatcggattgatgaccatcaacaacatcggccacgacgtacaagcgctctggaagctctacgatgactcggtcgatgaggcctttctcgttcaccggcagcagatgcatgtctctatcttgtcggtcggcagtttctgtggtagactcttgagtggtgtcgggtccgactttctcgtcaaaagactgcacgccaaccgcgcctggtgcttggtcctcgcctgctttgtcttttgcatcgcccagctctgtgccctcaacgttacgaacccccatttccttggcttcgtctccggcctgtcgggactcggctacggcttcctctttggcgtgttcccctccatcgtggccgagtcgtttggcatccacggcctaagccagaactggggcttcatgaccctcagtcccgtcatctccggcaatattttcaacctgttctacggcgtcgttttcgacagccacagcgttgtgggaccagacggcgagcggtactgcccagatggcctggactgctataagaatgcgtattatgtcaccttaaccgcctgcggcgtcggcatcgtcatcacgctcttgacgattcgccgccagtaccgcgaacggttgagggaggagggaaagggagcggctgaggattaa

SEQ ID NO: 1889 - protein, 558 aa, Myceliophthora thermophilia
MGNAKLHRARLLSSVAAVMISLACGTNYVYSAWAPQFADKLHLTTTQINLIGLSGNMGMYSMGVPVGLFVDHRGPRPAVLAGALCLGIGYVPFRTAFETASGSVPALCFFAFLTGLGGCMAFAAAVKTSALNWPHHRGTATAFPLAAFGLSAFFFSLCGAVFFPGDTGAFLTLLAAGTFALIFTGFFFLKVYPHTSYQSLPTTSGLSGSQHLHRTLSEEAKTTRLHRHGRHSLDAEPGTSPNTTTTTYTTPAATAGPSREPLLNPAHDSADVEAALPPSPDGRSHDADADEASSLMSKSTASSVAGEVYVQNSVDMDRSHRVDIRGWRLLRNLDFWQLFSIMGILAGIGLMTINNIGHDVQALWKLYDDSVDEAFLVHRQQMHVSILSVGSFCGRLLSGVGSDFLVKRLHANRAWCLVLACFVFCIAQLCALNVTNPHFLGFVSGLSGLGYGFLFGVFPSIVAESFGIHGLSQNWGFMTLSPVISGNIFNLFYGVVFDSHSVVGPDGERYCPDGLDCYKNAYYVTLTACGVGIVITLLTIRRQYRERLREEGKGAAED

SEQ ID NO: 1890 - protein, 527 aa, Myceliophthora thermophilia
AWAPQFADKLHLTTTQINLIGLSGNMGMYSMGVPVGLFVDHRGPRPAVLAGALCLGIGYVPFRTAFETASGSVPALCFFAFLTGLGGCMAFAAAVKTSALNWPHHRGTATAFPLAAFGLSAFFFSLCGAVFFPGDTGAFLTLLAAGTFALIFTGFFFLKVYPHTSYQSLPTTSGLSGSQHLHRTLSEEAKTTRLHRHGRHSLDAEPGTSPNTTTTTYTTPAATAGPSREPLLNPAHDSADVEAALPPSPDGRSHDADADEASSLMSKSTASSVAGEVYVQNSVDMDRSHRVDIRGWRLLRNLDFWQLFSIMGILAGIGLMTINNIGHDVQALWKLYDDSVDEAFLVHRQQMHVSILSVGSFCGRLLSGVGSDFLVKRLHANRAWCLVLACFVFCIAQLCALNVTNPHFLGFVSGLSGLGYGFLFGVFPSIVAESFGIHGLSQNWGFMTLSPVISGNIFNLFYGVVFDSHSVVGPDGERYCPDGLDCYKNAYYVTLTACGVGIVITLLTIRRQYRERLREEGKGAAED

SEQ ID NO: 1891 - DNA, 3246 bp, Myceliophthora thermophilia
atggcgacccgactatcgcgtgcgctcgttgtcacggcgctgtcgctgtcatgcgtcgcctcggcttacaacaactacacgtcagccgacatgctacaggcacaagcagcactgatggcagaccgtcccaaggactgtcctccgtgctttaactgcaatcttcctatcaacagctgtggccagttcgccccgtgcaatgggtacaccggcaagtgcgactgcccggcgggctttggcggcgacaactgtctcgaacccctctgcggctcccttccccgaggccagaaccgcccggcgcggcaggggaagtcctgcaaatgcgacgaaggatggacgggcatcaactgtaacgtgtgcaccagtgaccgcgcatgcgatgccatgacggaaacgggcgacggtggcgtctgctacaccggcggcgaggtggtgaagcaaaactaccagatgtgcgacgtcacaaacagggcgatccgggatcttcttggcacccaagtgccccaggtaaccttcacctgcgagaaggagtctggggagtgtgattttcaattctgggttgatgagcgggagtccttcatgtgccacctgaacgagtgcgaatcgagcgccgacttcgattcctctgcggggaagaacacgacgtcctacaagtgcgagaagatccgctgcgagtgtatccccgaccgcatgctctgcggcgccaacggctctgtcgacctcaccgaattcctcgtcgaagtgatccgcggtcccgcaagtttcggctgcgagcaactagccggcggaccgaagaagtgcgcgttccaagagccggaaatgaacaaactgattagcgacatgttcggagatatgagcatcctcctcacctgtaacgccggagaatgtctgtaccacaccgaggtgcccggattctcgcccgagatccccaagatcaacacgccactgatcgccggcgttatcgccggctgttcgctctttctcgttgccgtcattctagggacctggtacttgtcgagaaggcagttcaagtatgggccgattcacctggacgactcggacgacgaggcgatcaagctcatgacggaccacaagccggcatccctgtatttccagaacgtctgctacagcctcaacggcaaggatatcctgtcgggcatccagggcatggcccatcccggcgagcttaccgccatcatgggcgcttcgggggcgggcaaaacgacgtttctggatattcttgctcgcaagaacaagcgcggccacgtgtccggagacttctacgtcaatggcgagaaggtcagcgatgcggactacaagaacgccaccggctttgtcgatcaagaggatacgatgctccctaccttgacagtgcacgagaccatcctcacgagcgccctgcttcgcctcccgcgggacatgacgcgcgcggccaaggagcagagagtcttcgaggtagagaagcagctgggcatctaccacatccgagactcgctcatcggatccgaagagggcaaggggcgcggcatttctggcggtgagaagcggcgcgtcagcattgcgtgcgagctagtaacgagtccttccatcctcttcctcgacgagcccacaagtggcctcgacgcctacaacgcctataatgtcattgaatgcctggtcaccctcgccaagacgtataagcgcaccgtcattttcaccatccaccagcccagatccaacattgtcgcgctcttcgaccgcctcatcctgctggctcaggggaagacggtctactccggcccgctgcatcagtgccaggactacttcgaccgtataggatacagctgcccgcccgggttcaacattgcggattacctcgtggatctgaccatgcatgccggctccaccacctcctttgacgatggcactatctcggcagacgtggcgagcgttggtcctagcagcaccagggcagtcaagtccatcgcgagcatctccggcggcagcgccggcgacgacagcacggtggacgcatccccgtcccgtccgagaagccggcggcatgattctgtgcggctcaggcaggaacgagagctcttcacccgccgcaagcaacctgtagacacggccgcctcttcggacgccggggacgagatcggggcttacagacttcagcagacgcctcaccgcgtgccaccgcacaacctcgacgagcatgacgacttgctgcctccagcgtccaccggcacggacctcgacattctcgtgcgctcctatatccagtccgacattgcgggaaacacgcacgacgagattcagcaagccatcgccgcagcggttagcactaacggccagaactccaacggctactcggtcgatggtcccaacatcaacaacaacagcactcccaccatgggccgcggctacgcacgtatcggctattggcgacagttcgtgctgctctcccggcgcacctggcgcaacctctaccgcaacccgatgcttatgctcacgcactacgccatcgccatcctgctggccgtctttgcgggctacctcttctacgggctgtccatggacatcgccggcttccagaaccgcctcggcctcttcttcttcatcctcgccctcttcggcttcagcaccctcaccagcctctccgtcttctcccaggagcgtctgctgtttgtccgcgagcgcgccaacggatactactcgcccgtcacgtactttgccgccaaggtgctgtttgacattgtcccgctgcgcatcatcccgcccatcctgctcggcgccatcgtctacccgatgacggggctcgttgcctcggtggacaagttcctgatctttatgctggtgctggtgctgttcaacctcgccgcggccgcgatatgcctgtttatcggcatcgtctgcaaagacggcggcgtggccaacctcatcgggagcctggtcatgctcttcagcctgctgttcgccggcctgctcctgaatcacaacgctatcccgcccgccgccctgtggctgcagtggctgtccatcttccactacggcttcgaggcgttgattgtcaacgaggtcacgcagctgacgctgatcgatcacaagatcggcatcgatatcacggtacccggtgcggcgatcctgagctcttttggatttgataaccaggcgatgtggccggatatcatcaaccttgggatcttcggagccgtttttatcgtgctggcatacggcgcgatgcacgtgttgcttgtcgagaggcgctaa

SEQ ID NO: 1892 - protein, 1081 aa, Myceliophthora thermophilia
MATRLSRALVVTALSLSCVASAYNNYTSADMLQAQAALMADRPKDCPPCFNCNLPINSCGQFAPCNGYTGKCDCPAGFGGDNCLEPLCGSLPRGQNRPARQGKSCKCDEGWTGINCNVCTSDRACDAMTETGDGGVCYTGGEVVKQNYQMCDVTNRAIRDLLGTQVPQVTFTCEKESGECDFQFWVDERESFMCHLNECESSADFDSSAGKNTTSYKCEKIRCECIPDRMLCGANGSVDLTEFLVEVIRGPASFGCEQLAGGPKKCAFQEPEMNKLISDMFGDMSILLTCNAGECLYHTEVPGFSPEIPKINTPLIAGVIAGCSLFLVAVILGTWYLSRRQFKYGPIHLDDSDDEAIKLMTDHKPASLYFQNVCYSLNGKDILSGIQGMAHPGELTAIMGASGAGKTTFLDILARKNKRGHVSGDFYVNGEKVSDADYKNATGFVDQEDTMLPTLTVHETILTSALLRLPRDMTRAAKEQRVFEVEKQLGIYHIRDSLIGSEEGKGRGISGGEKRRVSIACELVTSPSILFLDEPTSGLDAYNAYNVIECLVTLAKTYKRTVIFTIHQPRSNIVALFDRLILLAQGKTVYSGPLHQCQDYFDRIGYSCPPGFNIADYLVDLTMHAGSTTSFDDGTISADVASVGPSSTRAVKSIASISGGSAGDDSTVDASPSRPRSRRHDSVRLRQERELFTRRKQPVDTAASSDAGDEIGAYRLQQTPHRVPPHNLDEHDDLLPPASTGTDLDILVRSYIQSDIAGNTHDEIQQAIAAAVSTNGQNSNGYSVDGPNINNNSTPTMGRGYARIGYWRQFVLLSRRTWRNLYRNPMLMLTHYAIAILLAVFAGYLFYGLSMDIAGFQNRLGLFFFILALFGFSTLTSLSVFSQERLLFVRERANGYYSPVTYFAAKVLFDIVPLRIIPPILLGAIVYPMTGLVASVDKFLIFMLVLVLFNLAAAAICLFIGIVCKDGGVANLIGSLVMLFSLLFAGLLLNHNAIPPAALWLQWLSIFHYGFEALIVNEVTQLTLIDHKIGIDITVPGAAILSSFGFDNQAMWPDIINLGIFGAVFIVLAYGAMHVLLVERR

SEQ ID NO: 1893 - protein, 1060 aa, Myceliophthora thermophilia
AYNNYTSADMLQAQAALMADRPKDCPPCFNCNLPINSCGQFAPCNGYTGKCDCPAGFGGDNCLEPLCGSLPRGQNRPARQGKSCKCDEGWTGINCNVCTSDRACDAMTETGDGGVCYTGGEVVKQNYQMCDVTNRAIRDLLGTQVPQVTFTCEKESGECDFQFWVDERESFMCHLNECESSADFDSSAGKNTTSYKCEKIRCECIPDRMLCGANGSVDLTEFLVEVIRGPASFGCEQLAGGPKKCAFQEPEMNKLISDMFGDMSILLTCNAGECLYHTEVPGFSPEIPKINTPLIAGVIAGCSLFLVAVILGTWYLSRRQFKYGPIHLDDSDDEAIKLMTDHKPASLYFQNVCYSLNGKDILSGIQGMAHPGELTAIMGASGAGKTTFLDILARKNKRGHVSGDFYVNGEKVSDADYKNATGFVDQEDTMLPTLTVHETILTSALLRLPRDMTRAAKEQRVFEVEKQLGIYHIRDSLIGSEEGKGRGISGGEKRRVSIACELVTSPSILFLDEPTSGLDAYNAYNVIECLVTLAKTYKRTVIFTIHQPRSNIVALFDRLILLAQGKTVYSGPLHQCQDYFDRIGYSCPPGFNIADYLVDLTMHAGSTTSFDDGTISADVASVGPSSTRAVKSIASISGGSAGDDSTVDASPSRPRSRRHDSVRLRQERELFTRRKQPVDTAASSDAGDEIGAYRLQQTPHRVPPHNLDEHDDLLPPASTGTDLDILVRSYIQSDIAGNTHDEIQQAIAAAVSTNGQNSNGYSVDGPNINNNSTPTMGRGYARIGYWRQFVLLSRRTWRNLYRNPMLMLTHYAIAILLAVFAGYLFYGLSMDIAGFQNRLGLFFFILALFGFSTLTSLSVFSQERLLFVRERANGYYSPVTYFAAKVLFDIVPLRIIPPILLGAIVYPMTGLVASVDKFLIFMLVLVLFNLAAAAICLFIGIVCKDGGVANLIGSLVMLFSLLFAGLLLNHNAIPPAALWLQWLSIFHYGFEALIVNEVTQLTLIDHKIGIDITVPGAAILSSFGFDNQAMWPDIINLGIFGAVFIVLAYGAMHVLLVERR

SEQ ID NO: 1894 - DNA, 1344 bp, Myceliophthora thermophilia
atgcctggcgagaccggacttcttcaaaccctccgcgaccatattctcgccacgctaggtctcctcgggcaaaccgcccacgcccaggggtatcagtctctcgacgccaacgccgacatcatggtcgtcgaaacgtcctccccggccaatgaggccgcctttaccaagccgggcacggaggatgacaactatggcaccaccacgttcgtctcgtcgtcctcctcagatgccgaagccgccgcggtcgccgcgggtctctcagagctcgagtcgcgcaacgtgcactggtactcgtacttcctgacgatcgacttctggctcatcatcgcgctcggccagatcctgtcgctctgcatcacggcgaccaacacctttaccagcttcctggccggcgtccacaccaacatcccggccttccagaccctcttcaactatgccctcctgaccctgatctggctgccaatcacgctgcgccagcacggcccccgcaagtgggcctcgatcgtgctgcgcgacggctggaagtacttcatcctgtccttcctcgacgtcgagggcaactacttcaccgtgctggcctacaagtacaccaacatcctgtcggcccagctcatcaacttctggtccatcgtctgcgtcgtcaccctgtccttcttcctgctccgcgtccgctaccgctggctccagatcgccggcatcctcatttgctgcggcggcatgggcctcctgctcgccagcgaccacatcaccggctccaacggcgggccggccagcgacatgctcaagggtgatctgttcgccctgctcggcgcctccctgtacggcatcagcaatgtcttcgaggagtggttcgtcagcaagcggcccgtctacgaggtcctctcgttcctcggcatctttggcgcctgcatcaacggcgtccaggccgccatctttgaccgctcctccttcgacggcgccacctggaacggcaaggtcgccggctggctggtcggctacacgctctgcctctgcctcttctactcgatcgccccgctgatcctgcgcatgggcagcgccgccgtcttcgacgtcaacctgctgacggccaacttctggagcgtcatcatcggcacgcgggtctttggctacgtcgtgcactggatgtacccgatcgccttcgtcctcatcatctgcgggcttgtcatctacttcctggccggcagcatcctgggcgactccaagaagccctggctcggcgacaaccagaaggacggcgttgctggcatcgggacggccaagctgaaggcgctgaacgcggcccgaaagaaggggctcgccggccgggcggacggccaggcataa

SEQ ID NO: 1895 - protein, 447 aa, Myceliophthora thermophilia
MPGETGLLQTLRDHILATLGLLGQTAHAQGYQSLDANADIMVVETSSPANEAAFTKPGTEDDNYGTTTFVSSSSSDAEAAAVAAGLSELESRNVHWYSYFLTIDFWLIIALGQILSLCITATNTFTSFLAGVHTNIPAFQTLFNYALLTLIWLPITLRQHGPRKWASIVLRDGWKYFILSFLDVEGNYFTVLAYKYTNILSAQLINFWSIVCVVTLSFFLLRVRYRWLQIAGILICCGGMGLLLASDHITGSNGGPASDMLKGDLFALLGASLYGISNVFEEWFVSKRPVYEVLSFLGIFGACINGVQAAIFDRSSFDGATWNGKVAGWLVGYTLCLCLFYSIAPLILRMGSAAVFDVNLLTANFWSVIIGTRVFGYVVHWMYPIAFVLIICGLVIYFLAGSILGDSKKPWLGDNQKDGVAGIGTAKLKALNAARKKGLAGRADGQA

SEQ ID NO: 1896 - protein, 419 aa, Myceliophthora thermophilia
QGYQSLDANADIMVVETSSPANEAAFTKPGTEDDNYGTTTFVSSSSSDAEAAAVAAGLSELESRNVHWYSYFLTIDFWLIIALGQILSLCITATNTFTSFLAGVHTNIPAFQTLFNYALLTLIWLPITLRQHGPRKWASIVLRDGWKYFILSFLDVEGNYFTVLAYKYTNILSAQLINFWSIVCVVTLSFFLLRVRYRWLQIAGILICCGGMGLLLASDHITGSNGGPASDMLKGDLFALLGASLYGISNVFEEWFVSKRPVYEVLSFLGIFGACINGVQAAIFDRSSFDGATWNGKVAGWLVGYTLCLCLFYSIAPLILRMGSAAVFDVNLLTANFWSVIIGTRVFGYVVHWMYPIAFVLIICGLVIYFLAGSILGDSKKPWLGDNQKDGVAGIGTAKLKALNAARKKGLAGRADGQA

SEQ ID NO: 1897 - DNA, 1704 bp, Myceliophthora thermophilia
atgcagctcggcatcatcgttggtcttttgtccacaagcgttcagagcctgggcctcacgctccaacggaagtcgcatattctcgaagacgaaaaggtaccgtacgatgtgaggcggcctccataccgaaggaggaggtggcagctggggatggcaatgttcatcatctccaacgtggttgggagttcggtccagatttccatgctcccgctgcctgttctctcgactctgcaggcctcaggtctggtattcaactcgatctgcgccacgcttatccttggggaaccgtttacgagatggtcactatgggggacgctactggtttgcgccggggccgtcctcatcgccgtttttggggcgatcccgtcgccggcacacaagttgagcgagctgctggacttgctggggagaagacccttcgtgctttggatggccttccaagccctcttcgtcatcagtctcgcggtcgcaaccgagctcgtgagccacttcacgacgctgatgcaagatccacggttccgtctcgcgcggggcttctcgtatggatgcataagcggaaccctgtcagcgcactcccttttggtggccaaatcagccgttgagctcatcgtcaggacaatcgccgacggcgataaccagttcgttcactggcagtcgtggatgctagttctcggcctcgtcacccttgctctctcccagctgtactaccttcaccggggcctcaagctggtctcgacatccgttttatacccgctcatattctgcatttataacatcatcgcgattctggacggcctcatctatttccgccaaaccgacctcatcaacccgttacgcgcttgccttatcgcccttggcaccgttgtcctcctctctggcgtcctcgcgctgtcttggcgcctcagcgacgagcagcacacaccaggcgttgggcagtcaacgctcgcgcccggtctagggctcctcgaggacactgacgccgaggaggagggcgaagatgtttcgttgcgttcggctctcctcagcgagggcgagactgcggtagcaacgcagtctaactatcaaacattcgagacgccgctgtctcccgagctctctacggcatctgctgctgcacctgcgccccagagaccgagcttgatggcccgttcgacaagggcggcctcgtccagatgggcagaacaggccgagatctggggcgagctcgaagaccgcagcacgccggagccagcatctccctccttcaacagacgccggtcaactaccctacccgaccgcagaagctcgccttcgttagggcctgtgagacgcgaaacagctgattcagagcaggttggagcgaacgaagaggcagagccacttctctcgtcgcccaggggcaatttcaggaggaggcggaagtcgaccgggtttccgggctttacagcgcggaagaccacgggccgcaagacgtcagggggcattcagaccctggcgcgtagtgtgtttgggatgaagtggtggggcagtaagccgaggcaagcgatgccgacagacgccccaagagcgagttttggaagttgggcagtgccgccatatagagatgatctggagtcaggtttggcagggccttcggcggagggaagaacgtcgctagcacctggctcgaaggcaagccaaatgtcggagtcgagggatactaggcctggtgataccccagtataa

SEQ ID NO: 1898 - protein, 567 aa, Myceliophthora thermophilia
MQLGIIVGLLSTSVQSLGLTLQRKSHILEDEKVPYDVRRPPYRRRRWQLGMAMFIISNVVGSSVQISMLPLPVLSTLQASGLVFNSICATLILGEPFTRWSLWGTLLVCAGAVLIAVFGAIPSPAHKLSELLDLLGRRPFVLWMAFQALFVISLAVATELVSHFTTLMQDPRFRLARGFSYGCISGTLSAHSLLVAKSAVELIVRTIADGDNQFVHWQSWMLVLGLVTLALSQLYYLHRGLKLVSTSVLYPLIFCIYNIIAILDGLIYFRQTDLINPLRACLIALGTVVLLSGVLALSWRLSDEQHTPGVGQSTLAPGLGLLEDTDAEEEGEDVSLRSALLSEGETAVATQSNYQTFETPLSPELSTASAAAPAPQRPSLMARSTRAASSRWAEQAEIWGELEDRSTPEPASPSFNRRRSTTLPDRRSSPSLGPVRRETADSEQVGANEEAEPLLSSPRGNFRRRRKSTGFPGFTARKTTGRKTSGGIQTLARSVFGMKWWGSKPRQAMPTDAPRASFGSWAVPPYRDDLESGLAGPSAEGRTSLAPGSKASQMSESRDTRPGDTPV

SEQ ID NO: 1899 - protein, 549 aa, Myceliophthora thermophilia
LTLQRKSHILEDEKVPYDVRRPPYRRRRWQLGMAMFIISNVVGSSVQISMLPLPVLSTLQASGLVFNSICATLILGEPFTRWSLWGTLLVCAGAVLIAVFGAIPSPAHKLSELLDLLGRRPFVLWMAFQALFVISLAVATELVSHFTTLMQDPRFRLARGFSYGCISGTLSAHSLLVAKSAVELIVRTIADGDNQFVHWQSWMLVLGLVTLALSQLYYLHRGLKLVSTSVLYPLIFCIYNIIAILDGLIYFRQTDLINPLRACLIALGTVVLLSGVLALSWRLSDEQHTPGVGQSTLAPGLGLLEDTDAEEEGEDVSLRSALLSEGETAVATQSNYQTFETPLSPELSTASAAAPAPQRPSLMARSTRAASSRWAEQAEIWGELEDRSTPEPASPSFNRRRSTTLPDRRSSPSLGPVRRETADSEQVGANEEAEPLLSSPRGNFRRRRKSTGFPGFTARKTTGRKTSGGIQTLARSVFGMKWWGSKPRQAMPTDAPRASFGSWAVPPYRDDLESGLAGPSAEGRTSLAPGSKASQMSESRDTRPGDTPV

SEQ ID NO: 1900 - DNA, 1719 bp, Myceliophthora thermophilia
atgagaacagcggcccgtcttgctgtggcgtccctgctcctgggaccggcatgtgccgattggcagttccgctcccgtccggaccttgcgccaccccgactcaacattaccatcccggcaaccaaggatgtcgagaagggatatctctttgtggctccttttgccgggttccccgacacccccaccgagcagcacggtccgcgccaagcgggaccctacatcttccgcgacaacggggacttggtctggtccggttatggcatctacagcatctggtccaccaacttccaggcggctcgatggaagggcaaagatgtgctctttagcttcgagggcgaccacaacgccggatatggccacggccacggccacatcaccattatggatcagcactacgagaccatccgcgagctacgcgccggtaatcacaagctggttgacaagcacgagtttcacgttatcaacgaggagaccggtttgatccagatctaccagcccgtgccccgcgacctgaccgcctggggagcgggccccagacaacaatggattgtcgacgccatctttcaggaactggacattgccactggccgcctcttgttcgaatggcacagcctcgaccacgtgccgccctcggaatccgtgctcccgattaacccgggccaggcgggcggcgggtacaactcgtcggacgcgtgggactacttccacatcaacagcgtggacaaggaccgggagggcaactacctcatctcggcgcgggacgcgtgcgcggtgcacaagatcaacggcaccacgggcgagatcatctggcggctcaacggcaagcggtccgactttaccatgggcgaggggaccaccttctgctttcagcaccacgcccgctggctccagcaggccggcgagggcgacgacggcgtcgaggtcatcagcctgtacgacaactcggcgcacggcaccgagcacggcggcgggcacgaggtgcacacggccgaccggagcagcgccaagatcctgcggctcgacacgcgcgcgtggacggccgagctggtgcacggctactacccgcccagcggatacgacctgctgtccaagagccaggggtcggcgcaggtgctgcccaacgggaacgtgctggtcaactggggctccgagggggccgtgaccgagtacacggccgagggcgagcctatcttccacgcggccatggacagcggcgagctgggcgtgggcgtggagaactaccgcgcgttccggttcaactggacgggcctgccgagcgaggagccggcggtcgtcgcgctcgagggcgacgagggcacgtcggtctacgtgagctggaacggcgacaccgagacggcggtctggcgcttcttcgaggtggtggacgagctgggctcccgctcgttcctcggcgaggccgagcggacgagcttcgagacgcggttggatctcccccgcgcgaagaaggtagccggacgcgtcgcggccgaggcagtcgacaagcaaggaagggtgctgcgggcgacgcgcgaggtggctgtcgagccggaggtcctccctgcttcctcggacaggccgggatccggcgccggctcgtacgagcatcctgacatgtctgacgagcaaaacgccctggccgctagccccttccggagccgctgggaggagtatgcaattctcaaggtcttccgcttccgcttccccaaagacctcttctag

SEQ ID NO: 1901 - protein, 572 aa, Myceliophthora thermophilia
MRTAARLAVASLLLGPACADWQFRSRPDLAPPRLNITIPATKDVEKGYLFVAPFAGFPDTPTEQHGPRQAGPYIFRDNGDLVWSGYGIYSIWSTNFQAARWKGKDVLFSFEGDHNAGYGHGHGHITIMDQHYETIRELRAGNHKLVDKHEFHVINEETGLIQIYQPVPRDLTAWGAGPRQQWIVDAIFQELDIATGRLLFEWHSLDHVPPSESVLPINPGQAGGGYNSSDAWDYFHINSVDKDREGNYLISARDACAVHKINGTTGEIIWRLNGKRSDFTMGEGTTFCFQHHARWLQQAGEGDDGVEVISLYDNSAHGTEHGGGHEVHTADRSSAKILRLDTRAWTAELVHGYYPPSGYDLLSKSQGSAQVLPNGNVLVNWGSEGAVTEYTAEGEPIFHAAMDSGELGVGVENYRAFRFNWTGLPSEEPAVVALEGDEGTSVYVSWNGDTETAVWRFFEVVDELGSRSFLGEAERTSFETRLDLPRAKKVAGRVAAEAVDKQGRVLRATREVAVEPEVLPASSDRPGSGAGSYEHPDMSDEQNALAASPFRSRWEEYAILKVFRFRFPKDLF

SEQ ID NO: 1902 - protein, 553 aa, Myceliophthora thermophilia
DWQFRSRPDLAPPRLNITIPATKDVEKGYLFVAPFAGFPDTPTEQHGPRQAGPYIFRDNGDLVWSGYGIYSIWSTNFQAARWKGKDVLFSFEGDHNAGYGHGHGHITIMDQHYETIRELRAGNHKLVDKHEFHVINEETGLIQIYQPVPRDLTAWGAGPRQQWIVDAIFQELDIATGRLLFEWHSLDHVPPSESVLPINPGQAGGGYNSSDAWDYFHINSVDKDREGNYLISARDACAVHKINGTTGEIIWRLNGKRSDFTMGEGTTFCFQHHARWLQQAGEGDDGVEVISLYDNSAHGTEHGGGHEVHTADRSSAKILRLDTRAWTAELVHGYYPPSGYDLLSKSQGSAQVLPNGNVLVNWGSEGAVTEYTAEGEPIFHAAMDSGELGVGVENYRAFRFNWTGLPSEEPAVVALEGDEGTSVYVSWNGDTETAVWRFFEVVDELGSRSFLGEAERTSFETRLDLPRAKKVAGRVAAEAVDKQGRVLRATREVAVEPEVLPASSDRPGSGAGSYEHPDMSDEQNALAASPFRSRWEEYAILKVFRFRFPKDLF

SEQ ID NO: 1903 - DNA, 2985 bp, Myceliophthora thermophilia
atggccctctcgctttccccggccaagctcgtgctcctggccgtgcactacgccgtccacggtgacgtcgacagcctgaccgctctcgccgcccgccacggcgccgtcttgaagaaggacctgctgctgcgcatcctgctcacatacctacccgagacgctcccctccagccgctacaccgattttgtccgccagctcgacgagcgcggcctgtttccggacacggtccccgtcgaggtcgactgcagccccgtcgagcatcttgccgaggacgatgcggtgaagaaggtcaggaggctccgattgcttcctctggcgctcccggacgctcccgagagcgctcccgaggatgcgctcacgctgttcctgctgcgccggtcgtacaaggtggacgaggaggccggcttgctcgacgagctcccagcgctgctgctgcctttcatggaccactcgccatgcgtccgtacgctgctggtttccacaatcctgccactattgaggaggaactgcgaatactacccccaggagccgatcccgttcacccttcaaggcttccagcacctgccagaccgtgtggccgtgagctcgctcctctcgcggtctggcagccacgacgccgacatttccctggttggccgggacctgagggggttggttggcccgtggttgtccggggagaagaggtggaagcaagggacacaagggacacatggtgccgactcatcgaggagcgcagccgaggcggacgacgatctctgccccgggtgggacgaggtcctccgctggcttatgacgaaggcgtcgaagagctggagagtcgccgtcagcgcgattcagcaatgggatggcccgggagatgcggaccttggtggctggggctccgtcgagttcagcgatagccaacgagaatacttggaggagagctatgcccgggcggcactagcatccgcctatctaatcccggaagcatccctggaggctctggacggcgcctacaccatcgctgccagggttgctaacctccgtgccctcgatcccgtctcgcctctcgcctcagccctcgccgtgttgccaccacttacagaacagatttccgacgacatcttgtccctcaagaacacggcccagatgcgcaacgacctgctttctccgtccaacccgttaacgtcaccaaccgactcctccctggcttttctgcaggccctcgctctaagcgctcatatcctcaccaaagctggctgtccctgcacgatacggagagccggcgagctcgcgctgctccgggacgagagagagcaaaaggccgaagcaggcaagcttatctacgctatcagtagcaccgggcccaagacggacgataggttctggataaaggccaggaatgagatcctgtggctccgagactggggcgcggaggatggctggtcccctgaggaagccgcctgcggcgtcttcggccaggtcaagaaggacttcttggaggttgagattctgaaggcactactctccaatactcgggaatcggtgctgaccagcccaggatacacgctcgcgcggtcaatatatgaagacgcaccggaccaacccctggaccggggcctcttgcaagacaccatatacgcgactgcaatgactgcttacgacaacgcctccaatcccaatcgcactcgcggcgggctcaagaagtgcgatgagataattaaagcatttcctaagactatccagcaatccgaccctcgagcaaagcggatcgaggccctcctccaaactacccactctctaagcggctaccgccttgtcctcaaacaaggcgagcctttcactcccgtcgtgctccgcgttcatgacgatcctgtctccatcatctccaagattctcgagcagaacccaagaagctatacccaactccatgatctcctcacccttggcacccacatggtcgacgctgggctcaccaccaaaacgcccctgacgtcggaaaaggacgttgcccgccaccgcctctcgaccgagcgtcgcatcacagccatgtgcatcaacgcggcccttgcagaagacgactttgagaccgcctattcctacgtcgtcaaccgcatcgcccccgcaactaccccgaacagcagcagcagcagtagtagtaataacgcgacatggggcgacgactattcttggaaagccgccctccaggcaggcaagtatcgccgcggccacagcagcagcagcagcaccaccaccaccaccaccacccaccaccagcgaacgctcccaagcggcgtaggcagcggcggcggtctcttcagcagcgccaacgccgacgtgcgccacctcgagcagcgcatcgagtgcctcgccaccgccctccgcgtcgcgcccccgcacaccctgcaggagatcgtcaacgccggcgccaccaccaccaccaccaccaccctgccgggcctgttcggtcgcccctcccccgcctccgccgccggcgccggcgcgggtcgtgccggccatcacctggaggcgaagcgtagtcggccgagcaggaccgccgccgccgccgccgccgccgccggggacgaggatgccgcgcccatgtcgctgttcgacctgagccgcgccagcgtgctgtcggcccagcggaacctgtcggcgctgtcggccctgcaccggtcaaccggcctcggagcgcgcttggccagcgtcgggagcggtctaggcggcggaagaagaggaggaggaggaggagggggcggaggaggagcagggagaaaagcgagcgagggcaggggggatggtgctagtgatgccggtgatgggaggagtagcatggacatgccgccgctctcggccacggggtcgaccacctcggcggggagcgccgacgaggagaagagggtgcgcaagagagatcagctgagggaggcggccatggggacactggtgtcgggggtcgggtggctggtaggggcgccgccgccctcgcagttgagagattaa

SEQ ID NO: 1904 - protein, 994 aa, Myceliophthora thermophilia
MALSLSPAKLVLLAVHYAVHGDVDSLTALAARHGAVLKKDLLLRILLTYLPETLPSSRYTDFVRQLDERGLFPDTVPVEVDCSPVEHLAEDDAVKKVRRLRLLPLALPDAPESAPEDALTLFLLRRSYKVDEEAGLLDELPALLLPFMDHSPCVRTLLVSTILPLLRRNCEYYPQEPIPFTLQGFQHLPDRVAVSSLLSRSGSHDADISLVGRDLRGLVGPWLSGEKRWKQGTQGTHGADSSRSAAEADDDLCPGWDEVLRWLMTKASKSWRVAVSAIQQWDGPGDADLGGWGSVEFSDSQREYLEESYARAALASAYLIPEASLEALDGAYTIAARVANLRALDPVSPLASALAVLPPLTEQISDDILSLKNTAQMRNDLLSPSNPLTSPTDSSLAFLQALALSAHILTKAGCPCTIRRAGELALLRDEREQKAEAGKLIYAISSTGPKTDDRFWIKARNEILWLRDWGAEDGWSPEEAACGVFGQVKKDFLEVEILKALLSNTRESVLTSPGYTLARSIYEDAPDQPLDRGLLQDTIYATAMTAYDNASNPNRTRGGLKKCDEIIKAFPKTIQQSDPRAKRIEALLQTTHSLSGYRLVLKQGEPFTPVVLRVHDDPVSIISKILEQNPRSYTQLHDLLTLGTHMVDAGLTTKTPLTSEKDVARHRLSTERRITAMCINAALAEDDFETAYSYVVNRIAPATTPNSSSSSSSNNATWGDDYSWKAALQAGKYRRGHSSSSSTTTTTTTHHQRTLPSGVGSGGGLFSSANADVRHLEQRIECLATALRVAPPHTLQEIVNAGATTTTTTTLPGLFGRPSPASAAGAGAGRAGHHLEAKRSRPSRTAAAAAAAAGDEDAAPMSLFDLSRASVLSAQRNLSALSALHRSTGLGARLASVGSGLGGGRRGGGGGGGGGGAGRKASEGRGDGASDAGDGRSSMDMPPLSATGSTTSAGSADEEKRVRKRDQLREAAMGTLVSGVGWLVGAPPPSQLRD

SEQ ID NO: 1905 - protein, 973 aa, Myceliophthora thermophilia
DVDSLTALAARHGAVLKKDLLLRILLTYLPETLPSSRYTDFVRQLDERGLFPDTVPVEVDCSPVEHLAEDDAVKKVRRLRLLPLALPDAPESAPEDALTLFLLRRSYKVDEEAGLLDELPALLLPFMDHSPCVRTLLVSTILPLLRRNCEYYPQEPIPFTLQGFQHLPDRVAVSSLLSRSGSHDADISLVGRDLRGLVGPWLSGEKRWKQGTQGTHGADSSRSAAEADDDLCPGWDEVLRWLMTKASKSWRVAVSAIQQWDGPGDADLGGWGSVEFSDSQREYLEESYARAALASAYLIPEASLEALDGAYTIAARVANLRALDPVSPLASALAVLPPLTEQISDDILSLKNTAQMRNDLLSPSNPLTSPTDSSLAFLQALALSAHILTKAGCPCTIRRAGELALLRDEREQKAEAGKLIYAISSTGPKTDDRFWIKARNEILWLRDWGAEDGWSPEEAACGVFGQVKKDFLEVEILKALLSNTRESVLTSPGYTLARSIYEDAPDQPLDRGLLQDTIYATAMTAYDNASNPNRTRGGLKKCDEIIKAFPKTIQQSDPRAKRIEALLQTTHSLSGYRLVLKQGEPFTPVVLRVHDDPVSIISKILEQNPRSYTQLHDLLTLGTHMVDAGLTTKTPLTSEKDVARHRLSTERRITAMCINAALAEDDFETAYSYVVNRIAPATTPNSSSSSSSNNATWGDDYSWKAALQAGKYRRGHSSSSSTTTTTTTHHQRTLPSGVGSGGGLFSSANADVRHLEQRIECLATALRVAPPHTLQEIVNAGATTTTTTTLPGLFGRPSPASAAGAGAGRAGHHLEAKRSRPSRTAAAAAAAAGDEDAAPMSLFDLSRASVLSAQRNLSALSALHRSTGLGARLASVGSGLGGGRRGGGGGGGGGGAGRKASEGRGDGASDAGDGRSSMDMPPLSATGSTTSAGSADEEKRVRKRDQLREAAMGTLVSGVGWLVGAPPPSQLRD

SEQ ID NO: 1906 - DNA, 2211 bp, Myceliophthora thermophilia
atgcggtggtcgataacgaggccgcttgcggccctggcgtcgctcgccgccctcgcctctccctcgcatgccgagtatatcctccagtccaactcgttgaacgcctgccaggagaactcgggctttaccgccagcctgttcaaggtcgttttcacgccgaaaaaccacacggccaatgtcgacattgttgccgtctcgtcggtccagggcaacgtcgtctttgatgtcgccatctcggcctacggataccagttcatcaagaggacggtcgatccgtgcaaggttggcctggccggtctctgccccatgacggccggcaagatcccgctcaacttcaacctcaacgtcggcgaggacgccgtcaagcaaatcccctcgatcgcttacaccttcccggatctcgacgccaaggttcgcgtcttcatcaacaggacggacggttccgaggccggccagagcgtcgcctgcgtcgaggccgacatctccaacggcaagaccgtggacctgctcggtgtcaagtgggccaccgccatcgttgccggtctcgccttggtctcctcggccattgtctccggcctgggccaccagaatgcggctgcccacgtcgccgccaatgccctctccctctttggctacttccaggcccaggccatgctcggtctgaccggagtccacctgccgcccgtcgtcatggcgtggactcaggatttccaatggagcatgggcatcatccgcatcgggttcatgcaggatatttttacctggtaccagcgcgccaccggcggtacgccgtcgaccatcttcgactcgttgaccaccgtttcggttcaggtcgagaaacgcgccgtcgatctgagcctgggcttggcgaaacgctcgctcgccatgatgccgaggagcatttccgagcccatgtcggccataatgaagcgcgacctgatcaagcggggcaacatccagaccagctccggcagctacattgtctacggcatccagcgcgtggcattccgcgccggcatcgagtcgaccaacctcttcatgaccggcctgattttcttctgtctcctcgtcctcttcacctcggccgccgtggcggccttcaagggctttctcgagacggccgtcaagaagaagtggatgcccagcgacaggtttctcgagttccgcaacggctggctcaccgtcctcaaggggatcctattccgcctcaccctgatcggcttcccccagatgaccatcctctgcctctgggagttcacccagaaggactcggccgccgaggtcgtcctggccgtcttcttcctctttggcatggtcatcacgctcggatgggccgcctacaaggtcatcatgattgcccgccgctccatcctgatgcataacaaccccgcctacatcctattctcggatccccaggcgctcaacaagtggggtttcttgtacgtgcagttccgggcctcggcttactatttcatcgtccccgttctgggctatgccctggtcaaggccatgttcatcgccttcgcgcaggacaagggaaccgtgcaggccgtcggcttcctcatcctcgaggccggcgccctgatcgccgccagcgtgctccgcccgtggatggataagaagaccaactcgttcaacatcgccatctgcgccctcaactttatcaattccatcttcctcatgatctttactgaggtcttcaaccagccgcccctcgtcacgggcgtcgtcggcgtcatcctgtggatcaccaacgccgtcttcgccttgatcctgctgctcatgctcatcgtgagcaccatcttcgtcttcttccgcgagaaccccgacggccggtaccagatcatggccgacgacaggacttcgttcatgaagtcgcagacgcacctcgcccaaaccaccgagctggacgcccttgccgcaaccgcgcgcggcgacaagggcggcttcaagggcggcttggacctggacgatgatgccgagtccatcacatcggactcgttgcgccaccaaaccgagcacttggtcgtgccctcaaacggctccgtgacgggcttcagcagccagccgcgtgctcccgcttcgccctcgatgcctttgttccctgccgacggccctcggagtcctccgaggttcaatgagcgaccggcgagcccgttcggcgcgtcaaactacggcccggcctttagagctcagaataattctaggtga

SEQ ID NO: 1907 - protein, 736 aa, Myceliophthora thermophilia
MRWSITRPLAALASLAALASPSHAEYILQSNSLNACQENSGFTASLFKVVFTPKNHTANVDIVAVSSVQGNVVFDVAISAYGYQFIKRTVDPCKVGLAGLCPMTAGKIPLNFNLNVGEDAVKQIPSIAYTFPDLDAKVRVFINRTDGSEAGQSVACVEADISNGKTVDLLGVKWATAIVAGLALVSSAIVSGLGHQNAAAHVAANALSLFGYFQAQAMLGLTGVHLPPVVMAWTQDFQWSMGIIRIGFMQDIFTWYQRATGGTPSTIFDSLTTVSVQVEKRAVDLSLGLAKRSLAMMPRSISEPMSAIMKRDLIKRGNIQTSSGSYIVYGIQRVAFRAGIESTNLFMTGLIFFCLLVLFTSAAVAAFKGFLETAVKKKWMPSDRFLEFRNGWLTVLKGILFRLTLIGFPQMTILCLWEFTQKDSAAEVVLAVFFLFGMVITLGWAAYKVIMIARRSILMHNNPAYILFSDPQALNKWGFLYVQFRASAYYFIVPVLGYALVKAMFIAFAQDKGTVQAVGFLILEAGALIAASVLRPWMDKKTNSFNIAICALNFINSIFLMIFTEVFNQPPLVTGVVGVILWITNAVFALILLLMLIVSTIFVFFRENPDGRYQIMADDRTSFMKSQTHLAQTTELDALAATARGDKGGFKGGLDLDDDAESITSDSLRHQTEHLVVPSNGSVTGFSSQPRAPASPSMPLFPADGPRSPPRFNERPASPFGASNYGPAFRAQNNSR

SEQ ID NO: 1908 - protein, 712 aa, Myceliophthora thermophilia
EYILQSNSLNACQENSGFTASLFKVVFTPKNHTANVDIVAVSSVQGNVVFDVAISAYGYQFIKRTVDPCKVGLAGLCPMTAGKIPLNFNLNVGEDAVKQIPSIAYTFPDLDAKVRVFINRTDGSEAGQSVACVEADISNGKTVDLLGVKWATAIVAGLALVSSAIVSGLGHQNAAAHVAANALSLFGYFQAQAMLGLTGVHLPPVVMAWTQDFQWSMGIIRIGFMQDIFTWYQRATGGTPSTIFDSLTTVSVQVEKRAVDLSLGLAKRSLAMMPRSISEPMSAIMKRDLIKRGNIQTSSGSYIVYGIQRVAFRAGIESTNLFMTGLIFFCLLVLFTSAAVAAFKGFLETAVKKKWMPSDRFLEFRNGWLTVLKGILFRLTLIGFPQMTILCLWEFTQKDSAAEVVLAVFFLFGMVITLGWAAYKVIMIARRSILMHNNPAYILFSDPQALNKWGFLYVQFRASAYYFIVPVLGYALVKAMFIAFAQDKGTVQAVGFLILEAGALIAASVLRPWMDKKTNSFNIAICALNFINSIFLMIFTEVFNQPPLVTGVVGVILWITNAVFALILLLMLIVSTIFVFFRENPDGRYQIMADDRTSFMKSQTHLAQTTELDALAATARGDKGGFKGGLDLDDDAESITSDSLRHQTEHLVVPSNGSVTGFSSQPRAPASPSMPLFPADGPRSPPRFNERPASPFGASNYGPAFRAQNNSR

SEQ ID NO: 1909 - DNA, 1041 bp, Myceliophthora thermophilia
atggccggcttgttttttctcatcgtgacctctgtggtcatgaccgtggcctcgttcctcgccggcgccctcccgttgtcgctctccctcgcgcagtcccagctgcggctcattgcctccctcggagcgggactgctggttggcagctgtctggttgtcatcctgccggaagggatcgaagctctagccgcagcatctgaacattcgcacgacccagctcaaccgatgccacggctgccggggctggtgctacgagagggcgacgagcccgcggagaataccggcgaactacccgcatttagcatcggcttcgccctcgtccttggttttgcgctgatgttcctcgtcgaccgactgccccgccatgcgaccgagaggtttcgagccgcgccgacaagtaggcatgtcagcctggaagatcttgccgggtcaagtgtgtccggggaaggcgaatccgagggctttctggactccctcgcgccgttacccaaacagactcgtggtctagctactacattgggtctcgtcatacatgcagcggcggacggcatcgcaatgggagcatcggctacaacttccaatctgaatgttgggctcatcatctttctcgcgattttgatgcacaaggcgccggccgcttttgggctgacgtcaatcctgctgaagcaaggtctcacgaagcgagctgcgcgggtgcatctcatggtgttcagtctcgccgcccctgccggtgcactggcaacctatttcctcgtctcgttggccggaggcgccaacttggagggtgagtcagcacagtggtggacgggtatgctgctcctttttagcgctggtacatttctgtacgtggcaatgcacgccatgcgagaagaggaaaacaacccagcgggttacgaccacagttctagcagcaacgggtattccgagagcggtggctccgctcccaggagaagagcgaaactcgaattgagggatactcttgcgaccgtggtgggctttatgctgccattgctgacgcggttcggacaccatcaccattaa

SEQ ID NO: 1910 - protein, 346 aa, Myceliophthora thermophilia
MAGLFFLIVTSVVMTVASFLAGALPLSLSLAQSQLRLIASLGAGLLVGSCLVVILPEGIEALAAASEHSHDPAQPMPRLPGLVLREGDEPAENTGELPAFSIGFALVLGFALMFLVDRLPRHATERFRAAPTSRHVSLEDLAGSSVSGEGESEGFLDSLAPLPKQTRGLATTLGLVIHAAADGIAMGASATTSNLNVGLIIFLAILMHKAPAAFGLTSILLKQGLTKRAARVHLMVFSLAAPAGALATYFLVSLAGGANLEGESAQWWTGMLLLFSAGTFLYVAMHAMREEENNPAGYDHSSSSNGYSESGGSAPRRRAKLELRDTLATVVGFMLPLLTRFGHHHH

SEQ ID NO: 1911 - protein, 321 aa, Myceliophthora thermophilia
LSLSLAQSQLRLIASLGAGLLVGSCLVVILPEGIEALAAASEHSHDPAQPMPRLPGLVLREGDEPAENTGELPAFSIGFALVLGFALMFLVDRLPRHATERFRAAPTSRHVSLEDLAGSSVSGEGESEGFLDSLAPLPKQTRGLATTLGLVIHAAADGIAMGASATTSNLNVGLIIFLAILMHKAPAAFGLTSILLKQGLTKRAARVHLMVFSLAAPAGALATYFLVSLAGGANLEGESAQWWTGMLLLFSAGTFLYVAMHAMREEENNPAGYDHSSSSNGYSESGGSAPRRRAKLELRDTLATVVGFMLPLLTRFGHHHH

SEQ ID NO: 1912 - DNA, 1575 bp, Myceliophthora thermophilia
atgaagctgcccacgatttacaatgtccagctcgtggccatcatcgcgaccctcggtggcatgctgttcgggttcgacatttcttccatgtcggccatcgtcgtgaccgaccagtacattgagtacttcaacaaccctaccggggttatccaaggcgccatcgggtcggctctcgcggccggctcggtcgtcggttctgccgtggcaggtccgctgtccgactggatgggccggcgcgactccatcatgtttgcctgcttgttctggctcgtcgggacggcggtccaggtggcgacccagaacgtcggccagctcatcgccggccgcgtgctcaacggcttcaccgtcggcatcacgtcgtcccaggtgcccgtctacctggccgagatcgccaaggccgagaagcgcggctccatcgtcatcatccagcagctggccgtcgagttcggcatcctcatcatgtacttcatcggctacggctgcgcctccatcgagggcaccggctccttccgcaccgcctggggcacccagttcatcccctgcgtcttcctcatgctcggcctccccttcctcccgcgctcgccccgatggctcgccaaggtcggccgcgacaaggaggccatcgagaccctcgccaacatccaggccgacggcaacacccaggactcccgcgtcattgccgagtgggaggagatccagaccgtcatgcaggccgagcgcgaggccggccgcggctggaggaagttcttgctcaacggcatgtggaagcgtaccctggccggcatgtcggtccaggcgtggcagcaactggctggcgccaacgtgatcgtttactacctgacttacatcgctcagatggctggtctgaccggcgacgtcgccatggttacgtcgggtatccaatatgccgtcttcatcgtcttcaccggcatcatgtggctcttcatcgacaagaccggccgccgcacgctgctcatctggggcgccctcggcatgggcttctgccacttcgtcgtcggcggcgtcatgggcgcgcactcgacctaccaccccgagggcgtgggcaacccgcccaacggcaacatcgtcatcgccgtcaacaagggcgcgccggccaacacggtcatcaccttctcgtacctgctcatcgtcgtctacgcgctgacgctggccccggtctgctggatctacgcggccgaggtctggtcgctgggcacgcgggcgacgggcatgtccctggcggccatgagcaactgggtcttcaacttcgccctcggcatgttcaccccgccgggcttcgtcaacatcacctggaagctcttcatcatcttcggcgtcctctgcgtcaccgccgccgcctggttcttcctgctctgcccggagacgtgcggcaagacgctcgaggagatcgagctcctcttctccggcccggacgccccgcacccctggaacaccaggaagggcgactcccgcctcgccgccgagatcgccgccgtcgaggcccgccggcgcgagaagaccgaggccggcgaggtggaggccgtgccctccgtcggcgagcaggagaaggtttaa

SEQ ID NO: 1913 - protein, 524 aa, Myceliophthora thermophilia
MKLPTIYNVQLVAIIATLGGMLFGFDISSMSAIVVTDQYIEYFNNPTGVIQGAIGSALAAGSVVGSAVAGPLSDWMGRRDSIMFACLFWLVGTAVQVATQNVGQLIAGRVLNGFTVGITSSQVPVYLAEIAKAEKRGSIVIIQQLAVEFGILIMYFIGYGCASIEGTGSFRTAWGTQFIPCVFLMLGLPFLPRSPRWLAKVGRDKEAIETLANIQADGNTQDSRVIAEWEEIQTVMQAEREAGRGWRKFLLNGMWKRTLAGMSVQAWQQLAGANVIVYYLTYIAQMAGLTGDVAMVTSGIQYAVFIVFTGIMWLFIDKTGRRTLLIWGALGMGFCHFVVGGVMGAHSTYHPEGVGNPPNGNIVIAVNKGAPANTVITFSYLLIVVYALTLAPVCWIYAAEVWSLGTRATGMSLAAMSNWVFNFALGMFTPPGFVNITWKLFIIFGVLCVTAAAWFFLLCPETCGKTLEEIELLFSGPDAPHPWNTRKGDSRLAAEIAAVEARRREKTEAGEVEAVPSVGEQEKV

SEQ ID NO: 1914 - protein, 500 aa, Myceliophthora thermophilia
FDISSMSAIVVTDQYIEYFNNPTGVIQGAIGSALAAGSVVGSAVAGPLSDWMGRRDSIMFACLFWLVGTAVQVATQNVGQLIAGRVLNGFTVGITSSQVPVYLAEIAKAEKRGSIVIIQQLAVEFGILIMYFIGYGCASIEGTGSFRTAWGTQFIPCVFLMLGLPFLPRSPRWLAKVGRDKEAIETLANIQADGNTQDSRVIAEWEEIQTVMQAEREAGRGWRKFLLNGMWKRTLAGMSVQAWQQLAGANVIVYYLTYIAQMAGLTGDVAMVTSGIQYAVFIVFTGIMWLFIDKTGRRTLLIWGALGMGFCHFVVGGVMGAHSTYHPEGVGNPPNGNIVIAVNKGAPANTVITFSYLLIVVYALTLAPVCWIYAAEVWSLGTRATGMSLAAMSNWVFNFALGMFTPPGFVNITWKLFIIFGVLCVTAAAWFFLLCPETCGKTLEEIELLFSGPDAPHPWNTRKGDSRLAAEIAAVEARRREKTEAGEVEAVPSVGEQEKV

SEQ ID NO: 1915 - DNA, 1605 bp, Myceliophthora thermophilia
atgtggcaagctagcaacgtctatgccatctgcgggtttgccgccatcggcggcggccttttcggcttcgatatcagctccatgtcgggcgtcctcggcactcaggcgtacaagcgctacttcaacaacccggtttcgtacgcccagggaggcatcacggccgccatgcctgcgggcagtctggtcggctcgctgggctcgtccttcatcgccgacaagttctcgcgcaaagtggccctgcagatctcgtgcgtcctctggatcatcggctccatcctcatggcggccgcccagaacgtcgccatgctctgtgtcggcagagtcatctgcggcctgtgtgtcggcatcgcctcgtccatcgtgcccgtgtaccagtccgagatcgcgcccaaggagatccggggacgggtggtatccctgcagcagtgggctatcacttggggcatcttgatccaatacttcatccagttcggggcggccgagggcatcggtggcggatccaaggacccgaaccagccgacagctgccttccgtatcccctggggagtccagatggtcccggccgtcgtcctgctgatcggcctcttcttctgtccctacagcccgcgctggcttgcctctaaagaccgctgggacgaggccgtgcgggtgctcgccaacctccacggcaaaggtgaccttaaccatcccaaggtcctcgcccagtaccaggaaattcaggaagccctgaggttggagagggagcaggccgagtcgtcctttagcacgctcgtccagccgaggatactcaagcgtgtcgctctgggcatgagcattcagatgtggtcccagctcagcggaatgaacatcatgatgtactacattgtctacattatggagggtgcccagattgcttctccgctcgcgaccgcatcaatccaatacgtgatcaacgtcgccctgacgctacccgctatcctcttcctcgacaaatggggccgccgtccttctctgatcctcggtgcctttggcatgatgaccttcctcttcgtttcgggcgccctccagcagtactacggccagcccaacaccgacgagacccggacgccccagaacagcgacatcagctggatcgtcagcaacaaccggcccgtctcctccggcatcgtcgcgtgctcctatctcttcgtcgccaccttcgccacgacctggggtcccgtctcgtggagctacccggctgagatcttcccgaacaaggtccgtgccaaggcggtctcgctggcgacggcggccaactggttctggaacatggtactggccttcgccgtcccgcctctgctgtggaacatctcgtacaagatgtactacatctttggcgcctttaacggcgccgcctttatccacatgaccctgttggcgcccgagacaaagggcttcaccctcgaggagatggacgaggtgtttgactcgggccggcccgcctggaagaagtacaagaaatcgagcaagctggaagagctggcgcgcgagatcgaggccggtaaccttaaggttgctgttcccatcggtgaccagaacaaggctgcgggcgaaattgttacatccgagaagaaagcggaaccatag

SEQ ID NO: 1916 - protein, 534 aa, Myceliophthora thermophilia
MWQASNVYAICGFAAIGGGLFGFDISSMSGVLGTQAYKRYFNNPVSYAQGGITAAMPAGSLVGSLGSSFIADKFSRKVALQISCVLWIIGSILMAAAQNVAMLCVGRVICGLCVGIASSIVPVYQSEIAPKEIRGRVVSLQQWAITWGILIQYFIQFGAAEGIGGGSKDPNQPTAAFRIPWGVQMVPAVVLLIGLFFCPYSPRWLASKDRWDEAVRVLANLHGKGDLNHPKVLAQYQEIQEALRLEREQAESSFSTLVQPRILKRVALGMSIQMWSQLSGMNIMMYYIVYIMEGAQIASPLATASIQYVINVALTLPAILFLDKWGRRPSLILGAFGMMTFLFVSGALQQYYGQPNTDETRTPQNSDISWIVSNNRPVSSGIVACSYLFVATFATTWGPVSWSYPAEIFPNKVRAKAVSLATAANWFWNMVLAFAVPPLLWNISYKMYYIFGAFNGAAFIHMTLLAPETKGFTLEEMDEVFDSGRPAWKKYKKSSKLEELAREIEAGNLKVAVPIGDQNKAAGEIVTSEKKAEP

SEQ ID NO: 1917 - protein, 512 aa, Myceliophthora thermophilia
FDISSMSGVLGTQAYKRYFNNPVSYAQGGITAAMPAGSLVGSLGSSFIADKFSRKVALQISCVLWIIGSILMAAAQNVAMLCVGRVICGLCVGIASSIVPVYQSEIAPKEIRGRVVSLQQWAITWGILIQYFIQFGAAEGIGGGSKDPNQPTAAFRIPWGVQMVPAVVLLIGLFFCPYSPRWLASKDRWDEAVRVLANLHGKGDLNHPKVLAQYQEIQEALRLEREQAESSFSTLVQPRILKRVALGMSIQMWSQLSGMNIMMYYIVYIMEGAQIASPLATASIQYVINVALTLPAILFLDKWGRRPSLILGAFGMMTFLFVSGALQQYYGQPNTDETRTPQNSDISWIVSNNRPVSSGIVACSYLFVATFATTWGPVSWSYPAEIFPNKVRAKAVSLATAANWFWNMVLAFAVPPLLWNISYKMYYIFGAFNGAAFIHMTLLAPETKGFTLEEMDEVFDSGRPAWKKYKKSSKLEELAREIEAGNLKVAVPIGDQNKAAGEIVTSEKKAEP

SEQ ID NO: 1918 - DNA, 1527 bp, Myceliophthora thermophilia
atgtgggagatagcaatctcgaaggccgcctggcgccttcactccttctgcttgattttagccctgggttcgtttgtttgggggtacaacgtcggcgtcctagcctccgtgctcgtccacccgggcttcaagcagatcctgggtgagccagacgcgccccggcgcggactcatcacggccgtctactatctcggcttgtggctgatctacgtgttgtttgcacatcccgtcgccgaccgactgggccgccgcaacgctgctctcggcggcatgtcggtgatatgcctcggccaggggcttcagaccggcgccgccgggccgcacgcgctcgccatgatcatcgccggtcgcaccatcgccggcatggggacggccgtcatctcgacgagcgtgccactgtaccagagcgagatatcaccgccggggcagcgtggtcgatatgtcgtcatgaaccacgttggcttcgttgccggcctctcctcaggtttctgggtcggatatgccatgacgttctggaacaacgaccgcgggagcgcggttggttggcggttttctctcggtgcatcctttgtgccggccttgatctttgtcgccgcccttccgtttatgcgcgagtcgtcaacatctcgctcgctccttcgtcaccggagcaataggccgcgctggctggtcgagcacgggaagaccgaggaggcgctcgagacgctgcggttctaccgagaaggttactacggcccagacgaggtccaggcggagctgtcaggcatcgagcgctcgattgccgcgttccggaactcgggcctcacttgggtctcgctgttctcggacggcagcctctttgcgcgcatgtggcgggcggcgctcctgcagttcctggcccatctctgcggcgccacggccatgaaatactaccttcccgcgctgttccaggccctggggtttagccaccgcgtgtccctgcttgctggcggcattgagagcacgctcaagacgggatgcactgttatcgacatgctcctcatcgacagggcaggccgtcgtctcactctcattgctggggccggcgtcatggcttttgctttactgatcaacggcgcgctcccgctggcgtaccccgacaacgtgaacagagcggccgactacgtctgtgtcgtcttcatatttgtctacgccctaggctacagcttgggcttcggccctgctgcgtgggtctacggcgctgagatctttcccactgccatccgcgcccgagggttgagtctagccgcctcctgcggcgccttggccgccgtcatcgttgcccaggtatggccggtgggcatcgccaatctcggttccagcatctacttcttcttcatggcggtcaacctgatcagtgtacccgttatttacctgttctacccggagaccaaagggcggccgctggaggacatggaggaattgtttggagccggctcgggagcctcgtccgacgacctcctcatcggcccaggggatcacgcacacccccgagaatcgtgcccctga

SEQ ID NO: 1919 - protein, 508 aa, Myceliophthora thermophilia
MWEIAISKAAWRLHSFCLILALGSFVWGYNVGVLASVLVHPGFKQILGEPDAPRRGLITAVYYLGLWLIYVLFAHPVADRLGRRNAALGGMSVICLGQGLQTGAAGPHALAMIIAGRTIAGMGTAVISTSVPLYQSEISPPGQRGRYVVMNHVGFVAGLSSGFWVGYAMTFWNNDRGSAVGWRFSLGASFVPALIFVAALPFMRESSTSRSLLRHRSNRPRWLVEHGKTEEALETLRFYREGYYGPDEVQAELSGIERSIAAFRNSGLTWVSLFSDGSLFARMWRAALLQFLAHLCGATAMKYYLPALFQALGFSHRVSLLAGGIESTLKTGCTVIDMLLIDRAGRRLTLIAGAGVMAFALLINGALPLAYPDNVNRAADYVCVVFIFVYALGYSLGFGPAAWVYGAEIFPTAIRARGLSLAASCGALAAVIVAQVWPVGIANLGSSIYFFFMAVNLISVPVIYLFYPETKGRPLEDMEELFGAGSGASSDDLLIGPGDHAHPRESCP

SEQ ID NO: 1920 - protein, 480 aa, Myceliophthora thermophilia
YNVGVLASVLVHPGFKQILGEPDAPRRGLITAVYYLGLWLIYVLFAHPVADRLGRRNAALGGMSVICLGQGLQTGAAGPHALAMIIAGRTIAGMGTAVISTSVPLYQSEISPPGQRGRYVVMNHVGFVAGLSSGFWVGYAMTFWNNDRGSAVGWRFSLGASFVPALIFVAALPFMRESSTSRSLLRHRSNRPRWLVEHGKTEEALETLRFYREGYYGPDEVQAELSGIERSIAAFRNSGLTWVSLFSDGSLFARMWRAALLQFLAHLCGATAMKYYLPALFQALGFSHRVSLLAGGIESTLKTGCTVIDMLLIDRAGRRLTLIAGAGVMAFALLINGALPLAYPDNVNRAADYVCVVFIFVYALGYSLGFGPAAWVYGAEIFPTAIRARGLSLAASCGALAAVIVAQVWPVGIANLGSSIYFFFMAVNLISVPVIYLFYPETKGRPLEDMEELFGAGSGASSDDLLIGPGDHAHPRESCP

SEQ ID NO: 1921 - DNA, 1464 bp, Myceliophthora thermophilia
atggcgagaaaaataacacgactgggcgcgctctgtgcagcaatcgctgctcagggggccgaagcagccgtcagctttgccatccccaacaaggcgggaacgggcgcacaactgtacgcgcccctcgatccggcgccggtgggcatctcgttcgagttctttgccttcccttcctacttcaccaacgtcacggcgaccaagcagtgcctggccaactggaaggacctcacgggcgtctggcccccgatccggatcggcggaaccacccaggaccgagcctcgtatgactcctccacttcggcatacgtcgtctactcggtcgccaacccggccgacgcccctgcgaccctgaccttcggtcccaagttcatgaccctcgccggcacgtacccgggcagtgtcgtcgtcggcttgaacaggggcaagaacaacattgacaacacgatcgccgcggccaaggttgccgtcagcgaggttaccaacctgttggccatcgagttgggcaacgagccagagtactaccccaaggatggtcaacccatcgccagcggcacctggaacccctcggtcgacgcggcctcccaggtggattggagcatccgggtcggcagcgccgtcggcaagcggaacatcatccaggccggcaactggaaccagccgccgccggaatggggcgccgcccagctgatcgcaagcgagaacgccaccgcgagccagtacatccgtcactacgcccaccacaactacccgggaggcgacgtccagaagctccaatcccactcccagacctccagcaacgtccgctccatgttcgccgccgacgtcgccgccgtcaagcagcagacgggcaaggaatacgtcctcggcgagacaaactctgtctcgggcggcggcgcggccaacgtgtcgccgacgtttggcgcggcgctctggacgatggactacgcgctgcgggcggcggcgcacggcatctcgcgcgtctacttccaccacggcaccgtgggcaactgccagtactgcttctggggccgctactcgatgggggcgccctactacggcgcgacggccgccgtcgccctggccgcgggcgccagctccatcgccgccctcgacgccggcaccgacgggtacgccgcctacgtcaccttcgacgccgccggcgcccccctgcgcgccctcctgtacaactcggactactacgccggcggcggcgccgaaccccgctcctcccagcagttcaccctcaccggcctgcgcggcgaccgcgtccgcgccaagcgcctcaccgccgccagctccctgtcgcgcgccgaccgcggcaacgacatctcctttggcggtcagtactgggtcaacggcacctgcgtcgtcggcggcgaggaggtcttcgagacggtcgaggtcgccggtggcagggcgacgtttgatatcaaggcggccgaggccttgttggtgtatctgtga

SEQ ID NO: 1922 - protein, 487 aa, Myceliophthora thermophilia
MARKITRLGALCAAIAAQGAEAAVSFAIPNKAGTGAQLYAPLDPAPVGISFEFFAFPSYFTNVTATKQCLANWKDLTGVWPPIRIGGTTQDRASYDSSTSAYVVYSVANPADAPATLTFGPKFMTLAGTYPGSVVVGLNRGKNNIDNTIAAAKVAVSEVTNLLAIELGNEPEYYPKDGQPIASGTWNPSVDAASQVDWSIRVGSAVGKRNIIQAGNWNQPPPEWGAAQLIASENATASQYIRHYAHHNYPGGDVQKLQSHSQTSSNVRSMFAADVAAVKQQTGKEYVLGETNSVSGGGAANVSPTFGAALWTMDYALRAAAHGISRVYFHHGTVGNCQYCFWGRYSMGAPYYGATAAVALAAGASSIAALDAGTDGYAAYVTFDAAGAPLRALLYNSDYYAGGGAEPRSSQQFTLTGLRGDRVRAKRLTAASSLSRADRGNDISFGGQYWVNGTCVVGGEEVFETVEVAGGRATFDIKAAEALLVYL

SEQ ID NO: 1923 - protein, 465 aa, Myceliophthora thermophilia
AVSFAIPNKAGTGAQLYAPLDPAPVGISFEFFAFPSYFTNVTATKQCLANWKDLTGVWPPIRIGGTTQDRASYDSSTSAYVVYSVANPADAPATLTFGPKFMTLAGTYPGSVVVGLNRGKNNIDNTIAAAKVAVSEVTNLLAIELGNEPEYYPKDGQPIASGTWNPSVDAASQVDWSIRVGSAVGKRNIIQAGNWNQPPPEWGAAQLIASENATASQYIRHYAHHNYPGGDVQKLQSHSQTSSNVRSMFAADVAAVKQQTGKEYVLGETNSVSGGGAANVSPTFGAALWTMDYALRAAAHGISRVYFHHGTVGNCQYCFWGRYSMGAPYYGATAAVALAAGASSIAALDAGTDGYAAYVTFDAAGAPLRALLYNSDYYAGGGAEPRSSQQFTLTGLRGDRVRAKRLTAASSLSRADRGNDISFGGQYWVNGTCVVGGEEVFETVEVAGGRATFDIKAAEALLVYL

SEQ ID NO: 1924 - DNA, 1455 bp, Myceliophthora thermophilia
atgctggaggcggccgccacctcgttggcctccataatcgtcctcggagccggttttggcctagccgcctatgcttaccataagggttacaagtacatggtgcttcacaagatggccaacgcctttgagcccggcgaccccgtcctagagcttgccgcaataggcaaagatctcccgctctccaagacggccgcggccacccactgggtggagcggccggagcagcccatcgtcgacgacatcgtcgccggccgcagcgtcggtcactaccacctgttcatcggggacaagggcaccggcaagagcagcatgctcctggaagcgatgcgcaagatcgacggcgacggcgtggccatgttcgaagcccatgccgatctcgagatcttcaggatccgcctgggcaaggcgctggactacgagttccacgaggactacatcggcggctacttcagcgagcgcgggccgagggacaccaccgccctgctcgacatcgagcgcgccctcaacaagctggagaaggtggcgctccgcagacgggccaaggtcgggcgcccgctcgtcgtcatcatcaaccagatgcacctgatcagggacgacgaagacggcaaggatctgatcgagctgctgcagcagcgggccgagcagtgggcggccgcgcacctggtcaccatggtcttcaacagcgacgactactgggtctacgagcggctgaagcagctggcgacccgcatggacgtcctcaccatcatggacctgcccaaggcgcaggcgacggccgccctcaggaactaccgccagcgctacttccacgaggaccctccgtccgagatcctcgaggaggtctacaaccgcgtcggcggccgactcaacttcctgaaccgcgtggccaagagcaacgacatgctggatgcctgcgacaagatcaaggagaccgagaagacctggttcttgaatcaatgctggatcctcggaaaagacatggacgacgacgtcatggaccagcaaaagtgggctgcggccgcggtggtcctagcggccgctctggtagacaaggagaaggagatggagacgacgtacgaccccgtggtgggccacgtgctcccgtcgtttccgctctacaaggcccaggagatcatgacccgggtcgactttgtgcgcgccttcgatcgcctgaacctgtttagcatcacgagcgacgcccaggtccgggccagctccgtgcccatgcacctcgccttccgggagatcgtctcccagcccggcttccgcgagcatctccagggcaccatcgaccgcatcgccgccatcgagagcctcggccgcacacgggagcttgtggccaaggacttggtcctcggcgggaagtatgagatacggaagatccctggaggcattgacgtgtcactacgggagaaggaagaagaggaagccacgggcgatgacgacaagaactga

SEQ ID NO: 1925 - protein, 484 aa, Myceliophthora thermophilia
MLEAAATSLASIIVLGAGFGLAAYAYHKGYKYMVLHKMANAFEPGDPVLELAAIGKDLPLSKTAAATHWVERPEQPIVDDIVAGRSVGHYHLFIGDKGTGKSSMLLEAMRKIDGDGVAMFEAHADLEIFRIRLGKALDYEFHEDYIGGYFSERGPRDTTALLDIERALNKLEKVALRRRAKVGRPLVVIINQMHLIRDDEDGKDLIELLQQRAEQWAAAHLVTMVFNSDDYWVYERLKQLATRMDVLTIMDLPKAQATAALRNYRQRYFHEDPPSEILEEVYNRVGGRLNFLNRVAKSNDMLDACDKIKETEKTWFLNQCWILGKDMDDDVMDQQKWAAAAVVLAAALVDKEKEMETTYDPVVGHVLPSFPLYKAQEIMTRVDFVRAFDRLNLFSITSDAQVRASSVPMHLAFREIVSQPGFREHLQGTIDRIAAIESLGRTRELVAKDLVLGGKYEIRKIPGGIDVSLREKEEEEATGDDDKN

SEQ ID NO: 1926 - protein, 459 aa, Myceliophthora thermophilia
YHKGYKYMVLHKMANAFEPGDPVLELAAIGKDLPLSKTAAATHWVERPEQPIVDDIVAGRSVGHYHLFIGDKGTGKSSMLLEAMRKIDGDGVAMFEAHADLEIFRIRLGKALDYEFHEDYIGGYFSERGPRDTTALLDIERALNKLEKVALRRRAKVGRPLVVIINQMHLIRDDEDGKDLIELLQQRAEQWAAAHLVTMVFNSDDYWVYERLKQLATRMDVLTIMDLPKAQATAALRNYRQRYFHEDPPSEILEEVYNRVGGRLNFLNRVAKSNDMLDACDKIKETEKTWFLNQCWILGKDMDDDVMDQQKWAAAAVVLAAALVDKEKEMETTYDPVVGHVLPSFPLYKAQEIMTRVDFVRAFDRLNLFSITSDAQVRASSVPMHLAFREIVSQPGFREHLQGTIDRIAAIESLGRTRELVAKDLVLGGKYEIRKIPGGIDVSLREKEEEEATGDDDKN

SEQ ID NO: 1927 - DNA, 1794 bp, Myceliophthora thermophilia
atggctctccatcagttcgactacatcttcgccatcggcctcatctttgccgcactcgatgcctggaacatcggtgccaatgatgtggccaattcgtgggcgacgtcggtcgggtcgcagtccgtgacgtacctgcaggccatgctcctcgcatcagcaatggaattcgccggctgcgtgggtgtgggcgcccgtgtcgccgacaccatccgtaccaagattgtcgacacctcgctcttcgtcgacgacccggccctgctcatgcttggcatggtctgcgccgtcgtcgcttcctccctctacctcaccttcgccaccaggttcggcatgcccgtatccaccacccattccatcctcggcggtgtcatcggcatgggcgttgcctcagttggtgccaaaggtgttcaatgggtgggctccggcagcggcactagcgccatcaactcgggtgttgtccaggtcttcctcgcgtggattattgctccgggccttgctgggtgcttcgctgccatcatcttcctccttaccaagtacatggtgctgatccgaagcaactccgccctttgggcgctccgcgtcgttcccttctacttcgcccttaccgccatgctgcttaccatgctgctcctgtggaaaggtggcagctacgagatccacctcaccgaccccgagattgccggcactatcgttggtgttggtgcgggcttcggcctcctggtttccctcacgctggtgccctggatgtaccgcgtcgtcatcaaggaggactggcaacttcgctggtaccacatccccctgggacctctcctgttgcgtcgtggtgacgtccctccgccgccggaggatgccggcccggtcgtcaagaactactatgaaggccgcatgaccaaggaggagttcgaggcccgcaaggctgctcagcgcggcgatgtcgaagtggtgggcggcgacgctgccgccgagaagacggccagcgcggagggtgccgtggccgcggacaagtcggccactgcggaaggctccgatgccgcctcggccgagcgcccgaaccggagccccctcgccgatgtccgcagcgcccccaagaagctggtgggtcccaagcccgagggcaagtggtacgagggccgcgtgctcttctggtacgtcaagtgggcgctgctgcgcggtgtcgaccaggaagtcgtcaacgccaagagcacgcacaacatgctggccaagaacatcgacgaggtgcacgcctatgcccagcactacgacaacaggaccgagtacatgtacagcttcctccagatcatgacggccgccaccgcttctttcacccacggcgccaacgacattgccaacgccatcggccccttcgcgaccgtccaccaggtctggaacgatggcgcgctcccggccaagggcaagtcagacgtgcccatctggatcctctgcttcggcggtgccatgctggtcatcggcgtctggacctacggctacaacatcatgcgcaacctgggtaaccgcctgaccctgcaatctcccgcgcgcgggttttccatggagctcggctctgccattaccgtcatccttgctacccgcctgaaactccccgtctctaccactcagtgcatcactggcgccactgtcggcgtcggcctctgctccggaacttggcgcaccgttaactggcgcatggtcttgtggatctacttcggatggatcatcaccctgcccgtcacgggtatcatttcgggttgcctgatgggtattatcattaatgctcctcgctggggctactctggctga

SEQ ID NO: 1928 - protein, 597 aa, Myceliophthora thermophilia
MALHQFDYIFAIGLIFAALDAWNIGANDVANSWATSVGSQSVTYLQAMLLASAMEFAGCVGVGARVADTIRTKIVDTSLFVDDPALLMLGMVCAVVASSLYLTFATRFGMPVSTTHSILGGVIGMGVASVGAKGVQWVGSGSGTSAINSGVVQVFLAWIIAPGLAGCFAAIIFLLTKYMVLIRSNSALWALRVVPFYFALTAMLLTMLLLWKGGSYEIHLTDPEIAGTIVGVGAGFGLLVSLTLVPWMYRVVIKEDWQLRWYHIPLGPLLLRRGDVPPPPEDAGPVVKNYYEGRMTKEEFEARKAAQRGDVEVVGGDAAAEKTASAEGAVAADKSATAEGSDAASAERPNRSPLADVRSAPKKLVGPKPEGKWYEGRVLFWYVKWALLRGVDQEVVNAKSTHNMLAKNIDEVHAYAQHYDNRTEYMYSFLQIMTAATASFTHGANDIANAIGPFATVHQVWNDGALPAKGKSDVPIWILCFGGAMLVIGVWTYGYNIMRNLGNRLTLQSPARGFSMELGSAITVILATRLKLPVSTTQCITGATVGVGLCSGTWRTVNWRMVLWIYFGWIITLPVTGIISGCLMGIIINAPRWGYSG

SEQ ID NO: 1929 - protein, 576 aa, Myceliophthora thermophilia
WNIGANDVANSWATSVGSQSVTYLQAMLLASAMEFAGCVGVGARVADTIRTKIVDTSLFVDDPALLMLGMVCAVVASSLYLTFATRFGMPVSTTHSILGGVIGMGVASVGAKGVQWVGSGSGTSAINSGVVQVFLAWIIAPGLAGCFAAIIFLLTKYMVLIRSNSALWALRVVPFYFALTAMLLTMLLLWKGGSYEIHLTDPEIAGTIVGVGAGFGLLVSLTLVPWMYRVVIKEDWQLRWYHIPLGPLLLRRGDVPPPPEDAGPVVKNYYEGRMTKEEFEARKAAQRGDVEVVGGDAAAEKTASAEGAVAADKSATAEGSDAASAERPNRSPLADVRSAPKKLVGPKPEGKWYEGRVLFWYVKWALLRGVDQEVVNAKSTHNMLAKNIDEVHAYAQHYDNRTEYMYSFLQIMTAATASFTHGANDIANAIGPFATVHQVWNDGALPAKGKSDVPIWILCFGGAMLVIGVWTYGYNIMRNLGNRLTLQSPARGFSMELGSAITVILATRLKLPVSTTQCITGATVGVGLCSGTWRTVNWRMVLWIYFGWIITLPVTGIISGCLMGIIINAPRWGYSG

SEQ ID NO: 1930 - DNA, 1554 bp, Myceliophthora thermophilia
atgccgtccaatgagccatggcttaccaagaccttcctcgcctccctatttctgggcataggagggtttctatacggcttcgactcgggcatcatcacccctagtttggccttggcgtcattctcgacctactttgacaagcccaatgcgcctctccggggcgccatcgtatcggtctaccaagccggagcatggctcggcagcgcttcggtaggcatcaccagcgatagattgggcaggcggaaggctatcgcctttgggtgcgcttggggagtgttgggcggagccttgatggccggtgccgcacacgtggccatgctcattatcggccgccttctcatcggttacgctgtcggtaccgtcacgggtgttgctcccgtctttggagccgagattgccaagaccaacgagcgtgccaggatcacggccacgaaccagatgatggtcgcctggggattcttcgttgccctctggacgggcgtgggcgaaggaaaatggtctaacgccaaccagtggcggctcggctttgcgatccaggcgattccggccctccttctcggggtcggcgttctgtttattggggagtccccgaggtggctctgtctcaagggccgctacgaggaggccgagaagactttccggaggtggcattacaacggcagaaacgacgaatggtgccggaccgagtttgccgccatccagacgagcattgccgaggaggtgcaagcgcagcaccggctcggctggggtgacctcgtccgcaccgccccgttccgcaggcggctcttcgtcgggtccttcgtctgggccgctgccatgctttccggtatcagcttcgtgcagtacttccagacggctatctatgcgacgctgcagttcgaccaggaccggcagctgcttgtcagcggtctctacggctgcgtggcacccgttgcatgcatcctctcgctcttcttcgtcgatcgcgtcggccgcaggaagatcctgatcggcagctcggctctgttgtcgatctcctacctgatcatcaccgtactcgctgccctctacccggccatacccggcaagccaaccaacgaggcggcccagaaggccatcatcgcgtgcatattcttggtgtcggccaactactccgcactgctggggcccatgacctggatcattccgcctgaggtcttcacgaccgaactccgtgccaaagcaaacgcggtggtccaagtcatccactactccatcagcttgatcattacccaatgttccccgatcgccctcgagagggtgggctggaagtactatgtaacgaaactcccccagaagcatacgccgctgcagattagtcctgccgctaacgagaggcaccagatcctcttcatcctcacaaacgctctgtgcacgctcgtgtttgcggttgcctacccagaaacccgaggcaaatcgctcgagcagatcgacgagatattcggcgacgttcaaattaagcgtgacgtcgaatctagccctgagaaggaggtcctcgagaaggatggtgtctcgattaccgaggtgtccagataa

SEQ ID NO: 1931 - protein, 517 aa, Myceliophthora thermophilia
MPSNEPWLTKTFLASLFLGIGGFLYGFDSGIITPSLALASFSTYFDKPNAPLRGAIVSVYQAGAWLGSASVGITSDRLGRRKAIAFGCAWGVLGGALMAGAAHVAMLIIGRLLIGYAVGTVTGVAPVFGAEIAKTNERARITATNQMMVAWGFFVALWTGVGEGKWSNANQWRLGFAIQAIPALLLGVGVLFIGESPRWLCLKGRYEEAEKTFRRWHYNGRNDEWCRTEFAAIQTSIAEEVQAQHRLGWGDLVRTAPFRRRLFVGSFVWAAAMLSGISFVQYFQTAIYATLQFDQDRQLLVSGLYGCVAPVACILSLFFVDRVGRRKILIGSSALLSISYLIITVLAALYPAIPGKPTNEAAQKAIIACIFLVSANYSALLGPMTWIIPPEVFTTELRAKANAVVQVIHYSISLIITQCSPIALERVGWKYYVTKLPQKHTPLQISPAANERHQILFILTNALCTLVFAVAYPETRGKSLEQIDEIFGDVQIKRDVESSPEKEVLEKDGVSITEVSR

SEQ ID NO: 1932 - protein, 495 aa, Myceliophthora thermophilia
FLYGFDSGIITPSLALASFSTYFDKPNAPLRGAIVSVYQAGAWLGSASVGITSDRLGRRKAIAFGCAWGVLGGALMAGAAHVAMLIIGRLLIGYAVGTVTGVAPVFGAEIAKTNERARITATNQMMVAWGFFVALWTGVGEGKWSNANQWRLGFAIQAIPALLLGVGVLFIGESPRWLCLKGRYEEAEKTFRRWHYNGRNDEWCRTEFAAIQTSIAEEVQAQHRLGWGDLVRTAPFRRRLFVGSFVWAAAMLSGISFVQYFQTAIYATLQFDQDRQLLVSGLYGCVAPVACILSLFFVDRVGRRKILIGSSALLSISYLIITVLAALYPAIPGKPTNEAAQKAIIACIFLVSANYSALLGPMTWIIPPEVFTTELRAKANAVVQVIHYSISLIITQCSPIALERVGWKYYVTKLPQKHTPLQISPAANERHQILFILTNALCTLVFAVAYPETRGKSLEQIDEIFGDVQIKRDVESSPEKEVLEKDGVSITEVSR

SEQ ID NO: 1933 - DNA, 1989 bp, Myceliophthora thermophilia
atggcccggatttcctcgaccctccgggcaagtgtgctttacggcctcctagctgttgctagcgccgaggctgctctctccccgaccccgaagcctaggccgcttcgcctacgatcgccccaggctgatcactcggaatcggagtctgatccggccaccatcactgccgtgtcagaatgccatttgcatggaacagtacagtatgccaactctcccaccagagcagcttcgttacgcgctcgtttctcacgccgtctctctgtgctagatactgtcaagccggaaccaccgagttcaggatatcagggactgccactgcctcatcctacactgactgccacaaccatggcgccgaaacgtaggctgtccctccccctgatgactttccttttttatgaatgtcacctgacactgataattaggttttgtatggcacctaccggggaggtccagatcttcgccgccgaggcagcgcaaacgacgacgccgaccccaaccagggccgactcgaccagctcgagcatcacggccgtgtccgattgccatgcccacggctctacactcttttgtatggccgggacagccgagtatgaagttcacacgaccgtgacggcgacccaggatatccctcctgcctacaccgggtgccacagccacggaacggagaccttctgtattggcccggatggagaagaggtcgagctccacccggccggagaggaggaggaggaagatggatcggggggtcagaactgccacttccatgccggtgtcgagcattgtgtcgggagctccggggaagaagaggaacacagttgcgagcgggtcgacagggactacaacatccgtctccgcgtcggcttgctcttcgtcatgctggtaaccagctccatcggcgttttcggcccgatcctcgtggcttcctacgtctctccttcccatcccgtcttcaccgtcctgagacaattcggcaccggcgtcatcatctcgaccgccttcgttcatctctacacgcacgccaccctgatgttcgagaacgagtgcctcggcgagctcacctacgagtctaccgcctcggccatcctcatggccgggctcttcctgtcgttcctggtcgagtactccggcaaccggctcatccagtggcgcgagtccaaggccaaggccaaagagggcagcatcgagtccggcgccgacgccgatgccgcgccggccgccgcccgcaccgacatggtcaacatcgtcgttttggaagccggcgtcatctttcactctctactgatcggcctcaccctcgtcgtcgcgggcgacagcttcttcctgaccctcttcgccgtcatcgtcttccatcagatgttcgaaggcctcgccctcggcacgcgcatcgccgccctcggccggccctgcccgacctccgcccccgagacgcccggacacggccaagccttccccaacggccacaaccacgcccacggtcatgagcattaccacgcccaggacgaccaaaccgtcgacgaccaccccgccgagcccgctgaccccaaggccgccgccgccacacaaccaagcgccacctccaaagaacaagagcccgcgagcggcgccccgtccgtctcgaacgatcccgcggccgcgtccggccagaagttgaggggcggcggcagcagcagcaccatcaccagcgtcccgctgagcaagaagctgctgctggcggtcgcgttcgcgctggtgacgccggtggggatggcgatcgggatcggggtgctgcggcagttcaacggcaacgacccgtcgacggtggtggcgatcggcacgctcgacgccctctcggcggggatcctggtctgggtcggcgtcgtcgagatgtgggcgcacgactggatgctcggcggcgagatgacccgcgccgggcccgcccgcaccgccctcggcctcgtcgccctcgtcgtcggcatggccctcatgagccttctcggcaagtgggcttga

SEQ ID NO: 1934 - protein, 662 aa, Myceliophthora thermophilia
MARISSTLRASVLYGLLAVASAEAALSPTPKPRPLRLRSPQADHSESESDPATITAVSECHLHGTVQYANSPTRAASLRARFSRRLSVLDTVKPEPPSSGYQGLPLPHPTLTATTMAPKRRLSLPLMTFLFYECHLTLIIRFCMAPTGEVQIFAAEAAQTTTPTPTRADSTSSSITAVSDCHAHGSTLFCMAGTAEYEVHTTVTATQDIPPAYTGCHSHGTETFCIGPDGEEVELHPAGEEEEEDGSGGQNCHFHAGVEHCVGSSGEEEEHSCERVDRDYNIRLRVGLLFVMLVTSSIGVFGPILVASYVSPSHPVFTVLRQFGTGVIISTAFVHLYTHATLMFENECLGELTYESTASAILMAGLFLSFLVEYSGNRLIQWRESKAKAKEGSIESGADADAAPAAARTDMVNIVVLEAGVIFHSLLIGLTLVVAGDSFFLTLFAVIVFHQMFEGLALGTRIAALGRPCPTSAPETPGHGQAFPNGHNHAHGHEHYHAQDDQTVDDHPAEPADPKAAAATQPSATSKEQEPASGAPSVSNDPAAASGQKLRGGGSSSTITSVPLSKKLLLAVAFALVTPVGMAIGIGVLRQFNGNDPSTVVAIGTLDALSAGILVWVGVVEMWAHDWMLGGEMTRAGPARTALGLVALVVGMALMSLLGKWA

SEQ ID NO: 1935 - protein, 638 aa, Myceliophthora thermophilia
ALSPTPKPRPLRLRSPQADHSESESDPATITAVSECHLHGTVQYANSPTRAASLRARFSRRLSVLDTVKPEPPSSGYQGLPLPHPTLTATTMAPKRRLSLPLMTFLFYECHLTLIIRFCMAPTGEVQIFAAEAAQTTTPTPTRADSTSSSITAVSDCHAHGSTLFCMAGTAEYEVHTTVTATQDIPPAYTGCHSHGTETFCIGPDGEEVELHPAGEEEEEDGSGGQNCHFHAGVEHCVGSSGEEEEHSCERVDRDYNIRLRVGLLFVMLVTSSIGVFGPILVASYVSPSHPVFTVLRQFGTGVIISTAFVHLYTHATLMFENECLGELTYESTASAILMAGLFLSFLVEYSGNRLIQWRESKAKAKEGSIESGADADAAPAAARTDMVNIVVLEAGVIFHSLLIGLTLVVAGDSFFLTLFAVIVFHQMFEGLALGTRIAALGRPCPTSAPETPGHGQAFPNGHNHAHGHEHYHAQDDQTVDDHPAEPADPKAAAATQPSATSKEQEPASGAPSVSNDPAAASGQKLRGGGSSSTITSVPLSKKLLLAVAFALVTPVGMAIGIGVLRQFNGNDPSTVVAIGTLDALSAGILVWVGVVEMWAHDWMLGGEMTRAGPARTALGLVALVVGMALMSLLGKWA

SEQ ID NO: 1936 - DNA, 885 bp, Myceliophthora thermophilia
atgatcatcgcacaccctgcatcactccttgttcgcctaatcacgttcaacgtacggtatgccactgagcatcccagcccaaacgaggaaccgtggtcagtccgttgtccgaggctctgcgcacagctaaagttcatcgtttccgggcacgactcggcattcatctgtctccaggaagtcctacattctcagcttaccgatatccaggcacggctggggtcttcgtggggacatatcggccgagggcgggaggatggcaacgaggcaggagagtactctcccatcttcttccgggcagatcactgggagtgcgagcgcagcagcacatactggctttccccaacccccgaagtgccctcgaaaggatgggatgctgcgttggagcggatcgttactatgggctacttccgccacaaagccaccggggctgctgttgtggtcatgagcacacatcttgatcatagaggagaagttgcacgtgaagaaagcgcccgtcttctcctggaattcgccagaacctggcccacggagcgtgcccccggggcttccccgccggtgctcctcggcggcgacttcaacagcaccccgacagatcgtgcatacaaggtgctgaccgaaccgagctcgggcatgagagatatttccggcctcgtgcccgaggaggcaatgtatggcaaccgggagataactttcacctcgttcggagatgcaaacgaagagccgaaacggatagatttccttttcgcgtctgacgccgggaaccttggtttcgtgaccttcgccatccttcccaacaggttcgatgacggaatttacctctcagatcaccggcctgtcgtttcggatatccggattccagcccaggtggccgccgcctgccaatga

SEQ ID NO: 1937 - protein, 294 aa, Myceliophthora thermophilia
MIIAHPASLLVRLITFNVRYATEHPSPNEEPWSVRCPRLCAQLKFIVSGHDSAFICLQEVLHSQLTDIQARLGSSWGHIGRGREDGNEAGEYSPIFFRADHWECERSSTYWLSPTPEVPSKGWDAALERIVTMGYFRHKATGAAVVVMSTHLDHRGEVAREESARLLLEFARTWPTERAPGASPPVLLGGDFNSTPTDRAYKVLTEPSSGMRDISGLVPEEAMYGNREITFTSFGDANEEPKRIDFLFASDAGNLGFVTFAILPNRFDDGIYLSDHRPVVSDIRIPAQVAAACQ

SEQ ID NO: 1938 - protein, 273 aa, Myceliophthora thermophilia
TEHPSPNEEPWSVRCPRLCAQLKFIVSGHDSAFICLQEVLHSQLTDIQARLGSSWGHIGRGREDGNEAGEYSPIFFRADHWECERSSTYWLSPTPEVPSKGWDAALERIVTMGYFRHKATGAAVVVMSTHLDHRGEVAREESARLLLEFARTWPTERAPGASPPVLLGGDFNSTPTDRAYKVLTEPSSGMRDISGLVPEEAMYGNREITFTSFGDANEEPKRIDFLFASDAGNLGFVTFAILPNRFDDGIYLSDHRPVVSDIRIPAQVAAACQ

SEQ ID NO: 1939 - DNA, 438 bp, Myceliophthora thermophilia
atgcagtacagcactcttcttatcggccttcttgccgccgcaagcagcgccttcgctgccccggctcccaacacccgatctgaagcggtctctgccatggccgacgttccccagtggatcatcaggtcgttcacccgtacttgcaacgacgatgacacctcgtgcgagatttcatttggtgtcgacacgcaaatcgcacccgtcaccgaatgctcctacaatgtgaccggcaacccggccagccagacgtcgacgaacggcattacatgcggcccttacactatcagctccggctgggacccgctgggcttcacgacgtggtctgtggtggactggagcaagcatctcattgtttggcccgcttacagtgacgccgagctcgtcaatggccagccggtcacccccgacaagagctttgctcctcaggcactcccttga

SEQ ID NO: 1940 - protein, 145 aa, Myceliophthora thermophilia
MQYSTLLIGLLAAASSAFAAPAPNTRSEAVSAMADVPQWIIRSFTRTCNDDDTSCEISFGVDTQIAPVTECSYNVTGNPASQTSTNGITCGPYTISSGWDPLGFTTWSVVDWSKHLIVWPAYSDAELVNGQPVTPDKSFAPQALP

SEQ ID NO: 1941 - protein, 126 aa, Myceliophthora thermophilia
APAPNTRSEAVSAMADVPQWIIRSFTRTCNDDDTSCEISFGVDTQIAPVTECSYNVTGNPASQTSTNGITCGPYTISSGWDPLGFTTWSVVDWSKHLIVWPAYSDAELVNGQPVTPDKSFAPQALP

SEQ ID NO: 1942 - DNA, 1641 bp, Myceliophthora thermophilia
atgccgctcgtttccgcaatgatgtcgctccgggaggccctcctcgcggctgttaggtctctcctacgcggcaagtcctttctcaaagccctcctcgccttctggacagccagccctgtcacccctatcaactcccaagatgccggggccaaggtcaacgccgaccccgcagccgacttcctcgccgaggccgagcacctgctgctggggttcatcgaagccggcgggctgaaacgcttctcgcgaaagctgaagcgccagttcaaggaaaggctgtggtcgaacacggagtgcatgctgccctcgtacaattcacaactacccacggggcgcgagtcaggccagtatctcgccctcgacgttggcgggtcgacgctgcgcgtggccctggtggagctcgggggcaagggcgctgaaggggcagagggcagcatcatccggatggacacgttcaagatcgacagccatgtcaggaatctgaggggtgcccggtttttcgactggatggccgagaggatacagcagaccgtggccaaagacagcactcggggacacgtccccgacgtcccgctcctcatggggttggcctggagtttccctatcgagcaaacctcttcgaaggggggcaagctgtccgtcatgggcaaaggcttcctcgcccacgagggtctcgtggggcaggacctgggagacatcatcaagtccgcttgccagaagcaaggactgcacgtcgagctctcggctatcgtcaacgattcgagcgccgctctgctttctgaggcatatgttaccccctcgacccgcttcagcctcgtcctcggcaccggcgtgaacatcgccgtccacctcccagtcaataccattgaccagcccaaattcggcgaccgtccgagcagctggcacgagaaagccagccatgtgatagtcaacacggaactgggcatgttcggccacgacattctgcccctgacgaaatgggataagctcctcaaagccgaccatccccgaccagacttccagccgctagagcagctcgtcagtggatactacctcggcgagatctgccgccttgccctgctcgacgccatcgcgtcgacgggcatcttcggcggaaatgtgccaccatcactgcggacaccttactccctcgacactgaaaccctgtccttgatcgaagcagacaccagcccgagcctctccgatgcccttcaagccttcgccgcccgccaccccatcccgtcttaccgccccaccacggccgacatgtcctttctccgcaccctcgcatcccacgtcacgcggcgctcggcctcggtcgtcgccgcctccctccacgcgctctgggagctcaaggccgaggccgagcgcgccatgctcgcgagcctgcccgatccgtccggcgcgttcgcgttggagacggaggccgagatcgccctcgcctcgtccaagacgaccgtggccttcaacgggtccgtgatcgagcagtaccccggctatagggcgcggctgcaggcgttcgtggatggattgcttgccgaggacgacggtgatggagatctcaagaaggggtcaatcgcgttggtggaggcgagggagagttcgctgcggggggctgccgttgcgttggcttgcttgtcgtaa

SEQ ID NO: 1943 - protein, 546 aa, Myceliophthora thermophilia
MPLVSAMMSLREALLAAVRSLLRGKSFLKALLAFWTASPVTPINSQDAGAKVNADPAADFLAEAEHLLLGFIEAGGLKRFSRKLKRQFKERLWSNTECMLPSYNSQLPTGRESGQYLALDVGGSTLRVALVELGGKGAEGAEGSIIRMDTFKIDSHVRNLRGARFFDWMAERIQQTVAKDSTRGHVPDVPLLMGLAWSFPIEQTSSKGGKLSVMGKGFLAHEGLVGQDLGDIIKSACQKQGLHVELSAIVNDSSAALLSEAYVTPSTRFSLVLGTGVNIAVHLPVNTIDQPKFGDRPSSWHEKASHVIVNTELGMFGHDILPLTKWDKLLKADHPRPDFQPLEQLVSGYYLGEICRLALLDAIASTGIFGGNVPPSLRTPYSLDTETLSLIEADTSPSLSDALQAFAARHPIPSYRPTTADMSFLRTLASHVTRRSASVVAASLHALWELKAEAERAMLASLPDPSGAFALETEAEIALASSKTTVAFNGSVIEQYPGYRARLQAFVDGLLAEDDGDGDLKKGSIALVEARESSLRGAAVALACLS

SEQ ID NO: 1944 - protein, 504 aa, Myceliophthora thermophilia
INSQDAGAKVNADPAADFLAEAEHLLLGFIEAGGLKRFSRKLKRQFKERLWSNTECMLPSYNSQLPTGRESGQYLALDVGGSTLRVALVELGGKGAEGAEGSIIRMDTFKIDSHVRNLRGARFFDWMAERIQQTVAKDSTRGHVPDVPLLMGLAWSFPIEQTSSKGGKLSVMGKGFLAHEGLVGQDLGDIIKSACQKQGLHVELSAIVNDSSAALLSEAYVTPSTRFSLVLGTGVNIAVHLPVNTIDQPKFGDRPSSWHEKASHVIVNTELGMFGHDILPLTKWDKLLKADHPRPDFQPLEQLVSGYYLGEICRLALLDAIASTGIFGGNVPPSLRTPYSLDTETLSLIEADTSPSLSDALQAFAARHPIPSYRPTTADMSFLRTLASHVTRRSASVVAASLHALWELKAEAERAMLASLPDPSGAFALETEAEIALASSKTTVAFNGSVIEQYPGYRARLQAFVDGLLAEDDGDGDLKKGSIALVEARESSLRGAAVALACLS

SEQ ID NO: 1945 - DNA, 951 bp, Myceliophthora thermophilia
atgctcacctccagattggttctgccagccgcatggctgatgctcctaggaagcgcatcagctgcgccggcgcccgagagtgccgctgctggcaccgatgcgaccacgagcgtgacggacgccgcgccgccgccgccgccggtgcccaccaacgaagacggcagcgatgcgtttgtcacctgcagcaacaccgacgggccctttaagccgttctgccttcccaagcacaacgacgtctactatccgggccagaacaccaccctcaggatcgtcggcatctacgccaacctccctccagcggtggtgcccgagcccgcccccgcccccgattctgacgaggaggcttcttcggaccccgagcttcccccgtcgtccgaaacggccccgcatggtccgcatgggcaggtggtggaagccttcagctcggacaccatctcggccgcctggggcttctaccagtggcacctcgaccagtccctcctcaagagccacggcctcaaggaggccaacatcacgctgcgcatcgccgcgctggcgccggacagccggtcggcccagtggtactcgggccccaccatcacgctgcagaacaagcccaagaagcgcaagaagcccgtccacacgcccaccccggccgacgacgaggtgctctacatcgcccttcccctcatcttcggcttcgccacgttcatgatcgtcggcaccttctgctggaacaggcagctgcgccgcatcggggtcggcaacgtcatggggagggccaacacgagaggcaggaggctgggagcgagcaggagggaccgcgccaagaacagggataaggagtcgagcatccggttgatggagagcggcggcgcggctgccgattcggacgaggaaggttggagccacggttcgagttctgctgctgaaaggagggtgttcgagagggtcgacaggaaacgggattag

SEQ ID NO: 1946 - protein, 316 aa, Myceliophthora thermophilia
MLTSRLVLPAAWLMLLGSASAAPAPESAAAGTDATTSVTDAAPPPPPVPTNEDGSDAFVTCSNTDGPFKPFCLPKHNDVYYPGQNTTLRIVGIYANLPPAVVPEPAPAPDSDEEASSDPELPPSSETAPHGPHGQVVEAFSSDTISAAWGFYQWHLDQSLLKSHGLKEANITLRIAALAPDSRSAQWYSGPTITLQNKPKKRKKPVHTPTPADDEVLYIALPLIFGFATFMIVGTFCWNRQLRRIGVGNVMGRANTRGRRLGASRRDRAKNRDKESSIRLMESGGAAADSDEEGWSHGSSSAAERRVFERVDRKRD

SEQ ID NO: 1947 - protein, 295 aa, Myceliophthora thermophilia
APAPESAAAGTDATTSVTDAAPPPPPVPTNEDGSDAFVTCSNTDGPFKPFCLPKHNDVYYPGQNTTLRIVGIYANLPPAVVPEPAPAPDSDEEASSDPELPPSSETAPHGPHGQVVEAFSSDTISAAWGFYQWHLDQSLLKSHGLKEANITLRIAALAPDSRSAQWYSGPTITLQNKPKKRKKPVHTPTPADDEVLYIALPLIFGFATFMIVGTFCWNRQLRRIGVGNVMGRANTRGRRLGASRRDRAKNRDKESSIRLMESGGAAADSDEEGWSHGSSSAAERRVFERVDRKRD

SEQ ID NO: 1948 - DNA, 441 bp, Myceliophthora thermophilia
atgcagctctccaagattctcggcattttctcgcttgccgccgcggcgtctgccaccacaggcggggagactgacgcggagacagtgagctacgatacgggctacgacgatgctggtcgtccgctcaccagcgtcgcttgctcggacggcgtcaacggtctgatctggaagtacggctggcaaacccagggtcaggtcaaggggttcccgttcattggcggtgtcgaggctgtcgagggctggaactcggcaaactgcggaacctgctggtctgtcacgtggaacggcaagactatcaatattctggccgttgaccacgccgcgtccggcctcaacatcggcctcacagccatgaacgagttgacaaacggccatgctgttgagctgggccgtgtcgaggctgatgtgaagcaggtcgatctcagtgcttgcgggctgtga

SEQ ID NO: 1949 - protein, 146 aa, Myceliophthora thermophilia
MQLSKILGIFSLAAAASATTGGETDAETVSYDTGYDDAGRPLTSVACSDGVNGLIWKYGWQTQGQVKGFPFIGGVEAVEGWNSANCGTCWSVTWNGKTINILAVDHAASGLNIGLTAMNELTNGHAVELGRVEADVKQVDLSACGL

SEQ ID NO: 1950 - protein, 128 aa, Myceliophthora thermophilia
TTGGETDAETVSYDTGYDDAGRPLTSVACSDGVNGLIWKYGWQTQGQVKGFPFIGGVEAVEGWNSANCGTCWSVTWNGKTINILAVDHAASGLNIGLTAMNELTNGHAVELGRVEADVKQVDLSACGL

SEQ ID NO: 1951 - DNA, 1629 bp, Myceliophthora thermophilia
atggcgctgctcgtagggagactgcttctctttctcttgggggctgccgtatctccggcatgggcaggaagtatttcggcttggtatactgcatacggaccgcaggtcattctggtcaatgacacgaccaacgagatccgctacacggcctgtaacagcaatgacaagccgacatactcgtacatcgacgactattcgctcaccctcgacatcaaacccaagattggcacgccgctaaccggagtggtgtgtgctcgcttctcccgtcgaactggcgtgttgactgacgggcatatcagagcttcgatctggtacctcgacgagaccaacaatatcacgaatgccttcttcaactgcaacatgacaactggccagtttctgctgcagggaaactggaccgtcaccagcggcgccccgtccgttcattccaactcgggcttggctgctgttgtcctcggcgcggacaccggctaccgcgtgtacttccatgacgaagacggcgccatcaacgagcttttctataaccgcgatatcggctgggagtattggggtcccatctctcaggatataaactccctgcccgccttaggtgccgcattcagcggcagggaaaacatcactgttgcctccccgcgcgatgagaggaacattgcggcgacccggtggaacaaggatgagacttggtatcgaaccaccctgccacacccgctcgcgctcgtgggcggattcgctaccgccgagaccgccagggatgacatttccctagatgaggggactccggccaacttcacgctgcccgcgtgggacggcaagactaaaagcattggagtcaccattgacaatgtctatacgcgtttcctttggtacattggcaatgacagaaatctctacctgctggccaatcagaactacacttggggccggcgagccagccaacccaacactgtctggccccaggccgacgacccgaacggtcatctaggcgttgcctacgacatgtttaccagcagggtatggctttactactttgttcaggatcggcttggcgaggttaagtatgcagacaacacctggcaatcatggtccgcacttcaagaaccaccgccgctaccgacaccgtccgcctcgacagatgaccccacgggctcagacgccgggctgtccaccggtgccaaggcaggcatcggcgttggcgtctcgctgggcgcgattgcgttcgctaccattatcgccattgtcatcctggcgcgaaggaagaagcaagcttcagagcacctggcggagactgaagcaggttcgaccactctcggtccccgcacgcccgcaacgccagatggttccccagctcttgcgcatgcgttgggagcgcagaagtacggctatgaccagaaggtggcaccgatacgagcgcaggaattgccttctgagcagcagctgcaacagctggacggcgcaacccgattggagatggacagtaataccgcacgcgcggaactggaccccacagccaggggcgagatgtacgcccagtcgcaacctatatatgagctcccttcgcactggtccttccatgaacagccggccgaacaaccgaagcagtggctcgagccccatcagcagaggcaatga

SEQ ID NO: 1952 - protein, 542 aa, Myceliophthora thermophilia
MALLVGRLLLFLLGAAVSPAWAGSISAWYTAYGPQVILVNDTTNEIRYTACNSNDKPTYSYIDDYSLTLDIKPKIGTPLTGVVCARFSRRTGVLTDGHIRASIWYLDETNNITNAFFNCNMTTGQFLLQGNWTVTSGAPSVHSNSGLAAVVLGADTGYRVYFHDEDGAINELFYNRDIGWEYWGPISQDINSLPALGAAFSGRENITVASPRDERNIAATRWNKDETWYRTTLPHPLALVGGFATAETARDDISLDEGTPANFTLPAWDGKTKSIGVTIDNVYTRFLWYIGNDRNLYLLANQNYTWGRRASQPNTVWPQADDPNGHLGVAYDMFTSRVWLYYFVQDRLGEVKYADNTWQSWSALQEPPPLPTPSASTDDPTGSDAGLSTGAKAGIGVGVSLGAIAFATIIAIVILARRKKQASEHLAETEAGSTTLGPRTPATPDGSPALAHALGAQKYGYDQKVAPIRAQELPSEQQLQQLDGATRLEMDSNTARAELDPTARGEMYAQSQPIYELPSHWSFHEQPAEQPKQWLEPHQQRQ

SEQ ID NO: 1953 - protein, 520 aa, Myceliophthora thermophilia
GSISAWYTAYGPQVILVNDTTNEIRYTACNSNDKPTYSYIDDYSLTLDIKPKIGTPLTGVVCARFSRRTGVLTDGHIRASIWYLDETNNITNAFFNCNMTTGQFLLQGNWTVTSGAPSVHSNSGLAAVVLGADTGYRVYFHDEDGAINELFYNRDIGWEYWGPISQDINSLPALGAAFSGRENITVASPRDERNIAATRWNKDETWYRTTLPHPLALVGGFATAETARDDISLDEGTPANFTLPAWDGKTKSIGVTIDNVYTRFLWYIGNDRNLYLLANQNYTWGRRASQPNTVWPQADDPNGHLGVAYDMFTSRVWLYYFVQDRLGEVKYADNTWQSWSALQEPPPLPTPSASTDDPTGSDAGLSTGAKAGIGVGVSLGAIAFATIIAIVILARRKKQASEHLAETEAGSTTLGPRTPATPDGSPALAHALGAQKYGYDQKVAPIRAQELPSEQQLQQLDGATRLEMDSNTARAELDPTARGEMYAQSQPIYELPSHWSFHEQPAEQPKQWLEPHQQRQ

SEQ ID NO: 1954 - DNA, 2760 bp, Myceliophthora thermophilia
atggcgaccttcaaaccctacccgttcttgctcgggttcgttatcctcttctgcttcgtgcggcctacgctggcctttggcgccggcaacattgccagcatctccaagatcgagggccaaaactggcgtcacggtgatatcgaagatgctctcctcaagattgccatggcccgcgttgccggcggcaagaagttcgacaagctgatggtctcgcgcgtctacttcggcaactggcttcgcgactactcgcaagccatcgatgtgggcacggtcaaatccgtctcggccgaggccatccggctcctcctgtgtatcctcggcttcttgacctttggctacggaagcggcgagttcgaggtgacggccgaccgcctcggctgctatcgtcccgaggaccacatcgataaccccaagaactacgccgacaacctggatgcgagacagtacgaccgtcgcctgcgcggtcccgtggacgagtcagtcgagctggccattgacgaggagacgggcatgaagaactacattgcgaacgaaaatgtcggcatcatgacctcggccaagcatgttcgccgcctgtttaccaagtgcattgagctggggcgctcttacggacaatcccggaacaaggcggagctctacgaggccctccgcctcatgggcaccggcctgcactgtctcgagggtgagcgcttcccagttgctctgcgactaaacaactacaccgagcttgctctgatcgaactgggcgaggacgacgttttcccccacgtcggccggaacacgaagatgaggatccccggtgctcgccacgaggtctatcccctcgttaccggcacctttggtggcgtcgacttcctgcactccgtcaccggcgaagtatccgacaagatgacccagagcgagattgaggatctcgagggaaccctgaagcagagcagcaacaacgacaccagcctcctccgcgacctgctcgacaagattcccgatggcctcctcggcggcaacaacaaatccaagctggacgatatccagagcaacgcgcaggccgcgcagatggagaacctgagcgtctcgccgcgggaacccgaggagctgaccagatacgtccaggaagtgttccgtcagatcatgcccgccatcaagttccatgaccagcttctccaggacatctcggaggccatcgacaagatcccggtgctgcccaagattgtggagcagctggaggagcagatgtccatctttgtattccagatcatggccccgttcgtggttccgcttatcgagcagatcaagaacgagctcgcgactggctccagcgagatcatccagagcagcagggctgagcagcacaacgtctttgaggacgacaacgccaccgacccgactcactcgatgttggccaaggaccactttagtaacatcctcaacgagatcggcggtcgcgccgcctccaaggtcgtctcctgggtcgtcccgcagctcatggaggcctgggacgatgacagcgtcgacgtggaccgcctgcttgacaagatcatttacggagtgttccaccatcccgcgcagcgcaccatgggccctgagggggcgtccgagggccgggagctcatcttcaacatggtgcgcgagtggtgggaggacatgagcgacgggcagcgcgacgagtaccggggcaagctgagccgcgagggagtcgagagaggcgacaaccaccgcgagggccagcacgactgcggccacggctgcgggggcaagctcaagatgcacaagaacttccggaacgaggcgccccagacggtagaggaccagatcgcgggcgccgccgcggaggccatcatgggaggcgtcaagcagggcctgtcgcaggccgtgcagaacgccgccggccgccaggagtcgtcggagagcagcggcctgggtgggttcatcagcagcgtcgcgggcggcctcctgggcggcgccctcaagagggacgagacagagtcgtaccaggccggcggccgcaccgaggacggcgggtacacgcagaccacgaccgagtacggctactccggaggccgctacggccaggcccagtacacggagacgcagtacggcggcggcggcggcggccgcagcgagtaccgccgctacgagcagcgcgaggatgatgacggccgggtccagagctacggatacacggaacagcgcaccgagacgcgctacgacagctactcgggtggctatggcggccgcgaggagaccagcagctatggcggcggcggcagcgcgagcgaatacattcgtagctcccagcagagtagctacggtggcagcggctatggcagtgggtacggtcgtcgtgatgaagaagagagcagcggctatggaagtggttacggtcgtcgtgatgaagaggagagtggtggttatggtggcggctatggccgccgtcaggaagaagagagtagcagctatggaagcggttatggtcgtcgtcgtgatgaagaagagagcggcggttatggtggtggctacggccgccgtcaggaagaagagagtagcggctatggaagtggttacggtcgtcgtgatgaagaagggagcggcggttatggtggtggctacggccgccgtcatgaggaagagagcagtggttacggcagcggctatggtcgtcgccatgaagaggagggcggtggctacggcagtggttacggccgccggcgcaacgacgaggaggaagaggaggatggcggacgccggaggtggggttactag

SEQ ID NO: 1955 - protein, 919 aa, Myceliophthora thermophilia
MATFKPYPFLLGFVILFCFVRPTLAFGAGNIASISKIEGQNWRHGDIEDALLKIAMARVAGGKKFDKLMVSRVYFGNWLRDYSQAIDVGTVKSVSAEAIRLLLCILGFLTFGYGSGEFEVTADRLGCYRPEDHIDNPKNYADNLDARQYDRRLRGPVDESVELAIDEETGMKNYIANENVGIMTSAKHVRRLFTKCIELGRSYGQSRNKAELYEALRLMGTGLHCLEGERFPVALRLNNYTELALIELGEDDVFPHVGRNTKMRIPGARHEVYPLVTGTFGGVDFLHSVTGEVSDKMTQSEIEDLEGTLKQSSNNDTSLLRDLLDKIPDGLLGGNNKSKLDDIQSNAQAAQMENLSVSPREPEELTRYVQEVFRQIMPAIKFHDQLLQDISEAIDKIPVLPKIVEQLEEQMSIFVFQIMAPFVVPLIEQIKNELATGSSEIIQSSRAEQHNVFEDDNATDPTHSMLAKDHFSNILNEIGGRAASKVVSWVVPQLMEAWDDDSVDVDRLLDKIIYGVFHHPAQRTMGPEGASEGRELIFNMVREWWEDMSDGQRDEYRGKLSREGVERGDNHREGQHDCGHGCGGKLKMHKNFRNEAPQTVEDQIAGAAAEAIMGGVKQGLSQAVQNAAGRQESSESSGLGGFISSVAGGLLGGALKRDETESYQAGGRTEDGGYTQTTTEYGYSGGRYGQAQYTETQYGGGGGGRSEYRRYEQREDDDGRVQSYGYTEQRTETRYDSYSGGYGGREETSSYGGGGSASEYIRSSQQSSYGGSGYGSGYGRRDEEESSGYGSGYGRRDEEESGGYGGGYGRRQEEESSSYGSGYGRRRDEEESGGYGGGYGRRQEEESSGYGSGYGRRDEEGSGGYGGGYGRRHEEESSGYGSGYGRRHEEEGGGYGSGYGRRRNDEEEEEDGGRRRWGY

SEQ ID NO: 1956 - protein, 894 aa, Myceliophthora thermophilia
FGAGNIASISKIEGQNWRHGDIEDALLKIAMARVAGGKKFDKLMVSRVYFGNWLRDYSQAIDVGTVKSVSAEAIRLLLCILGFLTFGYGSGEFEVTADRLGCYRPEDHIDNPKNYADNLDARQYDRRLRGPVDESVELAIDEETGMKNYIANENVGIMTSAKHVRRLFTKCIELGRSYGQSRNKAELYEALRLMGTGLHCLEGERFPVALRLNNYTELALIELGEDDVFPHVGRNTKMRIPGARHEVYPLVTGTFGGVDFLHSVTGEVSDKMTQSEIEDLEGTLKQSSNNDTSLLRDLLDKIPDGLLGGNNKSKLDDIQSNAQAAQMENLSVSPREPEELTRYVQEVFRQIMPAIKFHDQLLQDISEAIDKIPVLPKIVEQLEEQMSIFVFQIMAPFVVPLIEQIKNELATGSSEIIQSSRAEQHNVFEDDNATDPTHSMLAKDHFSNILNEIGGRAASKVVSWVVPQLMEAWDDDSVDVDRLLDKIIYGVFHHPAQRTMGPEGASEGRELIFNMVREWWEDMSDGQRDEYRGKLSREGVERGDNHREGQHDCGHGCGGKLKMHKNFRNEAPQTVEDQIAGAAAEAIMGGVKQGLSQAVQNAAGRQESSESSGLGGFISSVAGGLLGGALKRDETESYQAGGRTEDGGYTQTTTEYGYSGGRYGQAQYTETQYGGGGGGRSEYRRYEQREDDDGRVQSYGYTEQRTETRYDSYSGGYGGREETSSYGGGGSASEYIRSSQQSSYGGSGYGSGYGRRDEEESSGYGSGYGRRDEEESGGYGGGYGRRQEEESSSYGSGYGRRRDEEESGGYGGGYGRRQEEESSGYGSGYGRRDEEGSGGYGGGYGRRHEEESSGYGSGYGRRHEEEGGGYGSGYGRRRNDEEEEEDGGRRRWGY

SEQ ID NO: 1957 - DNA, 363 bp, Myceliophthora thermophilia
atgaagttctctctcgccaccgtcttcctcggcatcgccgccgtcgcctcggcccttcctcaggataacccgatcgcggctcgtcagaaccaaggccgccccatgcccttcggcacctgctgcatcgccaacacgaatctgaagcaggacgcttgcgtcgccgccaacggcgaggccggccgctgcgtgcccggcggcaacgactgcggcggtaggctcagctgcattggccagagcagtctgacgtgcgacaacaacgttatcgagcgcggaaagagcctgtgccgcgcccaggccccgggcggcggcttgtttgacggagccaggatcatccagaacctgagccaggccaaggtcaactga

SEQ ID NO: 1958 - protein, 120 aa, Myceliophthora thermophilia
MKFSLATVFLGIAAVASALPQDNPIAARQNQGRPMPFGTCCIANTNLKQDACVAANGEAGRCVPGGNDCGGRLSCIGQSSLTCDNNVIERGKSLCRAQAPGGGLFDGARIIQNLSQAKVN

SEQ ID NO: 1959 - protein, 102 aa, Myceliophthora thermophilia
LPQDNPIAARQNQGRPMPFGTCCIANTNLKQDACVAANGEAGRCVPGGNDCGGRLSCIGQSSLTCDNNVIERGKSLCRAQAPGGGLFDGARIIQNLSQAKVN

SEQ ID NO: 1960 - DNA, 1905 bp, Myceliophthora thermophilia
atgcggtattctgtgcctgcacccctgctgggcttggtcatccccttggtgcacgccgcccctgcagtcattctcgaggaaacgaagggaataccgcccggatgggtgttcctgggaaatgctagcgcctcggaccggatgacgcttttcgtggccctgaaagagccgggaatcgaggaactaaaggccaagctcaaccagcgccgggacgtggaccatccgtcatttggccagcatttgagccgagacgaggtggcccagtatcgccagcccggggaccagtcgagtcgcgcggtcctcggctggctgagatccgaaggaatccggaacatccacaaccagggcagtctcatcagcttcgaggcatcggcccaaacggtcaagactctgttccacgccgagctagggtactacgcatacgaggagagcaacgcggcgccggtgctgcgggcgcagtcctacacgatcccggcgtggctgtgcgactatatcgattttgtccaccccatcaccaacttcatgcccccgcggcctcgcccacgtccgcatccgaagccaaccaagaagcccttttcgacgatcacgtcgacgacgacgaccaccaccagaagcaccacatccgccatctcgagcagcagcagcaccctggcgcccaagcccacgcccgacaccccggacaacacgatcaacccttttcccaacctgccctgtctagcggcgacggtgccggactgcatcaagaagctctacaacatcacctactctccgtccccgcccgggagtccgagcccggtgcgcttcggggtggccgggttcctggagcaatgggtgctccactcggacgtggacctcttcctcgacacgctggcgccgacggtgccgcggaggatgaataataataataataataataatagttattacaacttcaccgtcgagctcgtcaacaacggcaccaacccgcaggactcgccgcgcaacgccgggctcgaggcgtcgctcgacgtcgagtacgccatggcgctcgcgtacccggccaacgtggtcttctacagcacgggcgggcggggcacgatgctggacgcgggcacgggcacgggcgtggcgctgcctcccgtgtcgcagagcgacaacgagccgttcctcgagctcctgcaggcgctgctggccaagccggacggggagctgccgcacgtgctgagcatcagctacgccgacgacgaggtcggggtgccgcgggcgtacgcgcggcgggtgtgcgaccagttcgcggcgctggccgcgcgcgggaccaccgtgctggcggccacgggcgacggcggggcggcgggcacgggccggacgcggtgcgtggaccgcgagacgggggcgcgccggttcgtcgccaccttcccggccggctgcccgtacatgacggcccttcagggcccttccggcgggttcagcgatttcttcgggcggccggcctggcaggacgaggtggtcgagccgtacctcgccgcgctggtccgcagcaacgacacgaggatcggcctgttcaaccacggcggccgggccatgcccgacatcagcgccgtcgggtcggcgttccagatcgtcctcgggggcgacaacacccaggtgctgggcacgagcgcgagcacgcccgtgatggcggccatggtggcgctgatcaacgatgcccggatgcgcgccggcaagccaagcctcgggtggctgaacccgctgctgtactcggcaaaggtcaggaacgtgctccgggatgttacagtaggcgagagcatgggctgcaggttccctgacggggtcagctcggtcggatggtccgcggtcaggggttacgatttggtcaccggactcggagtggtcgatgactttaacgactttttggaggttttgctgtaa

SEQ ID NO: 1961 - protein, 634 aa, Myceliophthora thermophilia
MRYSVPAPLLGLVIPLVHAAPAVILEETKGIPPGWVFLGNASASDRMTLFVALKEPGIEELKAKLNQRRDVDHPSFGQHLSRDEVAQYRQPGDQSSRAVLGWLRSEGIRNIHNQGSLISFEASAQTVKTLFHAELGYYAYEESNAAPVLRAQSYTIPAWLCDYIDFVHPITNFMPPRPRPRPHPKPTKKPFSTITSTTTTTTRSTTSAISSSSSTLAPKPTPDTPDNTINPFPNLPCLAATVPDCIKKLYNITYSPSPPGSPSPVRFGVAGFLEQWVLHSDVDLFLDTLAPTVPRRMNNNNNNNNSYYNFTVELVNNGTNPQDSPRNAGLEASLDVEYAMALAYPANVVFYSTGGRGTMLDAGTGTGVALPPVSQSDNEPFLELLQALLAKPDGELPHVLSISYADDEVGVPRAYARRVCDQFAALAARGTTVLAATGDGGAAGTGRTRCVDRETGARRFVATFPAGCPYMTALQGPSGGFSDFFGRPAWQDEVVEPYLAALVRSNDTRIGLFNHGGRAMPDISAVGSAFQIVLGGDNTQVLGTSASTPVMAAMVALINDARMRAGKPSLGWLNPLLYSAKVRNVLRDVTVGESMGCRFPDGVSSVGWSAVRGYDLVTGLGVVDDFNDFLEVLL

SEQ ID NO: 1962 - protein, 615 aa, Myceliophthora thermophilia
APAVILEETKGIPPGWVFLGNASASDRMTLFVALKEPGIEELKAKLNQRRDVDHPSFGQHLSRDEVAQYRQPGDQSSRAVLGWLRSEGIRNIHNQGSLISFEASAQTVKTLFHAELGYYAYEESNAAPVLRAQSYTIPAWLCDYIDFVHPITNFMPPRPRPRPHPKPTKKPFSTITSTTTTTTRSTTSAISSSSSTLAPKPTPDTPDNTINPFPNLPCLAATVPDCIKKLYNITYSPSPPGSPSPVRFGVAGFLEQWVLHSDVDLFLDTLAPTVPRRMNNNNNNNNSYYNFTVELVNNGTNPQDSPRNAGLEASLDVEYAMALAYPANVVFYSTGGRGTMLDAGTGTGVALPPVSQSDNEPFLELLQALLAKPDGELPHVLSISYADDEVGVPRAYARRVCDQFAALAARGTTVLAATGDGGAAGTGRTRCVDRETGARRFVATFPAGCPYMTALQGPSGGFSDFFGRPAWQDEVVEPYLAALVRSNDTRIGLFNHGGRAMPDISAVGSAFQIVLGGDNTQVLGTSASTPVMAAMVALINDARMRAGKPSLGWLNPLLYSAKVRNVLRDVTVGESMGCRFPDGVSSVGWSAVRGYDLVTGLGVVDDFNDFLEVLL

SEQ ID NO: 1963 - DNA, 1215 bp, Myceliophthora thermophilia
atgccgctcttcccaaccttctcttccatcctcttcctcctcctcctcctccccttcctctccctccccttctcccaggcctacaccccgctctcgcccgccctcctcaagtcgctcccctctccctccaccgacgactacgaccccaccaacggcaccctcctcgcccccctgctgatcccccgcgtcccgggaacgccgggccagaaggcggcgcaggcgcacctggcctccttcttcgccgcccacctgccgcagtgggaggtgcggtggcagaactcgacgtcgacgacgccggcgacgggcgaccgcgccgtcccgttcgcgaacctgatcgcccgccgcgagcccccctggacccgccgccgcgggcccggcaccgcctcctacctcacgctggtcgcccactacgacagcaagcgcgagcccgaaggtttcgtcggcgccaccgacagcgcggccccttgcgccatccttatggacgtcgcccgcacggtggacgggttcctgcagaagatgtgggccgaggagggggagaaggagggggagaaggaggaggagaaggaggaggagaaggagggggaggaggcaacggagtggcggcagagggatgaggggatccagatcctgttcttggacggggaggaggcgtttgtgaagtggacggataccgactcgctttacgggtcgagcgctaatcagcgttggtccgcgaacgactccagggccctcgccgaggaatgggaggctaccacgaacccggccggttcaccgttcaagagcccgatgcagcagatcagcctgttcgtgctgctcgacctgctgggcgcgccgaacccgcgggtgccgtcgtactttcagggtacccattgggcgtaccagcggatggcggcactcgagggcaggttgcggcagctgggcctgctggagagcaagcccgggaaggagccgtttctgcccgagagcggcaagatggcgacccagttcagcggcggcgtctacgtaggcgacgaccatgtccccttcatgcagcgaggtgcgccggtgctgcatcttatccccgggccgttcccggatgtatggcacaccttggatgacgacggagagcacttggatattccgacggtaaaggactgggtgcgcatcgtcaccgcgttcacgctagagtggatggacgtgcagaaaacggagccgccgaaggacgggcagccctga

SEQ ID NO: 1964 - protein, 404 aa, Myceliophthora thermophilia
MPLFPTFSSILFLLLLLPFLSLPFSQAYTPLSPALLKSLPSPSTDDYDPTNGTLLAPLLIPRVPGTPGQKAAQAHLASFFAAHLPQWEVRWQNSTSTTPATGDRAVPFANLIARREPPWTRRRGPGTASYLTLVAHYDSKREPEGFVGATDSAAPCAILMDVARTVDGFLQKMWAEEGEKEGEKEEEKEEEKEGEEATEWRQRDEGIQILFLDGEEAFVKWTDTDSLYGSSANQRWSANDSRALAEEWEATTNPAGSPFKSPMQQISLFVLLDLLGAPNPRVPSYFQGTHWAYQRMAALEGRLRQLGLLESKPGKEPFLPESGKMATQFSGGVYVGDDHVPFMQRGAPVLHLIPGPFPDVWHTLDDDGEHLDIPTVKDWVRIVTAFTLEWMDVQKTEPPKDGQP

SEQ ID NO: 1965 - protein, 377 aa, Myceliophthora thermophilia
YTPLSPALLKSLPSPSTDDYDPTNGTLLAPLLIPRVPGTPGQKAAQAHLASFFAAHLPQWEVRWQNSTSTTPATGDRAVPFANLIARREPPWTRRRGPGTASYLTLVAHYDSKREPEGFVGATDSAAPCAILMDVARTVDGFLQKMWAEEGEKEGEKEEEKEEEKEGEEATEWRQRDEGIQILFLDGEEAFVKWTDTDSLYGSSANQRWSANDSRALAEEWEATTNPAGSPFKSPMQQISLFVLLDLLGAPNPRVPSYFQGTHWAYQRMAALEGRLRQLGLLESKPGKEPFLPESGKMATQFSGGVYVGDDHVPFMQRGAPVLHLIPGPFPDVWHTLDDDGEHLDIPTVKDWVRIVTAFTLEWMDVQKTEPPKDGQP

SEQ ID NO: 1966 - DNA, 219 bp, Myceliophthora thermophilia
atgtccttcctcctgatcgcctgcagcgccctcagcagctcagccctcggcagcaggacaacgaccgtggaaagagctagacgccctgtgaaatcaggccaggatgccaagacccggagcatccaataccaaggggagccaagtccggccaagccagccaactcgaccgtcacggtccttcccgccatccggccaccggccaaggacgggcagcagtga

SEQ ID NO: 1967 - protein, 72 aa, Myceliophthora thermophilia
MSFLLIACSALSSSALGSRTTTVERARRPVKSGQDAKTRSIQYQGEPSPAKPANSTVTVLPAIRPPAKDGQQ

SEQ ID NO: 1968 - protein, 55 aa, Myceliophthora thermophilia
SRTTTVERARRPVKSGQDAKTRSIQYQGEPSPAKPANSTVTVLPAIRPPAKDGQQ

SEQ ID NO: 1969 - DNA, 1011 bp, Myceliophthora thermophilia
atgttggttctgtccgccgggaccaggggatccgtgatccccattgccattctcctgacatgcagctggctgctcctccttcgcgtccgtatccagtgggactggtttccctttgccgcccaagaaccgcctgtcgagatcgtcgtggcgagcgtcagcaccgaggacaccacctgggtgcatcgcttcctcccgggctgggcccgcagtgtctacatcgtcgacgacccttcggccaagctgacggtgcccgagaacaagggccgcgaggccatggtcttagtcagccacatcgtcgccaactacgacaccctcgccgagacgaccgtcttcatccacgcctcgcgcttcgcctggcacaacgacaacccggactacgacgtcctgccgatgctgcgcaacctcaagctggactacgtccaggcctcgggctacgtcaacctgcgctgcgtccaggtgctcggctgccccgtcgagatccgcccgcacgccgacgaggcctcggcctgggagcgcagcatcggcgccgcccgctccggccggccgctgaccgcaaaggagatatacaagcaggccttccaggagctgatgccgggcgtgccggtgcccgacagggtcggcgtcagctgctgctcgcagtttgccgtctcgcgcgaggccatcctgagccgccccagggacgactatgtccgctggcgcgactggctgttggagaccccactcgccgacgatctgagcgggcgcgtctttgagtatctgtggcataggcaccatggcctccagggtggtcgacacgggctgacagtagctgtagtcatcttcggcaaagaggccgtgtattgtccgtctgcatccgcgtgctactgccagctgtttggacagtgcgacctcgaatgcgacgagatgcaatgcaaggaccgatatgtattgccgaagtacgcggccctgccgcaaggttggccgaggtatggttactccggggaagagagaaacttcactggtcccctgtga

SEQ ID NO: 1970 - protein, 336 aa, Myceliophthora thermophilia
MLVLSAGTRGSVIPIAILLTCSWLLLLRVRIQWDWFPFAAQEPPVEIVVASVSTEDTTWVHRFLPGWARSVYIVDDPSAKLTVPENKGREAMVLVSHIVANYDTLAETTVFIHASRFAWHNDNPDYDVLPMLRNLKLDYVQASGYVNLRCVQVLGCPVEIRPHADEASAWERSIGAARSGRPLTAKEIYKQAFQELMPGVPVPDRVGVSCCSQFAVSREAILSRPRDDYVRWRDWLLETPLADDLSGRVFEYLWHRHHGLQGGRHGLTVAVVIFGKEAVYCPSASACYCQLFGQCDLECDEMQCKDRYVLPKYAALPQGWPRYGYSGEERNFTGPL

SEQ ID NO: 1971 - protein, 310 aa, Myceliophthora thermophilia
LRVRIQWDWFPFAAQEPPVEIVVASVSTEDTTWVHRFLPGWARSVYIVDDPSAKLTVPENKGREAMVLVSHIVANYDTLAETTVFIHASRFAWHNDNPDYDVLPMLRNLKLDYVQASGYVNLRCVQVLGCPVEIRPHADEASAWERSIGAARSGRPLTAKEIYKQAFQELMPGVPVPDRVGVSCCSQFAVSREAILSRPRDDYVRWRDWLLETPLADDLSGRVFEYLWHRHHGLQGGRHGLTVAVVIFGKEAVYCPSASACYCQLFGQCDLECDEMQCKDRYVLPKYAALPQGWPRYGYSGEERNFTGPL

SEQ ID NO: 1972 - DNA, 576 bp, Myceliophthora thermophilia
atgcgccagaacgttgtgctcgttgcgctctcggcgctcgccctcgccaacgcccaggacaacagccagaacttcaccatcgacccgaactcggtaaaggcctcgctcagggccgattggtgtgctgcggaatacaactcctgccgcgtcctttgcgccaacaacccgacggccaacgactgcgatgtgaacactttggagtacacgtgcacttgctctaacggctcggcgcctggcctgcaatactatatccagaccatccccacattcatctgcgagcaagcctactcggactgcatcgctgccaacacggccagctccagggctcaggatgagtgcaagacgaacatcaaggacaagtgcggcactctggatcccgccaaggcccaggttagcgacccgtcccagagcgagtctagctcgtcgtctgccacccaggctccgactgcatctagctcgcagaacgccgctgccagcacgtcgagctcgacagctggcgccgccgccactgccgccggctacatcggcaacggcgccgccatgattgccgccggcgtgtttgccgcgctgctctag

SEQ ID NO: 1973 - protein, 191 aa, Myceliophthora thermophilia
MRQNVVLVALSALALANAQDNSQNFTIDPNSVKASLRADWCAAEYNSCRVLCANNPTANDCDVNTLEYTCTCSNGSAPGLQYYIQTIPTFICEQAYSDCIAANTASSRAQDECKTNIKDKCGTLDPAKAQVSDPSQSESSSSSATQAPTASSSQNAAASTSSSTAGAAATAAGYIGNGAAMIAAGVFAALL

SEQ ID NO: 1974 - protein, 173 aa, Myceliophthora thermophilia
QDNSQNFTIDPNSVKASLRADWCAAEYNSCRVLCANNPTANDCDVNTLEYTCTCSNGSAPGLQYYIQTIPTFICEQAYSDCIAANTASSRAQDECKTNIKDKCGTLDPAKAQVSDPSQSESSSSSATQAPTASSSQNAAASTSSSTAGAAATAAGYIGNGAAMIAAGVFAALL

SEQ ID NO: 1975 - DNA, 618 bp, Myceliophthora thermophilia
atgagaatggggctgcggatgatgctgcggcacgtgctggcggtcctggctcttctggccgcgccgtcatgggcaggcttcaccaacgccttcgacggcatcaactgcggatcggacctggtcttgacgtgggacgctgtgccgccccagtactacccgccgtgcatcacggcgcaggtgattgacagaaatggcgatggtttcagcgcaaatgcatatcgtgtcaatattacgaccggggtcagcggaacttcgtacacttgggagggagcaccatacccgctccgctggatccttggcggactgtatcagctcgagttgaggccgatgagctggccggggggagacgtgccgttgttggccaagtcaccctccttcactattgcggacgcgggggttgcggcacagccggatgggtcggcagaagagccagcgccagaagattctcagagcgatagcgaacctgccatcagcaaaccagcggccatcgggatcggtgtggccatcggggtagtatcaataggtggaatgctgcttgtcggcgggtttcttaggaaacggcgtcgcaaggccgtcacgaagagccgagttgagagagggaactttgtcattagctga

SEQ ID NO: 1976 - protein, 205 aa, Myceliophthora thermophilia
MRMGLRMMLRHVLAVLALLAAPSWAGFTNAFDGINCGSDLVLTWDAVPPQYYPPCITAQVIDRNGDGFSANAYRVNITTGVSGTSYTWEGAPYPLRWILGGLYQLELRPMSWPGGDVPLLAKSPSFTIADAGVAAQPDGSAEEPAPEDSQSDSEPAISKPAAIGIGVAIGVVSIGGMLLVGGFLRKRRRKAVTKSRVERGNFVIS

SEQ ID NO: 1977 - protein, 180 aa, Myceliophthora thermophilia
GFTNAFDGINCGSDLVLTWDAVPPQYYPPCITAQVIDRNGDGFSANAYRVNITTGVSGTSYTWEGAPYPLRWILGGLYQLELRPMSWPGGDVPLLAKSPSFTIADAGVAAQPDGSAEEPAPEDSQSDSEPAISKPAAIGIGVAIGVVSIGGMLLVGGFLRKRRRKAVTKSRVERGNFVIS

SEQ ID NO: 1978 - DNA, 336 bp, Myceliophthora thermophilia
atgcatctgtcaaccttcgtcgcttcccttctcctgccgcttgcggctgttgcagagggcctttcaaccatcacttcaacaagcactatgacccttaccaagacgctcacccttcagcgtgccgtcgtcaccgtcgcgtccaacagctccaccggtcataccagtcactcgactactctcacgttagcatccagcaccacttcgacggggccagctgccaccagcaccagcgcgaccaccaccaccgaggaggacaaaaacgccgcaccagcgatgggtgcttcccagttggctgctcttggtgttgccggtgtcgtggctattgctcttttataa

SEQ ID NO: 1979 - protein, 111 aa, Myceliophthora thermophilia
MHLSTFVASLLLPLAAVAEGLSTITSTSTMTLTKTLTLQRAVVTVASNSSTGHTSHSTTLTLASSTTSTGPAATSTSATTTTEEDKNAAPAMGASQLAALGVAGVVAIALL

SEQ ID NO: 1980 - protein, 93 aa, Myceliophthora thermophilia
EGLSTITSTSTMTLTKTLTLQRAVVTVASNSSTGHTSHSTTLTLASSTTSTGPAATSTSATTTTEEDKNAAPAMGASQLAALGVAGVVAIALL

SEQ ID NO: 1981 - DNA, 594 bp, Myceliophthora thermophilia
atgatcacccggttgaagccatttgtcactcccgccctcaccgcggtcagcattcttctcatcttcgtctacttctcaaagatatggctattaccctgttctaatagccggcgcgaggcttatttctaccaaaggcctcataactacccttttccccagtgcgtaacgctcgaagttgcccatccaacaccggatcccactcctcctcttcctcctcctcaccgttctggattgttgccatctgcgagggacccagaatgcgagagattcccggacaccagcaaggtgctgctggtcatgaagacaggcgcatctgaagcctttgcccgggtgcccacgcagctcctgacggtgctacggtgcctgccagactttctcatctttagcgatatggaccagaatattgccggccagcagatccacgacagcctctcgaccatgctgcccggcgtcaaggaaggcaaccaatggtgtgtcgtcggccagggggaatgcgacaagctgggcgacccggcgcgcgagggctggaggctggaccggtgcaagaacgttcacatcgccaagaaggcgtaccagatgcgccccggctactag

SEQ ID NO: 1982 - protein, 197 aa, Myceliophthora thermophilia
MITRLKPFVTPALTAVSILLIFVYFSKIWLLPCSNSRREAYFYQRPHNYPFPQCVTLEVAHPTPDPTPPLPPPHRSGLLPSARDPECERFPDTSKVLLVMKTGASEAFARVPTQLLTVLRCLPDFLIFSDMDQNIAGQQIHDSLSTMLPGVKEGNQWCVVGQGECDKLGDPAREGWRLDRCKNVHIAKKAYQMRPGY

SEQ ID NO: 1983 - protein, 161 aa, Myceliophthora thermophilia
RREAYFYQRPHNYPFPQCVTLEVAHPTPDPTPPLPPPHRSGLLPSARDPECERFPDTSKVLLVMKTGASEAFARVPTQLLTVLRCLPDFLIFSDMDQNIAGQQIHDSLSTMLPGVKEGNQWCVVGQGECDKLGDPAREGWRLDRCKNVHIAKKAYQMRPGY

SEQ ID NO: 1984 - DNA, 666 bp, Myceliophthora thermophilia
atggtttctttccggacaacactcctggcgctcgccagcgccgtcgccgtctcggccgattactacatcgaccccgactcggttccgctctcgctccggagtaagcttagcccccccgaactgaaaatttctccaagcggccccagcgggaggactgacagtggcatgacagaggcgtggtgcagcgaccagcggagcatgtgcaagcccatctgccttgacatgggcgcgagtggcccgacgttggacaactcttgcgaccccgaaaccctcacgtacggttgtgtctgcagcgacggcaagcagcctaacgtgtccgagtacaccctgacgttgccgtactacgtgtgcatggcctggggcgagcagtgcgtggaggggtgcggcgacgacaaccagtgccagtcggactgccgggagaagcacccctgcggtgcccagagccccaagaaggccaatacgacgcagacgtcctcgtccaccacggcttccgccaccgccgccccgaccgaccaggtcttcgacggcctcggcgacggctcggacgactcggactcggatagtagcaacaagggcaatgcggccggcgccctgcgcctcggcgactcgtatggagttgccctcctggccggtagcctgtttgctggctttgccctggtgctctag

SEQ ID NO: 1985 - protein, 221 aa, Myceliophthora thermophilia
MVSFRTTLLALASAVAVSADYYIDPDSVPLSLRSKLSPPELKISPSGPSGRTDSGMTEAWCSDQRSMCKPICLDMGASGPTLDNSCDPETLTYGCVCSDGKQPNVSEYTLTLPYYVCMAWGEQCVEGCGDDNQCQSDCREKHPCGAQSPKKANTTQTSSSTTASATAAPTDQVFDGLGDGSDDSDSDSSNKGNAAGALRLGDSYGVALLAGSLFAGFALVL

SEQ ID NO: 1986 - protein, 202 aa, Myceliophthora thermophilia
DYYIDPDSVPLSLRSKLSPPELKISPSGPSGRTDSGMTEAWCSDQRSMCKPICLDMGASGPTLDNSCDPETLTYGCVCSDGKQPNVSEYTLTLPYYVCMAWGEQCVEGCGDDNQCQSDCREKHPCGAQSPKKANTTQTSSSTTASATAAPTDQVFDGLGDGSDDSDSDSSNKGNAAGALRLGDSYGVALLAGSLFAGFALVL

SEQ ID NO: 1987 - DNA, 276 bp, Myceliophthora thermophilia
atggcgccgtggggccgtgttctctgggcaatctacttgagggacctgatcgtcgctcaactccttcgaagtccaacatttcatcggggcgtccaacgcatccaccgcaccgtccaaaacctccgtcacggccgggatccgagtgagccgttgcgcccgggagaggccacagccgagcagaacgagtccagcaactttttcaaatatttcgtcgaggaactccgaaatcaggcccgcgggcagccgaccgacccgcctccgccgccgaagaagtaa

SEQ ID NO: 1988 - protein, 91 aa, Myceliophthora thermophilia
MAPWGRVLWAIYLRDLIVAQLLRSPTFHRGVQRIHRTVQNLRHGRDPSEPLRPGEATAEQNESSNFFKYFVEELRNQARGQPTDPPPPPKK

SEQ ID NO: 1989 - protein, 72 aa, Myceliophthora thermophilia
QLLRSPTFHRGVQRIHRTVQNLRHGRDPSEPLRPGEATAEQNESSNFFKYFVEELRNQARGQPTDPPPPPKK

SEQ ID NO: 1990 - DNA, 834 bp, Myceliophthora thermophilia
atgcactcgcttgcaatcctgcttatcgtgggagccgggctcatcgcgcccgctgccgctaccggagaccaccataccaccaaacctccctcgcacacgagcggctgtcctaccctcaccgttaccacggacctgtgccgcacctgtggctacctctacccatcgtgctccgtggtgagcacggtgacacgaagctgcgactgcccaaatccgccggcgacgtcctacacagctttcccttgccatgagccgtgccggagcattgggtgtccaaccagctattcgatcgtggagccgaccgggtgcgagtcgtccacttccaccccgccctccagcaccagcaccagcactagcagcagtagcagcaccagctgcagcgcgacctccacctcctcctcttcgtccgagaccgaggattgctcctccacgacggtgaccagctcccacagccacaccaaatcccacacccataccaagtcccatagtcacagcagctccagcagcgagcccccgtgcaacaccacatccacatccatatccacaagcacctgcacctgcaccagcgagccgccgggcgagactagcacgaccagctctgagccgtcaaccagtcactcccatccgcactcccctccccactcatcctctcagccacccacgtcgacctcctcgcccccgctccccccgccttcaacctcggctccgcccacgagcggcggtggcggggagggtgtgccgtcttcctcttccctgccgccgccgccgccgccgccgaccagcagcgtcgctacggccggcgccaacggcagggcgagaccgttccggctctggtaa

SEQ ID NO: 1991 - protein, 277 aa, Myceliophthora thermophilia
MHSLAILLIVGAGLIAPAAATGDHHTTKPPSHTSGCPTLTVTTDLCRTCGYLYPSCSVVSTVTRSCDCPNPPATSYTAFPCHEPCRSIGCPTSYSIVEPTGCESSTSTPPSSTSTSTSSSSSTSCSATSTSSSSSETEDCSSTTVTSSHSHTKSHTHTKSHSHSSSSSEPPCNTTSTSISTSTCTCTSEPPGETSTTSSEPSTSHSHPHSPPHSSSQPPTSTSSPPLPPPSTSAPPTSGGGGEGVPSSSSLPPPPPPPTSSVATAGANGRARPFRLW

SEQ ID NO: 1992 - protein, 257 aa, Myceliophthora thermophilia
TGDHHTTKPPSHTSGCPTLTVTTDLCRTCGYLYPSCSVVSTVTRSCDCPNPPATSYTAFPCHEPCRSIGCPTSYSIVEPTGCESSTSTPPSSTSTSTSSSSSTSCSATSTSSSSSETEDCSSTTVTSSHSHTKSHTHTKSHSHSSSSSEPPCNTTSTSISTSTCTCTSEPPGETSTTSSEPSTSHSHPHSPPHSSSQPPTSTSSPPLPPPSTSAPPTSGGGGEGVPSSSSLPPPPPPPTSSVATAGANGRARPFRLW

SEQ ID NO: 1993 - DNA, 1653 bp, Myceliophthora thermophilia
atgaggatcgctaaaacgctcctctcgttggcccttgtggccaacgctgctgttgccagctcgtggttctcgaatgccgcatacaataagtggcacgagacggagcttgagcgctggctgtcggaccatgacgttccctatccaactccggccgaccgcaaggagctcgagaagcttgtgcagaagaactgggacgagcaagtcgtcgagccataccgctcctgggatacccagaagctcactggctacctgaagcagaagggcattgaggccgaggagtcaactgaggacactcgggagtctctcctggcccgcgtcaagggcgcctggtacgagtcggaagaaaaggctcagaacgcctggtccaacaccaaggactggattctggacacttggacagacagccagctaaaggctttctgcgaccatcacgggatccccgttccccagccccgcaagagggatactctcctccaaaagatccgtgagaactatgatgcgattgcccagaaggctggcgacgccgctgcttaccctggaaactggttgtatgagacttggtctgaatccgatctgaaggagtggcttgacacgcacggattcccagcaccgcagccaacgactcgcgacaagctcatcgcctccgttcgtcgcaattctcgccttgcctacctgcgcatgcaagaacagacagaaagctccaagaagagcgcccaggacgcgtactctgctctgactgacaagcttatcgattcctggggggaatcccagctgaaggaattctgcgacaagaacggcatcagtgttccccaaggtaccaagctcaaccagcttcgtgcgcttgtccgcaagcaccgcgccgaaatcctgggcgacaccgtctcgggcactgttgcctctgcgttcggtgctgccacttccaatgttgggtccgccgcttccaaggccaccgacgccgcataccaggctgcccaagatgcctttgacaaggctatcgaagcttggtccgacagtcgcctgaagggttatttggatgcccgtggagtgcccgtgccccaaggctccaagaccaacgaactgcgcgccctcgtgcgcaagcacgctcacaaggccgccaccggctggaccgcctggacctgggacgacctgagcttggaaaacctccgcagctaccttgcctcgagtggtaacgccgcagccaagaaggtcgcagagaagacgggtgctacgcgcgacgagctcgtcgaggccgcgcaggccgcctacgcctcggcctcctccgcaggcggcagctcctacgcgtccgcaaccagctacctttccaaggcaaccgacacggccaaggccaacgtgtttgacacgtggagtgaaagtgagctgaaggcgtacctggacagctacggcatcccggtaccgcaggggtcgacgctcaacgagctacgagcgcttgcccgccgccagcacacatacttcaagtacggcaccacaacacccaccgacacgctcctcgctaaggtgagggaaaacgtgatcggcggttgggactgggtcgccaatcagctgggcatcgggtccgacgctgccaggaagaaggccgaggagctaacggagcaggcaaaggccaagggcgagaaggtgcataaggagctctga

SEQ ID NO: 1994 - protein, 550 aa, Myceliophthora thermophilia
MRIAKTLLSLALVANAAVASSWFSNAAYNKWHETELERWLSDHDVPYPTPADRKELEKLVQKNWDEQVVEPYRSWDTQKLTGYLKQKGIEAEESTEDTRESLLARVKGAWYESEEKAQNAWSNTKDWILDTWTDSQLKAFCDHHGIPVPQPRKRDTLLQKIRENYDAIAQKAGDAAAYPGNWLYETWSESDLKEWLDTHGFPAPQPTTRDKLIASVRRNSRLAYLRMQEQTESSKKSAQDAYSALTDKLIDSWGESQLKEFCDKNGISVPQGTKLNQLRALVRKHRAEILGDTVSGTVASAFGAATSNVGSAASKATDAAYQAAQDAFDKAIEAWSDSRLKGYLDARGVPVPQGSKTNELRALVRKHAHKAATGWTAWTWDDLSLENLRSYLASSGNAAAKKVAEKTGATRDELVEAAQAAYASASSAGGSSYASATSYLSKATDTAKANVFDTWSESELKAYLDSYGIPVPQGSTLNELRALARRQHTYFKYGTTTPTDTLLAKVRENVIGGWDWVANQLGIGSDAARKKAEELTEQAKAKGEKVHKEL

SEQ ID NO: 1995 - protein, 531 aa, Myceliophthora thermophilia
SSWFSNAAYNKWHETELERWLSDHDVPYPTPADRKELEKLVQKNWDEQVVEPYRSWDTQKLTGYLKQKGIEAEESTEDTRESLLARVKGAWYESEEKAQNAWSNTKDWILDTWTDSQLKAFCDHHGIPVPQPRKRDTLLQKIRENYDAIAQKAGDAAAYPGNWLYETWSESDLKEWLDTHGFPAPQPTTRDKLIASVRRNSRLAYLRMQEQTESSKKSAQDAYSALTDKLIDSWGESQLKEFCDKNGISVPQGTKLNQLRALVRKHRAEILGDTVSGTVASAFGAATSNVGSAASKATDAAYQAAQDAFDKAIEAWSDSRLKGYLDARGVPVPQGSKTNELRALVRKHAHKAATGWTAWTWDDLSLENLRSYLASSGNAAAKKVAEKTGATRDELVEAAQAAYASASSAGGSSYASATSYLSKATDTAKANVFDTWSESELKAYLDSYGIPVPQGSTLNELRALARRQHTYFKYGTTTPTDTLLAKVRENVIGGWDWVANQLGIGSDAARKKAEELTEQAKAKGEKVHKEL

SEQ ID NO: 1996 - DNA, 975 bp, Myceliophthora thermophilia
atgacggcgcaggcggcggtcgcgtcgctcgtcctgcaggtgctgctgcagcggcccggggccgtggtcgagctcgggctggaccggccgggcgtgttcgaccgcgcgcgcgactccatcgccgccctctgggggctcttcacctacctgatgcgcgccatgggcggcgggctggtgtacatgtcgatcgggtcggccggggaggaggagttcgccatcgtcgaccggttcgtccgcaccgtgcgcgcgtgggacggcccgcccatctgggtcaccatcatccacccgcacaacgggggattcgtgggcatcgaccgggccaccgacctggacgggctgtacgacgtgcacccgtcgctgaccaccacggacgcgctgcaccacgtgctgatgctcgagctcgacatccaccacgtctcggacacgatccagacggtgctgtgggaggccgcctggcgggagacgaggtatgcctcggtggggatcagcttctcgcgcgtcgtggccgtcatggaggacctggcgagggagctggcgacgaggaagacggacgtcgacaacgacggaggaggaggagcggatccggtgctgacggatgctgcgcgcgagcagtggatggagggcgtgaggaggtggctgagccacccgggcgcatccaactgcacgcgggagctggtccagaggcacctggacgtcgtgcccctggcgttccccgacgacgtccgtgccgaggtcgggcgccatctgaagcgtctcgtgctgcggatcgacgacgacgagagcaagaccaagtcgttcgcgtcccggtccatgaccgaagcacagcggcaccgcgtctgggatcacatgagggccgccatcgtcccgggctccgaggccatgttctgcgcgcacatccgggacctgatgtcggaggcgctgcaagtctttgccaaagcttgccccccaagcagcaaccactctgccgttgcttag

SEQ ID NO: 1997 - protein, 324 aa, Myceliophthora thermophilia
MTAQAAVASLVLQVLLQRPGAVVELGLDRPGVFDRARDSIAALWGLFTYLMRAMGGGLVYMSIGSAGEEEFAIVDRFVRTVRAWDGPPIWVTIIHPHNGGFVGIDRATDLDGLYDVHPSLTTTDALHHVLMLELDIHHVSDTIQTVLWEAAWRETRYASVGISFSRVVAVMEDLARELATRKTDVDNDGGGGADPVLTDAAREQWMEGVRRWLSHPGASNCTRELVQRHLDVVPLAFPDDVRAEVGRHLKRLVLRIDDDESKTKSFASRSMTEAQRHRVWDHMRAAIVPGSEAMFCAHIRDLMSEALQVFAKACPPSSNHSAVA

SEQ ID NO: 1998 - protein, 303 aa, Myceliophthora thermophilia
VVELGLDRPGVFDRARDSIAALWGLFTYLMRAMGGGLVYMSIGSAGEEEFAIVDRFVRTVRAWDGPPIWVTIIHPHNGGFVGIDRATDLDGLYDVHPSLTTTDALHHVLMLELDIHHVSDTIQTVLWEAAWRETRYASVGISFSRVVAVMEDLARELATRKTDVDNDGGGGADPVLTDAAREQWMEGVRRWLSHPGASNCTRELVQRHLDVVPLAFPDDVRAEVGRHLKRLVLRIDDDESKTKSFASRSMTEAQRHRVWDHMRAAIVPGSEAMFCAHIRDLMSEALQVFAKACPPSSNHSAVA

SEQ ID NO: 1999 - DNA, 1035 bp, Myceliophthora thermophilia
atgaagtacacctctctgtccctcgggctcctggcccagggagccgcggcccagcagatgatccgcttcggctgctcgcagctcgtcgtcgcccgcatggaccccctggtcaacccgggcctcccacagtccccccacgtgcaccaggtagccggcggcaactcgttcaacattagcatggacccggagacccacgacctcgtccgcgactcgacatgcactacctgcaccttctccgaggacttctctaactactggaccgccgtcctctacttccgcgcccgcaacggaacctacaagcgcgtgcgccagttccccaatgctggtttgagaaccgacggtggcttgaccgtgtattacattccaccctacgatggcaagaccaaggtgacggccttcaagccgggcttccgcatgctggtcggggacgcgtcgctgcggcaggccgaggggatgcagaagcagctgtgccaccggtgcctcggggccgagtacgaccagggcggcgccccctgcacgggctccgactcccagacgctgcccgaccatttctgcgacggcggcatccgcaccaccgtcaccttcccgacctgctgggacggcaagaacatcgacagcccggaccacaagagccacgtcgcctaccccgagacgggctccttcgagaccaccggcccctgcccggacagccaccccgtccgcttgccccagctcatgtacgaggtcatgtgggataccaccgagttcaacgacaaggacctctggccagaggatggttcccagccatttgtttggagcacgaacgacccggtcggctactcccaacacggtgactacatgtttggctggaagggcgattccctgcagcgagctctcgatgctcgttgcgggaatgccgtctgcaaggagctccggacccagacgtccgaggaggccatgcgctgcacgctgccgcagtacgtccccgaggacgtggacggatggctggattacattcctggcgtgggcgacgttgtggatggtggaaagaactag

SEQ ID NO: 2000 - protein, 344 aa, Myceliophthora thermophilia
MKYTSLSLGLLAQGAAAQQMIRFGCSQLVVARMDPLVNPGLPQSPHVHQVAGGNSFNISMDPETHDLVRDSTCTTCTFSEDFSNYWTAVLYFRARNGTYKRVRQFPNAGLRTDGGLTVYYIPPYDGKTKVTAFKPGFRMLVGDASLRQAEGMQKQLCHRCLGAEYDQGGAPCTGSDSQTLPDHFCDGGIRTTVTFPTCWDGKNIDSPDHKSHVAYPETGSFETTGPCPDSHPVRLPQLMYEVMWDTTEFNDKDLWPEDGSQPFVWSTNDPVGYSQHGDYMFGWKGDSLQRALDARCGNAVCKELRTQTSEEAMRCTLPQYVPEDVDGWLDYIPGVGDVVDGGKN

SEQ ID NO: 2001 - protein, 327 aa, Myceliophthora thermophilia
QQMIRFGCSQLVVARMDPLVNPGLPQSPHVHQVAGGNSFNISMDPETHDLVRDSTCTTCTFSEDFSNYWTAVLYFRARNGTYKRVRQFPNAGLRTDGGLTVYYIPPYDGKTKVTAFKPGFRMLVGDASLRQAEGMQKQLCHRCLGAEYDQGGAPCTGSDSQTLPDHFCDGGIRTTVTFPTCWDGKNIDSPDHKSHVAYPETGSFETTGPCPDSHPVRLPQLMYEVMWDTTEFNDKDLWPEDGSQPFVWSTNDPVGYSQHGDYMFGWKGDSLQRALDARCGNAVCKELRTQTSEEAMRCTLPQYVPEDVDGWLDYIPGVGDVVDGGKN

SEQ ID NO: 2002 - DNA, 240 bp, Myceliophthora thermophilia
atggccccccatccccccccccttttgctgctggcccctttttgcgcagttggatggatgcatggagccaccaaaacgctgagcaccttgcttattctgcatcgttatgcacgcacgttccggattacatctgggatattatactacgacagacaggagttcgtctctctctctctctctctgtgtgtgtggagaggggacgacaaggcaaagcaaagcgagcatcgacttgccgtgtga

SEQ ID NO: 2003 - protein, 79 aa, Myceliophthora thermophilia
MAPHPPPLLLLAPFCAVGWMHGATKTLSTLLILHRYARTFRITSGILYYDRQEFVSLSLSLCVWRGDDKAKQSEHRLAV

SEQ ID NO: 2004 - protein, 40 aa, Myceliophthora thermophilia
FRITSGILYYDRQEFVSLSLSLCVWRGDDKAKQSEHRLAV

SEQ ID NO: 2005 - DNA, 750 bp, Myceliophthora thermophilia
atgcagctcaacactttggccctgacgctggctgcggccgtctcctcggtcgccgcctaccccatcaccggggacgacgtcaactgccgcaccggccccggcaccagcttcaagtcggtcaagacgtacccgaagggcaccgatgtcaagctcagctgccagacgtacggcgaggtgattttcggaaactccatctgggacaagacccaggacggctgctatgtctcggattactacgtcaagacgggcagcaacaacatggtcaccggcgagtgccccgacaacggcaacggcagcggcggctccgtctaccagggcaagatcaaccgcaccgagatcatctcgcgcgccgagtactggaccaagcagaacgtgccctactcgatggagaagacgtacccggacccgcagggccgctactaccgcaccgactgctccggcctcgtgtccatggccctccacgccatggcccccggctacagcaccgtcaccctgccccagatcgccgtggccatctcgtgggacgacctcaaggccggcgacttcatcggcactctgggggccggcaccggcggctccggcggccacgtcaccgtcttccagtcctgggtcgacgacgcgcacacgcagtactggtcgctcgagtgcgccaacaaggagaagggctgcctccgccagaagcgcaacgtcaagtggaaggtgggcagcaacaccgccaagccctaccgctacaccaaggtcatcaactaa

SEQ ID NO: 2006 - protein, 249 aa, Myceliophthora thermophilia
MQLNTLALTLAAAVSSVAAYPITGDDVNCRTGPGTSFKSVKTYPKGTDVKLSCQTYGEVIFGNSIWDKTQDGCYVSDYYVKTGSNNMVTGECPDNGNGSGGSVYQGKINRTEIISRAEYWTKQNVPYSMEKTYPDPQGRYYRTDCSGLVSMALHAMAPGYSTVTLPQIAVAISWDDLKAGDFIGTLGAGTGGSGGHVTVFQSWVDDAHTQYWSLECANKEKGCLRQKRNVKWKVGSNTAKPYRYTKVIN

SEQ ID NO: 2007 - protein, 230 aa, Myceliophthora thermophilia
YPITGDDVNCRTGPGTSFKSVKTYPKGTDVKLSCQTYGEVIFGNSIWDKTQDGCYVSDYYVKTGSNNMVTGECPDNGNGSGGSVYQGKINRTEIISRAEYWTKQNVPYSMEKTYPDPQGRYYRTDCSGLVSMALHAMAPGYSTVTLPQIAVAISWDDLKAGDFIGTLGAGTGGSGGHVTVFQSWVDDAHTQYWSLECANKEKGCLRQKRNVKWKVGSNTAKPYRYTKVIN

SEQ ID NO: 2008 - DNA, 2184 bp, Myceliophthora thermophilia
atgcgcattcgtcacgccctggtcgggatcgctagcctctgctgtctcctcgggactgcctcgggggcccgaatcagtagtagggacatgttatcgaggcgggttgtcccgccgtcgcacacccttcacgagagacacgaggcgggcaacgttgaaggatgggtcaagagaggactcgcagatgccgagtccaccgttccggtcaggatcgggctgaagcagtccaacgtggacgctgcgcatgacttgctgatggacatctccgacccacgttccccaaactacggcaaacacctctcgaggagcgaagtcgaagatctctttgcacctcgggaacactcggttgccaaggtcaaacgctggctggcgtcggcaggggttgatgaaggaagaatctcgcaatcggccaacaagcagtggattcagttcgatgctcctgtctacgagctcgagaaattgctcctcacgaggtaccacatctttgaaaacctcgagacgggtgtgcagaacattgcttgttccgagtaccatgttcctcgcgacgtgtcgcatcacatcgactacatcactcctggcatcaagctcatggccggtgggcgtgaggaaagaatggtcaggtggaggaaagcggaccggcgttctctcgtagcgggtctggccagccagggcagaaagggagcccatggaatgggtcatggaggaggaggaggaagtagatcgccggatgatcccgtcgtggacgacagccctttccgggtgaccggaccgtgcagcgccgagatcacacccaactgtattcgggctcaatatcaactccccaacggtacacgagccgcgagcggcaacgagctcggcatcttccagggactgggtcagcattacagccaggaagatctcgacaactactggaaatacgttgccccttgggtcccccgcgggacgcacccggaactccggtcaatcaacggcgccctcggcccggccaacgacacactcagggccggagaggaagcggacctcgacttccagattgccattcccctgatatggcctcagaggacggtcctcttccagacggacgacgagtggtatcagcaagaccagcagcgcgctgataccaagtacccgggcttctttaacaccttctttgacgcgatcgacgggtcctactgccacatgacggcattcaacatgacgggcaactgcgtgacgccggagtgccgggacccggagtacccgaacccgaacgcgacgccggagcagggcgggtacgcgggggcgctcatgtgcgggcggcaccggccgacgagcgtggtgtcggtcagctacagcgggacggaggactcgtggccggcgagctacatgcggcggcagtgcctcgaggtgctcaagctggccctgcagggcgtcaccgtcgtcgagtcgtcgggcgacttcggcgtcggcggccgccccttcgacccccgcgccggctgcctcggcccggaccgcgccgtcttcagcccccgcgtcatggccaactgcccgtacgtgctcagcgtcggggccaccgcgctggtcgaccccgagcaggagcagcagcagcagcatgccgaccggggcggtagcggcaaggagccgagactggtcgaggtggcggcccggacgttcgcctcgggcggcggcttctccaacatcttcgggcggcccaagtggcaggacaggcacgtgagggagtatctgcgcaagaccaacctgtccgagctcgggtacgacaacgcggccgggatgagcttcgacagcctgcggccccccccggccggcggcaagctgttcaacaggctcggcaggggctatcccgacgtggccgccgtcggccagaacttccgcgtcgtcctcaggggctacccgaaccgcatgcacggcacctcggctgccgcgccggtctgggcctccatactgaccctcatcaacgaggagcgccgggcggtgggcaagggccccgtcggctttgtgcatcaggtcctcgttttgctcatggcttctcagtatcaacacccggaggtttttaccgacatcaccgtgggatccaaccccggatgcggaactgacggctttccggtcgaggagggatgggatccggtgacaggtctggggtcgcccatctacccaaagctcctgaagctgtttatgagcttgccatga

SEQ ID NO: 2009 - protein, 727 aa, Myceliophthora thermophilia
MRIRHALVGIASLCCLLGTASGARISSRDMLSRRVVPPSHTLHERHEAGNVEGWVKRGLADAESTVPVRIGLKQSNVDAAHDLLMDISDPRSPNYGKHLSRSEVEDLFAPREHSVAKVKRWLASAGVDEGRISQSANKQWIQFDAPVYELEKLLLTRYHIFENLETGVQNIACSEYHVPRDVSHHIDYITPGIKLMAGGREERMVRWRKADRRSLVAGLASQGRKGAHGMGHGGGGGSRSPDDPVVDDSPFRVTGPCSAEITPNCIRAQYQLPNGTRAASGNELGIFQGLGQHYSQEDLDNYWKYVAPWVPRGTHPELRSINGALGPANDTLRAGEEADLDFQIAIPLIWPQRTVLFQTDDEWYQQDQQRADTKYPGFFNTFFDAIDGSYCHMTAFNMTGNCVTPECRDPEYPNPNATPEQGGYAGALMCGRHRPTSVVSVSYSGTEDSWPASYMRRQCLEVLKLALQGVTVVESSGDFGVGGRPFDPRAGCLGPDRAVFSPRVMANCPYVLSVGATALVDPEQEQQQQHADRGGSGKEPRLVEVAARTFASGGGFSNIFGRPKWQDRHVREYLRKTNLSELGYDNAAGMSFDSLRPPPAGGKLFNRLGRGYPDVAAVGQNFRVVLRGYPNRMHGTSAAAPVWASILTLINEERRAVGKGPVGFVHQVLVLLMASQYQHPEVFTDITVGSNPGCGTDGFPVEEGWDPVTGLGSPIYPKLLKLFMSLP

SEQ ID NO: 2010 - protein, 705 aa, Myceliophthora thermophilia
ARISSRDMLSRRVVPPSHTLHERHEAGNVEGWVKRGLADAESTVPVRIGLKQSNVDAAHDLLMDISDPRSPNYGKHLSRSEVEDLFAPREHSVAKVKRWLASAGVDEGRISQSANKQWIQFDAPVYELEKLLLTRYHIFENLETGVQNIACSEYHVPRDVSHHIDYITPGIKLMAGGREERMVRWRKADRRSLVAGLASQGRKGAHGMGHGGGGGSRSPDDPVVDDSPFRVTGPCSAEITPNCIRAQYQLPNGTRAASGNELGIFQGLGQHYSQEDLDNYWKYVAPWVPRGTHPELRSINGALGPANDTLRAGEEADLDFQIAIPLIWPQRTVLFQTDDEWYQQDQQRADTKYPGFFNTFFDAIDGSYCHMTAFNMTGNCVTPECRDPEYPNPNATPEQGGYAGALMCGRHRPTSVVSVSYSGTEDSWPASYMRRQCLEVLKLALQGVTVVESSGDFGVGGRPFDPRAGCLGPDRAVFSPRVMANCPYVLSVGATALVDPEQEQQQQHADRGGSGKEPRLVEVAARTFASGGGFSNIFGRPKWQDRHVREYLRKTNLSELGYDNAAGMSFDSLRPPPAGGKLFNRLGRGYPDVAAVGQNFRVVLRGYPNRMHGTSAAAPVWASILTLINEERRAVGKGPVGFVHQVLVLLMASQYQHPEVFTDITVGSNPGCGTDGFPVEEGWDPVTGLGSPIYPKLLKLFMSLP

SEQ ID NO: 2011 - DNA, 2787 bp, Myceliophthora thermophilia
atgcggttgccctacctcggcgccgctgtcgtccatgacgtgctgctgctgctctccgtgtcgcacctggtcaccgcccagactgctgctgccgactccgctacctcgtccgattccccgactcccagtccgctctggatccagccgtcgggcgactggtatggcatagacgggacctggtcaaacttcgctttctacatcggctcgcccgctcaggtagtgtatctgaccgttgccaccgccctgtccgaaatatgggttatctcgaccggtggttgtgttccagttcaactatgtattgatgcccgcggcggcgtgttcgacttatcgcaatccgaaacatggaaaccactgggcagttggcagctgggcatgaactataccggcatgggtggcaacggagactacggactcgagaccttcgccttcgtcaacagagtgacgcgctacacaaccgccatggacgacgtgctggttgcggccatcaacgacaccgactactaccagggatacatcggcgtcggtgtaacccagggcaggttcgggacgaatctcaccaaccctttcatttcgcagttggtcgaaacgtacgggaccatcccgagccatggttatggatatacagcgggggcctactatcgagatgacggtacgaatggtggcacagtggcgtccttgacattgggaggctatgatactctgagattcaagccgcacaagacgaaattctcccttgagccggtaacacggctgccctttgtgcggctccgcggcatcacagccgaggtcccgacgcttgacgatgcgcccacgggaaactggacgtcgacgacgaaacagcttgtcaagatggaggattcgatcatcgccatcatcgactcgtcgacaccgtacctctggcttcctacggaagtgtgcgagcgcttcgcctcggccctgaacttgaaatggagggaggatctgggtctctacgtcttctccgacggcgcccagtacactcattaccagtccgacacgtcgctcacgttcaccttctcactttccagctaccagaatgccgacaactttgggcagcctctcaacacacccggggttgtcaacattaccctcccatctgccgcatttgcgcagctcctccggtaccccttcaagaatgtaatccagtggggtgactcgagtgtgccgtattttcccttgaagcggtcgaccaaggaggtgaacaacaaccagtacattatcgggcgcacgtttcttcaggaggcatacatcatcaccagctacgacagggggactttctcgcttcaccaggccctgtttccccaaaactcaacgaacaactatacgctcgaggagatcacgcgtccgatggacagcccctatccaaagtacgaaagcgatcccccgcccagtgagggattgagtactggccaaacggtgggtatcgttgtgggtgccttcattattggcagtatcgccgctctcgtactgtggttctgcctctctcgcaaacggaaggagagacgcaaggagaaacagaaagaggcgcccgtacaagaggaggagaacaatgacgctgctcacaaggaggaggaggacgtggacgaggaagaaccccagagcccaatcaaacggatgttgacaaagatcatccggaagaaacgatcaaggaggccggtgtcacagcaaacgaacgagaccaacgcgggaccagctgaggttggagccgacgcacaacatcaggttttcgagatgcccgtgccccctgaacccgtcgagctggatagccacgacatcggagacgacgacagcgattttggcggtgacagcacgccggggatgagccaatacgagatcaccagacgaaaactggatcgccagcttcaggggcccgtgccgacctatacccccacagtcacaattcccccggcgccggcgcatgggaagtcgatgcatgacccgagccctgtggctcattaccggccacccgaagacccatcaccaacgtcaacgccgacgtatgcgaacggcggctcactccccggcaccctcccatccccgttgacgccacatggcgactgggcgaatcgagggttcgacctcccctcaccgatgacgatcgctccccaaaccaatctactccacgcaccctccaatgtgtcggatcacaactactcgcccgtctccccccattcaccgcattcgctacattcactacattcactacattcaccgcacacgtatgccccgtcgtccatcacccgctcaggctcggatgtgtctcctactacaccgaccggatcggtgcagttaccaaccccagcaatccaacggactcccatcgattcatcacgggtggtatgcctgggtcccctaccggagaacgttccgctaccgcgcccgcaacgatccataccacgaatagtaaccccgagtcatccttcggctatgcccagggaaaacaccgaagccggaccggcctatatgcagacgcaggacctccctctcccccaaactccggggcaccatcgatcgctcacacagggctcgacggacacgcttggtagtgactatactgtcgaggaagagacgcgtctcagggccgagaattcgaccgcgagaccgcaaaccatcggacaggagcaccagcacgagagtcacgaccacgacataccccgcagcccctgcagcatggagcgcatagaggctggctcggagctcgtccacgtgccacaggtggccgagaagcggtatagctgggaagatgaccagggcgagagcctcagctga

SEQ ID NO: 2012 - protein, 928 aa, Myceliophthora thermophilia
MRLPYLGAAVVHDVLLLLSVSHLVTAQTAAADSATSSDSPTPSPLWIQPSGDWYGIDGTWSNFAFYIGSPAQVVYLTVATALSEIWVISTGGCVPVQLCIDARGGVFDLSQSETWKPLGSWQLGMNYTGMGGNGDYGLETFAFVNRVTRYTTAMDDVLVAAINDTDYYQGYIGVGVTQGRFGTNLTNPFISQLVETYGTIPSHGYGYTAGAYYRDDGTNGGTVASLTLGGYDTLRFKPHKTKFSLEPVTRLPFVRLRGITAEVPTLDDAPTGNWTSTTKQLVKMEDSIIAIIDSSTPYLWLPTEVCERFASALNLKWREDLGLYVFSDGAQYTHYQSDTSLTFTFSLSSYQNADNFGQPLNTPGVVNITLPSAAFAQLLRYPFKNVIQWGDSSVPYFPLKRSTKEVNNNQYIIGRTFLQEAYIITSYDRGTFSLHQALFPQNSTNNYTLEEITRPMDSPYPKYESDPPPSEGLSTGQTVGIVVGAFIIGSIAALVLWFCLSRKRKERRKEKQKEAPVQEEENNDAAHKEEEDVDEEEPQSPIKRMLTKIIRKKRSRRPVSQQTNETNAGPAEVGADAQHQVFEMPVPPEPVELDSHDIGDDDSDFGGDSTPGMSQYEITRRKLDRQLQGPVPTYTPTVTIPPAPAHGKSMHDPSPVAHYRPPEDPSPTSTPTYANGGSLPGTLPSPLTPHGDWANRGFDLPSPMTIAPQTNLLHAPSNVSDHNYSPVSPHSPHSLHSLHSLHSPHTYAPSSITRSGSDVSPTTPTGSVQLPTPAIQRTPIDSSRVVCLGPLPENVPLPRPQRSIPRIVTPSHPSAMPRENTEAGPAYMQTQDLPLPQTPGHHRSLTQGSTDTLGSDYTVEEETRLRAENSTARPQTIGQEHQHESHDHDIPRSPCSMERIEAGSELVHVPQVAEKRYSWEDDQGESLS

SEQ ID NO: 2013 - protein, 902 aa, Myceliophthora thermophilia
QTAAADSATSSDSPTPSPLWIQPSGDWYGIDGTWSNFAFYIGSPAQVVYLTVATALSEIWVISTGGCVPVQLCIDARGGVFDLSQSETWKPLGSWQLGMNYTGMGGNGDYGLETFAFVNRVTRYTTAMDDVLVAAINDTDYYQGYIGVGVTQGRFGTNLTNPFISQLVETYGTIPSHGYGYTAGAYYRDDGTNGGTVASLTLGGYDTLRFKPHKTKFSLEPVTRLPFVRLRGITAEVPTLDDAPTGNWTSTTKQLVKMEDSIIAIIDSSTPYLWLPTEVCERFASALNLKWREDLGLYVFSDGAQYTHYQSDTSLTFTFSLSSYQNADNFGQPLNTPGVVNITLPSAAFAQLLRYPFKNVIQWGDSSVPYFPLKRSTKEVNNNQYIIGRTFLQEAYIITSYDRGTFSLHQALFPQNSTNNYTLEEITRPMDSPYPKYESDPPPSEGLSTGQTVGIVVGAFIIGSIAALVLWFCLSRKRKERRKEKQKEAPVQEEENNDAAHKEEEDVDEEEPQSPIKRMLTKIIRKKRSRRPVSQQTNETNAGPAEVGADAQHQVFEMPVPPEPVELDSHDIGDDDSDFGGDSTPGMSQYEITRRKLDRQLQGPVPTYTPTVTIPPAPAHGKSMHDPSPVAHYRPPEDPSPTSTPTYANGGSLPGTLPSPLTPHGDWANRGFDLPSPMTIAPQTNLLHAPSNVSDHNYSPVSPHSPHSLHSLHSLHSPHTYAPSSITRSGSDVSPTTPTGSVQLPTPAIQRTPIDSSRVVCLGPLPENVPLPRPQRSIPRIVTPSHPSAMPRENTEAGPAYMQTQDLPLPQTPGHHRSLTQGSTDTLGSDYTVEEETRLRAENSTARPQTIGQEHQHESHDHDIPRSPCSMERIEAGSELVHVPQVAEKRYSWEDDQGESLS

SEQ ID NO: 2014 - DNA, 690 bp, Myceliophthora thermophilia
atggcttcactacgctccctcctcgccgccgggctgctgttcctctccgcagccaacgcacacttcgagctcaatcaaccgaccccactcgagggcgacaagatggacgagagtctcgagagcagcgggccttgcggcggtggagtgccggacctgagcaaaaacacagcaaccgatttccacgtcgacggcgacgccgtgagcttgctgttggcccaccctcaggccaactacttgatccggggcaccctcgacgacaaggccgccggcaactggacccagctgttccccatcgtccagcagagcggccgcggcgatttctgcgagccgtccgtcaaggcgccaaaggagtgggctggcaagaagggcttcattggcattgcctgcgcggccccggacggcatgctgttccaatgtgccgccgtcaacttcgtctcgggagccgccgacgaggtccccagctcttgtgcgaatggaacctccgtgagcattagctttaccgacgacgcgagcctgagcgccctcctgggtgacagttctaccaatacccctacctcaaccgctggcagcccttcgcagtcgacttcggggagcgcagcgccttcgtcgaaggttgggagcggcagcctgccaatcggcgcgtttgccgccaccgtcgtgatgcttctagtcgggacagctctgctgtga

SEQ ID NO: 2015 - protein, 229 aa, Myceliophthora thermophilia
MASLRSLLAAGLLFLSAANAHFELNQPTPLEGDKMDESLESSGPCGGGVPDLSKNTATDFHVDGDAVSLLLAHPQANYLIRGTLDDKAAGNWTQLFPIVQQSGRGDFCEPSVKAPKEWAGKKGFIGIACAAPDGMLFQCAAVNFVSGAADEVPSSCANGTSVSISFTDDASLSALLGDSSTNTPTSTAGSPSQSTSGSAAPSSKVGSGSLPIGAFAATVVMLLVGTALL

SEQ ID NO: 2016 - protein, 209 aa, Myceliophthora thermophilia
HFELNQPTPLEGDKMDESLESSGPCGGGVPDLSKNTATDFHVDGDAVSLLLAHPQANYLIRGTLDDKAAGNWTQLFPIVQQSGRGDFCEPSVKAPKEWAGKKGFIGIACAAPDGMLFQCAAVNFVSGAADEVPSSCANGTSVSISFTDDASLSALLGDSSTNTPTSTAGSPSQSTSGSAAPSSKVGSGSLPIGAFAATVVMLLVGTALL

SEQ ID NO: 2017 - DNA, 480 bp, Myceliophthora thermophilia
atgcgatatcatctttccctcgccgtcctctcccttctgggagccaccagcgtggccaccgccgacaggcggccttgcggcttcaagatcgctccttgcccgaccggcgagatctgccagaaagtcgaccccggctgcgaccgcggcgagaactgtcagggctactgcgtgcccgccgccacccccaccaccctggtgaccaagacgaccgcgagcccgcccgagccgacctatcagttctgcggtggcttcgccaacattcaatgcgagaacgagaatcacgtctgcatcgacgcgccggacgacaactgcgacccccgaaacggcggtgctgactgcggcggcatctgcgtcgagcccgtcttctgtggggggatcgccggcttgcaatgccccgacggcaagcgatgtatcgatgatccccgggacagatgcgaccccaagaacggcggcgccgactgcggcggtatttgcgtctag

SEQ ID NO: 2018 - protein, 159 aa, Myceliophthora thermophilia
MRYHLSLAVLSLLGATSVATADRRPCGFKIAPCPTGEICQKVDPGCDRGENCQGYCVPAATPTTLVTKTTASPPEPTYQFCGGFANIQCENENHVCIDAPDDNCDPRNGGADCGGICVEPVFCGGIAGLQCPDGKRCIDDPRDRCDPKNGGADCGGICV

SEQ ID NO: 2019 - protein, 138 aa, Myceliophthora thermophilia
DRRPCGFKIAPCPTGEICQKVDPGCDRGENCQGYCVPAATPTTLVTKTTASPPEPTYQFCGGFANIQCENENHVCIDAPDDNCDPRNGGADCGGICVEPVFCGGIAGLQCPDGKRCIDDPRDRCDPKNGGADCGGICV

SEQ ID NO: 2020 - DNA, 1356 bp, Myceliophthora thermophilia
atgaccacgctggctgcatttgtggccttcgcctcttattattgcgttggacagcctggccagagcggccgcggcgcacttgccatgaggttactcaagacgatcctgctgtcgctcttgacgctggcgcaggttgcgctctgtgccgaggactactacaaggtcctgggtctcgacaagcatgccaccgagaggcagatcaagtccgcctacaggcaactaagcaagaaataccaccccgacaagaacccaaacgacccgacagcccacgaaaagttcgtgctcgtgtcggaagcctacgaggcgctgtcggaccccgagtcgcgccggatctacgaccagtacggctacgagggctaccagcagcgcaagcagcagcagggcggcggcgggcacgcgcacgaccccttcgacctcttcagccgcttcttcggcggcggcggccactttggcaaccagccgggccagcgccgcggccacgacgtcgaggtcaaggtcggcatctcgctgcgcgacttctacaacggccgcacgaccgagttccagtggaacaagcaggagatctgcgacgcctgcgagggcaccggcgccgccgaccgcgtcgtccacacctgccaggcctgcggcggccgcggcgtccgcaccgtccggcagcagctggcccccggcatggtgacgcaggtgcagatgcagtgcgacgcctgcggcggccgcggcaagagcatccgccaccgctgcaaggtctgcggcggcgagcgcgtcgtccgccgaccgactaccgtctcggtgacggtccagcccggcatggccgacggcgtccgcatcgcctacgagaacgaggccgacgcccacccggactacgtcgccggcgacctgatcgtcaccctgtacgagaaggagcccgagctcgagggcgagggcaacccggaccgcgtcgacggcgtcttcttccgccgccgcggcgacgacctcttctggcgcgaggtcctctccctgcgcgaggccctcatgggcgactggacccgcaacatcacccacctcgacggccacgtcgtcaggctcgggcgcaagcgcggccaggtcgtccagccgaaccacgtcgacaccatcgtgggcgagggaatgcccaagtggcacgagaacggcgacagcgtctaccacaagaccgagttcggaaacctctacgtcgagtacaccgtcgtgctgccggaccagatggagagcggcatggagaaggagctgtgggccctcttcgagaagtggcgggccaagaagggcgtcgacctgcacaaggacagcgggcggcccgacaaacctattatgcatgatgaggcgcatgaacatgaggagttataa

SEQ ID NO: 2021 - protein, 451 aa, Myceliophthora thermophilia
MTTLAAFVAFASYYCVGQPGQSGRGALAMRLLKTILLSLLTLAQVALCAEDYYKVLGLDKHATERQIKSAYRQLSKKYHPDKNPNDPTAHEKFVLVSEAYEALSDPESRRIYDQYGYEGYQQRKQQQGGGGHAHDPFDLFSRFFGGGGHFGNQPGQRRGHDVEVKVGISLRDFYNGRTTEFQWNKQEICDACEGTGAADRVVHTCQACGGRGVRTVRQQLAPGMVTQVQMQCDACGGRGKSIRHRCKVCGGERVVRRPTTVSVTVQPGMADGVRIAYENEADAHPDYVAGDLIVTLYEKEPELEGEGNPDRVDGVFFRRRGDDLFWREVLSLREALMGDWTRNITHLDGHVVRLGRKRGQVVQPNHVDTIVGEGMPKWHENGDSVYHKTEFGNLYVEYTVVLPDQMESGMEKELWALFEKWRAKKGVDLHKDSGRPDKPIMHDEAHEHEEL

SEQ ID NO: 2022 - protein, 403 aa, Myceliophthora thermophilia
AEDYYKVLGLDKHATERQIKSAYRQLSKKYHPDKNPNDPTAHEKFVLVSEAYEALSDPESRRIYDQYGYEGYQQRKQQQGGGGHAHDPFDLFSRFFGGGGHFGNQPGQRRGHDVEVKVGISLRDFYNGRTTEFQWNKQEICDACEGTGAADRVVHTCQACGGRGVRTVRQQLAPGMVTQVQMQCDACGGRGKSIRHRCKVCGGERVVRRPTTVSVTVQPGMADGVRIAYENEADAHPDYVAGDLIVTLYEKEPELEGEGNPDRVDGVFFRRRGDDLFWREVLSLREALMGDWTRNITHLDGHVVRLGRKRGQVVQPNHVDTIVGEGMPKWHENGDSVYHKTEFGNLYVEYTVVLPDQMESGMEKELWALFEKWRAKKGVDLHKDSGRPDKPIMHDEAHEHEEL

SEQ ID NO: 2023 - DNA, 987 bp, Myceliophthora thermophilia
atgttgctgtgcccaagggctgtgaccgctgcgctggcgactgcgtcggctgcgtcgacgctcatcctaccagtggcagcagcctcttcaaagcgtggtctcgtcttcaccccgaacgtgacagccccggccgatgacaagatctggatcgaggagccgaccaccttgacgtggtactacaactacgggcccaatcccgagtccgtgtaccaagatgtgccacagtccgaattcgagtttgtacccatgatgtggggtgccccggacagtctcgacgacacttcattcctatcgaccgtgaagagcctgatcaagagcaagggcataaacatcactaacgtgctctccttcaacgagcccgacggctcttttgaatacggagggagccagattgagccctccacagccgcgcagctctgggtcaacaacatgatcccgctccaggagatgggcgtgcgcgtcgggctcccggcgtgcaccggggggtctagtggccttccttggctgcagaatttccttgccgagtgctccgagctgatcagctcgaaagacaagcagcggaactgcacatttgactttgtaacgatccactggtacggcaactttgaaggcctggcgagccatatgggggagtattcggccgcattccccaacaagaccatgtggatcaccgaattcaacctgaacgaccgggacctggaagccacccagtcgttctacaacatgtcgaccgagtactttgaccgcctcgactttgtcgagcgctactcgtattttggagccttccgcagcaacgtgtccaacattggccccaacggcgccatgctgagcgacaacggcagccttaccgacattggcgcttggtacctcggccgccagccgacaggcatattgcccaccagctcgtcatccctgcatttgcctcttccgcagaaagtcgttgcagtgttcgccgctgtggttgcggctgccatttcattagcttga

SEQ ID NO: 2024 - protein, 328 aa, Myceliophthora thermophilia
MLLCPRAVTAALATASAASTLILPVAAASSKRGLVFTPNVTAPADDKIWIEEPTTLTWYYNYGPNPESVYQDVPQSEFEFVPMMWGAPDSLDDTSFLSTVKSLIKSKGINITNVLSFNEPDGSFEYGGSQIEPSTAAQLWVNNMIPLQEMGVRVGLPACTGGSSGLPWLQNFLAECSELISSKDKQRNCTFDFVTIHWYGNFEGLASHMGEYSAAFPNKTMWITEFNLNDRDLEATQSFYNMSTEYFDRLDFVERYSYFGAFRSNVSNIGPNGAMLSDNGSLTDIGAWYLGRQPTGILPTSSSSLHLPLPQKVVAVFAAVVAAAISLA

SEQ ID NO: 2025 - protein, 301 aa, Myceliophthora thermophilia
ASSKRGLVFTPNVTAPADDKIWIEEPTTLTWYYNYGPNPESVYQDVPQSEFEFVPMMWGAPDSLDDTSFLSTVKSLIKSKGINITNVLSFNEPDGSFEYGGSQIEPSTAAQLWVNNMIPLQEMGVRVGLPACTGGSSGLPWLQNFLAECSELISSKDKQRNCTFDFVTIHWYGNFEGLASHMGEYSAAFPNKTMWITEFNLNDRDLEATQSFYNMSTEYFDRLDFVERYSYFGAFRSNVSNIGPNGAMLSDNGSLTDIGAWYLGRQPTGILPTSSSSLHLPLPQKVVAVFAAVVAAAISLA

SEQ ID NO: 2026 - DNA, 471 bp, Myceliophthora thermophilia
atggtcgtctgccagctcctcctcgtgtccctcaagcccggcatttccgtccccgccttcctccggaccctctcccgggccggcgcgacgtcggccggccacctgctcgccttccgcccgggcaagaaggagcagtacaagcagtacggcgccgagttcgcccggcgggtgggctcgcttcacggcggccgcgtcaagctcgtcgggcgggtgctcgcccacggccccgggcgtcggcgatggcggcgacggatccggggaggaggaggaggaggacggcggctgggacgagatcgcctaattacgtgcactacccgaccatccggcacttgcgaggactaccaggaggccaataggcggtacaggctcggcgccctcggggataccttcgtcttttgttgtcaagagatggacggcgacggcgagcttgccgccgccgccgcaattgcgaagcccggaagcagtaattaa

SEQ ID NO: 2027 - protein, 156 aa, Myceliophthora thermophilia
MVVCQLLLVSLKPGISVPAFLRTLSRAGATSAGHLLAFRPGKKEQYKQYGAEFARRVGSLHGGRVKLVGRVLAHGPGRRRWRRRIRGGGGGGRRLGRDRLITCTTRPSGTCEDYQEANRRYRLGALGDTFVFCCQEMDGDGELAAAAAIAKPGSSN

SEQ ID NO: 2028 - protein, 140 aa, Myceliophthora thermophilia
VPAFLRTLSRAGATSAGHLLAFRPGKKEQYKQYGAEFARRVGSLHGGRVKLVGRVLAHGPGRRRWRRRIRGGGGGGRRLGRDRLITCTTRPSGTCEDYQEANRRYRLGALGDTFVFCCQEMDGDGELAAAAAIAKPGSSN

SEQ ID NO: 2029 - DNA, 465 bp, Myceliophthora thermophilia
atgcttgggtcgtcttcgttagttctgttcctccttttcagaacgccgcttcgctacgaggccttattcccgtccttatatgccctggcccctggccaaggagcctgcttctctgctttctcccctttccccccacccccggccggccgccggccgctcgtcgtcggtatttgcaaatcctccccagatcgagaaggtttccggtccatggccccgacttactctccttggcaagacctggcattcccggattccagccagggttacaccgtcctgggtttcgggagcgctctgccgccttggcccggccggctaaaatgcagcggcgaccactcaggcgccacgccgatattgttgacgattccaaacacatcgacggcatttggctccgccgcccagctggccatgcccagtggcccgcggtccagtcaaacgactcctgcgggcgccgtgtggagtgcatga

SEQ ID NO: 2030 - protein, 154 aa, Myceliophthora thermophilia
MLGSSSLVLFLLFRTPLRYEALFPSLYALAPGQGACFSAFSPFPPPPAGRRPLVVGICKSSPDREGFRSMAPTYSPWQDLAFPDSSQGYTVLGFGSALPPWPGRLKCSGDHSGATPILLTIPNTSTAFGSAAQLAMPSGPRSSQTTPAGAVWSA

SEQ ID NO: 2031 - protein, 133 aa, Myceliophthora thermophilia
LFPSLYALAPGQGACFSAFSPFPPPPAGRRPLVVGICKSSPDREGFRSMAPTYSPWQDLAFPDSSQGYTVLGFGSALPPWPGRLKCSGDHSGATPILLTIPNTSTAFGSAAQLAMPSGPRSSQTTPAGAVWSA

SEQ ID NO: 2032 - DNA, 306 bp, Myceliophthora thermophilia
atggtcgtcatggcagtggttacgggcttctttagcggtgttgtcattgcgttgcccccactctgcttccgggtgctgaccgagaacaaggccatgattggcacccgcaccggccagggctttgccatcggcgggctgggcttgctgctcgctgggccgagtgctggtgcaattctcgggaccgtcgagccgcggaactggacgggcctctgggtgtatggaggcgtgacgctgtgtgccgtcggcctaatcctgtttggtctgcggtttatgaaatcagggctcgccttgatggtcaagtgttga

SEQ ID NO: 2033 - protein, 101 aa, Myceliophthora thermophilia
MVVMAVVTGFFSGVVIALPPLCFRVLTENKAMIGTRTGQGFAIGGLGLLLAGPSAGAILGTVEPRNWTGLWVYGGVTLCAVGLILFGLRFMKSGLALMVKC

SEQ ID NO: 2034 - protein, 84 aa, Myceliophthora thermophilia
LPPLCFRVLTENKAMIGTRTGQGFAIGGLGLLLAGPSAGAILGTVEPRNWTGLWVYGGVTLCAVGLILFGLRFMKSGLALMVKC

SEQ ID NO: 2035 - DNA, 807 bp, Myceliophthora thermophilia
atggcaccccttttctcctggcgccaggccatcgtggccgctctcttcgtcaccgggcaggctgccccccttctccaggcaaggcagcacgtccgcaagtcggaccagactcagaccgtggattctgcggctcttcagactcttctgcagggactcgtggccggcataggggcgggggcgggagcttcccctgctgtcacggtccctgacatcaagtccacccaaggcgtgctcgcaccgccggttctcccctctcgcggccacgacaatgatggcactagcggcattagcaagagggccgacactgccgagtccggcgaaagcaagctcccagaggggttgctcgaaaagatcaacaaggacggcatcaccgtaaaaggtgtcgtggacggcacggtcaacttcgtcaagcccctcatcaccagccaacagagcaccgacggaaccaacgacgacaacgtggacctggcggatatcgtcggtcttctcaccggcaacgaaaactccgcagagaaagttgagaacggtttcgaagggcgtgagagctcccttgatgagttgttcggcgagaaagaaggcgacaacgaaagtggcaacgacgaagaaggcaacgacgaaatcggcaacgacgaaatcggcaacgacgaagaaggcgacgacgaaatcggcatgagcagcagcagcaagagcaaggtcaaacgcaaggttgttgcgcgagctgaagaagaagaggacccgaccttgatggaggtcctcctcaagctccttggtgttcccaacagcgaggaggaaagtggcgccaactga

SEQ ID NO: 2036 - protein, 268 aa, Myceliophthora thermophilia
MAPLFSWRQAIVAALFVTGQAAPLLQARQHVRKSDQTQTVDSAALQTLLQGLVAGIGAGAGASPAVTVPDIKSTQGVLAPPVLPSRGHDNDGTSGISKRADTAESGESKLPEGLLEKINKDGITVKGVVDGTVNFVKPLITSQQSTDGTNDDNVDLADIVGLLTGNENSAEKVENGFEGRESSLDELFGEKEGDNESGNDEEGNDEIGNDEIGNDEEGDDEIGMSSSSKSKVKRKVVARAEEEEDPTLMEVLLKLLGVPNSEEESGAN

SEQ ID NO: 2037 - protein, 247 aa, Myceliophthora thermophilia
APLLQARQHVRKSDQTQTVDSAALQTLLQGLVAGIGAGAGASPAVTVPDIKSTQGVLAPPVLPSRGHDNDGTSGISKRADTAESGESKLPEGLLEKINKDGITVKGVVDGTVNFVKPLITSQQSTDGTNDDNVDLADIVGLLTGNENSAEKVENGFEGRESSLDELFGEKEGDNESGNDEEGNDEIGNDEIGNDEEGDDEIGMSSSSKSKVKRKVVARAEEEEDPTLMEVLLKLLGVPNSEEESGAN

SEQ ID NO: 2038 - DNA, 528 bp, Myceliophthora thermophilia
atgatgcgcagtttggctgccttcctcctggcgctcaccgcgctcctccccacgccgacggcagcctcggggtcaccgggcttcaccggccacggccagctccgcgccctccacaacaccggcgaccatgaggacctcggctgcttgactagcgagggaaaatggacggtcgaggagccgctgtgtggtgtcttcgccgccgaccggatcgacgactaccagttccgactccggagcatcgaggcaggcgaatgcggcatcgatgtcgcgacgttcaagtgcggcggcggtgtgaaggcagccggtttcgggacatgggggacaccgggaccggtcccaggctatgacgtcctgcgctactcccagtacggcgtgctcgctaccaatgctccggacagcccgccggcgccgggcgaagagccgcttgccattcacttctatagcggcagcgagaagggcaagtggatctggctggggtggaaggccttgtcagacgacgaggctgccgacgacgctggtgagaactga

SEQ ID NO: 2039 - protein, 175 aa, Myceliophthora thermophilia
MMRSLAAFLLALTALLPTPTAASGSPGFTGHGQLRALHNTGDHEDLGCLTSEGKWTVEEPLCGVFAADRIDDYQFRLRSIEAGECGIDVATFKCGGGVKAAGFGTWGTPGPVPGYDVLRYSQYGVLATNAPDSPPAPGEEPLAIHFYSGSEKGKWIWLGWKALSDDEAADDAGEN

SEQ ID NO: 2040 - protein, 153 aa, Myceliophthora thermophilia
SGSPGFTGHGQLRALHNTGDHEDLGCLTSEGKWTVEEPLCGVFAADRIDDYQFRLRSIEAGECGIDVATFKCGGGVKAAGFGTWGTPGPVPGYDVLRYSQYGVLATNAPDSPPAPGEEPLAIHFYSGSEKGKWIWLGWKALSDDEAADDAGEN

SEQ ID NO: 2041 - DNA, 837 bp, Myceliophthora thermophilia
atgcacctctcctcctgggggctatggcccttcctggcctcgctggtctaccttggcgctgttgccgaccctgctggtgtactagaagtcgacctggtcttcccacgcaacgagacatacgcgcccacaccctatatgccgatcgtgtttggtttccgaaacggcgagcttgctcggcgtctcaatccagagattctcgtcacaatgcgcaactcgacagccctcggggacatcagcagttacattgagactccagtgactgtgaactggactagcaacgagcccaacttcgtgtacaccgtctttcagaacgagttcgcgatcgaggggacgtggtggatcgcatgggatgtgtggtggacaacttgtaaggtggaggatgatgggcttatccacggcgatatcacgcgaaatcactccagccggttgtccgacttcgtcatcaagaagggcgggaaagcagtcgacttggtggctataacagccaacgacaagacctgtcctgagacactggggatcaccatcaacgttaccgacacgaccgcacccattagtttcgcaaaccagccagtcccattacgcgtctcctatccacgattggaaacgtgcgcgttggtagcatcctctaccccgaccgcgaacccctgcttggtccggatcgactctaccgctgctgcagccatctctgcgtcggcgaaatcctggcaatgcatcttggatcggacaccggactgcccagacagatggaagaagaataccgcccagcagctggctgttgcgggggcggcgtcttttgcagctgcgctcggagcgtttgggtttcttcttctagcatga

SEQ ID NO: 2042 - protein, 278 aa, Myceliophthora thermophilia
MHLSSWGLWPFLASLVYLGAVADPAGVLEVDLVFPRNETYAPTPYMPIVFGFRNGELARRLNPEILVTMRNSTALGDISSYIETPVTVNWTSNEPNFVYTVFQNEFAIEGTWWIAWDVWWTTCKVEDDGLIHGDITRNHSSRLSDFVIKKGGKAVDLVAITANDKTCPETLGITINVTDTTAPISFANQPVPLRVSYPRLETCALVASSTPTANPCLVRIDSTAAAAISASAKSWQCILDRTPDCPDRWKKNTAQQLAVAGAASFAAALGAFGFLLLA

SEQ ID NO: 2043 - protein, 256 aa, Myceliophthora thermophilia
DPAGVLEVDLVFPRNETYAPTPYMPIVFGFRNGELARRLNPEILVTMRNSTALGDISSYIETPVTVNWTSNEPNFVYTVFQNEFAIEGTWWIAWDVWWTTCKVEDDGLIHGDITRNHSSRLSDFVIKKGGKAVDLVAITANDKTCPETLGITINVTDTTAPISFANQPVPLRVSYPRLETCALVASSTPTANPCLVRIDSTAAAAISASAKSWQCILDRTPDCPDRWKKNTAQQLAVAGAASFAAALGAFGFLLLA

SEQ ID NO: 2044 - DNA, 462 bp, Myceliophthora thermophilia
atgcgttccgctgctttcttcctcgccctcgcctccctggctctggcccaggataccactacccttactggtgttgagaccaccgtcactgagaccaccctcactgccaccagcacctctggcggggcatcggcatcgtccctctcgagctccatcagctccgccctgagctccatcaactcggaggcgtcgtcccgcgtcagctcgatcacgagcggcgccggcagcgccatcgagtccctgtcgtcggagctcgctaccgccaccgggtcggcggcctcgtccctcagctcccggatcgagagtctcaccagctccgtcggctccgccgtcagctcggtcacctcgagcgccgccgccgagaccagctcggtgacgacgaccaacgccggaccgatgcagaccgccgccgtgggcatgggcgccctgtttggcggcgccgccgtcctggccaacctgtga

SEQ ID NO: 2045 - protein, 153 aa, Myceliophthora thermophilia
MRSAAFFLALASLALAQDTTTLTGVETTVTETTLTATSTSGGASASSLSSSISSALSSINSEASSRVSSITSGAGSAIESLSSELATATGSAASSLSSRIESLTSSVGSAVSSVTSSAAAETSSVTTTNAGPMQTAAVGMGALFGGAAVLANL

SEQ ID NO: 2046 - protein, 137 aa, Myceliophthora thermophilia
QDTTTLTGVETTVTETTLTATSTSGGASASSLSSSISSALSSINSEASSRVSSITSGAGSAIESLSSELATATGSAASSLSSRIESLTSSVGSAVSSVTSSAAAETSSVTTTNAGPMQTAAVGMGALFGGAAVLANL

SEQ ID NO: 2047 - DNA, 717 bp, Artificial Sequence
  Synthetic polynucleotide
  misc_feature (349)..(477): n is a, c, g, or t
atgaagaacaccgccgtattcgtactcctcggccacgcggcacttgctcaggccgaagcctggtgggaaggtgctccagagtgtgcttatgactgcttcaactcgtggtggtcctccgccatcgcctggccggctcccaccagttactgctccgcaaaccagggagcctccgtatccaactgcctcaggacggcctgctcggccaccccgacagccgtgacctcgtacagctcgctgtccgcgtcactgtgctccaggtggtcatcgtgtagctctgccggctccacgggcgtgtacaccatcacaacgccaggaatcccactctttgcccttccacaccaccacacannnnnnnnnnnnnnnnnnnnnnnnnnnnnnnnnnnnnnnnnnnnnnnnnnnnnnnnnnnnnnnnnnnnnnnnnnnnnnnnnnnnnnnnnnnnnnnnnnnnnnnnnnnnnnnnnnnnnnnnnnnnnnnnnggcgtcggcccgggcctggtcgccctggccgtcagcggagacgtgacgagcaccagcgtcgtcggggcggccgagacgaccggcaccggcaccgctggcaacagccccagtgctaccggcggcagcggcggtggctcggttccggacgcggccgctgccttggctggggatggcgctctcggggtcaaggttgccggggccgttctgggcggcgtcattgctgtggctgccctgctttaa

SEQ ID NO: 2048 - protein, 238 aa, Artificial Sequence
  Synthetic polypeptide
  misc_feature (117)..(159): Xaa can be any naturally occurring amino acid
MKNTAVFVLLGHAALAQAEAWWEGAPECAYDCFNSWWSSAIAWPAPTSYCSANQGASVSNCLRTACSATPTAVTSYSSLSASLCSRWSSCSSAGSTGVYTITTPGIPLFALPHHHTXXXXXXXXXXXXXXXXXXXXXXXXXXXXXXXXXXXXXXXXXXXGVGPGLVALAVSGDVTSTSVVGAAETTGTGTAGNSPSATGGSGGGSVPDAAAALAGDGALGVKVAGAVLGGVIAVAALL

SEQ ID NO: 2049 - protein, 220 aa, Artificial Sequence
  Synthetic polypeptide
  misc_feature (99)..(141): Xaa can be any naturally occurring amino acid
EAWWEGAPECAYDCFNSWWSSAIAWPAPTSYCSANQGASVSNCLRTACSATPTAVTSYSSLSASLCSRWSSCSSAGSTGVYTITTPGIPLFALPHHHTXXXXXXXXXXXXXXXXXXXXXXXXXXXXXXXXXXXXXXXXXXXGVGPGLVALAVSGDVTSTSVVGAAETTGTGTAGNSPSATGGSGGGSVPDAAAALAGDGALGVKVAGAVLGGVIAVAALL

SEQ ID NO: 2050 - DNA, 3174 bp, Myceliophthora thermophilia
atggcgaagaaggcgcgccagaggattagctatggttggttgtctcttttcactgccttcccttctattggtctcgaaaccccgcacacggcgctgcgcgtcgacggatcgcgtctctgggatccctcggcgaaagagacacctctcgatttccggaacccgtcgttgacgtgctctttcgttccagtccttgaagcgcccaactcctcgccaggcggtcaccgcttgggggtgaatggcttggccatcgaccgcgacaatgctattctctactctggcggccgcgacggtgtcatctgcgcatgggatgtgaaccgaaacgcggctacctctcccaacggccactccgccgtcgttgatgccgccccggccaacggcaggccaaagtccatcacccggttccgcgcgcagacccacgcgcacacccattggatcaatgacatcaccctcgctcagcagcacagcgcgctggtgtcggcctcctcggatctcctggtcaaggtctggcgccccctggccagcgacattcaggagccagtcaccatcggccagcacgccgactacgttaagtgcgtcgcaacgccaagccagtccaccaactgggttgcctcgggaggtcttgatcggaagatctacctatgggacctatcaggagccggcaagaccctcgagatcgatgtccagggcgaagaggtgccgcagaagggcagtgtatacgcgctgggcgtcacccatgacatcctcgccaacggcggccccgagagcatcgtgcggttgtgggatccaaggtcgggtcagcgcattaccaagttcgtcggccacacggacatgatccgcgccatcctgatcagcgagtcgggggacatggttttgtcggcaagctcggaccaaaccgtcaaggtctggagcgtcacggccggtcgttgcatgcacaccctcaccatgcacgaccagagcgtgtgggccctgttctcggacgacccggggcttaacgtcttctacagcagtgatcggtcggggctggtggtcaagacggacgtccgcgagacccacggtgacttggacaacggcttgtccctggccgtcgctaaggagcacgacggtgtcagcaagattgtggcctgggacgacagcatctggactgcgaccgccacggcctcgatcaaccggtggaaggacgtcgacaccggcggtagcatccggcttcccgaggcttacaagcagcaccgagcgtctatggtgacggtgcggagcaaggactcggcggtaccggctgcctgggagagcgactctgccggaccgacgatctctgccaagtccatccttcgcatatcgaacacggcgtcgttcccactcgtcattggccgcgacggcgacaactcatcctcgggcttcactcgcaaaggttcggagctctccgagcaggtggctagcattgtagagcccatctatcatttgcccgaggagaccatcgaggggcactttggcttggtcaagcacaaattactaaacgataggaggcgcgttctgactttggataccgcgggtgatgtcttgatgtgggacctgattcaatgccgacccataaagagttttgggaagcgcaatctcgaagacgtggaaccagaagtgaatacccgggaggcggtggcgccgtggtgttcgatcgacatcagctcgggaaacctgacagtcgtgctcgagccatacaactgtttcgacgccgagatgtatgccgatgagctggtgttggacgagccggttgagttccgagaagaccaaaggataaacctcgggaagtgggtgcttagatatctttttgctgagcttatagacgaggagatacggcgtgacgaagccttcaggcagaagttgaaccagggagcgacgacaaagaggaacgtaggtggcagagcagcgaggccactggcaatatccataccctctgaacctggctggggaccggccgacccgtcttcggccacaccccgacccagtggatcgcagtaccctcccatgacaccaggatttggaataggactggcaactcccggctctccggtgccgccagcgctcgagggactcacgacgcccctcagtccgattgtcgacaggcgcttctctcaagtcagccggccgtcgcaagagagggaagactacttttcagacgcaatacaaagccctgacggagctcccaagccggctcagacccccgccgctgaagttcctcctgtggaggacaagtcgaccaagacggctggcgaaactgctggcaaggagagcgaagccaaggataaggacaaggataaagacaaggagaacggaaagtcacccggcactatgtttggcaaaaagttccgcatgggaatgtcctttggctctaaaaagctgggacggtccatgtcgacggcggccgccgagaagcccgcggtgctggacgaaaaggcggaggagtcggagtcgtcttcgaacaacgagaaggaggaatttgacgacagcttcctgggtgtgatccaacggatccgtagcgaatatgagaaacaaatggcggagaaccccgaccagccggtcgagaccaagatcactccgagccttgccaacgacacccccgtactcaaactgcctcccgccaccaaggttatcatccaagaagagacctcggggggctcggccgagatgtaccgcggtacggtggcgtcggtgggcgccgatgccagcgtcatcgaggagcgggcaccgcagtggctgggcgatgtgctcctcctcaacgtcctgccgcctaaggacccggtcaagatctcgttcgtgctgtatccgtggaaggacacgctgccgcccatcgcgtcggccgacggtaacaaccggctgaacgcgaaccgcatgctgcgcgtcaagaagattctggcgtacgtcgccgagcgcatcgaccccgtccgcgagggcgaggactcggggccggacgcgctgaagccggaggagtatctggaactgtattgcaatgatcagttgctcccaatcaaaatgactcttgctacccttcgaacccatatctggagaggcggcaacgacattgttctccactacaaggcgaacggcaggaaggagatccccatgccgccgcccgcggaggcaaaggaggcggaagggcccgaagcggttccaggagctgcgtag

SEQ ID NO: 2051 - protein, 1057 aa, Myceliophthora thermophilia
MAKKARQRISYGWLSLFTAFPSIGLETPHTALRVDGSRLWDPSAKETPLDFRNPSLTCSFVPVLEAPNSSPGGHRLGVNGLAIDRDNAILYSGGRDGVICAWDVNRNAATSPNGHSAVVDAAPANGRPKSITRFRAQTHAHTHWINDITLAQQHSALVSASSDLLVKVWRPLASDIQEPVTIGQHADYVKCVATPSQSTNWVASGGLDRKIYLWDLSGAGKTLEIDVQGEEVPQKGSVYALGVTHDILANGGPESIVRLWDPRSGQRITKFVGHTDMIRAILISESGDMVLSASSDQTVKVWSVTAGRCMHTLTMHDQSVWALFSDDPGLNVFYSSDRSGLVVKTDVRETHGDLDNGLSLAVAKEHDGVSKIVAWDDSIWTATATASINRWKDVDTGGSIRLPEAYKQHRASMVTVRSKDSAVPAAWESDSAGPTISAKSILRISNTASFPLVIGRDGDNSSSGFTRKGSELSEQVASIVEPIYHLPEETIEGHFGLVKHKLLNDRRRVLTLDTAGDVLMWDLIQCRPIKSFGKRNLEDVEPEVNTREAVAPWCSIDISSGNLTVVLEPYNCFDAEMYADELVLDEPVEFREDQRINLGKWVLRYLFAELIDEEIRRDEAFRQKLNQGATTKRNVGGRAARPLAISIPSEPGWGPADPSSATPRPSGSQYPPMTPGFGIGLATPGSPVPPALEGLTTPLSPIVDRRFSQVSRPSQEREDYFSDAIQSPDGAPKPAQTPAAEVPPVEDKSTKTAGETAGKESEAKDKDKDKDKENGKSPGTMFGKKFRMGMSFGSKKLGRSMSTAAAEKPAVLDEKAEESESSSNNEKEEFDDSFLGVIQRIRSEYEKQMAENPDQPVETKITPSLANDTPVLKLPPATKVIIQEETSGGSAEMYRGTVASVGADASVIEERAPQWLGDVLLLNVLPPKDPVKISFVLYPWKDTLPPIASADGNNRLNANRMLRVKKILAYVAERIDPVREGEDSGPDALKPEEYLELYCNDQLLPIKMTLATLRTHIWRGGNDIVLHYKANGRKEIPMPPPAEAKEAEGPEAVPGAA

SEQ ID NO: 2052 - protein, 1033 aa, Myceliophthora thermophilia
LETPHTALRVDGSRLWDPSAKETPLDFRNPSLTCSFVPVLEAPNSSPGGHRLGVNGLAIDRDNAILYSGGRDGVICAWDVNRNAATSPNGHSAVVDAAPANGRPKSITRFRAQTHAHTHWINDITLAQQHSALVSASSDLLVKVWRPLASDIQEPVTIGQHADYVKCVATPSQSTNWVASGGLDRKIYLWDLSGAGKTLEIDVQGEEVPQKGSVYALGVTHDILANGGPESIVRLWDPRSGQRITKFVGHTDMIRAILISESGDMVLSASSDQTVKVWSVTAGRCMHTLTMHDQSVWALFSDDPGLNVFYSSDRSGLVVKTDVRETHGDLDNGLSLAVAKEHDGVSKIVAWDDSIWTATATASINRWKDVDTGGSIRLPEAYKQHRASMVTVRSKDSAVPAAWESDSAGPTISAKSILRISNTASFPLVIGRDGDNSSSGFTRKGSELSEQVASIVEPIYHLPEETIEGHFGLVKHKLLNDRRRVLTLDTAGDVLMWDLIQCRPIKSFGKRNLEDVEPEVNTREAVAPWCSIDISSGNLTVVLEPYNCFDAEMYADELVLDEPVEFREDQRINLGKWVLRYLFAELIDEEIRRDEAFRQKLNQGATTKRNVGGRAARPLAISIPSEPGWGPADPSSATPRPSGSQYPPMTPGFGIGLATPGSPVPPALEGLTTPLSPIVDRRFSQVSRPSQEREDYFSDAIQSPDGAPKPAQTPAAEVPPVEDKSTKTAGETAGKESEAKDKDKDKDKENGKSPGTMFGKKFRMGMSFGSKKLGRSMSTAAAEKPAVLDEKAEESESSSNNEKEEFDDSFLGVIQRIRSEYEKQMAENPDQPVETKITPSLANDTPVLKLPPATKVIIQEETSGGSAEMYRGTVASVGADASVIEERAPQWLGDVLLLNVLPPKDPVKISFVLYPWKDTLPPIASADGNNRLNANRMLRVKKILAYVAERIDPVREGEDSGPDALKPEEYLELYCNDQLLPIKMTLATLRTHIWRGGNDIVLHYKANGRKEIPMPPPAEAKEAEGPEAVPGAA

SEQ ID NO: 2053 - DNA, 1248 bp, Myceliophthora thermophilia
atgcctggactgatacctttgatgctcgcctcgggctctcggacgtgtagcgcgggcccaactcagtctttccttcgacgccagtcaacgggttactcgcccggctcaacgagcccaacgacgccaattaccccaacggtacctacggtacctacgtacgctgtgaggctgaacccgcacaaacgctcgtcacttcccgccccagcgccagctccagtgataccctgtacgaaggcagaatggaagaagacgatcgccgaagtcaagaggatgtattttggcaagcggtaccgggcatgctcggcgaggtgtctcgaggtccttgagagcattaaggatacgtcccaggtcgagcccgtatatctcatctacctccatttctacgcggccacgtctttggagatctgcgcccgtccgcttccatccactgccgcgttccgggccacgctcctgcagcaggcctacacccacttcgaccgggcctcggcgctgatcaatgccgccgaggagtctcttctgcgaaagtttcgccccggctccgtcggctcaacacgctcctccagctgccattcgccctccggctcgatcagctcgcgagcatggacccccgacacctgcattacgtcgccaaccaactccgtcttttccttccacgatcccgatcgcagatcctctcattcactccacgggcacggcaagaaagtatccttctctttctccgagaatacgccccttcatgccggcccagcagagcccatcatccgtccggattcgcccacgctcggcttcgaagacgctttctaccaccagcccggcgtatcagcagcagcagaagcatccccgccagatctccggccaatcaagttccaagaggagattgagctgcccctgccgacagtgccagagcacgaacaagaagaggaacgagaagagggagacgagagcgcttaccacgtagcccgcgccgtcgaccgttgctgcgagcacctctccaccctgcgcacacagctggcgcggcattcggccagcctcgcacagctcttggctcagcagcctacgccatcccctgatgcctcttccccctcggcaactacgacgacacaaaggggctgcaatgacaggaaccaagaccgccaggccaggatcgagcggctgcgcaagagcgggtggcagcgcgagcggttcgacccgaccaagtacgaagagttgtgcgataccgtcttggccgagttgtcaggacaggattaa

SEQ ID NO: 2054 - protein, 415 aa, Myceliophthora thermophilia
MPGLIPLMLASGSRTCSAGPTQSFLRRQSTGYSPGSTSPTTPITPTVPTVPTYAVRLNPHKRSSLPAPAPAPVIPCTKAEWKKTIAEVKRMYFGKRYRACSARCLEVLESIKDTSQVEPVYLIYLHFYAATSLEICARPLPSTAAFRATLLQQAYTHFDRASALINAAEESLLRKFRPGSVGSTRSSSCHSPSGSISSRAWTPDTCITSPTNSVFSFHDPDRRSSHSLHGHGKKVSFSFSENTPLHAGPAEPIIRPDSPTLGFEDAFYHQPGVSAAAEASPPDLRPIKFQEEIELPLPTVPEHEQEEEREEGDESAYHVARAVDRCCEHLSTLRTQLARHSASLAQLLAQQPTPSPDASSPSATTTTQRGCNDRNQDRQARIERLRKSGWQRERFDPTKYEELCDTVLAELSGQD

SEQ ID NO: 2055 - protein, 397 aa, Myceliophthora thermophilia
GPTQSFLRRQSTGYSPGSTSPTTPITPTVPTVPTYAVRLNPHKRSSLPAPAPAPVIPCTKAEWKKTIAEVKRMYFGKRYRACSARCLEVLESIKDTSQVEPVYLIYLHFYAATSLEICARPLPSTAAFRATLLQQAYTHFDRASALINAAEESLLRKFRPGSVGSTRSSSCHSPSGSISSRAWTPDTCITSPTNSVFSFHDPDRRSSHSLHGHGKKVSFSFSENTPLHAGPAEPIIRPDSPTLGFEDAFYHQPGVSAAAEASPPDLRPIKFQEEIELPLPTVPEHEQEEEREEGDESAYHVARAVDRCCEHLSTLRTQLARHSASLAQLLAQQPTPSPDASSPSATTTTQRGCNDRNQDRQARIERLRKSGWQRERFDPTKYEELCDTVLAELSGQD

SEQ ID NO: 2056 - DNA, 834 bp, Myceliophthora thermophilia
atgaggggtgaacggtttgtaacactgctctcactggcggtttctgccagagcccagtttgacagcctggacccctgcggacaaacatgtgttggcaataccaataatctggcgggccagtttggctgcgcggccatggatttcagctgtctctgtggcgttccggactggagcaactctatcagagactgcgcagagggtgcttgccctcccggctatgcgccgactgtggtcagcgcagcctccgccgtgtgtgccacggccaccctcccccctggggcttccatcccgacgtctcagacgagcacgtcgtcggagacgccttcgccaaccgccaaggcgtcgaccgagtcgtccgagaagagctcaagcacaactaaaacctcgaccaagtcggagacctcggcaacgtcgacaacttcgacgacgatgacaagctcgacaacgtctgcgacgccagcaagctcaacggctgagccgaccaaaactgtcagcagttcgacaactgcctcatcgactcccggagcagcaacgtctgaagcggccaagggctcggcctcgaccgggattagtgaggctggaaagattggcataggcatcggcgtggctgccgtcgtgattgccctcgccgcggtggctgcctgcttcatgctgcgcaagcgacaggcgacgcagccacccaagttcaagatctcgcatcccatgcccagcaacgagtacgcctacacgaacaacaatcactcagacaacgactttggatccagcgaactggagatgaagagtcgacgatacgaagacatgcttccgcgcacagagccacggcagatggtctag

SEQ ID NO: 2057 - protein, 277 aa, Myceliophthora thermophilia
MRGERFVTLLSLAVSARAQFDSLDPCGQTCVGNTNNLAGQFGCAAMDFSCLCGVPDWSNSIRDCAEGACPPGYAPTVVSAASAVCATATLPPGASIPTSQTSTSSETPSPTAKASTESSEKSSSTTKTSTKSETSATSTTSTTMTSSTTSATPASSTAEPTKTVSSSTTASSTPGAATSEAAKGSASTGISEAGKIGIGIGVAAVVIALAAVAACFMLRKRQATQPPKFKISHPMPSNEYAYTNNNHSDNDFGSSELEMKSRRYEDMLPRTEPRQMV

SEQ ID NO: 2058 - protein, 259 aa, Myceliophthora thermophilia
QFDSLDPCGQTCVGNTNNLAGQFGCAAMDFSCLCGVPDWSNSIRDCAEGACPPGYAPTVVSAASAVCATATLPPGASIPTSQTSTSSETPSPTAKASTESSEKSSSTTKTSTKSETSATSTTSTTMTSSTTSATPASSTAEPTKTVSSSTTASSTPGAATSEAAKGSASTGISEAGKIGIGIGVAAVVIALAAVAACFMLRKRQATQPPKFKISHPMPSNEYAYTNNNHSDNDFGSSELEMKSRRYEDMLPRTEPRQMV

SEQ ID NO: 2059 - DNA, 558 bp, Myceliophthora thermophilia
atgaagttgcccgctcttctcttcctcaccacggtggcgcagctcggcgccgggcatgacgacctcaccgagccggctgttagacggcgcgaagccctcaacatcggccatgacgcctcaccaatcgacacggctgtgctcccccagtcgccgaacgaaggatgcacgacgaccgtatcgacgacgtacggctatccttgctcttgggacggcaccaccaccgtgtacacgtccacgaccgtcttgtataagcagatcaactgcaacgggtgcgacagtgtgagcgtctacgaggaatggtactattgtcccaaccagcccgtcaccgcgacactcaacgcggggttccctactacttcttggagcacgatatgccagccatctcccgctctccccgatcgggcccagacaaacacgcctgcaaccacgacggcccttggtctcggcgctctgcagaccgtgcgttcaccccccagctttccgacgggaaatccgttcccgactcccaccattgagccgggacccagacgcgcccgccgccgagcgggtgacttctaa

SEQ ID NO: 2060 - protein, 185 aa, Myceliophthora thermophilia
MKLPALLFLTTVAQLGAGHDDLTEPAVRRREALNIGHDASPIDTAVLPQSPNEGCTTTVSTTYGYPCSWDGTTTVYTSTTVLYKQINCNGCDSVSVYEEWYYCPNQPVTATLNAGFPTTSWSTICQPSPALPDRAQTNTPATTTALGLGALQTVRSPPSFPTGNPFPTPTIEPGPRRARRRAGDF

SEQ ID NO: 2061 - protein, 167 aa, Myceliophthora thermophilia
HDDLTEPAVRRREALNIGHDASPIDTAVLPQSPNEGCTTTVSTTYGYPCSWDGTTTVYTSTTVLYKQINCNGCDSVSVYEEWYYCPNQPVTATLNAGFPTTSWSTICQPSPALPDRAQTNTPATTTALGLGALQTVRSPPSFPTGNPFPTPTIEPGPRRARRRAGDF

SEQ ID NO: 2062 - DNA, 363 bp, Myceliophthora thermophilia
atggcgcttggcatcttcttctctctctctctctcgtcctctatctgggttcgcggaacgaccggactgggcgttgagacacaatcgttggccgttcccagggcatgcggctatagcggcagcggcagcggcagaagcggtagcgacagccaactgcataacagtcgatgcaaaagacggcggcgggccggcagttacgcagcgccgcgagggcgcgcctctagccgccgccgcaacgataatctatctagtgcatgtacgaacgtactgcgccgcatgactgggctccttgataccagcgtcgagggcgcgcacgtggaagatcaagcttttccggggaggcagaaacaagggatccagtag

SEQ ID NO: 2063 - protein, 120 aa, Myceliophthora thermophilia
MALGIFFSLSLSSSIWVRGTTGLGVETQSLAVPRACGYSGSGSGRSGSDSQLHNSRCKRRRRAGSYAAPRGRASSRRRNDNLSSACTNVLRRMTGLLDTSVEGAHVEDQAFPGRQKQGIQ

SEQ ID NO: 2064 - protein, 98 aa, Myceliophthora thermophilia
LGVETQSLAVPRACGYSGSGSGRSGSDSQLHNSRCKRRRRAGSYAAPRGRASSRRRNDNLSSACTNVLRRMTGLLDTSVEGAHVEDQAFPGRQKQGIQ

SEQ ID NO: 2065 - DNA, 678 bp, Myceliophthora thermophilia
atgctctccgggctctcctccctcctcgccatcccggccctgctggccgcaacggccgtagccgcaccgtccggagaagtgcccgctgccctcgccccgcgcgaggctgcgtgtccgacggtcactcgatggaaggaatggcactatgagacggtctggctctccacgaccaccgtcaccaacggctggtcctctctcggctccgtcacctccaccaaaacggaggagatgacccgcaccatcaacaccaggaccacggtcttttccccgctcgtcacgacgctcccggtcaccactgcctccccgaccgtggctaccgagacaacgacattgacctggtatactcataccgtgaccgtcacctcccccggatatgccccgtcgtcggtctgccaggtcacgacggtcacgtacaccatcccgagcaccacgagcgtcacacagacgatggatctctcctatgccacgacgtggacgagcgagatcggccatgtgtccaccacgaccaatgtgtacttcgtcacgaatacctttaccgacacgaagccggggtcgacagtctatcaaaccacggtgacacagccggtaacggtcacgtccgtggatgtccaggttgccactgtcacctcgaccgtctgggagaagggctgcgagtcgtacgcttgccagacggcctga

SEQ ID NO: 2066 - protein, 225 aa, Myceliophthora thermophilia
MLSGLSSLLAIPALLAATAVAAPSGEVPAALAPREAACPTVTRWKEWHYETVWLSTTTVTNGWSSLGSVTSTKTEEMTRTINTRTTVFSPLVTTLPVTTASPTVATETTTLTWYTHTVTVTSPGYAPSSVCQVTTVTYTIPSTTSVTQTMDLSYATTWTSEIGHVSTTTNVYFVTNTFTDTKPGSTVYQTTVTQPVTVTSVDVQVATVTSTVWEKGCESYACQTA

SEQ ID NO: 2067 - protein, 204 aa, Myceliophthora thermophilia
APSGEVPAALAPREAACPTVTRWKEWHYETVWLSTTTVTNGWSSLGSVTSTKTEEMTRTINTRTTVFSPLVTTLPVTTASPTVATETTTLTWYTHTVTVTSPGYAPSSVCQVTTVTYTIPSTTSVTQTMDLSYATTWTSEIGHVSTTTNVYFVTNTFTDTKPGSTVYQTTVTQPVTVTSVDVQVATVTSTVWEKGCESYACQTA

SEQ ID NO: 2068 - DNA, 1320 bp, Myceliophthora thermophilia
atgcgtctagtccagatcgccgcaagcgcagcggcgctgctctccacaggcgccaatgccgcaatcccggagctcccgctgccgcagtcctgcagcggcgtcagcagctcccggttccagtacacagtggcgtcgggatggtcggcgttcaagattgccggcggtctgaagcaagtccggaccatcgtctgggacaccgagggcaacatgctggttgcccagtccggcaggggcatctcggtgcacacgttcggcgccgacggatgcatcaacagcaccagcatgctcatccaggccaaccagctcaaccacgggctggccctgtcgccggacggcaagaccctgtatgccagcggtgaaaccgctgtctacagttggagctacgacccggtcgcccgagccctcagcaaccagaaaaccctcatttccggcatctccacgggcatccacttcacccgaaccattgctgcggtgcccaactcggacctgattctcgtccaagtcggcagcaatcagaaccttgacatggctgcggcgagcccctccaccggcagggcaatcatcaagatcttcgacaccaccaaagcgcccgccagcgggttcaactacaacacgaacggcgaggtgtttggctacggtctgcgcaacactatcggcttcgttcccgaccccagcggcgttttctggggcgtcgagaacagcggtgatgacttcgcccggaccgagaacggacagcaacgcgacattcaccaggacaacccagcagaggagctcaataaccttggcaaccccctggaccccgagaggcgcaacatctggtacggctacccgacgtgctttaccgtctgggacccctcgccttttagcggtctcaaaacaggcgaccagttcgtcctttcccccaacaacaccttcaatgacgcgtcgtgcgcccaaaacaatgcagtccctccccgcctctcgttccaggcgcactccgcacccatctggaacaccttcaacgccgatgcgagcaagatgtacgtggccttccatggcagttgggaccgaagccctccaacaggcttcaaagttgttgagattccgttccaaaaactcgacgatggcagctatgaaccggtggctccggcggacagtcaaaccggatacaaggatattttcggcgcgccgaacccggccagctgcacggcaaacggcctcaccatgagcaactgcttccggctgactgcagctgcctgggatcctagcggccgcggcctgttcgttgggagtgacaacagcgccgagggagagatcttcatcttgaccccttcgtcttaa

SEQ ID NO: 2069 - protein, 439 aa, Myceliophthora thermophilia
MRLVQIAASAAALLSTGANAAIPELPLPQSCSGVSSSRFQYTVASGWSAFKIAGGLKQVRTIVWDTEGNMLVAQSGRGISVHTFGADGCINSTSMLIQANQLNHGLALSPDGKTLYASGETAVYSWSYDPVARALSNQKTLISGISTGIHFTRTIAAVPNSDLILVQVGSNQNLDMAAASPSTGRAIIKIFDTTKAPASGFNYNTNGEVFGYGLRNTIGFVPDPSGVFWGVENSGDDFARTENGQQRDIHQDNPAEELNNLGNPLDPERRNIWYGYPTCFTVWDPSPFSGLKTGDQFVLSPNNTFNDASCAQNNAVPPRLSFQAHSAPIWNTFNADASKMYVAFHGSWDRSPPTGFKVVEIPFQKLDDGSYEPVAPADSQTGYKDIFGAPNPASCTANGLTMSNCFRLTAAAWDPSGRGLFVGSDNSAEGEIFILTPSS

SEQ ID NO: 2070 - protein, 419 aa, Myceliophthora thermophilia
AIPELPLPQSCSGVSSSRFQYTVASGWSAFKIAGGLKQVRTIVWDTEGNMLVAQSGRGISVHTFGADGCINSTSMLIQANQLNHGLALSPDGKTLYASGETAVYSWSYDPVARALSNQKTLISGISTGIHFTRTIAAVPNSDLILVQVGSNQNLDMAAASPSTGRAIIKIFDTTKAPASGFNYNTNGEVFGYGLRNTIGFVPDPSGVFWGVENSGDDFARTENGQQRDIHQDNPAEELNNLGNPLDPERRNIWYGYPTCFTVWDPSPFSGLKTGDQFVLSPNNTFNDASCAQNNAVPPRLSFQAHSAPIWNTFNADASKMYVAFHGSWDRSPPTGFKVVEIPFQKLDDGSYEPVAPADSQTGYKDIFGAPNPASCTANGLTMSNCFRLTAAAWDPSGRGLFVGSDNSAEGEIFILTPSS

SEQ ID NO: 2071 - DNA, 666 bp, Myceliophthora thermophilia
atgacgatccagacattcctcaccctcgcgatagcgggccttgcccacgcccatttcggcatcgaatacccgccgatgcgaggcgacacactcagcagccacgcaaacgaaacttggtcccaatggaccaacccatgcgccggtgtcccctccaatctcacaggccgcccgattaccccgtggcccctgaccgggggctccctcaagctggacctgcaccatccctggacctacatcttcgtcaacctgggcctgggttcggacgtgtccaacttcaactacaccctgacccggcccttctggaacgagacgggcaacggcacgctgtgcgtgccccggctggagctgcccgccgacctgcccgtgcgcgacgggtcgccggccagcctgcaggtcgtgacggtgggcgaggacgggaacgcgctgtacaattgcgcggatatcgtgttccgggaggacgccaaggtgctgagcggggacgagtgcaggaacagcgagggcgtcacggtcgcgcccgtggtggtggaggcagatgatgatgcggccgggaacaacacaaccgcgggcgacaaggggagtgccgggtccgcgatgggggtgaatacggcggcgctgtcgtccgttgttgggctcgcgatggtgtttgttgcgggcttgagcatgtga

SEQ ID NO: 2072 - protein, 221 aa, Myceliophthora thermophilia
MTIQTFLTLAIAGLAHAHFGIEYPPMRGDTLSSHANETWSQWTNPCAGVPSNLTGRPITPWPLTGGSLKLDLHHPWTYIFVNLGLGSDVSNFNYTLTRPFWNETGNGTLCVPRLELPADLPVRDGSPASLQVVTVGEDGNALYNCADIVFREDAKVLSGDECRNSEGVTVAPVVVEADDDAAGNNTTAGDKGSAGSAMGVNTAALSSVVGLAMVFVAGLSM

SEQ ID NO: 2073 - protein, 204 aa, Myceliophthora thermophilia
HFGIEYPPMRGDTLSSHANETWSQWTNPCAGVPSNLTGRPITPWPLTGGSLKLDLHHPWTYIFVNLGLGSDVSNFNYTLTRPFWNETGNGTLCVPRLELPADLPVRDGSPASLQVVTVGEDGNALYNCADIVFREDAKVLSGDECRNSEGVTVAPVVVEADDDAAGNNTTAGDKGSAGSAMGVNTAALSSVVGLAMVFVAGLSM

SEQ ID NO: 2074 - DNA, 330 bp, Myceliophthora thermophilia
atgcgcagcatctgggcctgttcgtcgtgcgccgcgcttccgctggtcgcgctcctaggctgggacgcatcggcgtcgcatgtaggaagggaatggaacgatgtgcacaggattccaaaagcgcgcgtgacggcgcacccggtgcgccgagacgaggggacctgtccggccgagcacacctcgtgcgccgcctctctgggcggcgactgctgcccttctcgatatgcctgcgcggtcgattcgtgttatgcgacaacggcggggccaacgacagcctgcggaagagaagggtactatgcgtgcttcccggtgaacggacaacgtgcgtaa

SEQ ID NO: 2075 - protein, 109 aa, Myceliophthora thermophilia
MRSIWACSSCAALPLVALLGWDASASHVGREWNDVHRIPKARVTAHPVRRDEGTCPAEHTSCAASLGGDCCPSRYACAVDSCYATTAGPTTACGREGYYACFPVNGQRA

SEQ ID NO: 2076 - protein, 84 aa, Myceliophthora thermophilia
SHVGREWNDVHRIPKARVTAHPVRRDEGTCPAEHTSCAASLGGDCCPSRYACAVDSCYATTAGPTTACGREGYYACFPVNGQRA

SEQ ID NO: 2077 - DNA, 186 bp, Myceliophthora thermophilia
atgtggtcggagcacaacttttgcggcggcatgtactggctgagcgtcgcgctgttcacgcgcgccctcggctggacagcagatcggttggaggtgtttctggtcgatgtgaggaaggacctcaggaacaggtccatccatgcgtactggccgatatacgtcgtgtacgggcagaagccggagtga

SEQ ID NO: 2078 - protein, 61 aa, Myceliophthora thermophilia
MWSEHNFCGGMYWLSVALFTRALGWTADRLEVFLVDVRKDLRNRSIHAYWPIYVVYGQKPE

SEQ ID NO: 2079 - protein, 37 aa, Myceliophthora thermophilia
WTADRLEVFLVDVRKDLRNRSIHAYWPIYVVYGQKPE

SEQ ID NO: 2080 - DNA, 2598 bp, Myceliophthora thermophilia
atgttagtcacggccttcctgattctgggctacgcggcggccgacgctgctgctaaatgggatggcacacgctttgcctggtacacgaccgacgcgggagatgatttcaagagcacgctgcccatcggaaacggaaggctggcagctgccgtgtacggcacgggcaccgaaaagctggtcctgaacgagaactcggtctggagcgggccgtggctagaccgggccaacccgaactccaaggatgcggtccccaagatccgggagatgttaatctccgggaatatcaccggtgccggccaggccgcgctagacaacatggcaggcaacccgatctcgccgagggcgtaccatccgcttgtgaacttgggcatcgacttcggccacggctccggaatctcggactacacccgctggctcgacaccttccagggcacggcagccgtcaactacacgtaccacgggaccagctacagccgcgagtacgtcgccagctatccacacggcgtcctcgctttccgtctgagcgccgaccagccgggcaagctgaacgccaacttctccctctcccgcagccagtgggttctctcgcggagagctagcgtcagcgacggcgagggtgggcatacggtcgccctgagtgctgatagcgggcagccttcggatgccatcaccttctggtctgaagccaggatcgtgaactcgggaggcaatgccacctcggacggcaccaccgtcttcatcacgggcgcggacacggtcgacgtcttcttcgacgccgagacgtcgtaccggcatcccgacgcagacgcggctcagagggagctgaaacggaagctggacgccgccgtggctgcgggctacccggcagtccgcgacggcgccgtcgaggacttcagcagcctcatgggccgcgtgaggctcgatctcgggtcgtcgggcagcgcgggggagcaaccggtgccgacgcgcctgagcaacttcaggcaagaccccgacgcggaccccgagctgatgacgctcgtgttcaactttggccgccacctcctggccgcgtcgtcccgcgacacggggccgcgctcgctgccggccaacctgcagggcatctggaacgacgactacgaccccccctggcagagcaagtacaccatcaacatcaacatcgagatgaactactggcccgccctggtcaccaacctggccgagacgcacaagcccctgttcgacctgatcgacatggccatcccgcgcggccgggacgtggccaggaccatgtacgggtgcgagcgagggttcgtgctgcaccacaacaccgacctctggggcgacgcggccccggtcgaccggggcaccccctacaccgtctggcccatgggcgccgcctggctggcgacccacgcgatggagcactaccgcttcacccggaaccggaccttcctcgccgaggtcgcctggcccgtcctgcgcgagacggcccggttctaccactgctacctcttcgagtgggactcgtactggaccaccggcccctccctctcgcccgagcactccttcatcgtgcccccgggcatgaccaccgccggcgcggccgaggggctcgacatcagcccggagatggacaaccagctgctgcaccagctctttaccgacgtgaccgaggcctgcgcccgtcttggtcttttctcctcctcttcttccgacgacgacgacgacgacgccgagacgtgtaccaccacggccgagacctacctgccccgcatccgcccgccggccgtgcacccgacaaccggccggatccaggagtggcgctcgcccgagtacgccgacacggagccgggccaccggcacttctcgccgctgtgggggctgtacccggggcgacagctgctactgacccgcgcgggatcgggatcgggttcgtcggcctcgggcagtgactcagcctcagcgaacctgactaccgccgccgccgcggcgctgctggaccaccggatggagtccgggtccgggtcgacgggctggtcgcgcgcgtgggcggcggcgctgtacgcgcgggtgcccgggcgggggcgcgacgcgtggcggcacgcgcggcagctcgtcgccacgttcctgctgggcaacctgtggaactcggacagcggcggcgactcggtcttccagatcgacggcaacttcggcttcgtcgccgcgctggccgagatgctgctgcagagccacgagaccgcgccggcgtcaatgcgcggttcgccgggtaataataatagacggacgggcgtccgccaaggagagcagcagcagcaggaggaggaggaggagaaagaggtgtttgtggttcatctgctgcctgcgctgccgggcgacgaggtgccggacgggcgggtcgacgggctggtcgccaggggagggttcgtggtgcgggagctcgtctgggcgggcggcaagtttgcgagggcgagcgtgctggcgcagaacggcggtatgtttaaggtcaaggtgcagggaagagatcgtgggttcgcggtggacggggcgagctacgacccggaaaagggggtcgagacgacggtcggcggcgtgtatgagatcactcctctctga

SEQ ID NO: 2081 - protein, 865 aa, Myceliophthora thermophilia
MLVTAFLILGYAAADAAAKWDGTRFAWYTTDAGDDFKSTLPIGNGRLAAAVYGTGTEKLVLNENSVWSGPWLDRANPNSKDAVPKIREMLISGNITGAGQAALDNMAGNPISPRAYHPLVNLGIDFGHGSGISDYTRWLDTFQGTAAVNYTYHGTSYSREYVASYPHGVLAFRLSADQPGKLNANFSLSRSQWVLSRRASVSDGEGGHTVALSADSGQPSDAITFWSEARIVNSGGNATSDGTTVFITGADTVDVFFDAETSYRHPDADAAQRELKRKLDAAVAAGYPAVRDGAVEDFSSLMGRVRLDLGSSGSAGEQPVPTRLSNFRQDPDADPELMTLVFNFGRHLLAASSRDTGPRSLPANLQGIWNDDYDPPWQSKYTININIEMNYWPALVTNLAETHKPLFDLIDMAIPRGRDVARTMYGCERGFVLHHNTDLWGDAAPVDRGTPYTVWPMGAAWLATHAMEHYRFTRNRTFLAEVAWPVLRETARFYHCYLFEWDSYWTTGPSLSPEHSFIVPPGMTTAGAAEGLDISPEMDNQLLHQLFTDVTEACARLGLFSSSSSDDDDDDAETCTTTAETYLPRIRPPAVHPTTGRIQEWRSPEYADTEPGHRHFSPLWGLYPGRQLLLTRAGSGSGSSASGSDSASANLTTAAAAALLDHRMESGSGSTGWSRAWAAALYARVPGRGRDAWRHARQLVATFLLGNLWNSDSGGDSVFQIDGNFGFVAALAEMLLQSHETAPASMRGSPGNNNRRTGVRQGEQQQQEEEEEKEVFVVHLLPALPGDEVPDGRVDGLVARGGFVVRELVWAGGKFARASVLAQNGGMFKVKVQGRDRGFAVDGASYDPEKGVETTVGGVYEITPL

SEQ ID NO: 2082 - protein, 847 aa, Myceliophthora thermophilia
KWDGTRFAWYTTDAGDDFKSTLPIGNGRLAAAVYGTGTEKLVLNENSVWSGPWLDRANPNSKDAVPKIREMLISGNITGAGQAALDNMAGNPISPRAYHPLVNLGIDFGHGSGISDYTRWLDTFQGTAAVNYTYHGTSYSREYVASYPHGVLAFRLSADQPGKLNANFSLSRSQWVLSRRASVSDGEGGHTVALSADSGQPSDAITFWSEARIVNSGGNATSDGTTVFITGADTVDVFFDAETSYRHPDADAAQRELKRKLDAAVAAGYPAVRDGAVEDFSSLMGRVRLDLGSSGSAGEQPVPTRLSNFRQDPDADPELMTLVFNFGRHLLAASSRDTGPRSLPANLQGIWNDDYDPPWQSKYTININIEMNYWPALVTNLAETHKPLFDLIDMAIPRGRDVARTMYGCERGFVLHHNTDLWGDAAPVDRGTPYTVWPMGAAWLATHAMEHYRFTRNRTFLAEVAWPVLRETARFYHCYLFEWDSYWTTGPSLSPEHSFIVPPGMTTAGAAEGLDISPEMDNQLLHQLFTDVTEACARLGLFSSSSSDDDDDDAETCTTTAETYLPRIRPPAVHPTTGRIQEWRSPEYADTEPGHRHFSPLWGLYPGRQLLLTRAGSGSGSSASGSDSASANLTTAAAAALLDHRMESGSGSTGWSRAWAAALYARVPGRGRDAWRHARQLVATFLLGNLWNSDSGGDSVFQIDGNFGFVAALAEMLLQSHETAPASMRGSPGNNNRRTGVRQGEQQQQEEEEEKEVFVVHLLPALPGDEVPDGRVDGLVARGGFVVRELVWAGGKFARASVLAQNGGMFKVKVQGRDRGFAVDGASYDPEKGVETTVGGVYEITPL

SEQ ID NO: 2083 - DNA, 888 bp, Myceliophthora thermophilia
atgcaccgcctcgcgtatttggtcagcctgctgcccgtggtggctgcgcacggcttcgtatcttcgcctccggcccgtcgtccgggctccgcctacagagctacctgcggcgagcagccgttctaccagcagagctccgatatcaacggcaacgtccagggcatccagcaggtcgtcggcaaggatatgacggatgcgtgtaacctgtggctctgcaaggggtttgtgctcgacgacaacaaggaccaggtccagagcttctcgctcggccagaccatcgacttcaaggtcaacatcgcggcgccgcacacgggctacgccaacgtgtcggtggtcaagacgagcaccaacaccgtcatcggcgagcccctgatcgagttcgacaactacgcctccaacaacggcgtcgcagccaacaacactgccttcagcgtcaagctgccctccaaccttggcggctcctgcaccaccgccggcgactgcgtcctccagtggttctgggacgccccggacatcaaccagacctacgaggcctgcgtcgacttcaccgtcggcagcggcagcggcagcggcacttctgcctctccgaccgatcccactaccaccgccactcccacctccgcaccctcgacctcctcctcctccgccgctgctgccacgacgacgacgacctcggctgctgccccgcccacctcgaccgagggcgccgcgcccacaaccacagccacccccgttcctaatgatgagggagacgacgaggagtgcccggtcgacgacgacggggaggaggacaacgacggagaggatgacaacgcggacgaggagtgcccggccgacaacggcgaagacgacgaggacggcgataaatgcatcgcggacgatgagtga

SEQ ID NO: 2084 - protein, 295 aa, Myceliophthora thermophilia
MHRLAYLVSLLPVVAAHGFVSSPPARRPGSAYRATCGEQPFYQQSSDINGNVQGIQQVVGKDMTDACNLWLCKGFVLDDNKDQVQSFSLGQTIDFKVNIAAPHTGYANVSVVKTSTNTVIGEPLIEFDNYASNNGVAANNTAFSVKLPSNLGGSCTTAGDCVLQWFWDAPDINQTYEACVDFTVGSGSGSGTSASPTDPTTTATPTSAPSTSSSSAAAATTTTTSAAAPPTSTEGAAPTTTATPVPNDEGDDEECPVDDDGEEDNDGEDDNADEECPADNGEDDEDGDKCIADDE

SEQ ID NO: 2085 - protein, 279 aa, Myceliophthora thermophilia
HGFVSSPPARRPGSAYRATCGEQPFYQQSSDINGNVQGIQQVVGKDMTDACNLWLCKGFVLDDNKDQVQSFSLGQTIDFKVNIAAPHTGYANVSVVKTSTNTVIGEPLIEFDNYASNNGVAANNTAFSVKLPSNLGGSCTTAGDCVLQWFWDAPDINQTYEACVDFTVGSGSGSGTSASPTDPTTTATPTSAPSTSSSSAAAATTTTTSAAAPPTSTEGAAPTTTATPVPNDEGDDEECPVDDDGEEDNDGEDDNADEECPADNGEDDEDGDKCIADDE

SEQ ID NO: 2086 - DNA, 612 bp, Myceliophthora thermophilia
atgcattccgggtttgtctctttgttcgcttttgccgggcttgctgcccaggcctcagcgcatggtatcgtcacaaagccagcaacacgatcaccgggggaagcgaccgaggcagcatgcggcaagactatggccgacttctaccgagccgacaatacctcgtaccccgaggccttgcttcgagccaacccagacggcctgaagcccccatatgaccccgaaaagtgcaacctctggctctgcaaaggctatcaatttgccgacaacattgctaatgtgcagaactacactgtcggccaggttgtcgacatggaggtttggatccgaattccgcacgagggatatgccaatgtctcgatcgtcgacacctctcgcaatagtgtcattggtgaaccattgattgcctggccggagggttatgctggctctgccaacccccctaaagaccaaacaaagttcagcgtcaagctgcccgacctgggtgacaagtgcaccaagcctagtgcctgtgttatccaatggtactggtttggtcaagggcaaacatatgagtcgtgcgtcgacttcacccttgctacacccgccaagaggcgaagataccgcaagtattga

SEQ ID NO: 2087 - protein, 203 aa, Myceliophthora thermophilia
MHSGFVSLFAFAGLAAQASAHGIVTKPATRSPGEATEAACGKTMADFYRADNTSYPEALLRANPDGLKPPYDPEKCNLWLCKGYQFADNIANVQNYTVGQVVDMEVWIRIPHEGYANVSIVDTSRNSVIGEPLIAWPEGYAGSANPPKDQTKFSVKLPDLGDKCTKPSACVIQWYWFGQGQTYESCVDFTLATPAKRRRYRKY

SEQ ID NO: 2088 - protein, 183 aa, Myceliophthora thermophilia
HGIVTKPATRSPGEATEAACGKTMADFYRADNTSYPEALLRANPDGLKPPYDPEKCNLWLCKGYQFADNIANVQNYTVGQVVDMEVWIRIPHEGYANVSIVDTSRNSVIGEPLIAWPEGYAGSANPPKDQTKFSVKLPDLGDKCTKPSACVIQWYWFGQGQTYESCVDFTLATPAKRRRYRKY

SEQ ID NO: 2089 - DNA, 1155 bp, Myceliophthora thermophilia
atgcgtactcttacgttcgtgctggcagccgccccggtggctgtgcttgcccaatctcctctgtggggccagtgcggcggtcaaggctggacaggtcccacgacctgcgtttctggcgcagtatgccaattcgtcaatgactggtactcccaatgcgtgcccggatcgagcaaccctcctacgggcaccaccagcagcaccactggaagcaccccggctcctactggcggcggcggcagcggaaccggcctccacgacaaattcaaggccaagggcaagctctacttcggaaccgagatcgatcactaccatctcaacaacaatgccttgaccaacattgtcaagaaagactttggtcaagtcactcacgagaacagcttgaagtgggatgctactgagccgagccgcaatcaattcaactttgccaacgccgacgcggttgtcaactttgcccaggccaacggcaagctcatccgcggccacaccctcctctggcactctcagctgccgcagtgggtgcagaacatcaacgaccgcaacaccttgacccaggtcatcgagaaccacgtcaccacccttgtcactcgctacaagggcaagatcctccactgggacgtcgttaacgagatctttgccgaggacggctcgctccgcgacagcgtcttcagccgcgtcctcggcgaggactttgtcggcatcgccttccgcgccgcccgcgccgccgatcccaacgccaagctctacatcaacgactacaacctcgacattgccaactacgccaaggtgacccggggcatggtcgagaaggtcaacaagtggatcgcccagggcatcccgatcgacggcatcggcacccagtgccacctggccgggcccggcgggtggaacacggccgccggcgtccccgacgccctcaaggccctcgccgcggccaacgtcaaggagatcgccatcaccgagctcgacatcgccggcgcctccgccaacgactacctcaccgtcatgaacgcctgcctccaggtctccaagtgcgtcggcatcaccgtctggggcgtctctgacaaggacagctggaggtcgagcagcaacccgctcctcttcgacagcaactaccagccaaaggcggcatacaatgctctgattaatgccttgtaa

SEQ ID NO: 2090 - protein, 384 aa, Myceliophthora thermophilia
MRTLTFVLAAAPVAVLAQSPLWGQCGGQGWTGPTTCVSGAVCQFVNDWYSQCVPGSSNPPTGTTSSTTGSTPAPTGGGGSGTGLHDKFKAKGKLYFGTEIDHYHLNNNALTNIVKKDFGQVTHENSLKWDATEPSRNQFNFANADAVVNFAQANGKLIRGHTLLWHSQLPQWVQNINDRNTLTQVIENHVTTLVTRYKGKILHWDVVNEIFAEDGSLRDSVFSRVLGEDFVGIAFRAARAADPNAKLYINDYNLDIANYAKVTRGMVEKVNKWIAQGIPIDGIGTQCHLAGPGGWNTAAGVPDALKALAAANVKEIAITELDIAGASANDYLTVMNACLQVSKCVGITVWGVSDKDSWRSSSNPLLFDSNYQPKAAYNALINAL

SEQ ID NO: 2091 - protein, 367 aa, Myceliophthora thermophilia
QSPLWGQCGGQGWTGPTTCVSGAVCQFVNDWYSQCVPGSSNPPTGTTSSTTGSTPAPTGGGGSGTGLHDKFKAKGKLYFGTEIDHYHLNNNALTNIVKKDFGQVTHENSLKWDATEPSRNQFNFANADAVVNFAQANGKLIRGHTLLWHSQLPQWVQNINDRNTLTQVIENHVTTLVTRYKGKILHWDVVNEIFAEDGSLRDSVFSRVLGEDFVGIAFRAARAADPNAKLYINDYNLDIANYAKVTRGMVEKVNKWIAQGIPIDGIGTQCHLAGPGGWNTAAGVPDALKALAAANVKEIAITELDIAGASANDYLTVMNACLQVSKCVGITVWGVSDKDSWRSSSNPLLFDSNYQPKAAYNALINAL

SEQ ID NO: 2092 - DNA, 1128 bp, Myceliophthora thermophilia
atgcatctctcctcgtctctcctcctcctcgccgccttgcccctgggcatcgccggcaagggcaagggccacggccacggcccccataccgggctccacaccctcgccaagcaggccggcctcaagtacttcggctctgccaccgactctcccggccagcgtgagcgcgccggctacgaggacaagtacgcccagtacgaccagatcatgtggaagtcgggcgagttcggcctgacgaccccgaccaacggccaaaagtggctgtttactgagcccgagcgtggcgtgttcaacttcaccgagggtgacatcgtgacgaacctggcccggaagcacggtttcatgcagcggtgccacgcgctcgtctggcacagccagctcgccccttgggtcgagtcgaccgagtggacgcccgaggagctgcgccaggtcattgtcaaccacatcacccacgtggccggctactacaagggcaagtgctatgcctgggacgtcgtcaacgaggccctgaacgaggacggcacctaccgcgagtccgtcttctacaaggtgctcggcgaggactacatcaagctggccttcgagacggccgccaaggtcgacccccacgccaagctctactacaacgactacaacctcgagtcccccagcgccaagaccgagggcgccaagcgcatcgtcaagatgctcaaggacgccggcatccgcatcgacggcgtcggcctgcaggcccacctcgtcgccgagagccacccgaccctcgacgagcacatcgatgccatcaagggcttcaccgagctcggcgtcgaggtcgccctgaccgagctcgacatccgcctctccatcccggccaacgccaccaacctcgcccagcagagggaggcgtacaagaacgtcgtcggcgcttgcgtccaggttcgcggctgcattggcgtggagatctgggacttctatgaccccttcagctgggtccctgccaccttccccggccagggcgcccccctgctctggttcgaggacttttccaagcaccccgcctacgacggcgtcgtcgaggccctgaccaacaggaccacgggcgggtgcaagggcaagggcaagggcaagggcaaggtttggaaggcctaa

SEQ ID NO: 2093 - protein, 375 aa, Myceliophthora thermophilia
MHLSSSLLLLAALPLGIAGKGKGHGHGPHTGLHTLAKQAGLKYFGSATDSPGQRERAGYEDKYAQYDQIMWKSGEFGLTTPTNGQKWLFTEPERGVFNFTEGDIVTNLARKHGFMQRCHALVWHSQLAPWVESTEWTPEELRQVIVNHITHVAGYYKGKCYAWDVVNEALNEDGTYRESVFYKVLGEDYIKLAFETAAKVDPHAKLYYNDYNLESPSAKTEGAKRIVKMLKDAGIRIDGVGLQAHLVAESHPTLDEHIDAIKGFTELGVEVALTELDIRLSIPANATNLAQQREAYKNVVGACVQVRGCIGVEIWDFYDPFSWVPATFPGQGAPLLWFEDFSKHPAYDGVVEALTNRTTGGCKGKGKGKGKVWKA

SEQ ID NO: 2094 - protein, 356 aa, Myceliophthora thermophilia
KGKGHGHGPHTGLHTLAKQAGLKYFGSATDSPGQRERAGYEDKYAQYDQIMWKSGEFGLTTPTNGQKWLFTEPERGVFNFTEGDIVTNLARKHGFMQRCHALVWHSQLAPWVESTEWTPEELRQVIVNHITHVAGYYKGKCYAWDVVNEALNEDGTYRESVFYKVLGEDYIKLAFETAAKVDPHAKLYYNDYNLESPSAKTEGAKRIVKMLKDAGIRIDGVGLQAHLVAESHPTLDEHIDAIKGFTELGVEVALTELDIRLSIPANATNLAQQREAYKNVVGACVQVRGCIGVEIWDFYDPFSWVPATFPGQGAPLLWFEDFSKHPAYDGVVEALTNRTTGGCKGKGKGKGKVWKA

SEQ ID NO: 2095 - DNA, 1242 bp, Myceliophthora thermophilia
atgcactccaaagctttcttggcagcgcttcttgcgcctgccgtctcagggcaactgaacgacctcgccgtcagggctggactcaagtactttggtactgctcttagcgagagcgtcatcaacagtgatactcggtatgctgccatcctcagcgacaagagcatgttcggccagctcgtccccgagaatggcatgaagtgggatgctactgagccgtcccgtggccagttcaactacgcctcgggcgacatcacggccaacacggccaagaagaatggccagggcatgcgttgccacaccatggtctggtacagccagctcccgagctgggtctcctcgggctcgtggaccagggactcgctcacctcggtcatcgagacgcacatgaacaacgtcatgggccactacaagggccaatgctacgcctgggatgtcatcaacgaggccatcaatgacgacggcaactcctggcgcgacaacgtctttctccggacctttgggaccgactacttcgccctgtccttcaacctagccaagaaggccgatcccgataccaagctgtactacaacgactacaacctcgagtacaaccaggccaagacggaccgcgctgttgagctcgtcaagatggtccaggccgccggcgcgcccatcgacggtgtcggcttccagggccacctcattgtcggctcgaccccgacgcgctcgcagctggccaccgccctccagcgcttcaccgcgctcggcctcgaggtcgcctacaccgagctcgacatccgccactcgagcctgccggcctcttcgtcggcgctcgcgacccagggcaacgacttcgccaacgtggtcggctcttgcctcgacaccgccggctgcgtcggcgtcaccgtctggggcttcaccgatgcgcactcgtggatcccgaacacgttccccggccagggcgacgccctgatctacgacagcaactacaacaagaagcccgcgtggacctcgatctcgtccgtcctggccgccaaggccaccggcgccccgcccgcctcgtcctccaccaccctcgtcaccatcaccacccctccgccggcatccaccaccgcctcctcctcctccagtgccacgcccacgagcgtcccgacgcagacgaggtggggacagtgcggcggcatcggatggacggggccgacccagtgcgagagcccatggacctgccagaagctgaacgactggtactggcagtgcctgtaa

SEQ ID NO: 2096 - protein, 413 aa, Myceliophthora thermophilia
MHSKAFLAALLAPAVSGQLNDLAVRAGLKYFGTALSESVINSDTRYAAILSDKSMFGQLVPENGMKWDATEPSRGQFNYASGDITANTAKKNGQGMRCHTMVWYSQLPSWVSSGSWTRDSLTSVIETHMNNVMGHYKGQCYAWDVINEAINDDGNSWRDNVFLRTFGTDYFALSFNLAKKADPDTKLYYNDYNLEYNQAKTDRAVELVKMVQAAGAPIDGVGFQGHLIVGSTPTRSQLATALQRFTALGLEVAYTELDIRHSSLPASSSALATQGNDFANVVGSCLDTAGCVGVTVWGFTDAHSWIPNTFPGQGDALIYDSNYNKKPAWTSISSVLAAKATGAPPASSSTTLVTITTPPPASTTASSSSSATPTSVPTQTRWGQCGGIGWTGPTQCESPWTCQKLNDWYWQCL

SEQ ID NO: 2097 - protein, 396 aa, Myceliophthora thermophilia
QLNDLAVRAGLKYFGTALSESVINSDTRYAAILSDKSMFGQLVPENGMKWDATEPSRGQFNYASGDITANTAKKNGQGMRCHTMVWYSQLPSWVSSGSWTRDSLTSVIETHMNNVMGHYKGQCYAWDVINEAINDDGNSWRDNVFLRTFGTDYFALSFNLAKKADPDTKLYYNDYNLEYNQAKTDRAVELVKMVQAAGAPIDGVGFQGHLIVGSTPTRSQLATALQRFTALGLEVAYTELDIRHSSLPASSSALATQGNDFANVVGSCLDTAGCVGVTVWGFTDAHSWIPNTFPGQGDALIYDSNYNKKPAWTSISSVLAAKATGAPPASSSTTLVTITTPPPASTTASSSSSATPTSVPTQTRWGQCGGIGWTGPTQCESPWTCQKLNDWYWQCL

SEQ ID NO: 2098 - DNA, 693 bp, Myceliophthora thermophilia
atggtctccttcaaggccctcgttctcggcgccgttggcgccctctccttccctttcaacgtcaccgagctgtccgaggcgcacgcccggggcgagaatgtgaccgagctcttgatgtctcgcgccggcacgccgagccagaccggctggcacgggggctactacttctccttctggaccgacaacggcggcaccgtcaactactggaacggcgacaatggcagatacggtgtccagtggcagaactgcggcaactttgtcggcggtaagggatggaaccccggcgcggcgcggaccatcaacttcagcggctccttcaacccgtcgggcaacgggtacctggccgtgtacgggtggacgcagaacccgctgatcgagtactacatcgtcgagtcgttcggcacgtacgacccgtcgtcgcaggcccaggtcctcggcaccttctaccaggacggcagcaactacaagatcgccaagacgacccgctacaaccagccctccatcgagggcaccagcaccttcgaccagttctggtccgtccgcgagaaccaccgcaccagcggcagcgtcaacgtcggcgcccacttcgcccgctggcagcaggccggcctccgcctcggcacccacaactaccaaatcatggccaccgagggctaccagagcagcggctcctccgatatcaccgtctggtaa

SEQ ID NO: 2099 - protein, 230 aa, Myceliophthora thermophilia
MVSFKALVLGAVGALSFPFNVTELSEAHARGENVTELLMSRAGTPSQTGWHGGYYFSFWTDNGGTVNYWNGDNGRYGVQWQNCGNFVGGKGWNPGAARTINFSGSFNPSGNGYLAVYGWTQNPLIEYYIVESFGTYDPSSQAQVLGTFYQDGSNYKIAKTTRYNQPSIEGTSTFDQFWSVRENHRTSGSVNVGAHFARWQQAGLRLGTHNYQIMATEGYQSSGSSDITVW

SEQ ID NO: 2100 - protein, 214 aa, Myceliophthora thermophilia
FPFNVTELSEAHARGENVTELLMSRAGTPSQTGWHGGYYFSFWTDNGGTVNYWNGDNGRYGVQWQNCGNFVGGKGWNPGAARTINFSGSFNPSGNGYLAVYGWTQNPLIEYYIVESFGTYDPSSQAQVLGTFYQDGSNYKIAKTTRYNQPSIEGTSTFDQFWSVRENHRTSGSVNVGAHFARWQQAGLRLGTHNYQIMATEGYQSSGSSDITVW

SEQ ID NO: 2101 - DNA, 738 bp, Myceliophthora thermophilia
atggtttctgtcaaggcagtcctcctcctcggcgccgccggcaccaccctggccttcccgttcaacgctacccagttcagcgagctcgttgcccgggccggcaccccgagcggcaccggcacgcacgacggcttctactactccttctggaccgacggcggcggcaacgtcaactacgagaacggtcctggcggctcctacaccgtccagtggcagaactgcggcaactttgtcggcggcaagggctggaaccccggccaggcccgcaccatcacctactcgggcaccgtcgacttccagggcggcaacggctacctggccatctacggctggacgcagaacccgctgatcgagtactacatcgtcgagtcgttcggctcgtacgacccctcgtcgcaggcccagactttcggcaccgtcgaggtggacggcggcacctacacgctggccaagacgacgcgcgtcaaccagccctcgatcgagggcaccagcaccttcgaccagttctggtccgtccgccagcagcaccgcacctccggctccgtcgacgtcggcgcccacttcgacgcctgggccaaggccggcctccagctcggcacccacaactacagatcgtcgccaccgagggctaccagagcagcggctcctcttccatcaccgtccaggcctaagagggccctcaggcctttgctctactgccctctcctctcctctgcgctttccgtaagggagatctaa

SEQ ID NO: 2102 - protein, 245 aa, Myceliophthora thermophilia
MVSVKAVLLLGAAGTTLAFPFNATQFSELVARAGTPSGTGTHDGFYYSFWTDGGGNVNYENGPGGSYTVQWQNCGNFVGGKGWNPGQARTITYSGTVDFQGGNGYLAIYGWTQNPLIEYYIVESFGSYDPSSQAQTFGTVEVDGGTYTLAKTTRVNQPSIEGTSTFDQFWSVRQQHRTSGSVDVGAHFDAWAKAGLQLGTHNYRSSPPRATRAAAPLPSPSRPKRALRPLLYCPLLSSALSVREI

SEQ ID NO: 2103 - protein, 227 aa, Myceliophthora thermophilia
FPFNATQFSELVARAGTPSGTGTHDGFYYSFWTDGGGNVNYENGPGGSYTVQWQNCGNFVGGKGWNPGQARTITYSGTVDFQGGNGYLAIYGWTQNPLIEYYIVESFGSYDPSSQAQTFGTVEVDGGTYTLAKTTRVNQPSIEGTSTFDQFWSVRQQHRTSGSVDVGAHFDAWAKAGLQLGTHNYRSSPPRATRAAAPLPSPSRPKRALRPLLYCPLLSSALSVREI

SEQ ID NO: 2104 - DNA, 2595 bp, Myceliophthora thermophilia
atgggccggccatgggaagtggtgtttacgctgctaatcgctctgcagggcgtcctctctctccccacccgggtcatcacaagcccaggccgatctgacaacacggcctggatcgttgccagcgaaaaacacccagccggcggtgttatcccacccatccttgagaccgagaccgccaaacgcgtcaccccggtgtcgaatttgactacttcagtcccaaagccgactcctttgctcgtcacagcttccgctgttgcgagtctgcacttgtcgttgcccaccggcgccgtcaatatgcccggccaagacatcttcgccgatcccatttccacggatgcgccacctgccacattcggcaaaaagggggatcatcccgtgccgagactgggcgttcggggcaacggcccattcgagaccaacaagttctatggcagcctgcaactcggaacccagacctccccggtcttcctccacccgtactcggtcgtctgggctcgaggcgagggttcttccaagagctggggactggcaatctcgcatgttgaggccagccagagagtctacggcgagaccaaccagtcgacgggagctgcggaatacttcctcaaccccgtggggatccattccgtctgcctctcggcgaaggagctggggaatgacaccgccctcaccaccgaggagctgaccgacttctccgtccgggtcggcctgcgcccgagcgccgaggcgccgcccgcggtgcagttccccttggtccaggggctcggcttcatcacggccatctacgatggcgcaacccccgtgctccagacgggcgaacgcttcaaggcggtgacgcgggcatccgcggaccccaaggacggggtcgttaagtacaagctcgagctcgagtccggaaccacctggctggcgtatgcgcaccacaccgagggcgacccgctggatctggagtcgaccgacaccgggctcgctcaggcaaaggggccgtttcgcggcttcatccaggtggctaaggacccgggagacggcgagaaggtgtatgaccaggccgccggtgcctacgccaccggcgtccagctctccgggtccgtcgacggcgcaagggggacatataccttctcgttcaagaaggccggcatcgaagggaccacgctcgtcatgttcgcgctgcctcatcacgtaggctccttcgatgacgccaccaaggctaaagtgacggacctgaagctgcagaccacgactaagggggtgggagccgccgtcgtggccgactcctggaccatggtcgaggacaacctgccgacaaacatcggattcctgccgtggtctcccgaggccgggagcgccgccaacatctcggatggcactaagcaggccattcacggcgtcgcgcaggccgaggtctcgcaggatatcaagcagctgtctgacgtagactcgatgtacttcgccggaaaggtgggcttggagcaacacaagccccccccccaaagggggctcgcgagcgcatatgctgacgatgaacaggcgctggccaagtatgccaccctcgtcctggcaatccgggagatgctgggggatcaggccatggcccagaccgggttgaaccagctgaaagaggcattcgcccgctttgcgcagaatcagcaaaagcacccgctggtatatgagagtgcctggggaggcgtcgtttcgtccgccacgtacgacacgggcgacaccgggctcgactttggcaacacgctctacaacgaccaccacttccactggggctacttcatctacacggcagccgtgatcggacatctcgacccgtcgtgggcggaggaaaacaaggcctacgtcaacacgctcgtccgcgacatcgccaaccccagctcaaacgaccagtacttccccctctggcggtcctttgactggtaccacggccacagctgggctcacgggctcttcgacgcgctcgacggcaaagaccaagagtccagctcagaagacaccatgcacacctacgccctgaagctgtgggggtctgtgattggtgacacgaacctggaagcccgcggcaacctcatgctcgcggtccagagccgctctctccggtcctactacctctacacctcggacaacacgatccaggaccccaagtttatcggaaacaaggtggccggcatcctgttcgagaacaaggtccaccacacgacctacttcggcaacaacaccgagtacatccagggcatccacatgctgccgctgctgccgcagaccccctacgtgcgcaccccagcctttgtccgcgaggagtgggagacctacttcagcaacggccgcgccgacgccatcgcgggcggctggaggggcgtgctgctgggcaactacgccaccgtcgacccaaaggccgcctacgacttcttcgccaggtccgactttgacagctcctggctggacgacggcgccacccggacctggtatatgtgctatgctgccggtgagtaccgtaccccgttccgttccgtctaccttgacctcacctacccaccctgcctcctctggcttccgacacctcccgttcttcttcttcttatgagatcgtgctaa

SEQ ID NO: 2105 - protein, 864 aa, Myceliophthora thermophilia
MGRPWEVVFTLLIALQGVLSLPTRVITSPGRSDNTAWIVASEKHPAGGVIPPILETETAKRVTPVSNLTTSVPKPTPLLVTASAVASLHLSLPTGAVNMPGQDIFADPISTDAPPATFGKKGDHPVPRLGVRGNGPFETNKFYGSLQLGTQTSPVFLHPYSVVWARGEGSSKSWGLAISHVEASQRVYGETNQSTGAAEYFLNPVGIHSVCLSAKELGNDTALTTEELTDFSVRVGLRPSAEAPPAVQFPLVQGLGFITAIYDGATPVLQTGERFKAVTRASADPKDGVVKYKLELESGTTWLAYAHHTEGDPLDLESTDTGLAQAKGPFRGFIQVAKDPGDGEKVYDQAAGAYATGVQLSGSVDGARGTYTFSFKKAGIEGTTLVMFALPHHVGSFDDATKAKVTDLKLQTTTKGVGAAVVADSWTMVEDNLPTNIGFLPWSPEAGSAANISDGTKQAIHGVAQAEVSQDIKQLSDVDSMYFAGKVGLEQHKPPPQRGLASAYADDEQALAKYATLVLAIREMLGDQAMAQTGLNQLKEAFARFAQNQQKHPLVYESAWGGVVSSATYDTGDTGLDFGNTLYNDHHFHWGYFIYTAAVIGHLDPSWAEENKAYVNTLVRDIANPSSNDQYFPLWRSFDWYHGHSWAHGLFDALDGKDQESSSEDTMHTYALKLWGSVIGDTNLEARGNLMLAVQSRSLRSYYLYTSDNTIQDPKFIGNKVAGILFENKVHHTTYFGNNTEYIQGIHMLPLLPQTPYVRTPAFVREEWETYFSNGRADAIAGGWRGVLLGNYATVDPKAAYDFFARSDFDSSWLDDGATRTWYMCYAAGEYRTPFRSVYLDLTYPPCLLWLPTPPVLLLLMRSC

SEQ ID NO: 2106 - protein, 844 aa, Myceliophthora thermophilia
LPTRVITSPGRSDNTAWIVASEKHPAGGVIPPILETETAKRVTPVSNLTTSVPKPTPLLVTASAVASLHLSLPTGAVNMPGQDIFADPISTDAPPATFGKKGDHPVPRLGVRGNGPFETNKFYGSLQLGTQTSPVFLHPYSVVWARGEGSSKSWGLAISHVEASQRVYGETNQSTGAAEYFLNPVGIHSVCLSAKELGNDTALTTEELTDFSVRVGLRPSAEAPPAVQFPLVQGLGFITAIYDGATPVLQTGERFKAVTRASADPKDGVVKYKLELESGTTWLAYAHHTEGDPLDLESTDTGLAQAKGPFRGFIQVAKDPGDGEKVYDQAAGAYATGVQLSGSVDGARGTYTFSFKKAGIEGTTLVMFALPHHVGSFDDATKAKVTDLKLQTTTKGVGAAVVADSWTMVEDNLPTNIGFLPWSPEAGSAANISDGTKQAIHGVAQAEVSQDIKQLSDVDSMYFAGKVGLEQHKPPPQRGLASAYADDEQALAKYATLVLAIREMLGDQAMAQTGLNQLKEAFARFAQNQQKHPLVYESAWGGVVSSATYDTGDTGLDFGNTLYNDHHFHWGYFIYTAAVIGHLDPSWAEENKAYVNTLVRDIANPSSNDQYFPLWRSFDWYHGHSWAHGLFDALDGKDQESSSEDTMHTYALKLWGSVIGDTNLEARGNLMLAVQSRSLRSYYLYTSDNTIQDPKFIGNKVAGILFENKVHHTTYFGNNTEYIQGIHMLPLLPQTPYVRTPAFVREEWETYFSNGRADAIAGGWRGVLLGNYATVDPKAAYDFFARSDFDSSWLDDGATRTWYMCYAAGEYRTPFRSVYLDLTYPPCLLWLPTPPVLLLLMRSC

SEQ ID NO: 2107 - DNA, 1581 bp, Myceliophthora thermophilia
atgtacgccaagttcgcgaccctcgccgcccttgtggctggcgccgctgctcagaacgcctgcactctgaccgctgagaaccacccctcgctgacgtggtccaagtgcacgtctggcggcagctgcaccagcgtccagggttccatcaccatcgacgccaactggcggtggactcaccggaccgatagcgccaccaactgctacgagggcaacaagtgggatacttcgtactgcagcgatggtccttcttgcgcctccaagtgctgcatcgacggcgctgactactcgagcacctatggcatcaccacgagcggtaactccctgaacctcaagttcgtcaccaagggccagtactcgaccaacatcggctcgcgtacctacctgatggagagcgacaccaagtaccagatgttccagctcctcggcaacgagttcaccttcgatgtcgacgtctccaacctcggctgcggcctcaatggcgccctctacttcgtgtccatggatgccgatggtggcatgtccaagtactcgggcaacaaggcaggtgccaagtacggtaccggctactgtgattctcagtgcccccgcgacctcaagttcatcaacggcgaggccaacgtagagaactggcagagctcgaccaacgatgccaacgccggcacgggcaagtacggcagctgctgctccgagatggacgtctgggaggccaacaacatggccgccgccttcactccccacccttgcaccgtgatcggccagtcgcgctgcgagggcgactcgtgcggcggtacctacagcaccgaccgctatgccggcatctgcgaccccgacggatgcgacttcaactcgtaccgccagggcaacaagaccttctacggcaagggcatgacggtcgacacgaccaagaagatcacggtcgtcacccagttcctcaagaactcggccggcgagctctccgagatcaagcggttctacgtccagaacggcaaggtcatccccaactccgagtccaccatcccgggcgtcgagggcaactccatcacccaggactggtgcgaccgccagaaggccgccttcggcgacgtgaccgacttccaggacaagggcggcatggtccagatgggcaaggccctcgcggggcccatggtcctcgtcatgtccatctgggacgaccacgccgtcaacatgctctggctcgactccacctggcccatcgacggcgccggcaagccgggcgccgagcgcggtgcctgccccaccacctcgggcgtccccgctgaggtcgaggccgaggcccccaactccaacgtcatcttctccaacatccgcttcggccccatcggctccaccgtctccggcctgcccgacggcggcagcggcaaccccaacccgcccgtcagctcgtccaccccggtcccctcctcgtccaccacatcctccggttcctccggcccgactggcggcacgggtgtcgctaagcactatgagcaatgcggaggaatcgggttcactggccctacccagtgcgagagcccctacacttgcaccaagctgaatgactggtactcgcagtgcctgtaa

SEQ ID NO: 2108 - protein, 526 aa, Myceliophthora thermophilia
MYAKFATLAALVAGAAAQNACTLTAENHPSLTWSKCTSGGSCTSVQGSITIDANWRWTHRTDSATNCYEGNKWDTSYCSDGPSCASKCCIDGADYSSTYGITTSGNSLNLKFVTKGQYSTNIGSRTYLMESDTKYQMFQLLGNEFTFDVDVSNLGCGLNGALYFVSMDADGGMSKYSGNKAGAKYGTGYCDSQCPRDLKFINGEANVENWQSSTNDANAGTGKYGSCCSEMDVWEANNMAAAFTPHPCTVIGQSRCEGDSCGGTYSTDRYAGICDPDGCDFNSYRQGNKTFYGKGMTVDTTKKITVVTQFLKNSAGELSEIKRFYVQNGKVIPNSESTIPGVEGNSITQDWCDRQKAAFGDVTDFQDKGGMVQMGKALAGPMVLVMSIWDDHAVNMLWLDSTWPIDGAGKPGAERGACPTTSGVPAEVEAEAPNSNVIFSNIRFGPIGSTVSGLPDGGSGNPNPPVSSSTPVPSSSTTSSGSSGPTGGTGVAKHYEQCGGIGFTGPTQCESPYTCTKLNDWYSQCL

SEQ ID NO: 2109 - protein, 509 aa, Myceliophthora thermophilia
QNACTLTAENHPSLTWSKCTSGGSCTSVQGSITIDANWRWTHRTDSATNCYEGNKWDTSYCSDGPSCASKCCIDGADYSSTYGITTSGNSLNLKFVTKGQYSTNIGSRTYLMESDTKYQMFQLLGNEFTFDVDVSNLGCGLNGALYFVSMDADGGMSKYSGNKAGAKYGTGYCDSQCPRDLKFINGEANVENWQSSTNDANAGTGKYGSCCSEMDVWEANNMAAAFTPHPCTVIGQSRCEGDSCGGTYSTDRYAGICDPDGCDFNSYRQGNKTFYGKGMTVDTTKKITVVTQFLKNSAGELSEIKRFYVQNGKVIPNSESTIPGVEGNSITQDWCDRQKAAFGDVTDFQDKGGMVQMGKALAGPMVLVMSIWDDHAVNMLWLDSTWPIDGAGKPGAERGACPTTSGVPAEVEAEAPNSNVIFSNIRFGPIGSTVSGLPDGGSGNPNPPVSSSTPVPSSSTTSSGSSGPTGGTGVAKHYEQCGGIGFTGPTQCESPYTCTKLNDWYSQCL

SEQ ID NO: 2110 - DNA, 714 bp, Myceliophthora thermophilia
atgtttagctcggtgttcatgagattatgcgtcggcttccaggcccatgctgccgcaggtttgttttaccccaacggattcgaagagctgaatacaaaaggaggctctctctggcggtctggctcttgcaaaccagacgcatcacctccaatatcgcatcagatgcaccccaacattctcacactcgtcgccaccgttttcgtgggcaaggccgccgcccagcaggtcggtacctacaccaccgaaacgcaccccaggatgacctggcaaaggtgcagctccgggggctcctgcacgagcgtaaagggagagttggtcatcgactccaactggcgctgggtgcacgacaagaatggctacaccaactgctatacggccaacgagtggaactcgaccatctgcgccgacaaccagtcgtgcgcggccaactgtgccctcgacggcgccgactactcggggacgtacggcgcgaccaccagcgggaacgccctgacccttaaatttgtgaccaaggggtcttacaatcttagacaaaggatcgagtgttgtgtggagatcgagaccttcgagcatccctccaccgcccccatccccttttgcccggtgagacaaggaatgcagaagagacaagagctagaacagattgatccaagagcggccagggtcgagtatgctgactgtgaccatactccgtctcgaggggtgtcaggctag

SEQ ID NO: 2111 - protein, 237 aa, Myceliophthora thermophilia
MFSSVFMRLCVGFQAHAAAGLFYPNGFEELNTKGGSLWRSGSCKPDASPPISHQMHPNILTLVATVFVGKAAAQQVGTYTTETHPRMTWQRCSSGGSCTSVKGELVIDSNWRWVHDKNGYTNCYTANEWNSTICADNQSCAANCALDGADYSGTYGATTSGNALTLKFVTKGSYNLRQRIECCVEIETFEHPSTAPIPFCPVRQGMQKRQELEQIDPRAARVEYADCDHTPSRGVSG

SEQ ID NO: 2112 - protein, 217 aa, Myceliophthora thermophilia
LFYPNGFEELNTKGGSLWRSGSCKPDASPPISHQMHPNILTLVATVFVGKAAAQQVGTYTTETHPRMTWQRCSSGGSCTSVKGELVIDSNWRWVHDKNGYTNCYTANEWNSTICADNQSCAANCALDGADYSGTYGATTSGNALTLKFVTKGSYNLRQRIECCVEIETFEHPSTAPIPFCPVRQGMQKRQELEQIDPRAARVEYADCDHTPSRGVSG

SEQ ID NO: 2113 - DNA, 1371 bp, Myceliophthora thermophilia
atgggtcgcggcgctgctttcctaggcctcgcctcgctcctcgtgggcgcggccaaggcccagacgcccggcgagggcgaggaggtgcacccgcagatcacgacgtaccgctgcaccaaggcggacgggtgcgaggagaagaccaactacatcgtgctggacgccctatcgcacccggtccaccaggtcgacaacccgtacaactgcggcgactggggccagaagcccaacgagacggcctgcccggacctcgagtcgtgcgccaggaactgcatcatggacccggtctcggactacggccggcacggggtctcgaccgacggcacctcgctgcgcctcaagcagctagtcggcggcaacgtcgtcagcccgcgcgtctacctgctcgacgagaccaaggagcgctacgagatgctcaagctgaccggcaacgagttcacctttgacgtcgacgccaccaagctgccctgcggcatgaacagcgccctctacctctccgagatggacgccaccggcgcccggagcgagctcaacccgggcggcgccacctttggcaccggctactgcgacgcccagtgctacgtcacccccttcatcaacggcctcggcaacatcgagggcaagggcgcgtgctgcaacgagatggatatctgggaggccaacgcgcgggcgcagcacatcgcgccgcacccgtgcagcaaggcggggccgtacctgtgcgagggcgccgagtgcgagttcgacggcgtgtgcgacaagaacggctgcgcctggaacccgtaccgggtcaacgtgacggactactacggcgagggcgccgagttcagggtggacacgacccggcccttctcggtcgtcacgcagttccgcgccggcggcgacgcggggggcggcaagctcgagagcatctaccggctcttcgtccaggacggcagggtgatcgagtcgtacgtcgtcgacaagcccggcctgcccccgacggaccgcatgacggacgagttctgcgccgccaccggcgccgcccgcttcacggagctcggcgccatggaggccatgggcgacgccctgacgcgcggcatggtcctcgccctcagcatctggtggagcgagggcgacaacatgaactggctcgactcgggcgaggccggcccctgcgacccggacgagggcaacccgtccaacatcatccgcgtccagcccgacccggaggtcgtcttcagcaacctgcgctggggcgagatcggctcaacctacgagtccgccgtcgacgggcccgtcggcaagggcaagggcaagggcaagggcaaggctcccgccggcgacggcaacgggaaggagaagagcaatggcaagcgcttcaggaggttctga

SEQ ID NO: 2114 - protein, 456 aa, Myceliophthora thermophilia
MGRGAAFLGLASLLVGAAKAQTPGEGEEVHPQITTYRCTKADGCEEKTNYIVLDALSHPVHQVDNPYNCGDWGQKPNETACPDLESCARNCIMDPVSDYGRHGVSTDGTSLRLKQLVGGNVVSPRVYLLDETKERYEMLKLTGNEFTFDVDATKLPCGMNSALYLSEMDATGARSELNPGGATFGTGYCDAQCYVTPFINGLGNIEGKGACCNEMDIWEANARAQHIAPHPCSKAGPYLCEGAECEFDGVCDKNGCAWNPYRVNVTDYYGEGAEFRVDTTRPFSVVTQFRAGGDAGGGKLESIYRLFVQDGRVIESYVVDKPGLPPTDRMTDEFCAATGAARFTELGAMEAMGDALTRGMVLALSIWWSEGDNMNWLDSGEAGPCDPDEGNPSNIIRVQPDPEVVFSNLRWGEIGSTYESAVDGPVGKGKGKGKGKAPAGDGNGKEKSNGKRFRRF

SEQ ID NO: 2115 - protein, 436 aa, Myceliophthora thermophilia
QTPGEGEEVHPQITTYRCTKADGCEEKTNYIVLDALSHPVHQVDNPYNCGDWGQKPNETACPDLESCARNCIMDPVSDYGRHGVSTDGTSLRLKQLVGGNVVSPRVYLLDETKERYEMLKLTGNEFTFDVDATKLPCGMNSALYLSEMDATGARSELNPGGATFGTGYCDAQCYVTPFINGLGNIEGKGACCNEMDIWEANARAQHIAPHPCSKAGPYLCEGAECEFDGVCDKNGCAWNPYRVNVTDYYGEGAEFRVDTTRPFSVVTQFRAGGDAGGGKLESIYRLFVQDGRVIESYVVDKPGLPPTDRMTDEFCAATGAARFTELGAMEAMGDALTRGMVLALSIWWSEGDNMNWLDSGEAGPCDPDEGNPSNIIRVQPDPEVVFSNLRWGEIGSTYESAVDGPVGKGKGKGKGKAPAGDGNGKEKSNGKRFRRF

SEQ ID NO: 2116 - DNA, 1353 bp, Myceliophthora thermophilia
atgaagcagtacctccagtacctcgcggcgaccctgcccctggtgggcctggccacggcccagcaggcgggtaacctgcagaccgagactcaccccaagctcacttggtcgaagtgcacggccccgggatcctgccaacaggtcaacggcgaggtcgtcatcgactccaactggcgctgggtgcacgacgagaacgcgcagaactgctacgacggcaaccagtggaccaacgcttgcagctctgccaccgactgcgccgagaattgcgcgctcgagggtgccgactaccagggcacctatggcgcctcgaccagcggcaatgccctgacgctcaccttcgtcactaagcacgagtacggcaccaacattggttcgcgcctctacctcatgaacggcgcgaacaagtaccagatgttcaccctcaagggcaacgagctggccttcgacgtcgacctctcggccgtcgagtgcggcctcaacagcgccctctacttcgtggccatggaggaggatggcggtgtgtcgagctacccgaccaacacggccggtgctaagttcggcactgggtactgcgacgcccaatgcgcacgcgacctcaagttcgtcggcggcaagggcaacatcgagggctggaagccgtccaccaacgatgccaatgccggtgtcggtccttatggcgggtgctgcgctgagatcgacgtctgggagtcgaacaagtatgctttcgctttcaccccgcacggttgcgagaaccctaaataccacgtctgcgagaccaccaactgcggtggcacctactccgaggaccgcttcgctggtgactgcgatgccaacggctgcgactacaacccctaccgcatgggcaaccaggacttctacggtcccggcttgacggtcgataccagcaagaagttcaccgtcgtcagccagttcgaggagaacaagctcacccagttcttcgtccaggacggcaagaagattgagatccccggccccaaggtcgagggcatcgatgcggacagcgccgctatcacccctgagctgtgcagtgccctgttcaaggccttcgatgaccgtgaccgcttctcggaggttggcggcttcgatgccatcaacacggccctcagcactcccatggtcctcgtcatgtccatctgggatgatcactacgccaatatgctctggctcgactcgagctacccccctgagaaggctggccagcctggcggtgaccgtggcccgtgtcctcaggactctggcgtcccggccgacgttgaggctcagtaccctaatgccaaggtcatctggtccaacatccgcttcggccccatcggctcgactgtcaacgtctaa

SEQ ID NO: 2117 - protein, 450 aa, Myceliophthora thermophilia
MKQYLQYLAATLPLVGLATAQQAGNLQTETHPKLTWSKCTAPGSCQQVNGEVVIDSNWRWVHDENAQNCYDGNQWTNACSSATDCAENCALEGADYQGTYGASTSGNALTLTFVTKHEYGTNIGSRLYLMNGANKYQMFTLKGNELAFDVDLSAVECGLNSALYFVAMEEDGGVSSYPTNTAGAKFGTGYCDAQCARDLKFVGGKGNIEGWKPSTNDANAGVGPYGGCCAEIDVWESNKYAFAFTPHGCENPKYHVCETTNCGGTYSEDRFAGDCDANGCDYNPYRMGNQDFYGPGLTVDTSKKFTVVSQFEENKLTQFFVQDGKKIEIPGPKVEGIDADSAAITPELCSALFKAFDDRDRFSEVGGFDAINTALSTPMVLVMSIWDDHYANMLWLDSSYPPEKAGQPGGDRGPCPQDSGVPADVEAQYPNAKVIWSNIRFGPIGSTVNV

SEQ ID NO: 2118 - protein, 430 aa, Myceliophthora thermophilia
QQAGNLQTETHPKLTWSKCTAPGSCQQVNGEVVIDSNWRWVHDENAQNCYDGNQWTNACSSATDCAENCALEGADYQGTYGASTSGNALTLTFVTKHEYGTNIGSRLYLMNGANKYQMFTLKGNELAFDVDLSAVECGLNSALYFVAMEEDGGVSSYPTNTAGAKFGTGYCDAQCARDLKFVGGKGNIEGWKPSTNDANAGVGPYGGCCAEIDVWESNKYAFAFTPHGCENPKYHVCETTNCGGTYSEDRFAGDCDANGCDYNPYRMGNQDFYGPGLTVDTSKKFTVVSQFEENKLTQFFVQDGKKIEIPGPKVEGIDADSAAITPELCSALFKAFDDRDRFSEVGGFDAINTALSTPMVLVMSIWDDHYANMLWLDSSYPPEKAGQPGGDRGPCPQDSGVPADVEAQYPNAKVIWSNIRFGPIGSTVNV

SEQ ID NO: 2119 - DNA, 885 bp, Myceliophthora thermophilia
atgcgtctcctgcgatcgctcaccaagatggccgccatggccggcctggccgcgggcgcgtcactgcagccggtgaccaactttggcgacaatccgaccggtctgcagatgtatgtgtacgttccggacaaagttgcggtctcgcccgccatcatcgttgctctgcatccctgtggaggatcggctcagggatggtactcgcagacacggctcccgtcgtacgcggaccagcttgggttcatcctcatctacgccggcacgaccaagatgagcaactgctgggacgtccagaacccggccagcctgacacacaacggcgggggcgacgccgggggcatcgtcagcatggtcaagtacgcgctgaagcagtacaacggcgacgcgtcgagggtgtacgtcatggggggctcgtcgggggccatgatgaccaacgtgctggcgggctcgtacccggacgtgttcgaggccggcgcggccttctccggggtggcgcacgcgtgcttcctcggggccgactcggcgacgcccttctcgcctaaccagacgtgcgcgcagggccggatccagcggtcggcgcgcgagtggggggacctggtgcgcaactcgttcccggcctacgacggccgccgcccgcgcatgcagatcttccacggcaacgccgacttcctcgtccatcccgagtgcgcccaccaggccctcgcccagtgggccgacgtcctcggcctccagctgacccagaccaacaagggcgtgccctcggccgagtacacccaggaggtctacggcgacggcacccagctgcagggcttctttggcgacggcgtcggccacatcgccccggtcaacgagcccgtcatgctccgcttctttggcctgatgaactag

SEQ ID NO: 2120 - protein, 294 aa, Myceliophthora thermophilia
MRLLRSLTKMAAMAGLAAGASLQPVTNFGDNPTGLQMYVYVPDKVAVSPAIIVALHPCGGSAQGWYSQTRLPSYADQLGFILIYAGTTKMSNCWDVQNPASLTHNGGGDAGGIVSMVKYALKQYNGDASRVYVMGGSSGAMMTNVLAGSYPDVFEAGAAFSGVAHACFLGADSATPFSPNQTCAQGRIQRSAREWGDLVRNSFPAYDGRRPRMQIFHGNADFLVHPECAHQALAQWADVLGLQLTQTNKGVPSAEYTQEVYGDGTQLQGFFGDGVGHIAPVNEPVMLRFFGLMN

SEQ ID NO: 2121 - protein, 275 aa, Myceliophthora thermophilia
ASLQPVTNFGDNPTGLQMYVYVPDKVAVSPAIIVALHPCGGSAQGWYSQTRLPSYADQLGFILIYAGTTKMSNCWDVQNPASLTHNGGGDAGGIVSMVKYALKQYNGDASRVYVMGGSSGAMMTNVLAGSYPDVFEAGAAFSGVAHACFLGADSATPFSPNQTCAQGRIQRSAREWGDLVRNSFPAYDGRRPRMQIFHGNADFLVHPECAHQALAQWADVLGLQLTQTNKGVPSAEYTQEVYGDGTQLQGFFGDGVGHIAPVNEPVMLRFFGLMN

SEQ ID NO: 2122 - DNA, 945 bp, Myceliophthora thermophilia
atgtggcctactcccaaggttgcttacctcttgctggcagctcactcgctgctcgtcagcgggactcccgtcgacgccgaggccgtggacacggccatcctcgccaagcgccaatgcccgcagatccatatcttcggagctcgagaaacgacagcaccacccggatatggaactgccggtaccgtcgtcaacctgattctcaatgcgttccctggggccacggccgaagcaatcaactatcccgcctgcggtggacaagcatcttgtggaggagtccagaacgtgatcccttctatttgcgccatgatatcgtacggtgactcggcaaggcagggcaccgacgcggtggcttcggcggtgaacagcttcaaccagcggtgtcccaacactcagatcgtgcttgttggctactcccagggcggtcaaatcatcgacaatgctgtttgtggtggccctgacacgggctctggaatcacgaccacgactcctcccatctcggctgcggccctgaaccagatcaaggccgtcatcgaaatgggctctccacggttcgtcgccggcttgtcctacgacgtcggtacctgcacggcacaaggttttgctgcgcgcccgcgtggctacgtctgcggctccaactcggcgtccaagatccagagctactgcgattcgaccgacccctactgctgcaccggcaacgacgccaacagccaccagcagtatggcaacaagtacggacagcaggccctggcttttgtcaaggccaggctcagcggcagcggcggaactccgacgtcgtcggccggcggctccgttccgaccggcggcaacggcggcacttgcagcccgctgtacggacagtgcggtggccagggatggacgggtcccacgtgctgctctcagggaacctgcagggcatccaaccagtggtactcccagtgcttgtaa

SEQ ID NO: 2123 - protein, 314 aa, Myceliophthora thermophilia
MWPTPKVAYLLLAAHSLLVSGTPVDAEAVDTAILAKRQCPQIHIFGARETTAPPGYGTAGTVVNLILNAFPGATAEAINYPACGGQASCGGVQNVIPSICAMISYGDSARQGTDAVASAVNSFNQRCPNTQIVLVGYSQGGQIIDNAVCGGPDTGSGITTTTPPISAAALNQIKAVIEMGSPRFVAGLSYDVGTCTAQGFAARPRGYVCGSNSASKIQSYCDSTDPYCCTGNDANSHQQYGNKYGQQALAFVKARLSGSGGTPTSSAGGSVPTGGNGGTCSPLYGQCGGQGWTGPTCCSQGTCRASNQWYSQCL

SEQ ID NO: 2124 - protein, 293 aa, Myceliophthora thermophilia
TPVDAEAVDTAILAKRQCPQIHIFGARETTAPPGYGTAGTVVNLILNAFPGATAEAINYPACGGQASCGGVQNVIPSICAMISYGDSARQGTDAVASAVNSFNQRCPNTQIVLVGYSQGGQIIDNAVCGGPDTGSGITTTTPPISAAALNQIKAVIEMGSPRFVAGLSYDVGTCTAQGFAARPRGYVCGSNSASKIQSYCDSTDPYCCTGNDANSHQQYGNKYGQQALAFVKARLSGSGGTPTSSAGGSVPTGGNGGTCSPLYGQCGGQGWTGPTCCSQGTCRASNQWYSQCL

SEQ ID NO: 2125 - DNA, 735 bp, Myceliophthora thermophilia
atgaaggtcaccgccgttgccgttcccgtcctggctggcattgccagcgccaaccccgtcgacgtcgaggcccgccagtcgtgccccgaggtccacgtattcggcgcccgggaaactacagcaccccctggctatggcacatcccaaggcctcgtcaacatggtcgtgcaggcgtaccccggagcaacaagcgaggccataaactaccccgcatgcggcggtcaggcgtcttgcggtggaatcgatgcaagtgaccccgaaaatgccgctgactgtaaatcaggtgcatccgtttacaatacctctgcgaaccagggcactcaggcggttgtctccgctgtgacgagctttaaccagcgctgccctgacacaaagatcgtcttgatcggctattcgcagggtggccagatcatggacaacgcctactgcggcggcgccggtgccaccctcagcggcagcgccctcaacgccgttaaagccacggtctggttcggaaatccgcattatctgagccaattaagttatcgagttgggacatgccaggccggagggttcgcggcccgccctcccggattccaatgttcgcctggtaacccagataacatcaagtcgtactgcgatgccgaggatccgtactgctgcaatggaaacgatgcaaaccaccaccaacagtacgtcaccatctacggccagcaggcgctcgccttcatcaagtcgaagctcgacgctgcttaa

SEQ ID NO: 2126 - protein, 244 aa, Myceliophthora thermophilia
MKVTAVAVPVLAGIASANPVDVEARQSCPEVHVFGARETTAPPGYGTSQGLVNMVVQAYPGATSEAINYPACGGQASCGGIDASDPENAADCKSGASVYNTSANQGTQAVVSAVTSFNQRCPDTKIVLIGYSQGGQIMDNAYCGGAGATLSGSALNAVKATVWFGNPHYLSQLSYRVGTCQAGGFAARPPGFQCSPGNPDNIKSYCDAEDPYCCNGNDANHHQQYVTIYGQQALAFIKSKLDAA

SEQ ID NO: 2127 - protein, 227 aa, Myceliophthora thermophilia
NPVDVEARQSCPEVHVFGARETTAPPGYGTSQGLVNMVVQAYPGATSEAINYPACGGQASCGGIDASDPENAADCKSGASVYNTSANQGTQAVVSAVTSFNQRCPDTKIVLIGYSQGGQIMDNAYCGGAGATLSGSALNAVKATVWFGNPHYLSQLSYRVGTCQAGGFAARPPGFQCSPGNPDNIKSYCDAEDPYCCNGNDANHHQQYVTIYGQQALAFIKSKLDAA

SEQ ID NO: 2128 - DNA, 1473 bp, Myceliophthora thermophilia
atggcccggttaagcgtatgtatctcggcactcctggccggcctctcggcagccaagtacatcgtcccgggggggagatggcgcgacacggacggcaacctcgtcaacgcccatgcgggctgcgtaacggtcgacaaggataccggcaaattctggctctttggagagtacaaggtcgaaggccagactgaaggcggcggtgtttccgtctacagctcggatgacctggcgacgtgggaaagccacggccttgccttagctcccatcgagggccacccgtacatctcgccctcccacatcatccagcgaccaaaggtggtctacagcaaggtgtccaacgaatatcacatgtggtggcacgcagataactccacgtatggactgctgctccagggatttgctcggtcgccaaacatttcggggccttacaccttcgtgagcgccaccgcgcccctgggcaactggtcccaggatttcggcatctttaccgactacaaggacgggaggtcctacgcgctctactcgaacggcgacagccgggaaggccgagacgtgtatcttacggcctacaacgaggatgtgtcggcgctcgacaaggtcatccaccgcttcgacaagtacgatctcgaagccccgaccatcgtccagacggacaagagttactacgccatcatgagccacaagacgggctaccggcccaacaacgtggtcgccttccgggccgactcgctggccggtccgtggtcgcagcccttcatggtggcgccgcccaacacgcggaccttcaactcccagtcgggcttcaccttgaccatcaggggcaagaagaggacgacgtacttgtacctgggcgaccagtgggactccaactcgctctgggagagccggtacatctggcttccgatggagattgacgaccgcaagaagacactcaggctcgtgtggaacgacgtgtacgacttggacgtcaagacgggcgagtggtcccccgtccgaggcaagacatactacgcggccgacgccaagacggccggcaacgcgttcaagcaggaggccaacttcgccagcaagggtgtcatcgtcacgggcattcgcggcaacgacagcaccgttacttttgaagggatcgagggctccgggaagccgcagtgggtgtcgttctactaccagaacacggacgacatgggcttcggggaccaaccgggcgggacgccggaccggatcggcggcacgtggcagctgcgccggatcgcgagcgtcgtcgtaaacggtaacacggagaaggtcgagacgctgtaccagcgggacacgcacaagggcatcatcctctcgacgcctctgctgctgacgctggagaaggggaagaagaacaccatcaccgtgggcgggctgtggaacgggttcgattacaagggggcggatctggacagaatcgtcgtgtatccccccgaaacggaccgcaagaggcgataa

SEQ ID NO: 2129 - protein, 490 aa, Myceliophthora thermophilia
MARLSVCISALLAGLSAAKYIVPGGRWRDTDGNLVNAHAGCVTVDKDTGKFWLFGEYKVEGQTEGGGVSVYSSDDLATWESHGLALAPIEGHPYISPSHIIQRPKVVYSKVSNEYHMWWHADNSTYGLLLQGFARSPNISGPYTFVSATAPLGNWSQDFGIFTDYKDGRSYALYSNGDSREGRDVYLTAYNEDVSALDKVIHRFDKYDLEAPTIVQTDKSYYAIMSHKTGYRPNNVVAFRADSLAGPWSQPFMVAPPNTRTFNSQSGFTLTIRGKKRTTYLYLGDQWDSNSLWESRYIWLPMEIDDRKKTLRLVWNDVYDLDVKTGEWSPVRGKTYYAADAKTAGNAFKQEANFASKGVIVTGIRGNDSTVTFEGIEGSGKPQWVSFYYQNTDDMGFGDQPGGTPDRIGGTWQLRRIASVVVNGNTEKVETLYQRDTHKGIILSTPLLLTLEKGKKNTITVGGLWNGFDYKGADLDRIVVYPPETDRKRR

SEQ ID NO: 2130 - protein, 472 aa, Myceliophthora thermophilia
KYIVPGGRWRDTDGNLVNAHAGCVTVDKDTGKFWLFGEYKVEGQTEGGGVSVYSSDDLATWESHGLALAPIEGHPYISPSHIIQRPKVVYSKVSNEYHMWWHADNSTYGLLLQGFARSPNISGPYTFVSATAPLGNWSQDFGIFTDYKDGRSYALYSNGDSREGRDVYLTAYNEDVSALDKVIHRFDKYDLEAPTIVQTDKSYYAIMSHKTGYRPNNVVAFRADSLAGPWSQPFMVAPPNTRTFNSQSGFTLTIRGKKRTTYLYLGDQWDSNSLWESRYIWLPMEIDDRKKTLRLVWNDVYDLDVKTGEWSPVRGKTYYAADAKTAGNAFKQEANFASKGVIVTGIRGNDSTVTFEGIEGSGKPQWVSFYYQNTDDMGFGDQPGGTPDRIGGTWQLRRIASVVVNGNTEKVETLYQRDTHKGIILSTPLLLTLEKGKKNTITVGGLWNGFDYKGADLDRIVVYPPETDRKRR

SEQ ID NO: 2131 - DNA, 2046 bp, Myceliophthora thermophilia
atgataatgatgagactcaagtcgggactggccggggcgctggcctggggaacgacggcggcggcggcggcggcggtggcgagagtgggagccggcgcggccgcgaactcgacctactacaacccgatcctccccgggtggcactcggacccgtcgtgcgtgcaggtggaggggatcttctactgcgtgacgtcgaccttcatctcgttccccggcctgcccatctacgcgtcccgggacctgatcaactggaagcacgtcagccacgtgtggaaccgcgagtcccagctgcccgggtacagctgggcgacggagggccagcaggagggcatgtacgcggcgacgatccggcaccgcgagggcgtcttctatgtcatctgcgagtacctgggcgtcggcggcagggacgccggcgtgctcttccgggcgacggacccgttcgacgacgcggcctggagcgacgccctgaccttcgccgcgcccaagatcgacccggacctgttctgggacgacgacgggacggcctacgtggcgacgcagggcgtgcaggtgcagcgcatggacctcgacacgggcgccatcggcccgcccgtgccgctgtggaacgggacgggcggggtgtggcccgagggcccgcacatctaccgccgcgccgaccacttctacctcatgatcgccgagggcggcacggccgaggaccacgccatcaccatcgcccgcagcgaccggctgacggggccctacgtctcctgcccgcacaacccgatcctgaccaaccgcggcacggacgagtacttccagacggtcggccacggcgacctcttccaggacgccgccggcaactggtggggcgtcgccctggccacgcgctccggcccggagtaccgcgtctacccgatggggcgcgagaccgtgctgttccccgtcacctggcgcgagggcgactggccggtcctgcagcccgtgcgcggcgccatgtcgggctggccgctgccgccgccgacgcgcgacctgcccggcgacgggcccttcaacgcggacccggacgtgaaggcgatgccgcggaacctggtgcactggcgggtcccgcgcgagggcgccttcgcgaccacggcgcgcgggctccgcgtcgcgctggggcgcaaccggctcgacggctggcccgggggcgccgagccggccgccagggccgtctccttcgtggggcgccgccagaccgacagcctcttcaccttcagcgaggccggcgtgaccgcgttcctgacccagctcgccaacctgcagctcggcctggtcctccctggacggcgggccagctgcggctccgcttcatcgcgtcgggccacgtcacgcgataccgcggtgccggaggactgcaccgatgtcggcagctgtgacggcggtgacgacggcggtgacggcgggtaccggttcgcggccatgctggcgtccgacccggacccggaccggacccggatcgaggtcggcaccgcgccggccgagctgctcagcggcggctccggctccttcgtcggcaccctgctcggcgtctacgccacctgcaacggggccggggagggcatcgactgccccgccggcacgcccgacgcttacttcacccggtggaggtacacgggcgagggccagttctacaccgagaccgatctcgtcccgcccgacgagggccagggcaagggtaaaggtaaagggaacggtaaaggcaagggcaacggcaacggcaacggcaaagccgccaagagaagcaggtttccaaggtggacgccgggtctaaatggcgtcgttatcccgcccctgtggatcatggaggacgacccggagacccgctggccggcccagaagcgggctggggcgggcgggcagagctacgtcttccgccacggcaacctgcacacagttcgggatgagaatgatgccttcaagggcgcctctctctgcgtaccttaccatacctaccttgccaaggtgatccaggcacttactctcaactttgcgcatcttttcggggcgtggagactgacggtgtag

SEQ ID NO: 2132 - protein, 681 aa, Myceliophthora thermophilia
MIMMRLKSGLAGALAWGTTAAAAAAVARVGAGAAANSTYYNPILPGWHSDPSCVQVEGIFYCVTSTFISFPGLPIYASRDLINWKHVSHVWNRESQLPGYSWATEGQQEGMYAATIRHREGVFYVICEYLGVGGRDAGVLFRATDPFDDAAWSDALTFAAPKIDPDLFWDDDGTAYVATQGVQVQRMDLDTGAIGPPVPLWNGTGGVWPEGPHIYRRADHFYLMIAEGGTAEDHAITIARSDRLTGPYVSCPHNPILTNRGTDEYFQTVGHGDLFQDAAGNWWGVALATRSGPEYRVYPMGRETVLFPVTWREGDWPVLQPVRGAMSGWPLPPPTRDLPGDGPFNADPDVKAMPRNLVHWRVPREGAFATTARGLRVALGRNRLDGWPGGAEPAARAVSFVGRRQTDSLFTFSEAGVTAFLTQLANLQLGLVLPGRRASCGSASSRRATSRDTAVPEDCTDVGSCDGGDDGGDGGYRFAAMLASDPDPDRTRIEVGTAPAELLSGGSGSFVGTLLGVYATCNGAGEGIDCPAGTPDAYFTRWRYTGEGQFYTETDLVPPDEGQGKGKGKGNGKGKGNGNGNGKAAKRSRFPRWTPGLNGVVIPPLWIMEDDPETRWPAQKRAGAGGQSYVFRHGNLHTVRDENDAFKGASLCVPYHTYLAKVIQALTLNFAHLFGAWRLTV

SEQ ID NO: 2133 - protein, 666 aa, Myceliophthora thermophilia
WGTTAAAAAAVARVGAGAAANSTYYNPILPGWHSDPSCVQVEGIFYCVTSTFISFPGLPIYASRDLINWKHVSHVWNRESQLPGYSWATEGQQEGMYAATIRHREGVFYVICEYLGVGGRDAGVLFRATDPFDDAAWSDALTFAAPKIDPDLFWDDDGTAYVATQGVQVQRMDLDTGAIGPPVPLWNGTGGVWPEGPHIYRRADHFYLMIAEGGTAEDHAITIARSDRLTGPYVSCPHNPILTNRGTDEYFQTVGHGDLFQDAAGNWWGVALATRSGPEYRVYPMGRETVLFPVTWREGDWPVLQPVRGAMSGWPLPPPTRDLPGDGPFNADPDVKAMPRNLVHWRVPREGAFATTARGLRVALGRNRLDGWPGGAEPAARAVSFVGRRQTDSLFTFSEAGVTAFLTQLANLQLGLVLPGRRASCGSASSRRATSRDTAVPEDCTDVGSCDGGDDGGDGGYRFAAMLASDPDPDRTRIEVGTAPAELLSGGSGSFVGTLLGVYATCNGAGEGIDCPAGTPDAYFTRWRYTGEGQFYTETDLVPPDEGQGKGKGKGNGKGKGNGNGNGKAAKRSRFPRWTPGLNGVVIPPLWIMEDDPETRWPAQKRAGAGGQSYVFRHGNLHTVRDENDAFKGASLCVPYHTYLAKVIQALTLNFAHLFGAWRLTV

SEQ ID NO: 2134 - DNA, 1608 bp, Myceliophthora thermophilia
atggggcgcctaaacgatctcatagccctccttgcactgttgagcggcagtgccacatccgctgccgtaagaaacacggcttctcaggctcgcgcggcggaattcaacaacccggtgctctgggaggactatccggacctggacgtgttccgggtcgggtcgaccttctactactcctcctccacgttcgcctactccccgggggctccggtgctcaagtcgtacgacctggtgaactggacccccgtcacccactcggtcccgacgctcaactttggggaccgctacaacctcacgggcggcacgccggccggctacgtcaagggcatctgggcgtcgacgctgcggtaccggccctccaacgacaagttctactggtacggctgcgtcgagttcggcaagacgtacatctggaccagctccggcacgcgcgcgggcgacagggacggcgaggtggaccccgccgactgggtctgggagccgcacccgcccatcgaccggtgctactacgacagcggcctgttgatcgacgacgacgacaagatgtacatcgcgtacggcaaccccaagatcgaggtcgccgagctgtccgacgacgggctcaccgaggtctcctcccgggtcgtctacaccccgccggccggcaccaccatcgagggctcgcgcatgtacaaggtcggcgacgcctactacatcctggtgacgcggccggccgacgccgagtgggtgctccggtcgacgtccgggccctttcggcccggcggcatggtcgacaccccggacggccgcagctggtactacgtcgccttcatggacgcgtacccggggggccgcatccccgtggtcgcgccgctgcgctggacggacgacgggtggcccgaggtggtgacggacgcgcagggcggctggggcgccagctacccggtccccgtggagacgggcaagacggtgccggacgacggctgggagctggacgagttcaggggcggccggctgagccaccactgggagtggaaccacaacccggacccggcccgcttcgcgctcgcgggcggggacgagggcgggctggtgctgcaggcggcgacggtgacggaggacctgttcgcggccaggaacacgctcacgcggaggatcaggggccccaagtcgagcggcacgttccggctggacgtcagcaggatgcgcgacggcgaccgggccggggccgtgctgttccgggacacggcggcgtatatcggcgtgtggaagcaaggggacgaggccaccatcgtcgtagtcgacggccttgagctggctctgagctcctggacgaccgtctcgaccgggagggtggccgagacgggcccgaccctgagcagcacgcaggatgtctggctccggatcgaggccgacatcacgcccgcgttcgggaccaacacggcaaggaccacgactttctcgtacagtgtggacggcgggaagacctttgtccgtcttggcccggccttctcgatgagcaatacttggcaatactttacgggctacaggttcggagtcttcaactttgccaccaaggagcttgggggcgaagtcaaggtcaagagcttccagatgcagcctctgtga

SEQ ID NO: 2135 - protein, 535 aa, Myceliophthora thermophilia
MGRLNDLIALLALLSGSATSAAVRNTASQARAAEFNNPVLWEDYPDLDVFRVGSTFYYSSSTFAYSPGAPVLKSYDLVNWTPVTHSVPTLNFGDRYNLTGGTPAGYVKGIWASTLRYRPSNDKFYWYGCVEFGKTYIWTSSGTRAGDRDGEVDPADWVWEPHPPIDRCYYDSGLLIDDDDKMYIAYGNPKIEVAELSDDGLTEVSSRVVYTPPAGTTIEGSRMYKVGDAYYILVTRPADAEWVLRSTSGPFRPGGMVDTPDGRSWYYVAFMDAYPGGRIPVVAPLRWTDDGWPEVVTDAQGGWGASYPVPVETGKTVPDDGWELDEFRGGRLSHHWEWNHNPDPARFALAGGDEGGLVLQAATVTEDLFAARNTLTRRIRGPKSSGTFRLDVSRMRDGDRAGAVLFRDTAAYIGVWKQGDEATIVVVDGLELALSSWTTVSTGRVAETGPTLSSTQDVWLRIEADITPAFGTNTARTTTFSYSVDGGKTFVRLGPAFSMSNTWQYFTGYRFGVFNFATKELGGEVKVKSFQMQPL

SEQ ID NO: 2136 - protein, 513 aa, Myceliophthora thermophilia
VRNTASQARAAEFNNPVLWEDYPDLDVFRVGSTFYYSSSTFAYSPGAPVLKSYDLVNWTPVTHSVPTLNFGDRYNLTGGTPAGYVKGIWASTLRYRPSNDKFYWYGCVEFGKTYIWTSSGTRAGDRDGEVDPADWVWEPHPPIDRCYYDSGLLIDDDDKMYIAYGNPKIEVAELSDDGLTEVSSRVVYTPPAGTTIEGSRMYKVGDAYYILVTRPADAEWVLRSTSGPFRPGGMVDTPDGRSWYYVAFMDAYPGGRIPVVAPLRWTDDGWPEVVTDAQGGWGASYPVPVETGKTVPDDGWELDEFRGGRLSHHWEWNHNPDPARFALAGGDEGGLVLQAATVTEDLFAARNTLTRRIRGPKSSGTFRLDVSRMRDGDRAGAVLFRDTAAYIGVWKQGDEATIVVVDGLELALSSWTTVSTGRVAETGPTLSSTQDVWLRIEADITPAFGTNTARTTTFSYSVDGGKTFVRLGPAFSMSNTWQYFTGYRFGVFNFATKELGGEVKVKSFQMQPL

SEQ ID NO: 2137 - DNA, 1851 bp, Myceliophthora thermophilia
atgacgatgctcaagtcggccctccccgcggcgctggccctcctcctaacggcggccaacggccacccttccaggaccccggcggcggcggcggcggggggatgggcaccgctggcgaatgggacattccggaacccgatcctgtacgaggacttcccggacaacgacgtgtcggtcgggccggacggggccttctacctgtcggcgtccaacttccacttcagccccggggcgcccatcctgcggtcttacgacctggtcgactgggagtttgtgggccactcgatcccgcgcctcgacttcggcgccggctacgacctgccgccgacgggcgagcgggcgtaccgcgcgggcacgtgggcgtcgacgctgcggtaccgcgagagcacggggctctggtactggatcgggtgcaccaacttctggcgcacctgggtcttcaccgccccggcgcccgaggggccctggacccgggcgggcgacttcggcgacggcgtgtgcttctacgacaacggcctgctggtcgacgacgacgacaccatgtacgtcgtctacacccacgacggcggcaagcgggtccacgtgacccagctgagcgcggacgggctgagcgccgtccgcaccgagaccgtcctggtgccggagcaggccggcgtcgacgccctcgagggcaaccgcatgtacaagatcgacggccgctactacatcctcaacgaccacccgggcaccaccgcctacgtctggaagtccgactcgccctggggtccctacgagggcaaggcgctggccgacaacgtcgccagccccctgcccggcggcggcgccccgcaccagggcagcctggtgcccacgccctcgggcgcctggtactttatgtccttcacctgggcctacccgtccggccgcctgcccgtgctggccccgatcgagttccagccggacgggttcccgaccctcggcgcctggtactttatgtccttcacctgggcctacccgtccggccgcctgcccgtgctggccccgatcgagttccagccggacgggttcccgaccctcgtcaccgccaaggacaacaacaacaacaacaacaacaacgcctggggcgccagctacccgctgccgccgctaccgcgccggccgctgggctacccgtggtcgcgggcgcggtacgacttcagcgcgctcgccgaactgccgcccgcgttcgagtggaaccacaacccggacgcgagcaactacacgctgggagggaacggcgctgccggcctgatcctgcgggccgccaccgtcgcgcccgacgacgacctgtactcggcgcgcaacacgctgacgcaccgcgcccacgggcccttcccctcggccacgctggtcctcgacgtcgcggacatggccgacggcgaccgcgccgggctggccgccttccgcgaccgcagtgcctacatcggcatccactgctcctcctcctctgatgagaagaagaagaagacgtacgaggtggtggcgcgattcaacatgacgctggacgagtggggcagcggcgagacgctcgatctgggcgaggtggtggagcgggtcgagctggcctcgggcgtgacgcgcgtgtggctgcgggcgagcatggacgcgcggcccgacggcgagcggacggcccggttcgggtacagcgtcgacgggggcgagacctttgccggcctggggcccgcctaccaactctacgccgggtggcccttctttgtcggctaccgcttcgccgtcttcaactacgccaccaaggccctcggcgggagcgtcaccgtcctgagcctcgagaccgactcgggcgagggtgagcgcgatgccgagcaagcgtga

SEQ ID NO: 2138 - protein, 616 aa, Myceliophthora thermophilia
MTMLKSALPAALALLLTAANGHPSRTPAAAAAGGWAPLANGTFRNPILYEDFPDNDVSVGPDGAFYLSASNFHFSPGAPILRSYDLVDWEFVGHSIPRLDFGAGYDLPPTGERAYRAGTWASTLRYRESTGLWYWIGCTNFWRTWVFTAPAPEGPWTRAGDFGDGVCFYDNGLLVDDDDTMYVVYTHDGGKRVHVTQLSADGLSAVRTETVLVPEQAGVDALEGNRMYKIDGRYYILNDHPGTTAYVWKSDSPWGPYEGKALADNVASPLPGGGAPHQGSLVPTPSGAWYFMSFTWAYPSGRLPVLAPIEFQPDGFPTLGAWYFMSFTWAYPSGRLPVLAPIEFQPDGFPTLVTAKDNNNNNNNNAWGASYPLPPLPRRPLGYPWSRARYDFSALAELPPAFEWNHNPDASNYTLGGNGAAGLILRAATVAPDDDLYSARNTLTHRAHGPFPSATLVLDVADMADGDRAGLAAFRDRSAYIGIHCSSSSDEKKKKTYEVVARFNMTLDEWGSGETLDLGEVVERVELASGVTRVWLRASMDARPDGERTARFGYSVDGGETFAGLGPAYQLYAGWPFFVGYRFAVFNYATKALGGSVTVLSLETDSGEGERDAEQA

SEQ ID NO: 2139 - protein, 595 aa, Myceliophthora thermophilia
HPSRTPAAAAAGGWAPLANGTFRNPILYEDFPDNDVSVGPDGAFYLSASNFHFSPGAPILRSYDLVDWEFVGHSIPRLDFGAGYDLPPTGERAYRAGTWASTLRYRESTGLWYWIGCTNFWRTWVFTAPAPEGPWTRAGDFGDGVCFYDNGLLVDDDDTMYVVYTHDGGKRVHVTQLSADGLSAVRTETVLVPEQAGVDALEGNRMYKIDGRYYILNDHPGTTAYVWKSDSPWGPYEGKALADNVASPLPGGGAPHQGSLVPTPSGAWYFMSFTWAYPSGRLPVLAPIEFQPDGFPTLGAWYFMSFTWAYPSGRLPVLAPIEFQPDGFPTLVTAKDNNNNNNNNAWGASYPLPPLPRRPLGYPWSRARYDFSALAELPPAFEWNHNPDASNYTLGGNGAAGLILRAATVAPDDDLYSARNTLTHRAHGPFPSATLVLDVADMADGDRAGLAAFRDRSAYIGIHCSSSSDEKKKKTYEVVARFNMTLDEWGSGETLDLGEVVERVELASGVTRVWLRASMDARPDGERTARFGYSVDGGETFAGLGPAYQLYAGWPFFVGYRFAVFNYATKALGGSVTVLSLETDSGEGERDAEQA

SEQ ID NO: 2140 - DNA, 2538 bp, Myceliophthora thermophilia
atgaaggcctctgtatcatgcctcgtcggcatgagcgccgtggcctacggcctcgatggccctttccagacctaccccgactgcaccaagccccccctgtccgatattaaggtgtgcgaccggacactgcccgaggcggagcgggcggcagccctcgtggcagccctgaccgacgaggagaagctgcaaaacctggtcagcaaggcgccgggggcgccgcggatcggcctgcccgcgtacaactggtggagcgaggcgctgcacggggtggcccacgcgcccgggacgcagttccgcgacgggccgggggacttcaactcgtccacgtcgttcccgatgccgctgctgatggccgccgccttcgacgacgagctgatcgaggccgtcggcgacgtcatcggcaccgaggcccgcgcctttggcaacgccggctggtccggcctcgactactggacccccaacgtcaaccccttccgggacccccgctggggccgcggctccgagacgccgggcgaggacgtcgtgcgcctcaagcgctacgccgcctccatgatccgcgggctcgagggtcgttcctcctcctcctcctcctgctccttcggatccggaggggagccgccgcgcgtcatctcgacctgcaagcactacgccggcaacgactttgaggactggaacggcacgacgcggcacgacttcgacgccgtcatctcggcgcaggacctggccgagtactacctggcgccgttccagcagtgcgcgcgcgactcgcgcgtcggctccgtcatgtgcgcctacaacgccgtcaacggggtgccgtcgtgcgccaactcgtacctcatgaacacgatcctgcgcgggcactggaactggaccgagcacgacaactacgtcaccagcgactgcgaggccgtcctcgacgtctcggcccaccaccactacgccgacaccaacgccgagggcaccggcctctgcttcgaggccggcatggacacgagctgcgagtacgagggctcctccgacatcccgggcgcctccgccggcggcttcctgacctggcccgccgtcgaccgcgccctgacgcggctgtaccggagcctggtgcgggtcggctactttgacggccccgagtcgccgcacgcctcgctgggctgggccgacgtcaaccggcccgaggcgcaggagctggccctgcgcgctgccgtcgagggcatcgtgctgctcaagaacgacaacgacacgctgccgctgccgctgccggacgatgtcgttgtcaccgctgatggtggccgccgccgcgtcgccatgatcggcttctgggccgacgccccggacaagctgtttggcgggtacagcggcgcgccccccttcgcgcgctcgcccgcgagcgccgcccggcagctgggctggaacgtcacggtcgccggagggcccgtcctggagggagactcggacgaggaggaggacacgtggacggcgccggccgtcgaggcggccgccgacgccgactacatcgtctactttggcggcctggacacgtcggcggcgggcgagaccaaggaccggatgacgatcgggtggccggcggcgcagctggcgctcatctcggagctggcgcggctcggcaagcccgtcgtggtggtgcagatgggcgaccagctcgacgacacgcccctcttcgagctggacggggtgggcgccgtcctgtgggccaactggccgggccaggacggcggcacggccgtggtccggctgctcagcggcgccgagagcccggccggccgcctgcccgtgacccagtacccggccaactacaccgacgcggtgcccctgaccgacatgaccctgcgcccgtcggcgaccaacccgggccggacctaccgctggtacccgactcccgtccggcccttcggcttcggcctccactataccaccttccgggccgagttcggcccccaccccttcttcccgggggcgggcaagggcgatggcgacggcgaggacaagggcgagagcaagagcgagatcaggacgcagcagcagcaacagcagcagcagcagcagcgcagggcggcggcggcggccaccacgccgatccgggacctgctccgcgactgcgacaagacgtacccggacacgtgcccgctgccgccgctgacggtgcgcgtgaccaacgagggcgagcgcgcgtccgactacgtggtgctggccttcgtgtcgggcgagtacgggccggcgccgtacccgatcaagacgctggtctcgtacgcgcgggcgcgcgggctaaaggggaagggcgggacgggcgccggcgacggcgacgtcgccaccactaccgtctcgctcgactggaccgtcggcaacctggcccgccacgacgagcgcggcaacacaatcctgtacccgggaacttacaccctcactctcgacgagccggcccaggcgagcgtgcagttcgccctcgagggcgagcccgtcgtgctcgacgagtggcctgcgccgccgagtgccaactccaccgccagggggaggcacaggtaa

SEQ ID NO: 2141 - protein, 845 aa, Myceliophthora thermophilia
MKASVSCLVGMSAVAYGLDGPFQTYPDCTKPPLSDIKVCDRTLPEAERAAALVAALTDEEKLQNLVSKAPGAPRIGLPAYNWWSEALHGVAHAPGTQFRDGPGDFNSSTSFPMPLLMAAAFDDELIEAVGDVIGTEARAFGNAGWSGLDYWTPNVNPFRDPRWGRGSETPGEDVVRLKRYAASMIRGLEGRSSSSSSCSFGSGGEPPRVISTCKHYAGNDFEDWNGTTRHDFDAVISAQDLAEYYLAPFQQCARDSRVGSVMCAYNAVNGVPSCANSYLMNTILRGHWNWTEHDNYVTSDCEAVLDVSAHHHYADTNAEGTGLCFEAGMDTSCEYEGSSDIPGASAGGFLTWPAVDRALTRLYRSLVRVGYFDGPESPHASLGWADVNRPEAQELALRAAVEGIVLLKNDNDTLPLPLPDDVVVTADGGRRRVAMIGFWADAPDKLFGGYSGAPPFARSPASAARQLGWNVTVAGGPVLEGDSDEEEDTWTAPAVEAAADADYIVYFGGLDTSAAGETKDRMTIGWPAAQLALISELARLGKPVVVVQMGDQLDDTPLFELDGVGAVLWANWPGQDGGTAVVRLLSGAESPAGRLPVTQYPANYTDAVPLTDMTLRPSATNPGRTYRWYPTPVRPFGFGLHYTTFRAEFGPHPFFPGAGKGDGDGEDKGESKSEIRTQQQQQQQQQQRRAAAAATTPIRDLLRDCDKTYPDTCPLPPLTVRVTNEGERASDYVVLAFVSGEYGPAPYPIKTLVSYARARGLKGKGGTGAGDGDVATTTVSLDWTVGNLARHDERGNTILYPGTYTLTLDEPAQASVQFALEGEPVVLDEWPAPPSANSTARGRHR

SEQ ID NO: 2142 - protein, 828 aa, Myceliophthora thermophilia
LDGPFQTYPDCTKPPLSDIKVCDRTLPEAERAAALVAALTDEEKLQNLVSKAPGAPRIGLPAYNWWSEALHGVAHAPGTQFRDGPGDFNSSTSFPMPLLMAAAFDDELIEAVGDVIGTEARAFGNAGWSGLDYWTPNVNPFRDPRWGRGSETPGEDVVRLKRYAASMIRGLEGRSSSSSSCSFGSGGEPPRVISTCKHYAGNDFEDWNGTTRHDFDAVISAQDLAEYYLAPFQQCARDSRVGSVMCAYNAVNGVPSCANSYLMNTILRGHWNWTEHDNYVTSDCEAVLDVSAHHHYADTNAEGTGLCFEAGMDTSCEYEGSSDIPGASAGGFLTWPAVDRALTRLYRSLVRVGYFDGPESPHASLGWADVNRPEAQELALRAAVEGIVLLKNDNDTLPLPLPDDVVVTADGGRRRVAMIGFWADAPDKLFGGYSGAPPFARSPASAARQLGWNVTVAGGPVLEGDSDEEEDTWTAPAVEAAADADYIVYFGGLDTSAAGETKDRMTIGWPAAQLALISELARLGKPVVVVQMGDQLDDTPLFELDGVGAVLWANWPGQDGGTAVVRLLSGAESPAGRLPVTQYPANYTDAVPLTDMTLRPSATNPGRTYRWYPTPVRPFGFGLHYTTFRAEFGPHPFFPGAGKGDGDGEDKGESKSEIRTQQQQQQQQQQRRAAAAATTPIRDLLRDCDKTYPDTCPLPPLTVRVTNEGERASDYVVLAFVSGEYGPAPYPIKTLVSYARARGLKGKGGTGAGDGDVATTTVSLDWTVGNLARHDERGNTILYPGTYTLTLDEPAQASVQFALEGEPVVLDEWPAPPSANSTARGRHR

SEQ ID NO: 2143 - DNA, 2454 bp, Myceliophthora thermophilia
atgtcgacgaccaacccccgcttcccgtttctccgcacgaagcgcggcatcgccctcgtcgtcgccgccgtcctgctcatcgttggcggcggtctgtccgggctggccgcgctgcgcacccgcagcagcggggacggggactctgcgtcggcaggcgaggatggggagggggtgatcaaggatgactcgtggttctacggactgtcgccacctgtgtatccctcgccgaatattacgggtggtgaaggcaagtgggtagaggcgacgaggaaagccagggagttggtgcggaggatgacgcttgaggagaaggtcagcttgactgccggcgatggcacatttcccggctgttccggctctctcccggccattccacgcctcaaattcccgggcatgtgtctgagcgatgcgggaaatgggctccgcggcaccgatttcgtcagtacctggccgagcggtatccacgttggtgccagctggaacaaggctctcgcccgccggcggggttctggaatgggagccgagttcaagaccaagggtgtcaatgtgatgctggggcctgtcgtcgggccagctggtcgagtggtgctgggcggtaggaactgggaaggcttctcaagcgacccctatttatcgggagttttggtatccgagactgtcacggcggtccaagcagccggcgtcatcaccagcaccaagcactatattgccaatgagcaagagacgaaccgaaacccctccggcgacatccagtcggtgtcatcaaacatagatgataggaccatgcacgagttctatctatgctgcaacataatgtgctcgtaccaacgcctcaacaactcgtacggctgcgcaaacagcaaggcgctcaacgggttactcaagaccgagctcggctttcagggctgggtcgtaagcgactggggcgcccagcatgccggggtcgccgcggcactggcaggcatggatgttgccatgccgaatggcgatgctctctggggtccgcatctggtcgacgccgtcaacaatggttcggtttccgaaactcgcgtagacgacatggtcgtcaggacgctcgcgacatggtacctgttgggccaggatcgggacttcccacggcccggtatcggtatgcccacggatctcacgaggaatcacgggattgtcgacgcgaggaactccagtttccggtcaacactgttcgacggtgccgtcgagggtcacgttctggtcaagaacacccgaaacgccctgccgctgagagaaccaaagatgctgtctgttttcggttactcggccaagaacccggaccacaacaatccctcacccggccaatcgccctggctctggggctccgagtccttcaactacaccgagttcggcggccgcttctttggtctccccggcgagtatggctccacgcccatcgccttcaacggcaccatctactcgggtggcgggtccggggccacgtcgccggccgccatggtctccccctttgacgcgctggtccagcgggcatacgacgacggcacggccctcttctgggactttgtcagcggagagcccttcgtcaatcccgcgtcggacgcctgcctggttttcggcaacgcttatgccaccgaggccgccgaccgacccggggcgcgcgacgactacaccgacggcctgatcaggcacgtcgcagaccgctgcgccaacacgatcgtcgtcatccacaatgcggggatccgcctggtcgaccagttcatcgaccaccccaacgtgacggccctcctgttcgcgcacctgcccggggaggcatccgggcgcgcgctggtgtcgctgctgtacggggacgagaacccgtcgggcaagctgccgtatacggtggcgcgcaacgagtcggactatcccgtgctgggcccggacgtggcggccgaggggagcatgttcgcgcggttcccgcagagcaacttcaccgagggcgtgttcctggactatcggcactttgacgcgcggaacatcacgccgcggtacgagttcgggttcgggctgagctataccacgtttgcctacgacaacctggtggtggaaaaggtggcctccgcaggacggctcggcgagtatccgacgggacgggtcgtcgagggcggccaggaggacctgtgggatgtgctggtggaggtgtcggccgaggtgaccaacaccgggaaggtggccggcgccgaggttgcgcagctgtacgtggggatccccgcggagggggcgccggtgaggcagctgaggggcttcgagaagccgttcctgaacgcgtcggcgaccgcgaccgtccggttcccgttgacgaggagggacctgagcgtgtgggatgtggtggcgcagaagtggcggcttgtcaggggtcgtgagtataagatcgaggtgggcggcagcagcagggacttgccgctcgttgggacggttacgatctga

SEQ ID NO: 2144 - protein, 817 aa, Myceliophthora thermophilia
MSTTNPRFPFLRTKRGIALVVAAVLLIVGGGLSGLAALRTRSSGDGDSASAGEDGEGVIKDDSWFYGLSPPVYPSPNITGGEGKWVEATRKARELVRRMTLEEKVSLTAGDGTFPGCSGSLPAIPRLKFPGMCLSDAGNGLRGTDFVSTWPSGIHVGASWNKALARRRGSGMGAEFKTKGVNVMLGPVVGPAGRVVLGGRNWEGFSSDPYLSGVLVSETVTAVQAAGVITSTKHYIANEQETNRNPSGDIQSVSSNIDDRTMHEFYLCCNIMCSYQRLNNSYGCANSKALNGLLKTELGFQGWVVSDWGAQHAGVAAALAGMDVAMPNGDALWGPHLVDAVNNGSVSETRVDDMVVRTLATWYLLGQDRDFPRPGIGMPTDLTRNHGIVDARNSSFRSTLFDGAVEGHVLVKNTRNALPLREPKMLSVFGYSAKNPDHNNPSPGQSPWLWGSESFNYTEFGGRFFGLPGEYGSTPIAFNGTIYSGGGSGATSPAAMVSPFDALVQRAYDDGTALFWDFVSGEPFVNPASDACLVFGNAYATEAADRPGARDDYTDGLIRHVADRCANTIVVIHNAGIRLVDQFIDHPNVTALLFAHLPGEASGRALVSLLYGDENPSGKLPYTVARNESDYPVLGPDVAAEGSMFARFPQSNFTEGVFLDYRHFDARNITPRYEFGFGLSYTTFAYDNLVVEKVASAGRLGEYPTGRVVEGGQEDLWDVLVEVSAEVTNTGKVAGAEVAQLYVGIPAEGAPVRQLRGFEKPFLNASATATVRFPLTRRDLSVWDVVAQKWRLVRGREYKIEVGGSSRDLPLVGTVTI

SEQ ID NO: 2145 - protein, 786 aa, Myceliophthora thermophilia
LSGLAALRTRSSGDGDSASAGEDGEGVIKDDSWFYGLSPPVYPSPNITGGEGKWVEATRKARELVRRMTLEEKVSLTAGDGTFPGCSGSLPAIPRLKFPGMCLSDAGNGLRGTDFVSTWPSGIHVGASWNKALARRRGSGMGAEFKTKGVNVMLGPVVGPAGRVVLGGRNWEGFSSDPYLSGVLVSETVTAVQAAGVITSTKHYIANEQETNRNPSGDIQSVSSNIDDRTMHEFYLCCNIMCSYQRLNNSYGCANSKALNGLLKTELGFQGWVVSDWGAQHAGVAAALAGMDVAMPNGDALWGPHLVDAVNNGSVSETRVDDMVVRTLATWYLLGQDRDFPRPGIGMPTDLTRNHGIVDARNSSFRSTLFDGAVEGHVLVKNTRNALPLREPKMLSVFGYSAKNPDHNNPSPGQSPWLWGSESFNYTEFGGRFFGLPGEYGSTPIAFNGTIYSGGGSGATSPAAMVSPFDALVQRAYDDGTALFWDFVSGEPFVNPASDACLVFGNAYATEAADRPGARDDYTDGLIRHVADRCANTIVVIHNAGIRLVDQFIDHPNVTALLFAHLPGEASGRALVSLLYGDENPSGKLPYTVARNESDYPVLGPDVAAEGSMFARFPQSNFTEGVFLDYRHFDARNITPRYEFGFGLSYTTFAYDNLVVEKVASAGRLGEYPTGRVVEGGQEDLWDVLVEVSAEVTNTGKVAGAEVAQLYVGIPAEGAPVRQLRGFEKPFLNASATATVRFPLTRRDLSVWDVVAQKWRLVRGREYKIEVGGSSRDLPLVGTVTI

SEQ ID NO: 2146 - DNA, 2613 bp, Myceliophthora thermophilia
atgaaggctgctgcgctttcctgcctcttcggcagtacccttgccgttgcaggcgccattgaatcgagaaaggttcaccagaagcccctcgcgagatctgaacctttttacccgtcgccatggatgaatcccaacgccgacggctgggcggaggcctatgcccaggccaagtcctttgtctcccaaatgactctgctagagaaggtcaacttgaccacgggagtcggctggggggctgagcagtgcgtcggccaagtgggcgcgatccctcgccttggacttcgcagtctgtgcatgcatgactcccctctcggcatccgaggagccgactacaactcagcgttcccctctggccagaccgttgctgctacctgggatcgcggtctgatgtaccgtcgcggctacgcaatgggccaggaggccaaaggcaagggcatcaatgtccttctcggaccagtcgccggcccccttggccgcatgcccgagggcggtcgtaactgggaaggcttcgctccggatcccgtccttaccggcatcggcatgtccgagacgatcaagggcattcaggatgctggcgtcatcgcttgtgcgaagcactttattggaaacgagcaggagcacttcagacaggtgccagaagcccagggatacggttacaacatcagcgaaaccctctcctccaacattgacgacaagaccatgcacgagctctacctttggccgtttgccgatgccgtccgggccggcgtcggctctgtcatgtgctcgtaccagcaggtcaacaactcgtacgcctgccagaactcgaagctgctgaacgacctcctcaagaacgagcttgggtttcagggcttcgtcatgagcgactggcaggcacagcacactggcgcagcaagcgccgtggctggtctcgatatgtccatgccgggcgacacccagttcaacactggcgtcagtttctggggcgccaatctcaccctcgccgtcctcaacggcacagtccctgcctaccgtctcgacgacatggccatgcgcatcatggccgccctcttcaaggtcaccaagaccaccgacctggaaccgatcaacttctccttctggaccgacgacacttatggcccgatccactgggccgccaagcagggctaccaggagattaattcccacgttgacgtccgcgccgaccacggcaacctcatccgggagattgccgccaagggtacggtgctgctgaagaataccggctctctacccctgaacaagccaaagttcgtggccgtcatcggcgaggatgctgggtcgagccccaacgggcccaacggctgcagcgaccgcggctgtaacgaaggcacgctcgccatgggctggggatccggcacagccaactatccgtacctcgtttcccccgacgccgcgctccaggcccgggccatccaggacggcacgaggtacgagagcgtcctgtccaactacgccgaggaaaagacaaaggctctggtctcgcaggccaatgcaaccgccatcgtcttcgtcaatgccgactcaggcgagggctacatcaacgtggacggtaacgagggcgaccgtaagaacctgactctctggaacaacggtgatactctggtcaagaacgtctcgagctggtgcagcaacaccatcgtcgtcatccactcggtcggcccggtcctcctgaccgattggtacgacaaccccaacatcacggccattctctgggctggtcttccgggccaggagtcgggcaactccatcaccgacgtgctttacggcaaggtcaaccccgccgcccgctcgcccttcacttggggcaagacccgcgaaagctatggcgcggacgtcctgtacaagccgaataatggcaatggtgcgccccaacaggacttcaccgagggcgtcttcatcgactaccgctacttcgacaaggttgacgatgactcggtcatctacgagttcggccacggcctgagctacaccaccttcgagtacagcaacatccgcgtcgtcaagtccaacgtcagcgagtaccggcccacgacgggcaccacggcccaggccccgacgtttggcaacttctccaccgacctcgaggactatctcttccccaaggacgagttcccctacatctaccagtacatctacccgtacctcaacacgaccgacccccggagggcctcggccgatccccactacggccagaccgccgaggagttcctcccgccccacgccaccgatgacgacccccagccgctcctccggtcctcgggcggaaactcccccggcggcaaccgccagctgtacgacattgtctacacaatcacggccgacatcacgaatacgggctccgttgtaggcgaggaggtaccgcagctctacgtctcgctgggcggtcccgaggatcccaaggtgcagctgcgcgactttgacaggatgcggatcgaacccggcgagacgaggcagttcaccggccgcctgacgcgcagagatctgagcaactgggacgtcacggtgcaggactgggtcatcagcaggtatcccaagacggcatatgttgggaggagcagccggaagttggatctcaagattgagcttccttga

SEQ ID NO: 2147 - protein, 870 aa, Myceliophthora thermophilia
MKAAALSCLFGSTLAVAGAIESRKVHQKPLARSEPFYPSPWMNPNADGWAEAYAQAKSFVSQMTLLEKVNLTTGVGWGAEQCVGQVGAIPRLGLRSLCMHDSPLGIRGADYNSAFPSGQTVAATWDRGLMYRRGYAMGQEAKGKGINVLLGPVAGPLGRMPEGGRNWEGFAPDPVLTGIGMSETIKGIQDAGVIACAKHFIGNEQEHFRQVPEAQGYGYNISETLSSNIDDKTMHELYLWPFADAVRAGVGSVMCSYQQVNNSYACQNSKLLNDLLKNELGFQGFVMSDWQAQHTGAASAVAGLDMSMPGDTQFNTGVSFWGANLTLAVLNGTVPAYRLDDMAMRIMAALFKVTKTTDLEPINFSFWTDDTYGPIHWAAKQGYQEINSHVDVRADHGNLIREIAAKGTVLLKNTGSLPLNKPKFVAVIGEDAGSSPNGPNGCSDRGCNEGTLAMGWGSGTANYPYLVSPDAALQARAIQDGTRYESVLSNYAEEKTKALVSQANATAIVFVNADSGEGYINVDGNEGDRKNLTLWNNGDTLVKNVSSWCSNTIVVIHSVGPVLLTDWYDNPNITAILWAGLPGQESGNSITDVLYGKVNPAARSPFTWGKTRESYGADVLYKPNNGNGAPQQDFTEGVFIDYRYFDKVDDDSVIYEFGHGLSYTTFEYSNIRVVKSNVSEYRPTTGTTAQAPTFGNFSTDLEDYLFPKDEFPYIYQYIYPYLNTTDPRRASADPHYGQTAEEFLPPHATDDDPQPLLRSSGGNSPGGNRQLYDIVYTITADITNTGSVVGEEVPQLYVSLGGPEDPKVQLRDFDRMRIEPGETRQFTGRLTRRDLSNWDVTVQDWVISRYPKTAYVGRSSRKLDLKIELP

SEQ ID NO: 2148 - protein, 851 aa, Myceliophthora thermophilia
IESRKVHQKPLARSEPFYPSPWMNPNADGWAEAYAQAKSFVSQMTLLEKVNLTTGVGWGAEQCVGQVGAIPRLGLRSLCMHDSPLGIRGADYNSAFPSGQTVAATWDRGLMYRRGYAMGQEAKGKGINVLLGPVAGPLGRMPEGGRNWEGFAPDPVLTGIGMSETIKGIQDAGVIACAKHFIGNEQEHFRQVPEAQGYGYNISETLSSNIDDKTMHELYLWPFADAVRAGVGSVMCSYQQVNNSYACQNSKLLNDLLKNELGFQGFVMSDWQAQHTGAASAVAGLDMSMPGDTQFNTGVSFWGANLTLAVLNGTVPAYRLDDMAMRIMAALFKVTKTTDLEPINFSFWTDDTYGPIHWAAKQGYQEINSHVDVRADHGNLIREIAAKGTVLLKNTGSLPLNKPKFVAVIGEDAGSSPNGPNGCSDRGCNEGTLAMGWGSGTANYPYLVSPDAALQARAIQDGTRYESVLSNYAEEKTKALVSQANATAIVFVNADSGEGYINVDGNEGDRKNLTLWNNGDTLVKNVSSWCSNTIVVIHSVGPVLLTDWYDNPNITAILWAGLPGQESGNSITDVLYGKVNPAARSPFTWGKTRESYGADVLYKPNNGNGAPQQDFTEGVFIDYRYFDKVDDDSVIYEFGHGLSYTTFEYSNIRVVKSNVSEYRPTTGTTAQAPTFGNFSTDLEDYLFPKDEFPYIYQYIYPYLNTTDPRRASADPHYGQTAEEFLPPHATDDDPQPLLRSSGGNSPGGNRQLYDIVYTITADITNTGSVVGEEVPQLYVSLGGPEDPKVQLRDFDRMRIEPGETRQFTGRLTRRDLSNWDVTVQDWVISRYPKTAYVGRSSRKLDLKIELP

SEQ ID NO: 2149 - DNA, 1179 bp, Myceliophthora thermophilia
atgccgccaccacgactgagcaccctccttcccctcctagccttaatagcccccaccgccctggggcactcccacctcgggtacatcatcatcaacggcgaggtataccaaggattcgacccgcggccggagcaggcgaactcgccgttgcgcgtgggctggtcgacgggggcaatcgacgacgggttcgtggcgccggccaactactcgtcgcccgacatcatctgccacatcgagggggccagcccgccggcgcacgcgcccgtccgggcgggcgaccgggtgcacgtgcaatggaaacggctggccgctcggacacgtggggccggtgctgtcgtacctggcgccctgcggcgggctggaggggtccgagagcgggtggacgactcgctgccggcgatggagctggtcggggccgcggggggcgcggggggcgaggacgacggcagcggcagcgacggcagcggcagcggcggcagcggacgcgtcggcgtgcccgggcagcgctgggccaccgacgtgttgatcgcggccaacaacagctggcaggtcgagatcccgcgcgggctgcgggacgggccgtacgtgctgcgccacgagatcgtcgcgctgcactacgcggccgagcccggcggcgcgcagaactacccgctctgcgtcaacctgtgggtcgagggcggcgacggcagcatggagctggaccacttcgacgccacccagttctaccggcccgacgacccgggcatcctgctcaacgtgacggccggcctgcgctcatacgccgtgccgggcccgacgctggccgcgggggcgacgccggtgccgtacgcgcagcagaacatcagctcggcgagggcggatggaacccccgtgattgtcaccaggagcacggagacggtgcccttcaccgcggcacccacgccagccgagacggcagaagccaaaggggggaggtatgatgaccaaacccgaactaaagacctaaatgaacgcttcttttatagtagccggccagaacagaagaggctgacagcgacctcaagaagggaactagttgatcatcgtacccggtacctctccgtagctgtctgcgcagatttcggcgctcataaggcagcagaaaccaaccacgaagctttgagaggcggcaataagcaccatggcggtgtttcagagtga

SEQ ID NO: 2150 - protein, 392 aa, Myceliophthora thermophilia
MPPPRLSTLLPLLALIAPTALGHSHLGYIIINGEVYQGFDPRPEQANSPLRVGWSTGAIDDGFVAPANYSSPDIICHIEGASPPAHAPVRAGDRVHVQWKRLAARTRGAGAVVPGALRRAGGVRERVDDSLPAMELVGAAGGAGGEDDGSGSDGSGSGGSGRVGVPGQRWATDVLIAANNSWQVEIPRGLRDGPYVLRHEIVALHYAAEPGGAQNYPLCVNLWVEGGDGSMELDHFDATQFYRPDDPGILLNVTAGLRSYAVPGPTLAAGATPVPYAQQNISSARADGTPVIVTRSTETVPFTAAPTPAETAEAKGGRYDDQTRTKDLNERFFYSSRPEQKRLTATSRRELVDHRTRYLSVAVCADFGAHKAAETNHEALRGGNKHHGGVSE

SEQ ID NO: 2151 - protein, 370 aa, Myceliophthora thermophilia
HSHLGYIIINGEVYQGFDPRPEQANSPLRVGWSTGAIDDGFVAPANYSSPDIICHIEGASPPAHAPVRAGDRVHVQWKRLAARTRGAGAVVPGALRRAGGVRERVDDSLPAMELVGAAGGAGGEDDGSGSDGSGSGGSGRVGVPGQRWATDVLIAANNSWQVEIPRGLRDGPYVLRHEIVALHYAAEPGGAQNYPLCVNLWVEGGDGSMELDHFDATQFYRPDDPGILLNVTAGLRSYAVPGPTLAAGATPVPYAQQNISSARADGTPVIVTRSTETVPFTAAPTPAETAEAKGGRYDDQTRTKDLNERFFYSSRPEQKRLTATSRRELVDHRTRYLSVAVCADFGAHKAAETNHEALRGGNKHHGGVSE

SEQ ID NO: 2152 - DNA, 762 bp, Myceliophthora thermophilia
atgaagatcccgctcgccaccggcctcgcttcggccttgcttgccgtgtcggcggccgccgccccgactccggccgctcggcaggccaagccggctgccttcttcctcgcgggcgactcgacgacggccgtcaatggcggctggggcgacggcttcgttgctctcctgcggaacggagccatcggccagaacaagggccacagcggcgccacgacggcgtcgttcgtcgccggcggcgactgggcaagcgtcctcgacctggtcgagagcaacaaggccggcggatacgactgctacgtgacgatccagttcggccacaacgatcagaaatccacctcgggcatcagcatctcgcagtttcagaccaacctcgagaacatggcgcgggacgtcgagcgggcagggggcacgccggtgatcctgacgtcgctgacgcggcgcaccttcaccaacaacggcgtgctcgacgacagcctggccgacgtgtccgaggcggcccggaaggcggcggccgccgccgcgggcgtcgccctgctcgacctcaacgccgcctcgcgcgcgtacgtccaggccatcggccagcaggccgccgaccgctacaacctcgccgacggcgaccgcacccacctcaacccccacggcgaggccgtctttgcccgcatcgtcgccgacctcgtcgtcggctggaagcgggagctcgccgaatacgtcaccccggacccggaaatgtcggacaagatcgcccggggagagtatgtctga

SEQ ID NO: 2153 - protein, 253 aa, Myceliophthora thermophilia
MKIPLATGLASALLAVSAAAAPTPAARQAKPAAFFLAGDSTTAVNGGWGDGFVALLRNGAIGQNKGHSGATTASFVAGGDWASVLDLVESNKAGGYDCYVTIQFGHNDQKSTSGISISQFQTNLENMARDVERAGGTPVILTSLTRRTFTNNGVLDDSLADVSEAARKAAAAAAGVALLDLNAASRAYVQAIGQQAADRYNLADGDRTHLNPHGEAVFARIVADLVVGWKRELAEYVTPDPEMSDKIARGEYV

SEQ ID NO: 2154 - protein, 233 aa, Myceliophthora thermophilia
APTPAARQAKPAAFFLAGDSTTAVNGGWGDGFVALLRNGAIGQNKGHSGATTASFVAGGDWASVLDLVESNKAGGYDCYVTIQFGHNDQKSTSGISISQFQTNLENMARDVERAGGTPVILTSLTRRTFTNNGVLDDSLADVSEAARKAAAAAAGVALLDLNAASRAYVQAIGQQAADRYNLADGDRTHLNPHGEAVFARIVADLVVGWKRELAEYVTPDPEMSDKIARGEYV

SEQ ID NO: 2155 - DNA, 786 bp, Myceliophthora thermophilia
atgagagcctctgtcctgccagtcttgatagcaatcagccccgcgctcgcggggttcgacacctggtccccccctggaccgtatgacgtccgagccccgtgtcccatgctgaacacgctggcaaaccacggcttcctgccccacgacggcaaggacatcaccagggagcagaccgagaacgccctgtttgaggccctccacatcaacaagacgctggccagcttcctcttcgatttcgcactcaccaccaaccccaagaacacgagcactttctcgctcaacgacctcggaaaccacaacatcctcgagcacgacgcgagtctgagccgggccgacgcgtattttggcaatgtcctgcagttcaaccagaccgtcttcgacgagaccaagacgtactgggagggtgacacgatcgatctcaggatggccgccaaggcgagactcggccggatcaagacctcccaggcgaccaacccgacctactcgatgtcggagctcggcgacgcctttacctacggcgagtcggccgcctacgtcgtcgtgctgggcgacaaggagtcgcgcaccgtcaagaggtcctgggtggaatggttctttgagcatgagcagctgcctcaacatcttggctggaagaggccggccgcgtcctttgaggaggaggacctgaacagttccatggaggaaatcgagaaatacacaaaggagcttgagggatcgaacagcacgtcaggctctcagaagcaccgtcgtcggttaccccgccgtcgcgcccactttggtttctaa

SEQ ID NO: 2156 - protein, 261 aa, Myceliophthora thermophilia
MRASVLPVLIAISPALAGFDTWSPPGPYDVRAPCPMLNTLANHGFLPHDGKDITREQTENALFEALHINKTLASFLFDFALTTNPKNTSTFSLNDLGNHNILEHDASLSRADAYFGNVLQFNQTVFDETKTYWEGDTIDLRMAAKARLGRIKTSQATNPTYSMSELGDAFTYGESAAYVVVLGDKESRTVKRSWVEWFFEHEQLPQHLGWKRPAASFEEEDLNSSMEEIEKYTKELEGSNSTSGSQKHRRRLPRRRAHFGF

SEQ ID NO: 2157 - protein, 244 aa, Myceliophthora thermophilia
GFDTWSPPGPYDVRAPCPMLNTLANHGFLPHDGKDITREQTENALFEALHINKTLASFLFDFALTTNPKNTSTFSLNDLGNHNILEHDASLSRADAYFGNVLQFNQTVFDETKTYWEGDTIDLRMAAKARLGRIKTSQATNPTYSMSELGDAFTYGESAAYVVVLGDKESRTVKRSWVEWFFEHEQLPQHLGWKRPAASFEEEDLNSSMEEIEKYTKELEGSNSTSGSQKHRRRLPRRRAHFGF

SEQ ID NO: 2158 - DNA, 3174 bp, Myceliophthora thermophilia
atgagaacgaaagcaactctccttaccggtctgctgtcgctcgcggcccagactggcagggccgatccgacatggcccgcagctaccgaccacatggaggagatcgtcttccagcttcaggggttcaaagggagcctgttcaacgacatcatcacgccctgcaacaacgaagctgccggtcctggacgcatcacggcgagcgaatggctgcgtgtgggattccatgacatggcaccgcacaaccgctactttggcacaggtggacttgacggctcgctgcaattcgagctgaacaatggcgagaacacgggccccggccaccgcactacgctcgagttccttgccaactacttgtcttccaggtcaagcctcgccgacctgatcgccgctggagtatacgcctcggttcgctcctgcggcggccccatagttcccctgagactgggccgcaaagatgccatcacggccggcagcgcgggtgttccgcagccccagaactcggtcgttactttcaggcagcagtttgaccggatgggattcacccccaccgagatgatccagctggtcgcctgcggccataccctcggcgctgttcacagcaccgagtttcctcagatcgtccccgccaacgtcggccaaattcccttcgatacgaccaacgccacgttcgacaacagggtggccaccgagtacgtgtccgggaacacccagaaccctcttgtcgttggcgcttccattggtgtcggccgtaattcggacttcaaggtttacaactcggaccagaacgtgaccatcaccaccctgaccgatcctgatgtcttccgcgacacctgccgggtcgtgctccagaaaatgatcgatgttgttcccgccggtgtcacccttaccgaccccatcgcgccgtatgccgtcaagccggtcgacatgcagctgaccctgaactcgggcggcaccaccttcctcttgacaggacacattcgagtccggaccacggagctgccggcgagctccatcaagaacgttgtcctcacctggaaggaccggaacggcgggaacgactgcggctcctccagcacttgctccacgacctccacgttgcagggcgtcgctaccggatttgacgacacctttggattcttcccgattgaggctaccattccggttgcgtccggtatctcgtccttcactctcgtcctgaacctcaatgacggttcgagcaggacatacgataacaatggcaactcgtaccccatgtctgatgccgttatcctgcagaagccacagagctgcctgctccaagggcccggggcactcactgtctctgctcttctccgcaacgacctcagcaacctcccagttaatctcgtggtctcgtatctaactcctcgcaacacccccgacgacaacccagttccggccctgaacgaagctaccgtgcagatgacgaagggcgactgcgttggcccgtacactttctattcaggcagtttcaccattcccggcgggcttagctacaatgccaggatcagcgtaaccgctggttcgaatgtcaccgcctacactgatgacttcaacaaggcgagcgatctcagcggtacttgcggcaccttcaccggtggcgccacctgttccgatgttacaccaccgagtacttcctccgtgacatcgtcgacttccacgtcctccagctctgctagcgttaccagcaccacgtccggttccagcagctcgaccgccagcacgaccgccagcactaccgcctccccgacccctgctgtcaagcctacggtcggtggttacgtttttgtcagttgctggaccgaaggaacgggcgtgcgggcgctcagcggggctactttcgcctacgatgagatgacactcgaatcctgcatggccaactgcaccggcttcgattactgggccaccgagtacggcagggaatgctactgtggcaatagcctccatcccagcagcagtgaggccccggttgaggagtgcaacatggtgtgtggcggtgatccgaccgaattttgcggcgccggaaaccgcctcgagctgtattcgaccaccgccacccgtaccacgtctgccactcccaccccgacgggcacgctggctgtcaagccgactgtgggcgactacacctttgtcggatgccagacggaggcggccaccggcagagctcttagcgggaaggaggtatacgctgacgactcgatgacgcttgagaagtgtgcgacgtactgcgccggcttcacttacttcggcaccgagtacggccgcgaatgcttctgcggtaacagcctcaacgccggcagcgttccggctcccgaggccgagtgcgacatggtgtgcgcaggtgacccgttcgagtactgcggcgccggaaaccgcctcgagctctaccgactctcgagcgtatcctccacggcgggcccgtcctcggaagccgccacgaccagcacaacaacaggccccgccacctcgaccacgattccctcgcgggccccgaccgtctctcccttcacccacgtcggctgctggaccgaaggcgctggcgtccgcgccctcgctgccaagacgtacgcttcggccgacaacatgaccctcgagaactgcgccgccttttgcaccggctacaggtactttggcaccgagtacgccgccgagtgttactgcggcaatgccctcgccgcgacgtcctccaacgcctcgctcgccgactgctccatgccctgctcgggcgacccggcccagtactgcggcgggcccaaccgtctggagctgtacgaagaccctaccgtcccgccggcgcccacggcacagccgacccaacccgccaccgtcacggccaccgcgaccggcgcgggcggcagcaccacatggacgtggcacgggtgcatgacggaggcgacgggcgtgcgggcgctcgggaaggctagcaccgcgtcggacgagctgacgctggaggcgtgcgcggccttttgcgagggccacgctttcttcggggccgagtacgggcgggagtgctactgtggcgatgagttcgccgagggtgccgtcgaggcgcccgagcaggcggactgctcgatgccgtgcgccggagacgcgacccagctgtgcggcgacggcaaccggctgagcgtgtacgccaaggcggagccggcagcgtga

SEQ ID NO: 2159 - protein, 1057 aa, Myceliophthora thermophilia
MRTKATLLTGLLSLAAQTGRADPTWPAATDHMEEIVFQLQGFKGSLFNDIITPCNNEAAGPGRITASEWLRVGFHDMAPHNRYFGTGGLDGSLQFELNNGENTGPGHRTTLEFLANYLSSRSSLADLIAAGVYASVRSCGGPIVPLRLGRKDAITAGSAGVPQPQNSVVTFRQQFDRMGFTPTEMIQLVACGHTLGAVHSTEFPQIVPANVGQIPFDTTNATFDNRVATEYVSGNTQNPLVVGASIGVGRNSDFKVYNSDQNVTITTLTDPDVFRDTCRVVLQKMIDVVPAGVTLTDPIAPYAVKPVDMQLTLNSGGTTFLLTGHIRVRTTELPASSIKNVVLTWKDRNGGNDCGSSSTCSTTSTLQGVATGFDDTFGFFPIEATIPVASGISSFTLVLNLNDGSSRTYDNNGNSYPMSDAVILQKPQSCLLQGPGALTVSALLRNDLSNLPVNLVVSYLTPRNTPDDNPVPALNEATVQMTKGDCVGPYTFYSGSFTIPGGLSYNARISVTAGSNVTAYTDDFNKASDLSGTCGTFTGGATCSDVTPPSTSSVTSSTSTSSSSASVTSTTSGSSSSTASTTASTTASPTPAVKPTVGGYVFVSCWTEGTGVRALSGATFAYDEMTLESCMANCTGFDYWATEYGRECYCGNSLHPSSSEAPVEECNMVCGGDPTEFCGAGNRLELYSTTATRTTSATPTPTGTLAVKPTVGDYTFVGCQTEAATGRALSGKEVYADDSMTLEKCATYCAGFTYFGTEYGRECFCGNSLNAGSVPAPEAECDMVCAGDPFEYCGAGNRLELYRLSSVSSTAGPSSEAATTSTTTGPATSTTIPSRAPTVSPFTHVGCWTEGAGVRALAAKTYASADNMTLENCAAFCTGYRYFGTEYAAECYCGNALAATSSNASLADCSMPCSGDPAQYCGGPNRLELYEDPTVPPAPTAQPTQPATVTATATGAGGSTTWTWHGCMTEATGVRALGKASTASDELTLEACAAFCEGHAFFGAEYGRECYCGDEFAEGAVEAPEQADCSMPCAGDATQLCGDGNRLSVYAKAEPAA

SEQ ID NO: 2160 - protein, 1036 aa, Myceliophthora thermophilia
DPTWPAATDHMEEIVFQLQGFKGSLFNDIITPCNNEAAGPGRITASEWLRVGFHDMAPHNRYFGTGGLDGSLQFELNNGENTGPGHRTTLEFLANYLSSRSSLADLIAAGVYASVRSCGGPIVPLRLGRKDAITAGSAGVPQPQNSVVTFRQQFDRMGFTPTEMIQLVACGHTLGAVHSTEFPQIVPANVGQIPFDTTNATFDNRVATEYVSGNTQNPLVVGASIGVGRNSDFKVYNSDQNVTITTLTDPDVFRDTCRVVLQKMIDVVPAGVTLTDPIAPYAVKPVDMQLTLNSGGTTFLLTGHIRVRTTELPASSIKNVVLTWKDRNGGNDCGSSSTCSTTSTLQGVATGFDDTFGFFPIEATIPVASGISSFTLVLNLNDGSSRTYDNNGNSYPMSDAVILQKPQSCLLQGPGALTVSALLRNDLSNLPVNLVVSYLTPRNTPDDNPVPALNEATVQMTKGDCVGPYTFYSGSFTIPGGLSYNARISVTAGSNVTAYTDDFNKASDLSGTCGTFTGGATCSDVTPPSTSSVTSSTSTSSSSASVTSTTSGSSSSTASTTASTTASPTPAVKPTVGGYVFVSCWTEGTGVRALSGATFAYDEMTLESCMANCTGFDYWATEYGRECYCGNSLHPSSSEAPVEECNMVCGGDPTEFCGAGNRLELYSTTATRTTSATPTPTGTLAVKPTVGDYTFVGCQTEAATGRALSGKEVYADDSMTLEKCATYCAGFTYFGTEYGRECFCGNSLNAGSVPAPEAECDMVCAGDPFEYCGAGNRLELYRLSSVSSTAGPSSEAATTSTTTGPATSTTIPSRAPTVSPFTHVGCWTEGAGVRALAAKTYASADNMTLENCAAFCTGYRYFGTEYAAECYCGNALAATSSNASLADCSMPCSGDPAQYCGGPNRLELYEDPTVPPAPTAQPTQPATVTATATGAGGSTTWTWHGCMTEATGVRALGKASTASDELTLEACAAFCEGHAFFGAEYGRECYCGDEFAEGAVEAPEQADCSMPCAGDATQLCGDGNRLSVYAKAEPAA

SEQ ID NO: 2161 - DNA, 1185 bp, Myceliophthora thermophilia
atgaagatcagatatgtattcctcctcttcctcggcctcgcttcgcctggggtctctcggactctcctgggtatgaacaaatctctcgccggagaaatctcacccgccgccgcgaagcgtcagacaggggaactcctagcggacctcagcaccctccctgacgccgctctgtcaccggcgggctggacgatcaagaacattctgctcggcaaccgcgcggccgtatcaccgcaggacctgaccaccgtctacacggccccgggaccgctcgacagctccgaatgccgccgcgagacctgctgcgtgtggaagtacatcgcagacgccatggctacgtccttccgcgacggcgccggcaggtgtaacgagctcgcgcgccaggcggtccgcctgggcttccatgacgccggcacgtggtcgaagtccgcgggcggcggcggcgccgatgggtccgtcctcttggctcccagtgagctggcgcgggacgacaaccgcgccctcgaggtcgtcgcggcacaaatggcggcctggtacgcggagtggcggccccgcggcgcccgcatggccgacctgatccagatgggcgcggtggtagcagccgcgtcatgcccgctgggcccccgggcacgcgccttcgtcgggcgcaacgacagtgccacacccgcccctccggaccggctcccctcggccgccaacagcgacgccgccgcgctggcggcgctgtttgctgacaagacgctcagcctcggcgagcttgtcgccctcgtcggtgcccacaccaccagcgttcagcggttcttcgacccgctcgccgccgggtccccgcaggactctacgccgggcgtctgggacaccctctactacaaccagacggccagctcggatcctccgcagggcgtgtttcgtttcccgagcgacctggcgctgtcgcaatacccccccgcgcgtgagctgtggcaaacatttgcgaatgcgcaggctgtgtggaatgatgtgagcttcattttgccatgtgtatttttcatgcgtcttcttcctttttcactggtgagagacaggaagagacaaggtgctaatgctggcttgcaggactttgccgctgcgtacgtacaccttagcgtgctcggtgttgagcacatcaatgacctgacagagtgcaccggtgtgctgccattgtcgggttga

SEQ ID NO: 2162 - protein, 394 aa, Myceliophthora thermophilia
MKIRYVFLLFLGLASPGVSRTLLGMNKSLAGEISPAAAKRQTGELLADLSTLPDAALSPAGWTIKNILLGNRAAVSPQDLTTVYTAPGPLDSSECRRETCCVWKYIADAMATSFRDGAGRCNELARQAVRLGFHDAGTWSKSAGGGGADGSVLLAPSELARDDNRALEVVAAQMAAWYAEWRPRGARMADLIQMGAVVAAASCPLGPRARAFVGRNDSATPAPPDRLPSAANSDAAALAALFADKTLSLGELVALVGAHTTSVQRFFDPLAAGSPQDSTPGVWDTLYYNQTASSDPPQGVFRFPSDLALSQYPPARELWQTFANAQAVWNDVSFILPCVFFMRLLPFSLVRDRKRQGANAGLQDFAAAYVHLSVLGVEHINDLTECTGVLPLSG

SEQ ID NO: 2163 - protein, 375 aa, Myceliophthora thermophilia
RTLLGMNKSLAGEISPAAAKRQTGELLADLSTLPDAALSPAGWTIKNILLGNRAAVSPQDLTTVYTAPGPLDSSECRRETCCVWKYIADAMATSFRDGAGRCNELARQAVRLGFHDAGTWSKSAGGGGADGSVLLAPSELARDDNRALEVVAAQMAAWYAEWRPRGARMADLIQMGAVVAAASCPLGPRARAFVGRNDSATPAPPDRLPSAANSDAAALAALFADKTLSLGELVALVGAHTTSVQRFFDPLAAGSPQDSTPGVWDTLYYNQTASSDPPQGVFRFPSDLALSQYPPARELWQTFANAQAVWNDVSFILPCVFFMRLLPFSLVRDRKRQGANAGLQDFAAAYVHLSVLGVEHINDLTECTGVLPLSG

SEQ ID NO: 2164 - DNA, 1662 bp, Myceliophthora thermophilia
atgccgcttctcacgctgctgaagaagcagctgacgaaaaccaagctcacctttcacttccttttctggtcgcttcactggggcctcttcgcctatggatggtacaaacaagcgaacgatgcgcgcctggccggcctcaacacgcttcagtactcggtgtggatatcgcgaggtgccggcttggtcctgagcgtcgacgggatgctcatcctgctcccggtctgcagaaccattatgcgctttgtccggccaaagatccggttcctcccgcttgacgagaacatctggatgcaccggcagctcgcctacgccatgttgctgttcaccatcatccacacagcagggcattatgtgaacttctacaacgtcgagaagacccagatccggccagtgacagcggtgcagatccattacgtacagcccggcggcatcaccggccatgtcatgctcttctgcatgcttctgatgtacacgtcggcgcaccaccgcatcagacagcaatctttcgagaccttttggtacctgcaccacctcttcattcccttcttcctcgccctctacacccacaccgtcggctgcttcgtccgagacacagccgaacccatttccccgtttgctggcgaagagtactggaagcattgcattggttacctgggctggagatgggagctctggaccggcggcttctacctcctcgagcggctgtatcgcgagatccgtgccgtgcgcgagaccaagattacccgtgtcatcaggcatccctatgacgtggtcgagatccagttcagcaagccgtcgttcaagtacaaggccggccagtggctgttcctccaggtacccgaaatctccaagtaccagtggcatccgttcaccatcacgtcctgcccgtacgacccttacgtctcggttcacatccgccaggtcggcgacttcaccaaggcgctgggtgacagagtgggtgccggtgccgcgcagagcaagctctacgagggcgtcgacccgatgggcatgtacgaagtggcgcttcagaacggccagcaaatgccgctccttcgcatcgacggcccatacggtgctccggccgaggacgtgttcgagaacgaaatcgcggtcctggtcggaaccggtatcggcgtcactccgtgggcctccatcctgaagaacatctggcacctgcgcaacgggccgaacccgccgacgcggctgcgccgtgtcgagttcatctgggtgtgcaaggacacgacctcgttcgagtggttccagaccctgctctcttccctggagcggcagtcggacgaagccgcccgcgtgcccggttcgggcgggatcgagttcctcaagatccacacctacctgacgcagaagctcgacatggacacgacgcaaaacatcgtcctgaacagcgtcggtgccgatctggacccgctcaccgagctcaaggcccggaccaactttggccgccccaacttcaacaagctcttcaccagcatgcgcgacggcatcctcaaccggacctatctcaacgggctcgagggcaacatgaggacgaccgtgggagtctacttctgcggtccctcggcagccgcccgcgacatcaagaaggctgccaaggcggccaccgtccgcgaagtccgcttccgcttctggaaggaacatttctaa

SEQ ID NO: 2165 - protein, 553 aa, Myceliophthora thermophilia
MPLLTLLKKQLTKTKLTFHFLFWSLHWGLFAYGWYKQANDARLAGLNTLQYSVWISRGAGLVLSVDGMLILLPVCRTIMRFVRPKIRFLPLDENIWMHRQLAYAMLLFTIIHTAGHYVNFYNVEKTQIRPVTAVQIHYVQPGGITGHVMLFCMLLMYTSAHHRIRQQSFETFWYLHHLFIPFFLALYTHTVGCFVRDTAEPISPFAGEEYWKHCIGYLGWRWELWTGGFYLLERLYREIRAVRETKITRVIRHPYDVVEIQFSKPSFKYKAGQWLFLQVPEISKYQWHPFTITSCPYDPYVSVHIRQVGDFTKALGDRVGAGAAQSKLYEGVDPMGMYEVALQNGQQMPLLRIDGPYGAPAEDVFENEIAVLVGTGIGVTPWASILKNIWHLRNGPNPPTRLRRVEFIWVCKDTTSFEWFQTLLSSLERQSDEAARVPGSGGIEFLKIHTYLTQKLDMDTTQNIVLNSVGADLDPLTELKARTNFGRPNFNKLFTSMRDGILNRTYLNGLEGNMRTTVGVYFCGPSAAARDIKKAAKAATVREVRFRFWKEHF

SEQ ID NO: 2166 - protein, 522 aa, Myceliophthora thermophilia
YGWYKQANDARLAGLNTLQYSVWISRGAGLVLSVDGMLILLPVCRTIMRFVRPKIRFLPLDENIWMHRQLAYAMLLFTIIHTAGHYVNFYNVEKTQIRPVTAVQIHYVQPGGITGHVMLFCMLLMYTSAHHRIRQQSFETFWYLHHLFIPFFLALYTHTVGCFVRDTAEPISPFAGEEYWKHCIGYLGWRWELWTGGFYLLERLYREIRAVRETKITRVIRHPYDVVEIQFSKPSFKYKAGQWLFLQVPEISKYQWHPFTITSCPYDPYVSVHIRQVGDFTKALGDRVGAGAAQSKLYEGVDPMGMYEVALQNGQQMPLLRIDGPYGAPAEDVFENEIAVLVGTGIGVTPWASILKNIWHLRNGPNPPTRLRRVEFIWVCKDTTSFEWFQTLLSSLERQSDEAARVPGSGGIEFLKIHTYLTQKLDMDTTQNIVLNSVGADLDPLTELKARTNFGRPNFNKLFTSMRDGILNRTYLNGLEGNMRTTVGVYFCGPSAAARDIKKAAKAATVREVRFRFWKEHF

SEQ ID NO: 2167 - DNA, 1563 bp, Myceliophthora thermophilia
atgttccacaagatgatgatggtctcccccctggccatcctcttggtcctcgcctcggcggcgaccagggcggcggcgttcgagtactacacgttcgacgggcccgggtttccctcgtgccacaacgtgtcgagggtctacaacgccacgagcgtggacgacgtggcctcgctggtcaagtccctgacggcctccaacaacaacacggcggtgcgcgtgcgggcggcgggcaagggccacatgtggtacgacacgcagtgcagcgactcccagacggtgctcgtccgcaccgaggacctccacgccatctcggacctggacctgcccgccggtgccgagagcgggtcggtctgggtcgaggccggcgtgaccttcttccagctggccgagtacctgcacgagcggggcgcctcggtcggctacacgctgaccaactggaacatcagcttcggcggcagcgtcgccatgggcgcccaccggtcctccatccgcgaggacagcatggtcgccgccggcgtgctggccatggacattgtggacggcgccggcgaggtgaggcgcgtcgtcagggacgagagcgacgacgagtggctcgccgcctcgacctccctcggcctgctgggcatcatcgtgagaatccagctcaaggtgtatccggacaccaaggtctatgccaagcaggagacgctcgacgagaaggacgttctggacggcgacgtctatggcttgattgcgccgtatgcaaccgccaatctctggtggtggccgtacaagagaaagttccaccagcggtactacgacacggtgccggccaactcgacgccgcaggagggcttccagaacaccttctccgtgacggagctggaggcggtgacggcgcgcaccatgctcgacagcggcaagtacctgccgacgtccaacatgttggccgaggagatcttcttcggcctgtggtccaagcccaacttccgcgagaagaagaccaacgaggcgatcgacgagtggcccgtctacggctggaactacgacgtcctcatcggcggcctgtacccggaccagaagcccgagtgggagtacggcctggccggctacacactcgagctggccttccccgtcaccatggcaaaccagatgctcaagagggtccgtcagctgtttgacgacgagctcaagaagggcatcgtcatgacgtccacgtaccggagcggcatcaacatcaagttcggcaaggcctactacgacctcctcggccaggtcacgtacaacacgtccgacggggccgactggagcaagggcgccatcatgttcgacttcccctcgtaccggcccaccatcggcgaccacaagcgcttcaacgagccgttctaccacaagctagcgaacacgctcattgacgagttcccgtgccgcccgcactggaccaagaacacgcgcgaggtctttgctcgatccgtcaagaacctcgatcccgaccatcttcgccgcttcaacgccgtccggaaacgcttcgaccctaacggcatataccggagcatcgtcggagagattctgggtttctattaa

SEQ ID NO: 2168 - protein, 520 aa, Myceliophthora thermophilia
MFHKMMMVSPLAILLVLASAATRAAAFEYYTFDGPGFPSCHNVSRVYNATSVDDVASLVKSLTASNNNTAVRVRAAGKGHMWYDTQCSDSQTVLVRTEDLHAISDLDLPAGAESGSVWVEAGVTFFQLAEYLHERGASVGYTLTNWNISFGGSVAMGAHRSSIREDSMVAAGVLAMDIVDGAGEVRRVVRDESDDEWLAASTSLGLLGIIVRIQLKVYPDTKVYAKQETLDEKDVLDGDVYGLIAPYATANLWWWPYKRKFHQRYYDTVPANSTPQEGFQNTFSVTELEAVTARTMLDSGKYLPTSNMLAEEIFFGLWSKPNFREKKTNEAIDEWPVYGWNYDVLIGGLYPDQKPEWEYGLAGYTLELAFPVTMANQMLKRVRQLFDDELKKGIVMTSTYRSGINIKFGKAYYDLLGQVTYNTSDGADWSKGAIMFDFPSYRPTIGDHKRFNEPFYHKLANTLIDEFPCRPHWTKNTREVFARSVKNLDPDHLRRFNAVRKRFDPNGIYRSIVGEILGFY

SEQ ID NO: 2169 - protein, 494 aa, Myceliophthora thermophilia
FEYYTFDGPGFPSCHNVSRVYNATSVDDVASLVKSLTASNNNTAVRVRAAGKGHMWYDTQCSDSQTVLVRTEDLHAISDLDLPAGAESGSVWVEAGVTFFQLAEYLHERGASVGYTLTNWNISFGGSVAMGAHRSSIREDSMVAAGVLAMDIVDGAGEVRRVVRDESDDEWLAASTSLGLLGIIVRIQLKVYPDTKVYAKQETLDEKDVLDGDVYGLIAPYATANLWWWPYKRKFHQRYYDTVPANSTPQEGFQNTFSVTELEAVTARTMLDSGKYLPTSNMLAEEIFFGLWSKPNFREKKTNEAIDEWPVYGWNYDVLIGGLYPDQKPEWEYGLAGYTLELAFPVTMANQMLKRVRQLFDDELKKGIVMTSTYRSGINIKFGKAYYDLLGQVTYNTSDGADWSKGAIMFDFPSYRPTIGDHKRFNEPFYHKLANTLIDEFPCRPHWTKNTREVFARSVKNLDPDHLRRFNAVRKRFDPNGIYRSIVGEILGFY

SEQ ID NO: 2170 - DNA, 1212 bp, Myceliophthora thermophilia
atgccgaaacatttggtggtggtcatcggcgccggcgtcatcggcctcagctgcgccgtccttcttcaggaagccggctatgccgtgaccattgtcgctcgggatttccccggcccctttgagacgacggacccgaccgccaagatcaacttcacctctccctggggaggagcccacaaccgctgggttcccccgcacccgtctcttccctcccacctcgagcgggaccatcgcttctcgctgcgtacctacgcccgtatgaagcagctccatgacgcccaaccgggcacggcgggcatcaccttcctcaagggcatcgagtacctggagcgcccggggcctgaatacctcgccctctcgccgtcgggcatcccagcctcctcctcctcctcctcctccgccgacccgctgccgggcctgccgggattccgcctcctctcgccctccgagttccccgccgacggtcgcgtgacctggggttgcgagtacgacacctggtgcgtcaaccccatggtctactgctccttcctcctgcgccgcttcgtccgccgcggcggcaggctcctcgcgcgcgagctgcagcggcccgaggaggtcttctccctctcccgcgccgagctcggactgcctccgctcccggcgagagggggcgagagcaacagcagcagcagcagcagcagcaacagcagaggtaatgatggtgagagcgtcgtagcggcggtcgtgaacgcgtcggggacggggctcgtgccggacccgcacatgacaatgacgcgggggcagacatgcctggtggccgaggactgcgacgcgacggtgacgaggcagaacgcggacgggagctggaccttttgcgtgccgcgcgggttcgacggcggcaccatcgtgggcgggaccaaggagcccggcaactgggatccccggccgtccgccgaggtcagggccgagctgctccgccgcttcgccgagacgtaccccaagatcctgggcggcaaggccgagctgacggtgctgagggacattgtcgggcggcggcccaccagggacggcggaccgagggtcgagggcgaggtcatccccggcgccggcttcgtcatgcacgcctacgggctcggagggaggggatacgagttgtcgtggggtgttgccgaagccgtggtcgaggctgtcgacaagcacgtacagaaaaaggaggccggtgcgaggttgtaa

SEQ ID NO: 2171 - protein, 403 aa, Myceliophthora thermophilia
MPKHLVVVIGAGVIGLSCAVLLQEAGYAVTIVARDFPGPFETTDPTAKINFTSPWGGAHNRWVPPHPSLPSHLERDHRFSLRTYARMKQLHDAQPGTAGITFLKGIEYLERPGPEYLALSPSGIPASSSSSSSADPLPGLPGFRLLSPSEFPADGRVTWGCEYDTWCVNPMVYCSFLLRRFVRRGGRLLARELQRPEEVFSLSRAELGLPPLPARGGESNSSSSSSSNSRGNDGESVVAAVVNASGTGLVPDPHMTMTRGQTCLVAEDCDATVTRQNADGSWTFCVPRGFDGGTIVGGTKEPGNWDPRPSAEVRAELLRRFAETYPKILGGKAELTVLRDIVGRRPTRDGGPRVEGEVIPGAGFVMHAYGLGGRGYELSWGVAEAVVEAVDKHVQKKEAGARL

SEQ ID NO: 2172 - protein, 384 aa, Myceliophthora thermophilia
VLLQEAGYAVTIVARDFPGPFETTDPTAKINFTSPWGGAHNRWVPPHPSLPSHLERDHRFSLRTYARMKQLHDAQPGTAGITFLKGIEYLERPGPEYLALSPSGIPASSSSSSSADPLPGLPGFRLLSPSEFPADGRVTWGCEYDTWCVNPMVYCSFLLRRFVRRGGRLLARELQRPEEVFSLSRAELGLPPLPARGGESNSSSSSSSNSRGNDGESVVAAVVNASGTGLVPDPHMTMTRGQTCLVAEDCDATVTRQNADGSWTFCVPRGFDGGTIVGGTKEPGNWDPRPSAEVRAELLRRFAETYPKILGGKAELTVLRDIVGRRPTRDGGPRVEGEVIPGAGFVMHAYGLGGRGYELSWGVAEAVVEAVDKHVQKKEAGARL

SEQ ID NO: 2173 - DNA, 1494 bp, Myceliophthora thermophilia
atgcatctccttcccttgacggtctctgctacggcggtcgtctcggccgctagcagcccccatgccaagagggcggccatcgacgagtgcctaaaaaacgccaaagtgccggtgacggcacgcaattcgaccgagtggaagacagatgcgagccccttcaacgacagacttccgtacaccccggctgccatagccaaaccggccaccgtcgagcacatccaggccgccgtcttgtgcgcggccgaggtgggagtcaaggccaaccccaagtctggcgggcacagctacgcgtcgtttggcctgggcggcgaggacggccatcttgtggtggagctggatcggatgtacaacgtcacgctcgacccggagacgcacatcgctacggtccagccgggagccagactcggccacatcgccacggttctctacgaggaagggaagagagcgttcagccacggcacttgccctggcgtcggcgtaggcggacattcactacacggcggtttcggcttcagctcgcactcgcacggcctggccgtcgactggataaccagcgcagacgtggtgctggccaacggatctctcgtcaccgcttccgagacggagaacccggacctcttctgggccctccgcggcgccgggtccaactttggcatcgtggcgtccttccggttcaagaccttcgcggcgccgcccaacgtcacgtcctacgagatcaacctcccctggaccaactcgtccaacgtcgtgaagggctggggcgcgctccaggagtggctcctgaacggcggcatgcccgaggagatgaacatgcgagtgctcggaaacgcgtttcagacccagctgcaaggcctgtatcacggcaacgcctcggcccttaagaccgcaatccagccgctcctcgccctcctggatgccaacctctccagcgtccaagagcacgactggatggaaggcttcaggcactacgcttacagtggcgagatcgacatcacggatccgggctatgatcagtccgagacgttctactccaagagcctggtcacctcggcgctcccgccggacgtgctggagagggtggccgagtactggatcgagacggccaacaaggtgaggcggtcctggtacatcatcatcgacatgtacggggggcccaactcggccgtcacgagggtcccgcccggggccggatcgtacgccttccgcgacccggagaggcacctcttcctgtacgagctgtacgaccgcagcttcggcccttacccggacgacggcttcgccttcttggacggctgggtccacgccttcaccggcgggctggactcgagcgactggggcatgtacatcaactacgccgaccccggcctcgaccgggctgaggcccaggaggtctactaccggcagaacctggaccgcctccgtcggatcaagcagcagctcgaccctaccgagctgttttactacccgcaggctgtcgagccggctgaggtgtga

SEQ ID NO: 2174 - protein, 497 aa, Myceliophthora thermophilia
MHLLPLTVSATAVVSAASSPHAKRAAIDECLKNAKVPVTARNSTEWKTDASPFNDRLPYTPAAIAKPATVEHIQAAVLCAAEVGVKANPKSGGHSYASFGLGGEDGHLVVELDRMYNVTLDPETHIATVQPGARLGHIATVLYEEGKRAFSHGTCPGVGVGGHSLHGGFGFSSHSHGLAVDWITSADVVLANGSLVTASETENPDLFWALRGAGSNFGIVASFRFKTFAAPPNVTSYEINLPWTNSSNVVKGWGALQEWLLNGGMPEEMNMRVLGNAFQTQLQGLYHGNASALKTAIQPLLALLDANLSSVQEHDWMEGFRHYAYSGEIDITDPGYDQSETFYSKSLVTSALPPDVLERVAEYWIETANKVRRSWYIIIDMYGGPNSAVTRVPPGAGSYAFRDPERHLFLYELYDRSFGPYPDDGFAFLDGWVHAFTGGLDSSDWGMYINYADPGLDRAEAQEVYYRQNLDRLRRIKQQLDPTELFYYPQAVEPAEV

SEQ ID NO: 2175 - protein, 481 aa, Myceliophthora thermophilia
ASSPHAKRAAIDECLKNAKVPVTARNSTEWKTDASPFNDRLPYTPAAIAKPATVEHIQAAVLCAAEVGVKANPKSGGHSYASFGLGGEDGHLVVELDRMYNVTLDPETHIATVQPGARLGHIATVLYEEGKRAFSHGTCPGVGVGGHSLHGGFGFSSHSHGLAVDWITSADVVLANGSLVTASETENPDLFWALRGAGSNFGIVASFRFKTFAAPPNVTSYEINLPWTNSSNVVKGWGALQEWLLNGGMPEEMNMRVLGNAFQTQLQGLYHGNASALKTAIQPLLALLDANLSSVQEHDWMEGFRHYAYSGEIDITDPGYDQSETFYSKSLVTSALPPDVLERVAEYWIETANKVRRSWYIIIDMYGGPNSAVTRVPPGAGSYAFRDPERHLFLYELYDRSFGPYPDDGFAFLDGWVHAFTGGLDSSDWGMYINYADPGLDRAEAQEVYYRQNLDRLRRIKQQLDPTELFYYPQAVEPAEV

SEQ ID NO: 2176 - DNA, 1503 bp, Myceliophthora thermophilia
atgcacccgctcggcggctccctccggctcggcggcctcctggggctggcagtggcctcgcaggggtcgcgcctccatcaccggttcggcggcggcggcaaccagacggaccggctgaccgagtgcctgaccgaggccggggtgccggtcgacatggcggggacggcggagtacgcgatcgacgtctcgtccttcaacctgcggctcaactacacccccgcggcggtggcggcggccggcacggccgaccacgtgcgggacgccgtcgcctgcgcggcgcggctcggcgtcaaggcgacggccaagtgcggcggccacagctacgcctccttcggcctcggcggcgaggacggccacctcgtcatcgagatgagccgcatgaaccgggtcgttctcgacgacgaaaccggcatcgccaccgtcgagggcggcgcccgcctcggccacctcgccgtcgagctctgggaccagggcaagagggccatcagccacggcacgtgccccggcgtcggagtcggcggacacgtcctgcacggcggctacgggatgagctcccacacgcacggcctcgcgctcgactggatggtgggcgcgaccgtggtgctggccaacgcgagcgtggtcgagtgctccgagacggagaacccggacctcttctgggccctgcgcggcgccgggtcctcgatgggcgtcgtgaccgagttccgcttcaagacgttcgagccgcccgagaacctgacctacttcgtcgccaccgcgcagtggccgaccgaggaccgcgccctggccggcctcgccgccgtccaggagtacgccaagacgatgccggccgagctcaacatgcgcctctacatcgccaaccgcttcgtcaacctcgagggcctctactacggcgacgacgccgccctccaccacaccctcgccccgctcctcgaccaggccaacgcgaccctcgccctggcccagaccggcggctggctcgaccagctcaagcactttggcggctccaacctcgaccaggggcacggccacgaggagcacgagaccttccactcgacgagcctctacacgggcccactggacgaggaccggctgcgcgcgttcgtggggtactggttcgggccggccaagaacaacacgcgtagctggcacgtgcagatcgacctacacggcggggagaactcggccgtgtcggtggccccccggtcgacggcgtacgcgcaccgcgactcgctcctcatgttcctgctctacgaccgcgccgaccgcggcgagttccccgccgacggcgccgccctcatggacaacttcgccgccgccgtcaccgccggcttcgaccccgacgactggggcatgtacgtcaactaccccaacccgtccctctcccaggacgacgcccaggccaggtactggggccccaacctcgctcgcctgcgggccatcaagaaggacgtcgacccggacgacctgttccactacccgcagggcatcttgccggcgtag

SEQ ID NO: 2177 - protein, 500 aa, Myceliophthora thermophilia
MHPLGGSLRLGGLLGLAVASQGSRLHHRFGGGGNQTDRLTECLTEAGVPVDMAGTAEYAIDVSSFNLRLNYTPAAVAAAGTADHVRDAVACAARLGVKATAKCGGHSYASFGLGGEDGHLVIEMSRMNRVVLDDETGIATVEGGARLGHLAVELWDQGKRAISHGTCPGVGVGGHVLHGGYGMSSHTHGLALDWMVGATVVLANASVVECSETENPDLFWALRGAGSSMGVVTEFRFKTFEPPENLTYFVATAQWPTEDRALAGLAAVQEYAKTMPAELNMRLYIANRFVNLEGLYYGDDAALHHTLAPLLDQANATLALAQTGGWLDQLKHFGGSNLDQGHGHEEHETFHSTSLYTGPLDEDRLRAFVGYWFGPAKNNTRSWHVQIDLHGGENSAVSVAPRSTAYAHRDSLLMFLLYDRADRGEFPADGAALMDNFAAAVTAGFDPDDWGMYVNYPNPSLSQDDAQARYWGPNLARLRAIKKDVDPDDLFHYPQGILPA

SEQ ID NO: 2178 - protein, 481 aa, Myceliophthora thermophilia
SQGSRLHHRFGGGGNQTDRLTECLTEAGVPVDMAGTAEYAIDVSSFNLRLNYTPAAVAAAGTADHVRDAVACAARLGVKATAKCGGHSYASFGLGGEDGHLVIEMSRMNRVVLDDETGIATVEGGARLGHLAVELWDQGKRAISHGTCPGVGVGGHVLHGGYGMSSHTHGLALDWMVGATVVLANASVVECSETENPDLFWALRGAGSSMGVVTEFRFKTFEPPENLTYFVATAQWPTEDRALAGLAAVQEYAKTMPAELNMRLYIANRFVNLEGLYYGDDAALHHTLAPLLDQANATLALAQTGGWLDQLKHFGGSNLDQGHGHEEHETFHSTSLYTGPLDEDRLRAFVGYWFGPAKNNTRSWHVQIDLHGGENSAVSVAPRSTAYAHRDSLLMFLLYDRADRGEFPADGAALMDNFAAAVTAGFDPDDWGMYVNYPNPSLSQDDAQARYWGPNLARLRAIKKDVDPDDLFHYPQGILPA

SEQ ID NO: 2179 - DNA, 1323 bp, Myceliophthora thermophilia
atgcagctcctgagggacatccatgcaagctggctgcttgccgtcctggtctggtctagcagtctggttagcgcacgcccgcatcagcagcgggcgccccttgtaaggaaggaatggcgcaccctctcgaaggatgagaagtcttcctacctctctgcggtgaagtgcatcctgcgcaagtctgccctcaccccacacccttcaacaactggggcgtcatctctcgctatgacgacctcgtctacacccacattcagcagactttcgacatccactacacgggtcactttctcgcctgccacaggtactacctcgccgtctacgagcgcatgcttcgcgacgagtgcggctacaagggcgcccagctctactgggattggaccctcgacactccggctgacaagtgggcctcgtctcccctattcgatcccgtcacaggcccgcgtgctgtatccggagggtgataggaagtccggaccgtcaactgtggaagtgcggcccctcgatggtagccccctcttcaacgtctcggtgaagaatgaagtgattctcccggctggtgtgttcgggacaccggcaatcctgcagaggagcggcgttgggccggctcccttcttgcgcagcgcaaagatcccgttggtcctcgacctgccgggtgttggctccaatttgcacgatcactccggccctgcggttatttggaactacaccaaaccgcttccgttctaccttctcccgtcggacatgttcaaagaaacgttcgccgccgaggccgcggcggccttcaaccaaaatccagctcagggcccgtacaccctcgccatgtccaacagcgcgatctgggtgccgctccccgacataacggccgactacccggtcatcgtcaaccagatccgcgccctcgccaactcgtccgacccctcggagccccggctgcccctggccttcgacggcgacgaatcgctcgtggaaggctaccgggcccaactccgccagctggccgacctgtacgccaacccgcgctccccgagcctcgagagcgccgtatcgacggacaacacggcctcgccggtcctactgcaccccctcagccgcggcacggcccggctcaatctcacgcaccccttcgagccgcccgtgctggactaccggtcggcgcccaacccggtcgacatggccgtccacgtcgcgcacacgcgctttatacggcgcacgctgggcacgcgcgtgctccagaagctgggcgcggtcgagggggaaccgggcgccgacgtcgcgtcgtcggacgaggagctggaggcgttcgtgcgccggtccacgtaa

SEQ ID NO: 2180 - protein, 440 aa, Myceliophthora thermophilia
MQLLRDIHASWLLAVLVWSSSLVSARPHQQRAPLVRKEWRTLSKDEKSSYLSAVKCILRKSALTPHPSTTGASSLAMTTSSTPTFSRLSTSTTRVTFSPATGTTSPSTSACFATSAATRAPSSTGIGPSTLRLTSGPRLPYSIPSQARVLYPEGDRKSGPSTVEVRPLDGSPLFNVSVKNEVILPAGVFGTPAILQRSGVGPAPFLRSAKIPLVLDLPGVGSNLHDHSGPAVIWNYTKPLPFYLLPSDMFKETFAAEAAAAFNQNPAQGPYTLAMSNSAIWVPLPDITADYPVIVNQIRALANSSDPSEPRLPLAFDGDESLVEGYRAQLRQLADLYANPRSPSLESAVSTDNTASPVLLHPLSRGTARLNLTHPFEPPVLDYRSAPNPVDMAVHVAHTRFIRRTLGTRVLQKLGAVEGEPGADVASSDEELEAFVRRST

SEQ ID NO: 2181 - protein, 415 aa, Myceliophthora thermophilia
RPHQQRAPLVRKEWRTLSKDEKSSYLSAVKCILRKSALTPHPSTTGASSLAMTTSSTPTFSRLSTSTTRVTFSPATGTTSPSTSACFATSAATRAPSSTGIGPSTLRLTSGPRLPYSIPSQARVLYPEGDRKSGPSTVEVRPLDGSPLFNVSVKNEVILPAGVFGTPAILQRSGVGPAPFLRSAKIPLVLDLPGVGSNLHDHSGPAVIWNYTKPLPFYLLPSDMFKETFAAEAAAAFNQNPAQGPYTLAMSNSAIWVPLPDITADYPVIVNQIRALANSSDPSEPRLPLAFDGDESLVEGYRAQLRQLADLYANPRSPSLESAVSTDNTASPVLLHPLSRGTARLNLTHPFEPPVLDYRSAPNPVDMAVHVAHTRFIRRTLGTRVLQKLGAVEGEPGADVASSDEELEAFVRRST

SEQ ID NO: 2182 - DNA, 543 bp, Myceliophthora thermophilia
atggccagcggagtaattctccggttcccaggcgccctccatgtactccgccttttgttgcgtgctgtcgttggcctcaggaaacgagtcagcgtgaggaaggaggtcatcgtggcggccggcggcgtccacagctcccagtgtgctccagctgagcggcatcgggccgcgcgagctcctcgagtcggcgggcatcctcacggtcgtcaacctgcccggcgtggggcaggactttcagcatcacgccatgatccaagcaggccttcgggtacgagaacttcacgatccacacgggcccggacgtccatacggacggacgaccagttcgccgcctacctggcccgctcgctcaccccgaccgagtaccacccggcagggacccgcgccatgctgcccagggacctcggcggcgtcgtcgaccaggagctgcgcgtctacggcgtcgatcgcattcggggagtgccgtccaagtggtcattcgccgtgttccgtgtcgtttcccttgttctctgcttcctccattttcatagatatactgcgtaa

SEQ ID NO: 2183 - protein, 180 aa, Myceliophthora thermophilia
MASGVILRFPGALHVLRLLLRAVVGLRKRVSVRKEVIVAAGGVHSSQCAPAERHRAARAPRVGGHPHGRQPARRGAGLSASRHDPSRPSGTRTSRSTRARTSIRTDDQFAAYLARSLTPTEYHPAGTRAMLPRDLGGVVDQELRVYGVDRIRGVPSKWSFAVFRVVSLVLCFLHFHRYTA

SEQ ID NO: 2184 - protein, 155 aa, Myceliophthora thermophilia
LRKRVSVRKEVIVAAGGVHSSQCAPAERHRAARAPRVGGHPHGRQPARRGAGLSASRHDPSRPSGTRTSRSTRARTSIRTDDQFAAYLARSLTPTEYHPAGTRAMLPRDLGGVVDQELRVYGVDRIRGVPSKWSFAVFRVVSLVLCFLHFHRYTA

SEQ ID NO: 2185 - DNA, 1470 bp, Myceliophthora thermophilia
atgtcggcgacgctgtaccggctcgccggccgcagcgccaagagactctgcacccggccccgtgcgtcgccatcaccagcagcagctctcgccagttccatcatctcacaccccgcgcgtgccttctccgcctcggccctccgccgctatgctgagcctcaagagtcccagggcacgcgcctggtcccaaccggtcccgacttctcgagcgccgccgacccctacgggctcgcctcgagcctgcccgatggccgatcacccagcgagacgaaaaaatcccgcgacgagtcggtcgaggaccgcaaggtgcgccactacacggtcaactttgggccccagcacccggccgcccacggcgtgttgcgcctgatcctcgagctcaacggcgaggagatcatccgggcggacccgcacgtcggcctgctgcaccgcggcaccgagaagctgtgcgagtacaagacgtacctccaggcgctcccctactttgaccgcctcgattacgtctccatgatgaccaacgagcagtgcttctcgctggccgtcgagaagctgctcaacattgagatccccgagcgcgccaagttcatccggaccatgttcgccgagataacgcgcatcctgaaccacctcatgtcggtcctgtctcacgccatggacgtcggcgccctgacgcccttcctgtggggtttcgaggagcgagagaagctgatggaattctatgagcgcgtgtcgggcgcccgcctccacgccgcttatgtccgccccggcggcgtccaccaggacattccggtcggcctcctcgacgacatctaccagtgggcgacgcagtttggcgaccgcatcgacgagaccgaggagatgctgacggacaaccgcatctggatcgagcgtctcaagggcgtgggtgtcgtcagcgccgccgacgcgctcaacctgtccttcacgggcgtgatgctgcgggggtccggcgttccctgggacatacgcaagagccagccgtacgacgcctacgaccaggtcgagttcgacgtgcccgtcggcgtgaacggcgactgctatgaccgctacctgtgccgcatggaggagttccgccagtcgctgcgcatcatccaccagtgcctcaacaagatgcccgccggccccgtccgcgtcgaggactacaagatctccccgccgccccgcgccgccatgaaggagaacatggaggccctcatccaccacttcctgctctataccaagggctacgccgtcccgcctggcgacacctactcggccatcgaggcccccaagggcgagatgggcgtgtacgtggtcagcgacggctccgaacgtccctaccgcgtgcacatccgcgccccgggctttgcccacctcggcggtttcgaccacatctcgaggggtcacctgctggctgacgccgtggccgtcattggcaccatggacctggtgttcggcgaggtcgaccggtag

SEQ ID NO: 2186 - protein, 489 aa, Myceliophthora thermophilia
MSATLYRLAGRSAKRLCTRPRASPSPAAALASSIISHPARAFSASALRRYAEPQESQGTRLVPTGPDFSSAADPYGLASSLPDGRSPSETKKSRDESVEDRKVRHYTVNFGPQHPAAHGVLRLILELNGEEIIRADPHVGLLHRGTEKLCEYKTYLQALPYFDRLDYVSMMTNEQCFSLAVEKLLNIEIPERAKFIRTMFAEITRILNHLMSVLSHAMDVGALTPFLWGFEEREKLMEFYERVSGARLHAAYVRPGGVHQDIPVGLLDDIYQWATQFGDRIDETEEMLTDNRIWIERLKGVGVVSAADALNLSFTGVMLRGSGVPWDIRKSQPYDAYDQVEFDVPVGVNGDCYDRYLCRMEEFRQSLRIIHQCLNKMPAGPVRVEDYKISPPPRAAMKENMEALIHHFLLYTKGYAVPPGDTYSAIEAPKGEMGVYVVSDGSERPYRVHIRAPGFAHLGGFDHISRGHLLADAVAVIGTMDLVFGEVDR

SEQ ID NO: 2187 - protein, 448 aa, Myceliophthora thermophilia
FSASALRRYAEPQESQGTRLVPTGPDFSSAADPYGLASSLPDGRSPSETKKSRDESVEDRKVRHYTVNFGPQHPAAHGVLRLILELNGEEIIRADPHVGLLHRGTEKLCEYKTYLQALPYFDRLDYVSMMTNEQCFSLAVEKLLNIEIPERAKFIRTMFAEITRILNHLMSVLSHAMDVGALTPFLWGFEEREKLMEFYERVSGARLHAAYVRPGGVHQDIPVGLLDDIYQWATQFGDRIDETEEMLTDNRIWIERLKGVGVVSAADALNLSFTGVMLRGSGVPWDIRKSQPYDAYDQVEFDVPVGVNGDCYDRYLCRMEEFRQSLRIIHQCLNKMPAGPVRVEDYKISPPPRAAMKENMEALIHHFLLYTKGYAVPPGDTYSAIEAPKGEMGVYVVSDGSERPYRVHIRAPGFAHLGGFDHISRGHLLADAVAVIGTMDLVFGEVDR

SEQ ID NO: 2188 - DNA, 1311 bp, Myceliophthora thermophilia
atggtacttacagctcgccccgcgtccctcttgttctcttcccgcacctgttcccttctcccctccttgtcacgcccgggtccctggcggcctgctgctctccatcaccaacacctccgtgtgccccagacaccagacgtcttgccaaatcgggcgggcctgggcggcacgcacctgacgagacgcttgctaaccacacaacgcgaaaaggtcaaagttctggctgttctctacgacggcggcaagcacgcccaacaggtgccgggcctcctggggacgaccgagaatgagctcggcctccgcaagtggctcgaggaccagggccacaccctcgtgaccacctccgacaaggacggcgagaactcgacctttgaccgcgagctggttgatgccgagattatcatcaccacacctttccatcccggctacctcaccgccgagcgtctggccaaggccaagaagctcaagctcgcagtcacggccggcatcggctcggaccatgtcgacctcgacgcggccaacaagaccaacggcggcatcacggtcgccgaggtgacgggctccaacgtggtgtcggtggccgagcacgtcgtcatgaccatcctggtgttggtccgcaactttgtgcccgcccatgagcagatcgaggccggccgctgggacgtcgccgaggcggccaagaacgagttcgacctcgagggcaaggtggtcggcaccgtcgccgtcggccgcatcggcgagcgcgtcctgcgccgcctcaaggcctttgactgcaaggagctgctctactacgactaccagcccctctcgcccgagaaagagaaggagatcggctgccgccgcgtgctcgacctcgaggagatgctgggccagtgcgatgtcgtcaccatcaactgccccctgcacgagaagacgcgcggcctcttcaacaaggacctgatcgccaagatgaagcccggctcctggctcgtcaacacggcccgcggcgccatcgtcgtcaaggaggacgtcgccgaggccctccgcaccggccacctgcgcggctacggcggcgacgtctggttcccccagcccgccccggcggaccaccccctccgcaccgcaaagaaccccttcggcggcggcaacgccatggtgccccacatgtccggcacttcccttgacgcccagaagcgctacgccgacggcgtcaagcgcatcttggagagctacctctcgggcaggttcgactaccgcccggaggacctcatcgtccacaatggccagtacgccaccaggtcgtacggccagcgggaagtcagcacttcttaa

SEQ ID NO: 2189 - protein, 436 aa, Myceliophthora thermophilia
MVLTARPASLLFSSRTCSLLPSLSRPGPWRPAALHHQHLRVPQTPDVLPNRAGLGGTHLTRRLLTTQREKVKVLAVLYDGGKHAQQVPGLLGTTENELGLRKWLEDQGHTLVTTSDKDGENSTFDRELVDAEIIITTPFHPGYLTAERLAKAKKLKLAVTAGIGSDHVDLDAANKTNGGITVAEVTGSNVVSVAEHVVMTILVLVRNFVPAHEQIEAGRWDVAEAAKNEFDLEGKVVGTVAVGRIGERVLRRLKAFDCKELLYYDYQPLSPEKEKEIGCRRVLDLEEMLGQCDVVTINCPLHEKTRGLFNKDLIAKMKPGSWLVNTARGAIVVKEDVAEALRTGHLRGYGGDVWFPQPAPADHPLRTAKNPFGGGNAMVPHMSGTSLDAQKRYADGVKRILESYLSGRFDYRPEDLIVHNGQYATRSYGQREVSTS

SEQ ID NO: 2190 - protein, 418 aa, Myceliophthora thermophilia
LLPSLSRPGPWRPAALHHQHLRVPQTPDVLPNRAGLGGTHLTRRLLTTQREKVKVLAVLYDGGKHAQQVPGLLGTTENELGLRKWLEDQGHTLVTTSDKDGENSTFDRELVDAEIIITTPFHPGYLTAERLAKAKKLKLAVTAGIGSDHVDLDAANKTNGGITVAEVTGSNVVSVAEHVVMTILVLVRNFVPAHEQIEAGRWDVAEAAKNEFDLEGKVVGTVAVGRIGERVLRRLKAFDCKELLYYDYQPLSPEKEKEIGCRRVLDLEEMLGQCDVVTINCPLHEKTRGLFNKDLIAKMKPGSWLVNTARGAIVVKEDVAEALRTGHLRGYGGDVWFPQPAPADHPLRTAKNPFGGGNAMVPHMSGTSLDAQKRYADGVKRILESYLSGRFDYRPEDLIVHNGQYATRSYGQREVSTS

SEQ ID NO: 2191 - DNA, 1158 bp, Myceliophthora thermophilia
atggtctatcgcatccgcgtcgccatcatcggcctttcctccagcgcaaagacggcctgggcctcgcgcgcccacctgccctacttgttctcgtcccgggggcggtccaagtacgaggtggtggcgctgctcaactcgacggccgaggcggcgcgcgcggccgcggcggcgtacgggctgccgctcgagacgacgcgcacgtacggcgaccctgccgagctggcggccgacgacggcgtcgacctggtcgtgtgcacgacccgcgtcgacaagcactacgccaccgtcctcgacagcgtgcgccgcggcaaggacgtcttcgtcgagtggccgctggcgcaggacgggcggctcgcgcgcgagctggccgacgaggccgccaaggcgggtgttaggaccatcgtcgggctacagggcggcaaggcccccgtcgtagccaaactgcgggaagtcctggagagtgggaggatcggcaaggtgctgagctccgagctcagggtgtttggcggcttgaacgacaggcacggggtcccccagagcctctcgtactttacccagcgggaggtcggggggaatgtctatacgattgggttcgcgcatatttttgaaatggttttggccgtccttggcgagctcgcctcggctaagggcgacttccacctgcagcggcccgaggttaagctccttgacggagctggcaatgccgtggggaccgcccagtccaccgtgcccgacctgattctggtctccggaaagtggaacgagtcccacattacccaacccaacgccacgctgcactaccgcttccgccgcggccagccgttccccggggaccccgtgctgtcgtggaccattgccggtgagaagggagagatcaaagtgacctccccgaagcatacgttcatccacgctggcgaagagtccgtgccctccttctttgaggtccacgactatgagacgaacaccgtggacaaggtcgagtggcagtgggccgattggcagcaggagctaccgttccaggcaaggggcatcggcgcgttgtacgaagccttcgcagaggtcaaggccggtggggcccaggaaagctacgcgacgttcgacattgccgcgaggcgacatgagctactagacagcctgctgtcggagtggaaggcttag

SEQ ID NO: 2192 - protein, 385 aa, Myceliophthora thermophilia
MVYRIRVAIIGLSSSAKTAWASRAHLPYLFSSRGRSKYEVVALLNSTAEAARAAAAAYGLPLETTRTYGDPAELAADDGVDLVVCTTRVDKHYATVLDSVRRGKDVFVEWPLAQDGRLARELADEAAKAGVRTIVGLQGGKAPVVAKLREVLESGRIGKVLSSELRVFGGLNDRHGVPQSLSYFTQREVGGNVYTIGFAHIFEMVLAVLGELASAKGDFHLQRPEVKLLDGAGNAVGTAQSTVPDLILVSGKWNESHITQPNATLHYRFRRGQPFPGDPVLSWTIAGEKGEIKVTSPKHTFIHAGEESVPSFFEVHDYETNTVDKVEWQWADWQQELPFQARGIGALYEAFAEVKAGGAQESYATFDIAARRHELLDSLLSEWKA

SEQ ID NO: 2193 - protein, 364 aa, Myceliophthora thermophilia
SRAHLPYLFSSRGRSKYEVVALLNSTAEAARAAAAAYGLPLETTRTYGDPAELAADDGVDLVVCTTRVDKHYATVLDSVRRGKDVFVEWPLAQDGRLARELADEAAKAGVRTIVGLQGGKAPVVAKLREVLESGRIGKVLSSELRVFGGLNDRHGVPQSLSYFTQREVGGNVYTIGFAHIFEMVLAVLGELASAKGDFHLQRPEVKLLDGAGNAVGTAQSTVPDLILVSGKWNESHITQPNATLHYRFRRGQPFPGDPVLSWTIAGEKGEIKVTSPKHTFIHAGEESVPSFFEVHDYETNTVDKVEWQWADWQQELPFQARGIGALYEAFAEVKAGGAQESYATFDIAARRHELLDSLLSEWKA

SEQ ID NO: 2194 - DNA, 1725 bp, Myceliophthora thermophilia
atggcatccaacaccgacaagaagcccgtcatcatcgtaggcgcggggctcgcaggcctcgtcgccgcattcgagctcacccagcagaacgtgcccaccatcatcgtcgaccaggaaaatgctgccaatctgggcggccaggcgttctggtcgctggggggcctgttctgcgtcaattcgtccgagcagcgccgcatgggcatcaaggactcgcgcgagctggcgatgcgcgactggttcggctccgcccgcttcgaccgcgacaaggaagactactggccgcgcaagtgggccgaggcgttcgtcaacttcgccaccgacgagatggagagctacgtcaaggcgcgcggaatagggttcctgatgaacgtgggctgggcggagcgcggcgacgggcgggcggacgggcacggcaactcggtaccccgcttccacatcacctgggggaccgggccggaggtggtgcgcgtctttgccgagcccgtcaaggcggccgagaagaagggcctcgtcgagttcagacaccggcatatggtggacgagatcatcgtcgacgagaagacgggccgcgccgtgggggtcaggggacgggtgctggagccagacgattcgccgcgaggagtcaagtcgtcgaggaatgtcgtgggtgattttgagatctacggctctgccgtgctggtctcctcgggcggcattggcggcaacgtcgagaaggtcaaggcatgctggcccgttgagcgcctcggacctaaagtccccgagaactttgtcatcggtgtgccggcacatgtcgacggccgcatgatcgacatcgccgaagccgcgggtgccaatgtcatcaaccgcgacaggatgtggcattataccgaggggctccagaattgggaccccatctggcccgatcacggcatccgcgtcctgcccgcaccgtcctccctatggctcgacgccaccggtaagcgcctgccgccgttcctctatcccggcagcgacactctggcgacgctcaagtacatctgcagcacgggttacgactacacgtggttcattaccgaccagaccattgtcgcccgcgagttcgccctttcgggctcggaacagaacccggacttgaccaataagtccatctggcagcttctcacccagcgcgtcttcggttcccaaggcaccgtgcccgtgcagaagtttgtcaagcacggcgtggactttgtcgtgcgcgacaatctcgaggacctcgtcaagggcatgaacgagctggtctccacggtgcccggcgccccgcagctcgactacgcccaggtcgtcgaggtcgtcaaggcgcgggacgggcagtttgagaacacgtactccaaagacgcccaggcgatgctgatccacaacgcgcggacctactggcccgacaagcggagccgcgtcgcggtgccgcaccggctattggacgtcaagaaccacggcccactgatcgcggtgaggatgaacctgctgacgcggaagacgctcggcgggatcgagacgaacctggacagcaacgtgatgcgccccgacgggacggcgtttccggggttatatgccgcgggcgaagcggccggattcggcggcggcggcgtacacgggtacagctcactcgagggtacgttcctcggagggtgcatcttctcggggcgcgcggcggggcgggctatggcaagggagtttttgggcgagggggccaaggggacagaatga

SEQ ID NO: 2195 - protein, 574 aa, Myceliophthora thermophilia
MASNTDKKPVIIVGAGLAGLVAAFELTQQNVPTIIVDQENAANLGGQAFWSLGGLFCVNSSEQRRMGIKDSRELAMRDWFGSARFDRDKEDYWPRKWAEAFVNFATDEMESYVKARGIGFLMNVGWAERGDGRADGHGNSVPRFHITWGTGPEVVRVFAEPVKAAEKKGLVEFRHRHMVDEIIVDEKTGRAVGVRGRVLEPDDSPRGVKSSRNVVGDFEIYGSAVLVSSGGIGGNVEKVKACWPVERLGPKVPENFVIGVPAHVDGRMIDIAEAAGANVINRDRMWHYTEGLQNWDPIWPDHGIRVLPAPSSLWLDATGKRLPPFLYPGSDTLATLKYICSTGYDYTWFITDQTIVAREFALSGSEQNPDLTNKSIWQLLTQRVFGSQGTVPVQKFVKHGVDFVVRDNLEDLVKGMNELVSTVPGAPQLDYAQVVEVVKARDGQFENTYSKDAQAMLIHNARTYWPDKRSRVAVPHRLLDVKNHGPLIAVRMNLLTRKTLGGIETNLDSNVMRPDGTAFPGLYAAGEAAGFGGGGVHGYSSLEGTFLGGCIFSGRAAGRAMAREFLGEGAKGTE

SEQ ID NO: 2196 - protein, 551 aa, Myceliophthora thermophilia
FELTQQNVPTIIVDQENAANLGGQAFWSLGGLFCVNSSEQRRMGIKDSRELAMRDWFGSARFDRDKEDYWPRKWAEAFVNFATDEMESYVKARGIGFLMNVGWAERGDGRADGHGNSVPRFHITWGTGPEVVRVFAEPVKAAEKKGLVEFRHRHMVDEIIVDEKTGRAVGVRGRVLEPDDSPRGVKSSRNVVGDFEIYGSAVLVSSGGIGGNVEKVKACWPVERLGPKVPENFVIGVPAHVDGRMIDIAEAAGANVINRDRMWHYTEGLQNWDPIWPDHGIRVLPAPSSLWLDATGKRLPPFLYPGSDTLATLKYICSTGYDYTWFITDQTIVAREFALSGSEQNPDLTNKSIWQLLTQRVFGSQGTVPVQKFVKHGVDFVVRDNLEDLVKGMNELVSTVPGAPQLDYAQVVEVVKARDGQFENTYSKDAQAMLIHNARTYWPDKRSRVAVPHRLLDVKNHGPLIAVRMNLLTRKTLGGIETNLDSNVMRPDGTAFPGLYAAGEAAGFGGGGVHGYSSLEGTFLGGCIFSGRAAGRAMAREFLGEGAKGTE

SEQ ID NO: 2197 - DNA, 1059 bp, Myceliophthora thermophilia
atggcgcgcaagcgtctcgtgctcgtcacaggcatcaacggttacatcgccgcacacacggcagcagcccttttcaaggacggatacgctgttcggggcactgtgcgtgcgaggacggcgaacgtcgagaaccttgtccgcaagctcaatgagtaccacgatggagacagactggagctggtggaaattcccgacatcagcgccgatggagcttttgaccgcgccgtggatggcgtccaagcgatagctcacattgcgagccctgtatccacgaccgagacagacccggcacccatgatgcgggccgctgtccagggaaccacctcccttttgtcctcggcccttgtcgaggctaggaagagatctgggaaagacgcgcttaagtcggtggtgttcatgtctagcatgagtgccgtattctccccgaacaggccagcaggacacgtctttaccgaaagcgactggaatgacgtcgctgaggaggaactccgcaggctgggaacaagcgcgcccgggtacacctttcaccaggcgagcaagacggctgctgagagagcgttctggaaatatgggaaggagaccggggtcgagttcgctatgacgagcctatgccctgcgccggtgtttgggccgccgctgtacctccccgaacctatctcgagtcttagcattcgaatcaaagaagtttacgacatcttcgaggggggccccatacccgagttttcccccatccgaagcaccttcatcgacgtgcgcgacgtggccgagctggtcctcagggtctttgagcagcacggcgagcagccgggtgctcgtaaccggtatgtgctaactgcacagccaccgatatctccccagcaaatcgccgacgtactgcgggagagctttccggagaggcgagagaagatcggggaagggaatcctggggagaggtatccccgtatgacctggaaatttgactcgagcaaggcggcatcactgcttggtagggaatggattggatttcgccagagtgtggtcgatagtgcaaaggctttcctcggcgcaaaatctgtttga

SEQ ID NO: 2198 - protein, 352 aa, Myceliophthora thermophilia
MARKRLVLVTGINGYIAAHTAAALFKDGYAVRGTVRARTANVENLVRKLNEYHDGDRLELVEIPDISADGAFDRAVDGVQAIAHIASPVSTTETDPAPMMRAAVQGTTSLLSSALVEARKRSGKDALKSVVFMSSMSAVFSPNRPAGHVFTESDWNDVAEEELRRLGTSAPGYTFHQASKTAAERAFWKYGKETGVEFAMTSLCPAPVFGPPLYLPEPISSLSIRIKEVYDIFEGGPIPEFSPIRSTFIDVRDVAELVLRVFEQHGEQPGARNRYVLTAQPPISPQQIADVLRESFPERREKIGEGNPGERYPRMTWKFDSSKAASLLGREWIGFRQSVVDSAKAFLGAKSV

SEQ ID NO: 2199 - protein, 330 aa, Myceliophthora thermophilia
ALFKDGYAVRGTVRARTANVENLVRKLNEYHDGDRLELVEIPDISADGAFDRAVDGVQAIAHIASPVSTTETDPAPMMRAAVQGTTSLLSSALVEARKRSGKDALKSVVFMSSMSAVFSPNRPAGHVFTESDWNDVAEEELRRLGTSAPGYTFHQASKTAAERAFWKYGKETGVEFAMTSLCPAPVFGPPLYLPEPISSLSIRIKEVYDIFEGGPIPEFSPIRSTFIDVRDVAELVLRVFEQHGEQPGARNRYVLTAQPPISPQQIADVLRESFPERREKIGEGNPGERYPRMTWKFDSSKAASLLGREWIGFRQSVVDSAKAFLGAKSV

SEQ ID NO: 2200 - DNA, 1386 bp, Myceliophthora thermophilia
atgagatccgccgccttggtatccgtcttggcaaccgtcctcggcctgggggctgcgaagccgacgacgacggtgccagagccgcccagcaaacgggcgtcagtgccgactgtcacggtgtctggaaatgcgttctggcagggcgacacgcgcttctacgtccggggcattgactaccagccgggtggctcctcggcgatggccgatcccctggctgataccacggtctgcaagcgagacattgccgagttcaagaagttgggcgtcaacacaatccgcgtctacacggtcgacaactcggccaatcacgacgagtgcatgaaggagctggccgacgccggcatctacgtcgtcatcgacgccaacaacccgctctactcgctcaaccgcctcgacccggccccctcgtacaacaccaagtacctccagagcgtctttgccaccattgacgagttcatcaagtacgacaacacgctggccttcttctcgggcaacgaggtcatcaacgataatgtcaagagcacgcttgccgcccgctatgtcaaggctgtcactcgtgatatgcgctcctacatcaagagccgcggctaccgctccgttccggtgggctactcggcggcggacgtggcccagaaccgcatgcagcttgcacattacatgaactgcggcaccgaggacgagcggagcgacttcttcgcttttaacgactactcttggtgcaacaccaacttcgaagaggctggttgggaccagaaggtcaagaacttcaccggctacggcatcgccatctttctctccgaatatggctgtatcacaaacggccgcgactttggcgaggtcgcggccctcatgagcgacaagatgacgcccgtgtactcgggcggcctgatgtacgagtactcgctcgaggccaacggctacggtatcgtcaaaattgatagccccgacgccaccagcgtggaggagcagaaggagttttccaaattcgccaaggcgctgaaggagaaccccgcacccaagggcgacggcggcttcacgtcgaccacgcacgccgttgcctgcccgaccaaggatgccaactggttggtggacagcacgctcctgccggccattccggacgatgcgaagaagcggctgacgactcgttcgcagttcatgtctgaaggcgcgggccgcggccccgggctgaagggtgaggggtcgcagaatgcagccgaagggaccagcacgggcgatgccaccccaggctccggcaaggtgaccggcacgccgtcacacagcggcgattccgatgacgaatcgaacgcggcgagcgtggacgcgacgccgttcattcttacagggctggtggcggcgctgactctcgccggaactctgctcttgtaa

SEQ ID NO: 2201 - protein, 461 aa, Myceliophthora thermophilia
MRSAALVSVLATVLGLGAAKPTTTVPEPPSKRASVPTVTVSGNAFWQGDTRFYVRGIDYQPGGSSAMADPLADTTVCKRDIAEFKKLGVNTIRVYTVDNSANHDECMKELADAGIYVVIDANNPLYSLNRLDPAPSYNTKYLQSVFATIDEFIKYDNTLAFFSGNEVINDNVKSTLAARYVKAVTRDMRSYIKSRGYRSVPVGYSAADVAQNRMQLAHYMNCGTEDERSDFFAFNDYSWCNTNFEEAGWDQKVKNFTGYGIAIFLSEYGCITNGRDFGEVAALMSDKMTPVYSGGLMYEYSLEANGYGIVKIDSPDATSVEEQKEFSKFAKALKENPAPKGDGGFTSTTHAVACPTKDANWLVDSTLLPAIPDDAKKRLTTRSQFMSEGAGRGPGLKGEGSQNAAEGTSTGDATPGSGKVTGTPSHSGDSDDESNAASVDATPFILTGLVAALTLAGTLLL

SEQ ID NO: 2202 - protein, 442 aa, Myceliophthora thermophilia
KPTTTVPEPPSKRASVPTVTVSGNAFWQGDTRFYVRGIDYQPGGSSAMADPLADTTVCKRDIAEFKKLGVNTIRVYTVDNSANHDECMKELADAGIYVVIDANNPLYSLNRLDPAPSYNTKYLQSVFATIDEFIKYDNTLAFFSGNEVINDNVKSTLAARYVKAVTRDMRSYIKSRGYRSVPVGYSAADVAQNRMQLAHYMNCGTEDERSDFFAFNDYSWCNTNFEEAGWDQKVKNFTGYGIAIFLSEYGCITNGRDFGEVAALMSDKMTPVYSGGLMYEYSLEANGYGIVKIDSPDATSVEEQKEFSKFAKALKENPAPKGDGGFTSTTHAVACPTKDANWLVDSTLLPAIPDDAKKRLTTRSQFMSEGAGRGPGLKGEGSQNAAEGTSTGDATPGSGKVTGTPSHSGDSDDESNAASVDATPFILTGLVAALTLAGTLLL

SEQ ID NO: 2203 - DNA, 1263 bp, Myceliophthora thermophilia
atgctcgcgcttctcctgaccgtcgccgctctcggggccgccgccttattctttctgcagctctaccgtaccgagtcgcgtctgcgcaccccctggacgcccgaccggtcgtcgcgcctcttcgcccagcggccgctcccaccgccggtcgagggaacgttcctgtcatcaccgcactatacgttgccgctgcgcacgcgcgggcgcgatgtggtggatgcgcgggggcggcggttcaagctggcgagcgtcaactggtacggggcgagcgacgagctgatggtgccgggagggctggacgtgcggcaccggcgcgagatcgcgcgggccgtgcgccggctcggcttcaactcggtccgcctgccctactcggacgagatggtggcgactaacccgcccgtcgacgcccgcctggtggccgccaacccggacctggcgggcgcgcgggccctagacgtctacgtcgccgtcgtcgaggcgctgacggccgagggcgtcgccgtcgtggtcaacaaccacatcacgagcgcgacctggtgctgcggcgccgacccctgcgacgccggctgggccaacgaccacctgccggccgccctgtgccgcgtccgccagacggaggaccagtggatcgagcactgggagaccgtcatggccaggctggccgacaacccgctcgtcatcggcgccgacctgcgcaacgaggtccggggactctggggcaccatgccctgggcgcgctgggcggcggccgccgagagggccggcaaccggctgctccgcatgaacccggactggctcatcatcgtgggcggcaccgagtcgcagaacgacctgacgggcgtcgccacgcggcccgtcgtgctcgacctccccgaccgcgtcgtctactcggcccacgtctactcgtggagcggctggggcagctgggggggccggtacgcgacccggtcgtacccgagcttcgtccagtcggcgcgcaagaactgggcctacctggtcgagggggacgtggcgcccgtctgggtgggcgagttcggcgcgccccgctcgcccggccgcggcgacgccaactactggaacaacctgctccgctacctcaagaccatcgacgccgacttcggctactgggccctcaacccgcgcaagccccggcataacgagacggagacgtacgccctcctcgaggacgactgggtcaccccggtgctggactaccggctgaaggacctgaccgagctgatgcgagctggcaccaccacctga

SEQ ID NO: 2204 - protein, 420 aa, Myceliophthora thermophilia
MLALLLTVAALGAAALFFLQLYRTESRLRTPWTPDRSSRLFAQRPLPPPVEGTFLSSPHYTLPLRTRGRDVVDARGRRFKLASVNWYGASDELMVPGGLDVRHRREIARAVRRLGFNSVRLPYSDEMVATNPPVDARLVAANPDLAGARALDVYVAVVEALTAEGVAVVVNNHITSATWCCGADPCDAGWANDHLPAALCRVRQTEDQWIEHWETVMARLADNPLVIGADLRNEVRGLWGTMPWARWAAAAERAGNRLLRMNPDWLIIVGGTESQNDLTGVATRPVVLDLPDRVVYSAHVYSWSGWGSWGGRYATRSYPSFVQSARKNWAYLVEGDVAPVWVGEFGAPRSPGRGDANYWNNLLRYLKTIDADFGYWALNPRKPRHNETETYALLEDDWVTPVLDYRLKDLTELMRAGTTT

SEQ ID NO: 2205 - protein, 394 aa, Myceliophthora thermophilia
RLRTPWTPDRSSRLFAQRPLPPPVEGTFLSSPHYTLPLRTRGRDVVDARGRRFKLASVNWYGASDELMVPGGLDVRHRREIARAVRRLGFNSVRLPYSDEMVATNPPVDARLVAANPDLAGARALDVYVAVVEALTAEGVAVVVNNHITSATWCCGADPCDAGWANDHLPAALCRVRQTEDQWIEHWETVMARLADNPLVIGADLRNEVRGLWGTMPWARWAAAAERAGNRLLRMNPDWLIIVGGTESQNDLTGVATRPVVLDLPDRVVYSAHVYSWSGWGSWGGRYATRSYPSFVQSARKNWAYLVEGDVAPVWVGEFGAPRSPGRGDANYWNNLLRYLKTIDADFGYWALNPRKPRHNETETYALLEDDWVTPVLDYRLKDLTELMRAGTTT

SEQ ID NO: 2206 - DNA, 1170 bp, Myceliophthora thermophilia
atgaagtcctccatcctcgccagcgtcttcgccacgggcgccgtggctcaaagtggtccgtggcagcaatgtggtggcatcggatggcaaggatcgaccgactgtgtgtcgggttaccactgcgtctaccagaacgattggtacagccagtgcgtgcctggcgcggcgtcgacaacgctccagacatctaccacgtccaggcccaccgccaccagcaccgcccctccgtcgtccaccacctcgcctagcaagggcaagctcaagtggctcggcagcaacgagtcgggcgccgagttcggggagggcaactaccccggcctctggggcaagcacttcatcttcccgtcgacttcggcgattcagacgctcatcaatgatggatacaacatcttccggatcgacttctcgatggagcgtctggtgcccaaccagttgacgtcgtccttcgacgagggctacctccgcaacctgaccgaggtggtcaacttcgtgacgaacgcgggcaagtacgccgtcctggacccgcacaactacggccggtactacggcaacgtcatcacggacacgaacgcgttccggaccttctggaccaacctggccaagcagttcgcctccaactcgctcgtcatcttcgacaccaacaacgagtacaacacgatggaccagaccctggtgctcaacctcaaccaggccgccatcgacggcatccgggccgccggcgcgacctcgcagtacatcttcgtcgagggcaacgcgtggagcggggcctggagctggaacacgaccaacaccaacatggccgccctgacggacccgcagaacaagatcgtgtacgagatgcaccagtacctcgactcggacagctcgggcacccacgccgagtgcgtcagcagcaacatcggcgcccagcgcgtcgtcggagccacccagtggctccgcgccaacggcaagctcggcgtcctcggcgagttcgccggcggcgccaacgccgtctgccagcaggccgtcaccggcctcctcgaccacctccaggacaacagcgacgtctggctgggtgccctctggtgggccgccggtccctggtggggcgactacatgtactcgttcgagcctccttcgggcaccggctatgtcaactacaactcgatcctaaagaagtacttgccgtaa

SEQ ID NO: 2207 - protein, 389 aa, Myceliophthora thermophilia
MKSSILASVFATGAVAQSGPWQQCGGIGWQGSTDCVSGYHCVYQNDWYSQCVPGAASTTLQTSTTSRPTATSTAPPSSTTSPSKGKLKWLGSNESGAEFGEGNYPGLWGKHFIFPSTSAIQTLINDGYNIFRIDFSMERLVPNQLTSSFDEGYLRNLTEVVNFVTNAGKYAVLDPHNYGRYYGNVITDTNAFRTFWTNLAKQFASNSLVIFDTNNEYNTMDQTLVLNLNQAAIDGIRAAGATSQYIFVEGNAWSGAWSWNTTNTNMAALTDPQNKIVYEMHQYLDSDSSGTHAECVSSNIGAQRVVGATQWLRANGKLGVLGEFAGGANAVCQQAVTGLLDHLQDNSDVWLGALWWAAGPWWGDYMYSFEPPSGTGYVNYNSILKKYLP

SEQ ID NO: 2208 - protein, 373 aa, Myceliophthora thermophilia
QSGPWQQCGGIGWQGSTDCVSGYHCVYQNDWYSQCVPGAASTTLQTSTTSRPTATSTAPPSSTTSPSKGKLKWLGSNESGAEFGEGNYPGLWGKHFIFPSTSAIQTLINDGYNIFRIDFSMERLVPNQLTSSFDEGYLRNLTEVVNFVTNAGKYAVLDPHNYGRYYGNVITDTNAFRTFWTNLAKQFASNSLVIFDTNNEYNTMDQTLVLNLNQAAIDGIRAAGATSQYIFVEGNAWSGAWSWNTTNTNMAALTDPQNKIVYEMHQYLDSDSSGTHAECVSSNIGAQRVVGATQWLRANGKLGVLGEFAGGANAVCQQAVTGLLDHLQDNSDVWLGALWWAAGPWWGDYMYSFEPPSGTGYVNYNSILKKYLP

SEQ ID NO: 2209 - DNA, 900 bp, Myceliophthora thermophilia
atgaagttcctcgacgtccttctcggtgccgcagctgccagctcggccctggcagcgccgacttgcacaaccaagacaaagcgcgcgggcaagttcaagtttgtcggcgtcaaccagtcctgcgccgagtttggccaggacacgctcccgggccagctcaacaagcactacacctggccggccaagtcgagcattgataccgtttcctacgtcacgagcaagggagcctatgctgtcattgacccccataacttcggccggtactacacgcaagtcatcaccgacgtcgaaggcttcaaggcctggtggacgaccacggccgggctgtttgccgacaacgacaaggtcatcttcgacaccaacaacgagtaccacgacatggaccaatcgctcgttgtcaatctgaaccaggccgccatcgacggcatccgggccgccggcgccacctcgcagtacatctttatcgagggcaactcgtggacgggcgcatggacctgggtctcctcgggcaacggcgagtccctgctgaacctgtcggacccggagggcgacgacaagctcatctacgagatgcaccagtacctggacgaggacgggtcgggcacgcacgagcagtgcgtctcgggcaccatcggccgggagcgcctccaggcggcgaccgagtggctcaaggccaacggcaagaaggccatcctgggcgagacggccggcggcgccaacgaccagtgcatctcggccctgaccggcatgctctccttcatggaggagaactcggacgtctggcagggctggctctggtgggctgccggtccctggtgggccgactacatgtactcgattgagccgccgagcggtaccgcgtacaccaaggttttgcccagcctccagccttatatctga

SEQ ID NO: 2210 - protein, 299 aa, Myceliophthora thermophilia
MKFLDVLLGAAAASSALAAPTCTTKTKRAGKFKFVGVNQSCAEFGQDTLPGQLNKHYTWPAKSSIDTVSYVTSKGAYAVIDPHNFGRYYTQVITDVEGFKAWWTTTAGLFADNDKVIFDTNNEYHDMDQSLVVNLNQAAIDGIRAAGATSQYIFIEGNSWTGAWTWVSSGNGESLLNLSDPEGDDKLIYEMHQYLDEDGSGTHEQCVSGTIGRERLQAATEWLKANGKKAILGETAGGANDQCISALTGMLSFMEENSDVWQGWLWWAAGPWWADYMYSIEPPSGTAYTKVLPSLQPYI

SEQ ID NO: 2211 - protein, 281 aa, Myceliophthora thermophilia
APTCTTKTKRAGKFKFVGVNQSCAEFGQDTLPGQLNKHYTWPAKSSIDTVSYVTSKGAYAVIDPHNFGRYYTQVITDVEGFKAWWTTTAGLFADNDKVIFDTNNEYHDMDQSLVVNLNQAAIDGIRAAGATSQYIFIEGNSWTGAWTWVSSGNGESLLNLSDPEGDDKLIYEMHQYLDEDGSGTHEQCVSGTIGRERLQAATEWLKANGKKAILGETAGGANDQCISALTGMLSFMEENSDVWQGWLWWAAGPWWADYMYSIEPPSGTAYTKVLPSLQPYI

SEQ ID NO: 2212 - DNA, 1248 bp, Myceliophthora thermophilia
atgatggtcctcctgcgccgcctcgtcaccgccctcggcgtgctcgctcccctcgtcacggctgccactctcccggccctgcccttacactcgtccggccgctggatcctggacgccaacaacaagcgggtcaagctccgctgcgtcaactgggccgcgcacatggagaccaacatccccgaggggctccagcaccggccgatggacgccatcgccgactggatcgccgcccagggcttcaactgcgtccggctcacctacagcatcgaccacgcgctcgacccgtccctgcccgtgtcgacctccttcaccaccaacgcggcctcggcgaccggcgtgtcggcggccgagatggcggccctcttcgggcgcgtggcggccaacaacccgtggatcacgcccggggagacgacgacgcgcgacgtgctggcggccgccgtcgaccggctctacgcgcgcggcgtgctgaccgtcctggacaaccacgtctcgcgggcgtcgtggtgctgcagcctgaccgacggcaacggctgccgcttcttcgacacgcgcgcctggctggccgggctcgaggccatggccgcctgggcgcgcgcccaccccggggtggtggccatgtcgctgcgcaacgagctgcgcgagttccctctcctgcaggacgtcgacccggcccgcccggactggtacgccttcgtcggccgcgccggcgccgtcgtgcacgccgccaacccggacgtgctcgtcgtcgtgggcggcgtgcagagctcgaccgacctgtcgcacctccgcctccccggcggcggcggcatgctcgacacgagcgcctgggccggcaagcacgtctgggagatgcacgcctacagcttcaccgtcaccttcccggacgtgttcggcagctgcgacgtcgtccgggccgaatacggcgccctctccggcttcgtgctggagcaggaccgcccctacacggggccgctcatcctcagcgagttcggcgtcggcatggagggcggcgacaaggacggcctgagcgacgaggacgaccgctacctccgctgcctcgtgtcgtacatggagaacaacgacgccgactgggccgtctgggccgtccagggaagctactacgtgcgggacggccaggtggactatgacgagacctggggtttgatgaaccacaactggaccggctggagaaacccggcgtttcctgccaaattaggtaacatgtggaacatgacacaggagccgtga

SEQ ID NO: 2213 - protein, 415 aa, Myceliophthora thermophilia
MMVLLRRLVTALGVLAPLVTAATLPALPLHSSGRWILDANNKRVKLRCVNWAAHMETNIPEGLQHRPMDAIADWIAAQGFNCVRLTYSIDHALDPSLPVSTSFTTNAASATGVSAAEMAALFGRVAANNPWITPGETTTRDVLAAAVDRLYARGVLTVLDNHVSRASWCCSLTDGNGCRFFDTRAWLAGLEAMAAWARAHPGVVAMSLRNELREFPLLQDVDPARPDWYAFVGRAGAVVHAANPDVLVVVGGVQSSTDLSHLRLPGGGGMLDTSAWAGKHVWEMHAYSFTVTFPDVFGSCDVVRAEYGALSGFVLEQDRPYTGPLILSEFGVGMEGGDKDGLSDEDDRYLRCLVSYMENNDADWAVWAVQGSYYVRDGQVDYDETWGLMNHNWTGWRNPAFPAKLGNMWNMTQEP

SEQ ID NO: 2214 - protein, 394 aa, Myceliophthora thermophilia
ATLPALPLHSSGRWILDANNKRVKLRCVNWAAHMETNIPEGLQHRPMDAIADWIAAQGFNCVRLTYSIDHALDPSLPVSTSFTTNAASATGVSAAEMAALFGRVAANNPWITPGETTTRDVLAAAVDRLYARGVLTVLDNHVSRASWCCSLTDGNGCRFFDTRAWLAGLEAMAAWARAHPGVVAMSLRNELREFPLLQDVDPARPDWYAFVGRAGAVVHAANPDVLVVVGGVQSSTDLSHLRLPGGGGMLDTSAWAGKHVWEMHAYSFTVTFPDVFGSCDVVRAEYGALSGFVLEQDRPYTGPLILSEFGVGMEGGDKDGLSDEDDRYLRCLVSYMENNDADWAVWAVQGSYYVRDGQVDYDETWGLMNHNWTGWRNPAFPAKLGNMWNMTQEP

SEQ ID NO: 2215 - DNA, 1404 bp, Myceliophthora thermophilia
atgttcttgtccagccggggatggagaagagcagcagccacggcggtggctctgctgagcagatcaacatttgctcagacctggtcggcatgcaacccattaacatcaacaagttgcccggccgacacggcactgggcatgacgatacacgtcgacttcaccgagggggaggtcaactccttcgtccctagcgggggggtgccgacctacgacgaggacggcgtcagcttcacggtcgcctcttccggcgacgcgccgcagctgacgagcatcttctacatcatgttcggccgcgtcgaggtgaccatgaaggccgcccccggcgccggcatcgtcagctccctcgtgctgctctccgacgccctcgacgagatcgacatggagtggctgggcgccgactcgaccgaggtccagaccaactacttcagcaagggccagaccaccacctacaaccgcggccagttcaacccggccccgaacaaccaggccgagttcgtcacctacaccatcgactggaccgccgaccgcatcgcctggtacgtcggcggcaccctcgtccgcaccctcaccttcgacgaggccaacggcgagtacccgcagacgccgatgcaggtcaagttcggcgcctggtccggcggcgacccgtccaacccgcccggcaccatcgagtgggcccgcggcccgaccgactactcccaggggcccttctccatggtcgtccgctccgccgtcgtgaccgactactccaccggcaagcgctacacctacggcgaccagtcgggcacctggcagtccatccgctccgacggcggcgagatcaacggcaacctgggcgccgccggcaccgtctccgtcaccgccagcgcccccgccgccaccgactccctctcccccaccatcccgcccggcggcatcatcggcggcggcaccgccaccgccaccgacgggagcaccggcccctcccgcaccgtcggccccatcccggacggctgggtcatgacatccgagggcaaggtcgtgcccattgggtcgagcactaagaggaaagaaagaaggaaagaaaaaaaaagattacctcctgagagtgtttctctctctccttcaagagcttctcttctcttcttttgtctgttcgcaaaagatgctgacaacatggtcacggttcagacactccccggagcacaaccgtcctcctccctctcgcgggagctctctgcttcgccctcaacggcgggctccggcggcggtgagaccaccaccctcgccacgagcacactatcgacccttggcggcgcgagggcgccgactgacgcgccccctgagagcagcgcatcgaccgcgagacgaggcggacttctgcttggactcctcgtcctcgccgcgtccgcgttgctttgctggtag

SEQ ID NO: 2216 - protein, 467 aa, Myceliophthora thermophilia
MFLSSRGWRRAAATAVALLSRSTFAQTWSACNPLTSTSCPADTALGMTIHVDFTEGEVNSFVPSGGVPTYDEDGVSFTVASSGDAPQLTSIFYIMFGRVEVTMKAAPGAGIVSSLVLLSDALDEIDMEWLGADSTEVQTNYFSKGQTTTYNRGQFNPAPNNQAEFVTYTIDWTADRIAWYVGGTLVRTLTFDEANGEYPQTPMQVKFGAWSGGDPSNPPGTIEWARGPTDYSQGPFSMVVRSAVVTDYSTGKRYTYGDQSGTWQSIRSDGGEINGNLGAAGTVSVTASAPAATDSLSPTIPPGGIIGGGTATATDGSTGPSRTVGPIPDGWVMTSEGKVVPIGSSTKRKERRKEKKRLPPESVSLSPSRASLLFFCLFAKDADNMVTVQTLPGAQPSSSLSRELSASPSTAGSGGGETTTLATSTLSTLGGARAPTDAPPESSASTARRGGLLLGLLVLAASALLCW

SEQ ID NO: 2217 - protein, 442 aa, Myceliophthora thermophilia
QTWSACNPLTSTSCPADTALGMTIHVDFTEGEVNSFVPSGGVPTYDEDGVSFTVASSGDAPQLTSIFYIMFGRVEVTMKAAPGAGIVSSLVLLSDALDEIDMEWLGADSTEVQTNYFSKGQTTTYNRGQFNPAPNNQAEFVTYTIDWTADRIAWYVGGTLVRTLTFDEANGEYPQTPMQVKFGAWSGGDPSNPPGTIEWARGPTDYSQGPFSMVVRSAVVTDYSTGKRYTYGDQSGTWQSIRSDGGEINGNLGAAGTVSVTASAPAATDSLSPTIPPGGIIGGGTATATDGSTGPSRTVGPIPDGWVMTSEGKVVPIGSSTKRKERRKEKKRLPPESVSLSPSRASLLFFCLFAKDADNMVTVQTLPGAQPSSSLSRELSASPSTAGSGGGETTTLATSTLSTLGGARAPTDAPPESSASTARRGGLLLGLLVLAASALLCW

SEQ ID NO: 2218 - DNA, 1341 bp, Myceliophthora thermophilia
atggttcgcggtctcctgccgctgggcgctgccctcctcggcgcaaccgccgtcctggccgatgggccgccgaagtgcactttggacaagaagtgcccgaaggaagctccatgctgctctcagtacggcgagtgcggtgtgggcgcctactgtctcggcggttgcgacccgcggatgtcctactcgctcgattcgtgcgtgcccgctcccgtgtgcaaggacaaggtttacaagatggacaatctcgatcgttacaaggacatcagcgagtacctgggcgactcgagcaagacggactgggtcggtcagggtgagccactcctttataacggcaacgtcctgctcaccatgccgcccaagtcggtcggcaccgtcctttccacgactacgtatatgtggtacggcaaggtcaaggcacggctcaagacgtcccggggcgccggcgtggtgacggcgttcatcctgttcagcgatgtcaaggacgagatcgactacgaattcgtcggagtcgatctgcagactgcccagaccaactactacttccagggcattcccgactacaataactcgggcaacatcaccgtctccggcaacacgtacgacgagttccacgactacgagatccattggacacccgacgaaatcacgtggctcgtcgacggcaaggtcggccgcaccaagaagcggtccgagacctggaacgagacgctgaaccagtgggactacccgcagaccccgtcgcgcgtccagctttccatctggcccggcggcgccgagaccaatgccaagggcaccatcgactgggcgggcggcccgatcgactgggacagcgacgagatcaagaactttggctactactttgccaccttcagcgaggtctcggtcgagtgctacaagacggacaccccgcccggcaccagcaagggcaagtcgtactactacgacgacgtccgcggcaccaacgacacggtcgtcgacagcaacaagcgcaccaccctcaagagcctgctcggcacgggcaccgacatggacaagggcgacacaacctcctcgggcaagccctcctcgacctcctccgttaacgccatcccgggaggcggttccaccccgcccaaccaggtccccggcggtagcaacccgtcttccagcgacggctcgagctcgggctccggcagcagcggttcctcgacatgtagctccgagggcttccagcagcactgcggcgaagacggctccagcagcaccgacaacaagaacgacggcgcccgcggcgtcgaccggacgctgggcgccagcgccttcgctgtcattgttggcttcgccggcctgctgttgctctga

SEQ ID NO: 2219 - protein, 446 aa, Myceliophthora thermophilia
MVRGLLPLGAALLGATAVLADGPPKCTLDKKCPKEAPCCSQYGECGVGAYCLGGCDPRMSYSLDSCVPAPVCKDKVYKMDNLDRYKDISEYLGDSSKTDWVGQGEPLLYNGNVLLTMPPKSVGTVLSTTTYMWYGKVKARLKTSRGAGVVTAFILFSDVKDEIDYEFVGVDLQTAQTNYYFQGIPDYNNSGNITVSGNTYDEFHDYEIHWTPDEITWLVDGKVGRTKKRSETWNETLNQWDYPQTPSRVQLSIWPGGAETNAKGTIDWAGGPIDWDSDEIKNFGYYFATFSEVSVECYKTDTPPGTSKGKSYYYDDVRGTNDTVVDSNKRTTLKSLLGTGTDMDKGDTTSSGKPSSTSSVNAIPGGGSTPPNQVPGGSNPSSSDGSSSGSGSSGSSTCSSEGFQQHCGEDGSSSTDNKNDGARGVDRTLGASAFAVIVGFAGLLLL

SEQ ID NO: 2220 - protein, 426 aa, Myceliophthora thermophilia
DGPPKCTLDKKCPKEAPCCSQYGECGVGAYCLGGCDPRMSYSLDSCVPAPVCKDKVYKMDNLDRYKDISEYLGDSSKTDWVGQGEPLLYNGNVLLTMPPKSVGTVLSTTTYMWYGKVKARLKTSRGAGVVTAFILFSDVKDEIDYEFVGVDLQTAQTNYYFQGIPDYNNSGNITVSGNTYDEFHDYEIHWTPDEITWLVDGKVGRTKKRSETWNETLNQWDYPQTPSRVQLSIWPGGAETNAKGTIDWAGGPIDWDSDEIKNFGYYFATFSEVSVECYKTDTPPGTSKGKSYYYDDVRGTNDTVVDSNKRTTLKSLLGTGTDMDKGDTTSSGKPSSTSSVNAIPGGGSTPPNQVPGGSNPSSSDGSSSGSGSSGSSTCSSEGFQQHCGEDGSSSTDNKNDGARGVDRTLGASAFAVIVGFAGLLLL

SEQ ID NO: 2221 - DNA, 657 bp, Myceliophthora thermophilia
atggcgacaatgaagctcatggaggtcttgctgctcacctcctcgatctcgatagcctcggccaagcacatcatgatcccctccacctcgttcaattcgcagtccgatttcgacaccgactggaactacctctacccctggggcagcgaccacaatggtgccgcccgcatgagggagtcgcaggtcagcctctcggacggggtgctcacgctgagggcgacgcgcgtggacggcgaggcgcccgcccaccacggcggcaaggagatcgcaatccgctacctgtcgggcgccgtgcacgccaaggagcgcttcaacgtggtcgccgggggcgggtacgacttcgcgggcgagttccgcgcccccgtggcgcggggcacgtggccggccttttggctgacgggagtcgacagctggccgcccgagatcgacatggccgagtggaagggcagcggcaagatctcgttcaacacctttaacacgtcgtccgaggtccgcgctctggacgtagactacccgaacccggacgccttccacaagatcttgtgcgaggtgagggacatgaacggccaggacgtgagcgtgcgcttctctatggacggccaggtggttgcgacgcagtatgggagggggttcgtggggaagccgttgtacttgtga

SEQ ID NO: 2222 - protein, 218 aa, Myceliophthora thermophilia
MATMKLMEVLLLTSSISIASAKHIMIPSTSFNSQSDFDTDWNYLYPWGSDHNGAARMRESQVSLSDGVLTLRATRVDGEAPAHHGGKEIAIRYLSGAVHAKERFNVVAGGGYDFAGEFRAPVARGTWPAFWLTGVDSWPPEIDMAEWKGSGKISFNTFNTSSEVRALDVDYPNPDAFHKILCEVRDMNGQDVSVRFSMDGQVVATQYGRGFVGKPLYL

SEQ ID NO: 2223 - protein, 197 aa, Myceliophthora thermophilia
KHIMIPSTSFNSQSDFDTDWNYLYPWGSDHNGAARMRESQVSLSDGVLTLRATRVDGEAPAHHGGKEIAIRYLSGAVHAKERFNVVAGGGYDFAGEFRAPVARGTWPAFWLTGVDSWPPEIDMAEWKGSGKISFNTFNTSSEVRALDVDYPNPDAFHKILCEVRDMNGQDVSVRFSMDGQVVATQYGRGFVGKPLYL

SEQ ID NO: 2224 - DNA, 1434 bp, Myceliophthora thermophilia
atgtattctctgctcattgccctcctctgcgccggcactgccgtcgacgcccaggctctccagcagcgacaggccgggacaactctcaccgtcgacctgtccacgacgtaccagaggatcgacgggttcggtacctcggaggccttccagcgcgcggtgcagatgagcaggctgcccgaggaaggacagcggcgcgctctcgacgtcctgtttagtaccaccaacggcgccgggctctccatccttcgcaacggcatcgggtcctcacccgacatgagctccgaccacatggtctcgatcgcgcccaagagccccggctcgcccaacaacccgctgatctactcctgggacggctccgacaacaagcagctgtgggtgtcgcaagaagccgttcacacgtacggcgtcaagaccatctacgccgacgcctggagcgccccgggatacatgaagaccaacggcaacgacgccaacggcggcaccctgtgcggcctcagcggtgcccagtgcgcgagcggcgactggaggcaggcatatgccgactacctcaccaaatacgtcgagttttatcaggagtccaacgtgacggttacccacctcggcttcatcaacgagccagaactgacaacgagctacgcctcgatgcgcttctccgcctcccaggcagccgagttcatccgcatcctgtacccgaccatccagaagtccaaccttacctataagccgaccatcgcctgctgcgacgctgagggctggaactcgcaggctggcatgctgggtgccctgagctccgtcaactccatgtttggcctcgtcacggcgcacgcctacacctcgcagccgggcttctccatgaacacgccacacccggtctggatgaccgaggccgccgatctgcagggagcgtggacctcggcgtggtactcgtacggcggcgcgggcgagggctggacgtgggccaacaacgtgtacaacgccatcgtcaacggcaatgcgtcggcctacctgtactggatcggcgcgcagacgggcaacaccaacagccacatggtccacatcgacgccaacgccggcaccgtcgagcccagcaagcggctgtgggcgctgggccagtggagccgcttcgtgcgccccggcgcccgccgtgtcgccgtctcgggcgcctccggcagcctgcgcaccgccgccttccgcaacgaggacggttccgtcgccgtcgtcgtcatcaacagcggcggcgacgccgccgtcaacgtcaggctcgcctcgtcctcgtcggccgatcagcaacccgcctcggccaaggcctgggccaccgacaactcgagggccatcgaagagatccaggccagcttcgccgacggcgtcgccaccgtcaacgttccctcgaggtccatgaccacggtggtgctgtatccggcggccgacgcgtga

SEQ ID NO: 2225 - protein, 477 aa, Myceliophthora thermophilia
MYSLLIALLCAGTAVDAQALQQRQAGTTLTVDLSTTYQRIDGFGTSEAFQRAVQMSRLPEEGQRRALDVLFSTTNGAGLSILRNGIGSSPDMSSDHMVSIAPKSPGSPNNPLIYSWDGSDNKQLWVSQEAVHTYGVKTIYADAWSAPGYMKTNGNDANGGTLCGLSGAQCASGDWRQAYADYLTKYVEFYQESNVTVTHLGFINEPELTTSYASMRFSASQAAEFIRILYPTIQKSNLTYKPTIACCDAEGWNSQAGMLGALSSVNSMFGLVTAHAYTSQPGFSMNTPHPVWMTEAADLQGAWTSAWYSYGGAGEGWTWANNVYNAIVNGNASAYLYWIGAQTGNTNSHMVHIDANAGTVEPSKRLWALGQWSRFVRPGARRVAVSGASGSLRTAAFRNEDGSVAVVVINSGGDAAVNVRLASSSSADQQPASAKAWATDNSRAIEEIQASFADGVATVNVPSRSMTTVVLYPAADA

SEQ ID NO: 2226 - protein, 458 aa, Myceliophthora thermophilia
LQQRQAGTTLTVDLSTTYQRIDGFGTSEAFQRAVQMSRLPEEGQRRALDVLFSTTNGAGLSILRNGIGSSPDMSSDHMVSIAPKSPGSPNNPLIYSWDGSDNKQLWVSQEAVHTYGVKTIYADAWSAPGYMKTNGNDANGGTLCGLSGAQCASGDWRQAYADYLTKYVEFYQESNVTVTHLGFINEPELTTSYASMRFSASQAAEFIRILYPTIQKSNLTYKPTIACCDAEGWNSQAGMLGALSSVNSMFGLVTAHAYTSQPGFSMNTPHPVWMTEAADLQGAWTSAWYSYGGAGEGWTWANNVYNAIVNGNASAYLYWIGAQTGNTNSHMVHIDANAGTVEPSKRLWALGQWSRFVRPGARRVAVSGASGSLRTAAFRNEDGSVAVVVINSGGDAAVNVRLASSSSADQQPASAKAWATDNSRAIEEIQASFADGVATVNVPSRSMTTVVLYPAADA

SEQ ID NO: 2227 - DNA, 2724 bp, Myceliophthora thermophilia
atgcgggcgaaaagggcggccattgcccttttcctagcttggccggccataacacgggccgcgtccctcgtctcttttccgggaaacacggccgcgattccatcgtgggaactgcagtcttctgtggaggccggcactgacctcgaaggtctttcacaagttggggtcgatacaaagtcatggcaccacatcaaaacatggagatgtacgctcatgggctgcctgatcgaggccggcgtctacaatgaagatcaactcttctactcggagaacctgcgcaaagtcaacgagacgcaattcctggtgccatggatttatcgcaacgagttctccctgcatcccggcccgggcaggcacttcttcctgcagacacacggcatctcttcgcgagccgacatctttctgaacggcaaacgagtggccaattcttcggagcaggcgggttcgtacgttggccggatttacgacatcaccaaacaggttcacagagaaaatgcgctggcaattcaggtgtacccgaccaactactactacgacctggcgctcggatgggtggattggaacccatggccggccgacaacggcaccggcgtctggcgggacgtcgagatcaagcagaccggggcggtcatgctggagccgttgcgggttgtgacgcacttggggccgacgctcggagatgagccagcaaacgtgaccctcaaggcccaagcacataaccttgaaaactacaccgtcaccatcacggccaccggccacatcgccctggacccccactctgataaccaacaacaccatcaccaccaccaccctattacctggcaccgaacgtacacgctcccacccctttccaccaccgagctcgccctctccgcgaccattgccgacccccagatctggtggccccgccaatggggtggtcaaccgctctacaccgccgccttgaccgtcaccacgcgcggcaccaccacgccgtccgaccggtccacggccaccttcggcctgcgcaccgtcgaggcgaggctgaacccgacctacaacgacaccaccttccacgtcaactcgcgccccttccaggtcctgggcgccggctactcccccaacgtcttcctccgcgcgccgccacggaccgccgcggccgactacacggccacgctccagtacgtactcgacctgggcctgaacacgatccggctcgagggcaaggacgagcactcggaactgtacgcggcggcggaccggctgggcgtcatgatccttgccggctgggagtgctgcgacaagtgggaggcgtggagctacaacggcgacctggccatcgacccggtgccggtctgggacgacgccgactacgccgtcgcgcgtgccgccatggcccacgaggcccgcatgctccagccccatcccagcctgctgggcttcctcatcggcagcgacttctggcccgacgaccgcgccaccgccgcctacctcgatgccctggaagccgccgactgggccgcccccgtgctggcctcggcctcgaagcgcgggtaccccgagcggaccggtccgggagggctcaagatggacgggccgtacgactgggtgccaccggggtactggtgggacacggagccgaccggggagaggctcggagccgcgttcggttttgggtccgagctgggcgcgggcgtgggcacgccggagctggggtcgctgaggcggttcctgagcgagggggacctggaggccctgtggaagcggccgaacgtgagcctattccacatgtcgagggagacctcccaatttacgacgagggtgatctacaacgccgggctctggaaccggtggggcgcccccgcgagcctggaagactacctgatgaaggcgcagctgatggactacgaggccacgcgggctcagttcgacgcctacacggccatgtggaacgccgagaggccggccacgggcctgatatactggatgctcaacaacgcctggccgagcctgcactggaacctgtgggactactacatgcgtcctgccggtagttactttggggcaaaggccggcagcagggtggaaaatgtcgtgtttgactacgtcaggagggcggtctggctggtcaaccggtccctggacaagagcgggacgaggagagtgcaggtggacgtcatggataagcatggtaaagtcctatacaaggacacgaccgtcaccacgactgttccaaacacgagcaaggacattctttcactagcgggacctctgggcaacatcaccgacgtggtgtttttgcggctggttctctacgatgcacaacggcaagggcatgcgctgagtcgaaacgtgtactgggttgcgaaggagccagatgtgctggactgggacgagtcggattggtacttcacgccggtgaccagctactcggactacactgcactaaacaacatggctcaggcagacgtcacggttcacaatgtctggcacggctcaggggttgacatgacgctggagaacaaatctaaggtgccagcgttctttgtcagcttgacgctggtggatgtacacgggaacgaggtcctgccggtgacgtgggaggacaactatgtcaccctatggccgggtgagaaattgacacttcggggaaggtcaatgggggtagatgcaaagccgtgggaggtcattgtgagaggaaagaacgttgaagcaaagagagtccgtcaccggtggcatgtatga

SEQ ID NO: 2228 - protein, 907 aa, Myceliophthora thermophilia
MRAKRAAIALFLAWPAITRAASLVSFPGNTAAIPSWELQSSVEAGTDLEGLSQVGVDTKSWHHIKTWRCTLMGCLIEAGVYNEDQLFYSENLRKVNETQFLVPWIYRNEFSLHPGPGRHFFLQTHGISSRADIFLNGKRVANSSEQAGSYVGRIYDITKQVHRENALAIQVYPTNYYYDLALGWVDWNPWPADNGTGVWRDVEIKQTGAVMLEPLRVVTHLGPTLGDEPANVTLKAQAHNLENYTVTITATGHIALDPHSDNQQHHHHHHPITWHRTYTLPPLSTTELALSATIADPQIWWPRQWGGQPLYTAALTVTTRGTTTPSDRSTATFGLRTVEARLNPTYNDTTFHVNSRPFQVLGAGYSPNVFLRAPPRTAAADYTATLQYVLDLGLNTIRLEGKDEHSELYAAADRLGVMILAGWECCDKWEAWSYNGDLAIDPVPVWDDADYAVARAAMAHEARMLQPHPSLLGFLIGSDFWPDDRATAAYLDALEAADWAAPVLASASKRGYPERTGPGGLKMDGPYDWVPPGYWWDTEPTGERLGAAFGFGSELGAGVGTPELGSLRRFLSEGDLEALWKRPNVSLFHMSRETSQFTTRVIYNAGLWNRWGAPASLEDYLMKAQLMDYEATRAQFDAYTAMWNAERPATGLIYWMLNNAWPSLHWNLWDYYMRPAGSYFGAKAGSRVENVVFDYVRRAVWLVNRSLDKSGTRRVQVDVMDKHGKVLYKDTTVTTTVPNTSKDILSLAGPLGNITDVVFLRLVLYDAQRQGHALSRNVYWVAKEPDVLDWDESDWYFTPVTSYSDYTALNNMAQADVTVHNVWHGSGVDMTLENKSKVPAFFVSLTLVDVHGNEVLPVTWEDNYVTLWPGEKLTLRGRSMGVDAKPWEVIVRGKNVEAKRVRHRWHV

SEQ ID NO: 2229 - protein, 887 aa, Myceliophthora thermophilia
ASLVSFPGNTAAIPSWELQSSVEAGTDLEGLSQVGVDTKSWHHIKTWRCTLMGCLIEAGVYNEDQLFYSENLRKVNETQFLVPWIYRNEFSLHPGPGRHFFLQTHGISSRADIFLNGKRVANSSEQAGSYVGRIYDITKQVHRENALAIQVYPTNYYYDLALGWVDWNPWPADNGTGVWRDVEIKQTGAVMLEPLRVVTHLGPTLGDEPANVTLKAQAHNLENYTVTITATGHIALDPHSDNQQHHHHHHPITWHRTYTLPPLSTTELALSATIADPQIWWPRQWGGQPLYTAALTVTTRGTTTPSDRSTATFGLRTVEARLNPTYNDTTFHVNSRPFQVLGAGYSPNVFLRAPPRTAAADYTATLQYVLDLGLNTIRLEGKDEHSELYAAADRLGVMILAGWECCDKWEAWSYNGDLAIDPVPVWDDADYAVARAAMAHEARMLQPHPSLLGFLIGSDFWPDDRATAAYLDALEAADWAAPVLASASKRGYPERTGPGGLKMDGPYDWVPPGYWWDTEPTGERLGAAFGFGSELGAGVGTPELGSLRRFLSEGDLEALWKRPNVSLFHMSRETSQFTTRVIYNAGLWNRWGAPASLEDYLMKAQLMDYEATRAQFDAYTAMWNAERPATGLIYWMLNNAWPSLHWNLWDYYMRPAGSYFGAKAGSRVENVVFDYVRRAVWLVNRSLDKSGTRRVQVDVMDKHGKVLYKDTTVTTTVPNTSKDILSLAGPLGNITDVVFLRLVLYDAQRQGHALSRNVYWVAKEPDVLDWDESDWYFTPVTSYSDYTALNNMAQADVTVHNVWHGSGVDMTLENKSKVPAFFVSLTLVDVHGNEVLPVTWEDNYVTLWPGEKLTLRGRSMGVDAKPWEVIVRGKNVEAKRVRHRWHV

SEQ ID NO: 2230 - DNA, 675 bp, Myceliophthora thermophilia
atgatccatccgtctaaccgtcagagggtgttcaccaacgcgcggcccaccgacgcggagcaaaaggagttcgagcgtcagctggagatcatggtcaacgagcacaagagccacccgtccatcatcgcctgggtcctctacaacgagggctggggtcagagaaccgactacttccccgagttcgcgctgaccgaccgcgtccgcgagctcgacccgaccaggctcatcgattcggtcacgggctggcacgaccatggtgcggacaatcataaatatgctgaaccgcagtgcggcacgccttggcattcccagccgtcgtctccgttcgacccgaaccggatcggcttccagggcgagttcggagggatcggtcatcgcccagccgatgaaaacctctggcccatcgacggggcggtcaggacgatcaacgagacgtacgagatccacgccgggctcgagtcgtaccactaccgcgcccacgtgctcctcacccagctgcgcgagcaggtcgagcgctacgcctgcagcggcgccgtctacacgcagaccaccgacgtcgagggcgaggtcaacggcctcctgaccatggaccgccgcgtcgtccgcgtcgacgtcgaccgctggcgcgaggacatccgcgccctctacaaggccgcccgtgcgagggccaaataa

SEQ ID NO: 2231 - protein, 224 aa, Myceliophthora thermophilia
MIHPSNRQRVFTNARPTDAEQKEFERQLEIMVNEHKSHPSIIAWVLYNEGWGQRTDYFPEFALTDRVRELDPTRLIDSVTGWHDHGADNHKYAEPQCGTPWHSQPSSPFDPNRIGFQGEFGGIGHRPADENLWPIDGAVRTINETYEIHAGLESYHYRAHVLLTQLREQVERYACSGAVYTQTTDVEGEVNGLLTMDRRVVRVDVDRWREDIRALYKAARARAK

SEQ ID NO: 2232 - DNA, 1002 bp, Myceliophthora thermophilia
atgcatgccgagggccatcagattgccagtcacacttggtctcaccagaacgccagccagttgaccaccacgcaattcacgaaccaaatgatctggaacgaaattgcgctcaactcaatcctcggcttcttcccgacctacatgaggcccccttattctatctgcgagaagaactgccaagacatcctctcaaccctgggctaccacgtggtgtatttcgacctcgacacggaggggtaccttcacgacgatgcgacggagatccagaccagcaaagatatttgggacgacgccatcgatggctctgacccgtcctcggacaattttctgcagatcgaacacgacatccactatcagaccgtgtacaacctgaccgactacatcctaacctctctcttcgccaacggctaccgagcggtgacggtgggcaagtgcctcggcgatcctgtcgagaactggtaccgccagggacccaacggcagcatcaccgtgccgaccacctcagtggcccctcccgagtccactagcaccatgcccacggacccgacgaggacgaccatctctgtcgccccgacgcacagcggcccgagcatcgacggcacttgcggcaacggcgtgacgtgcgccggcacagagttcggctcctgctgctccgtctttggatggtgcggtgacagctacgaccactgctcctccgaaaaaggctgccagcccgagtggggaagctgtgatgggacaccgagcacgacgaccatcccttcctcgcagaccacgttctctaccaagaccaagactagctccacaaagacaggtgatccatcaacgtcatccgccgagccgacgcaaaccggtctcccagtcagcaccgacggacgctgcggtcccgaagtgaagcagacatgtacgggcagcgaattcgggcagtgctgcagcctgtcgaaaaaacaaaaatgtgcctttaacagcatgcgggtggctctgcacggtgacatccttgcatga

SEQ ID NO: 2233 - protein, 333 aa, Myceliophthora thermophilia
MHAEGHQIASHTWSHQNASQLTTTQFTNQMIWNEIALNSILGFFPTYMRPPYSICEKNCQDILSTLGYHVVYFDLDTEGYLHDDATEIQTSKDIWDDAIDGSDPSSDNFLQIEHDIHYQTVYNLTDYILTSLFANGYRAVTVGKCLGDPVENWYRQGPNGSITVPTTSVAPPESTSTMPTDPTRTTISVAPTHSGPSIDGTCGNGVTCAGTEFGSCCSVFGWCGDSYDHCSSEKGCQPEWGSCDGTPSTTTIPSSQTTFSTKTKTSSTKTGDPSTSSAEPTQTGLPVSTDGRCGPEVKQTCTGSEFGQCCSLSKKQKCAFNSMRVALHGDILA

SEQ ID NO: 2234 - DNA, 1674 bp, Myceliophthora thermophilia
atggtttactggcggacccagagtagcgccaacatatctcagttacgtatagtcacagtcaccaagttcaccgcctgctcagcaagtaatatcggtgtgttgaccaaaactgttacgataccaacacgtaacgagacggcgatcattcataattcccagcctgtcctcagcctatctcttccttatgccatcacgtacactctctctcctgatgcaatctttccgactcctttcactcggaccatcaccatcaccccaacccctcctgcgacagatggcgcagccgcggaagagccagatgctcctgttaccacccaagcaacgacggctactcctcaggagatggacaacggcaaccatgaagtatcctcatggtctgaaaatgcagagccaaatcccgtcacggttacagccaccaacccgggaattttgcagggttctgcagccctcgcccccttctcatctctgggcaatgtgcaaattgacaccgcgattgtcactacttcagagacatctggagctcttgtcgttgtgtctcagtcttgcggttcgattgtggccaactctctacccatcacgatcacacgaacttcggtcacgccagctgcaactgattcgtctgcaacggtatcagagaccagcgacttcaatccctttacggttagattctctgagaacagcgtatatggctcgactccgtcgtttttcacgagcgccgactcgtcagtggcaattaccatcccgcagactgtaacctccacgccaactccattatacccagttccctcaaggcctaccttctcagagagccccattgtctccgttacttctgtcacctacacggtgccccccgtctcaggagtcaaaacctcttcctccacggtcacattcttcaaccgccaacaaccaacatccaaccttgggcagcagcgcacacactccacgattaacgacaccacggccgacctcgccagttgtggtaacagcgtcagagaacattggcgaaacaacctttgcggcgagtccgccgctcagcgcaactgccacaacgggcatcccaacataccgctcactttcagcagcagtgaaagcggcgtgccagccaactcgggcgggtaccagtataacacgactggtgggatgctggctacctcatttcctatccaacccacggctgtaccccttactgccggagcgtcgtcgtcaaaatcaccaatcaccttcaggtggcgtgtccatagtgaccatcagccaaaagatttccttcggatatggttcttcgacaatcgttgggctcactacgaagctgacggttggagccagccctacaatctcaacctattttccgcttccgtcagcgtccttcccgccgtagcacatcacgacttgccatgtcccacctctgttttgtcattgaacacccgctcgactgtgcccacccatgctattacctacaactcagtttcccggccatccactacctttggctatgtcttttcccagatggacagcggccatggatatccagcacctggctacggcaacccagagcaaatcaggactgttcctttgtcaacagagtcattctcccccaattccacggatttgccggtctcccaatctgttccgcgctcttctgcgctggtcggccacggacacaacatctctcactag

SEQ ID NO: 2235 - protein, 557 aa, Myceliophthora thermophilia
MVYWRTQSSANISQLRIVTVTKFTACSASNIGVLTKTVTIPTRNETAIIHNSQPVLSLSLPYAITYTLSPDAIFPTPFTRTITITPTPPATDGAAAEEPDAPVTTQATTATPQEMDNGNHEVSSWSENAEPNPVTVTATNPGILQGSAALAPFSSLGNVQIDTAIVTTSETSGALVVVSQSCGSIVANSLPITITRTSVTPAATDSSATVSETSDFNPFTVRFSENSVYGSTPSFFTSADSSVAITIPQTVTSTPTPLYPVPSRPTFSESPIVSVTSVTYTVPPVSGVKTSSSTVTFFNRQQPTSNLGQQRTHSTINDTTADLASCGNSVREHWRNNLCGESAAQRNCHNGHPNIPLTFSSSESGVPANSGGYQYNTTGGMLATSFPIQPTAVPLTAGASSSKSPITFRWRVHSDHQPKDFLRIWFFDNRWAHYEADGWSQPYNLNLFSASVSVLPAVAHHDLPCPTSVLSLNTRSTVPTHAITYNSVSRPSTTFGYVFSQMDSGHGYPAPGYGNPEQIRTVPLSTESFSPNSTDLPVSQSVPRSSALVGHGHNISH

SEQ ID NO: 2236 - DNA, 1296 bp, Myceliophthora thermophilia
atgggcggcggacctacggacggctaccgttcggtggcatactttgtaaactgggccatctacgcccgcaagcaccggccccaggatctgcccgtcgagaggctgacccacgtgctgtacgccttcgccaacgtgcggcccgagtcgggcgaggtgtacatgacggactcgtgggccgacacggacatccactgggagggcgacagctggaacgacacgggcaccaacttgtacggctgcctgaagcagctcaacctgctcaagcgccgcaaccgcaacctcaaggtcctgctgtccatcggcggctggacgtacagtagcaacttcaggcagccggcctcgacgcccgagggtagacagaagtttgccacatcggcagtagacctggttcgttttataaaaacccgagaatcccataattggcactcgaacaatgctaacatgacaaacaaaaccattccgcacgcacagctctccaaccttggtttcgacggtctcgacatcgactgggagtacccgcagaacgcggccgaggcggccgacttcgtctcgctgctggccgaggtgcggggcgccctggacaagcacgcggccaaggtgtcggcgacgagcccgccgcacttcctgctgacggtcgccagcccggcgggcgcgcagaactacgagaagctcgacatggccggcatggaccgctacctcgacttctggaacctgatggcctacgactacgccggctcgtgggaccgcgtggccgcccaccaggccaacctgtacccctgccagacccacgccggcagctgcagccccttctcgaccgacgccgccgtgcgcgcctacatcgaccgcggcgtgccgcccggcaagatcgtcgtgggcatgcccctgtacggccgctcgttcgagaacaccgacgggctgggcaagccgttcagcggcgtgggcgagggcacgtgggagaacggcgtgcacgactacaagaagctgccgctcgagggtgctgaggtccgggtggacgagagtgccggcggtagctactgctatcatgccggccggagggtcctggtcagctacgacacggtggacatggcgagacaaaaggcccagtacatcaaggaccgcaagctcggcggcggcatgtggtgggagagctccgccgacaagggagggggagaaagcctgattacgaacgtcgtcgacgtgtttggcgggacgactgcgctggaatggcgcgagaactgcatcacatatccgttcaccaagtatgacaacctgagggagggattcccgaacaattag

SEQ ID NO: 2237 - protein, 431 aa, Myceliophthora thermophilia
MGGGPTDGYRSVAYFVNWAIYARKHRPQDLPVERLTHVLYAFANVRPESGEVYMTDSWADTDIHWEGDSWNDTGTNLYGCLKQLNLLKRRNRNLKVLLSIGGWTYSSNFRQPASTPEGRQKFATSAVDLVRFIKTRESHNWHSNNANMTNKTIPHAQLSNLGFDGLDIDWEYPQNAAEAADFVSLLAEVRGALDKHAAKVSATSPPHFLLTVASPAGAQNYEKLDMAGMDRYLDFWNLMAYDYAGSWDRVAAHQANLYPCQTHAGSCSPFSTDAAVRAYIDRGVPPGKIVVGMPLYGRSFENTDGLGKPFSGVGEGTWENGVHDYKKLPLEGAEVRVDESAGGSYCYHAGRRVLVSYDTVDMARQKAQYIKDRKLGGGMWWESSADKGGGESLITNVVDVFGGTTALEWRENCITYPFTKYDNLREGFPNN

SEQ ID NO: 2238 - DNA, 1077 bp, Myceliophthora thermophilia
atgcctccccttccccaaccccccgccctcccccgcgtcatcacgtactaccaaacccaccacacaccgtcggggaagccgatatcggtgctgccgctcctccagcagccggggattggcattacgcacgtcatcctggccgcgatccacatcaacgaggacccggccgggctgacgctcaacgaccacccgccgtcggacccgcgcttcaccaccctctgggccgagatgcgcgtgctccaggccagcggcgtcaaggtgctcggcatgctgggcggcgcggcgccggggacctacgcccgcctcgacctcaacggcaacggcaacggcaacggcaacggcggcgacgatgacggcgcgttcgaggcctactaccggccgctggccgagctgatccgcgagcgggggctggacgggctggacctggacgtggaggagcccatgtcgctgggcggcatcgtgcggctgatcgaccggctgcgggccgactttgggcccgacttcctcatcacgctcgcgcccgtcgcctcggccctgctcgacccgctgcgcaacctgagcggcttcgactacgaggcgctcgaggtcctgcgcgggcgcgacatcgcctggtacaatgcccagttctactgcggctggggcgactgcagcaaccccgtcatgtacgagatgctgctggccaagggctggcctcccgacaagatcgtcgtcggcctgctgaccaatcccgacaacggctccggctgggtgccctggaacctcctgtccggcgtgctgcccttgctggccgggcggcacccccgcttcggcggcgtcatgggctgggagtacttcaacagtctgccggggggcaaagagaggccctgggagtgggcgcaggccatgactgccctgttgaagggaagacgcgccgttcagagcctggaggggttgcaggggagcgagaagccggcggaggagaaaaagacatccgaggtttcccccgaggcggatccagatgaggaacagccaggggaagcaccaccagtacctgccgaattcgagtaccattcggatgggggaggggaggaggagtag

SEQ ID NO: 2239 - protein, 358 aa, Myceliophthora thermophilia
MPPLPQPPALPRVITYYQTHHTPSGKPISVLPLLQQPGIGITHVILAAIHINEDPAGLTLNDHPPSDPRFTTLWAEMRVLQASGVKVLGMLGGAAPGTYARLDLNGNGNGNGNGGDDDGAFEAYYRPLAELIRERGLDGLDLDVEEPMSLGGIVRLIDRLRADFGPDFLITLAPVASALLDPLRNLSGFDYEALEVLRGRDIAWYNAQFYCGWGDCSNPVMYEMLLAKGWPPDKIVVGLLTNPDNGSGWVPWNLLSGVLPLLAGRHPRFGGVMGWEYFNSLPGGKERPWEWAQAMTALLKGRRAVQSLEGLQGSEKPAEEKKTSEVSPEADPDEEQPGEAPPVPAEFEYHSDGGGEEE

SEQ ID NO: 2240 - DNA, 1839 bp, Myceliophthora thermophilia
atgccatcaaatattacacgaaaggacttcgaatcaggccctgtctcctctctctgcaacttacggcgtttcatgcgccgaaagaccctcaagatgcccgtacgacagcgcacagtccttgaccgcggccagggctcctctggagccggcgacacgcgatggaacggcgttgctcaagatggactgctcttccaaaccggaccaaacaacgattacatgccgccgaaccagaccatgaccgagggcaacgacgaccaggggttctggggcatggccgtcatgtcggccgcggagctcaacttcgatgatccgccgcacggcagaccgcaatggttggcgctcgcccaggccgtcttcaacactcaggccgctcgatgggaggaacgggattgcggaggcggcttgcggtggcagatcttcccctggaacaacgggtacgactataagaactccatctcccaggcctgcttcttcaacatcgccgcccgtctcgctctgtacactggcaaccagtcgtacgcggactgggccgaccgggtctgggattggatggcgaccacgaagctccttaacccggaaacataccacatctacgacggcgttcacgtcgagaactgctccaggattaccccttaccagtggacctacaacgccggcgcgatgctgctgggcgcggcggcgctctacaaccacagcgcgagcgccgcccggcgcgagacgtggcgcgagcgagtcgacggcctgctgaacggctccctcatcttcttcacgggcgagaacggcgacatcatgaccgaggtcgcgtgcgagcccgtagacctctgcgacctcgaccagcagagcttcaaggcgtacctctcgcgctggatggcggccaccatcaagtgggcgccctggacgaaccgccgcgtcaagcccctgctggcctcgtccgctgccgccgccgtggcaacctgcaccggcggcgacaacgggcgcatgtgcggtcttaaatggaacacgcgccggtgggacggcaccacaggggtcgggcagcagatggccgccatggaggtcgtcttggcaaacgcgatcgagcactcgcggccgcccgtgacggaccggaacggcggcacgagcgtcggcgacccgggggcgggcagcgcggacgtcggccgcaagacgccggaggagtactcctcggtctcgactgcggagaagaccggggcgtacatccttaccgtgctgttcgtgatcggcgtgatcgccgggagcctgtttgccttggatgacgagtacaaccgctcgtccgtgccggaacggcttgcgcggctccgcgcggtggtggtcagcggtgtccgcagctggagctgcagtgtcctttcgctcttttggcaacggggcggccgcggccaagcgaagggaaagtgggtaggccggtccgagagcaacgagcaacaccaaacggcagcagggcgagaggatatgcgtggtcgggccaatagcagggacctggtatatcaactcgtcgctctcgactcgacagcgacgttgcacttacgcaggaagaaacaacgctttagaggggtagcatcgtacctcctcttcgccggcgtcgccttcgtcgccctcaagaccagcctgtccgtcgtcgacagctaccgcttcgaacgccgccggcgcgccctgggctgcggcaccttcgcccttacccagatcgccgacgccgtcttcaagttcttcaacgtgttccgtgccatcgaggcccgggacgacaagccttataggcagcagacaaacttgaccatttcctttccagatggatgcctcgtcagtgtggtgcgagacaagcgtgattag

SEQ ID NO: 2241 - protein, 612 aa, Myceliophthora thermophilia
MPSNITRKDFESGPVSSLCNLRRFMRRKTLKMPVRQRTVLDRGQGSSGAGDTRWNGVAQDGLLFQTGPNNDYMPPNQTMTEGNDDQGFWGMAVMSAAELNFDDPPHGRPQWLALAQAVFNTQAARWEERDCGGGLRWQIFPWNNGYDYKNSISQACFFNIAARLALYTGNQSYADWADRVWDWMATTKLLNPETYHIYDGVHVENCSRITPYQWTYNAGAMLLGAAALYNHSASAARRETWRERVDGLLNGSLIFFTGENGDIMTEVACEPVDLCDLDQQSFKAYLSRWMAATIKWAPWTNRRVKPLLASSAAAAVATCTGGDNGRMCGLKWNTRRWDGTTGVGQQMAAMEVVLANAIEHSRPPVTDRNGGTSVGDPGAGSADVGRKTPEEYSSVSTAEKTGAYILTVLFVIGVIAGSLFALDDEYNRSSVPERLARLRAVVVSGVRSWSCSVLSLFWQRGGRGQAKGKWVGRSESNEQHQTAAGREDMRGRANSRDLVYQLVALDSTATLHLRRKKQRFRGVASYLLFAGVAFVALKTSLSVVDSYRFERRRRALGCGTFALTQIADAVFKFFNVFRAIEARDDKPYRQQTNLTISFPDGCLVSVVRDKRD

SEQ ID NO: 2242 - DNA, 1377 bp, Myceliophthora thermophilia
atggctgctaagcgctcttcttgcgacgagcagcttgctcccggtcgcacagggccaggggtacaagacgaaattcgggaatctgcacgaaccctcgcctacgacctgatgctgttctacaagggcaatcagtccggtgaaattccaggcatcttgccaggtccgccaacagagcacaagggcgactactactggtgggaaggaggggccatgatgggcacatacgtcgattactggttcctgaccggcgacccgagttacaaccacgtcgtcacagagggcatgctgcatcaggtcgggcccaacgccgactacatgccccctaaccacacggcttccctgggcaacgacgaccagggattctggggcatgtcggccatgctcgccgccgagaataagttccccaacccgcccgaggacaagccgcagtggctcgcgctcgcccaggccgtctttcacactcaagcagcgcccgaccgccacgacggaacgtgcaacggcggccttcgctggcaggtgcctccgaccaacgcgggatacaactataagaacaccatcgccaacgcctgcttcttcaacctgggcgcccgcctggcccgctacaccgagaaccagacgtacgccgactgggccagcaagacgttccagtggctctgggacgtaggctacatcgaccacgagagctggaaggtctacgacggcggtcatgtcgagcacaactgcaccgacatcaacaaggcccagttcagctacaacgccgccctgctccttcacgggtccgccttcatgtacaactacaccaacggcagcgagatctggagggagcgcgtcgacaagctgctcgagggcatcctccgcgacttcttccccgacggcgtcgccttcgagctgccctgcgagggccgcaagggcgcctgcaccgccgacatgctgtccttcaagggctacgtccaccgctggatggcggtggtgaccaagctggtgcccgacacggccgggaccatcctgcccgtgctgcggacctcggccgaggcggccgcgaggcagtgcacgggcggcgacacgggccgccgctgcggcttctactggtccgagggcgtcttcgtcgacccggccgtcgacaagaccagcggcgccggcgaggccatgagcgtgctcgccgccgtgtccagcttgctcatcgacgaggcgcccccgccggccaccaacgccaccggcatcagcaggggcgatcccaacgccggcagccgcagccgcggcccttcggagccgctcgcgcccatcaccactgccgatcgggccggcgcgggcatcctgaccatgttgatccttggcggtttcattggtacctggagctggatgagcatcggtgattaa

SEQ ID NO: 2243 - protein, 458 aa, Myceliophthora thermophilia
MAAKRSSCDEQLAPGRTGPGVQDEIRESARTLAYDLMLFYKGNQSGEIPGILPGPPTEHKGDYYWWEGGAMMGTYVDYWFLTGDPSYNHVVTEGMLHQVGPNADYMPPNHTASLGNDDQGFWGMSAMLAAENKFPNPPEDKPQWLALAQAVFHTQAAPDRHDGTCNGGLRWQVPPTNAGYNYKNTIANACFFNLGARLARYTENQTYADWASKTFQWLWDVGYIDHESWKVYDGGHVEHNCTDINKAQFSYNAALLLHGSAFMYNYTNGSEIWRERVDKLLEGILRDFFPDGVAFELPCEGRKGACTADMLSFKGYVHRWMAVVTKLVPDTAGTILPVLRTSAEAAARQCTGGDTGRRCGFYWSEGVFVDPAVDKTSGAGEAMSVLAAVSSLLIDEAPPPATNATGISRGDPNAGSRSRGPSEPLAPITTADRAGAGILTMLILGGFIGTWSWMSIGD

SEQ ID NO: 2244 - DNA, 1221 bp, Myceliophthora thermophilia
atggactttgaacaaccgccgcaaaccagagatccacagcgagggctggtggcgcccgattcaggacgcaaagtgtttgctcactacctcgtcggccttacttgcaaccagccgccggagcgctgggttcaagacattgctgcagctcagcgggctggtatagatgggtttgcgctcaacattggtccttcggacccctggaactgcacgcagctcgaccatgcttacagggcagccgaacgcagcggaggtttctttctgttcatttccttcgacatggcggctgggagctggtcagtgcctcatgtggttagcctgatcaagcgataccagggatcgtctgcgcagatgaaggtagagggaagaccacttgtgtcgaccttcgaaggtcccgactgggcccccaactggccgaccgtgcgtcgcgagacgggtggcatatgtctcataccagactggtctagtctaggcccgcaaggggtcggccagcggctagatctgatcgacggtgctttctcctgggacgcctggcccaagccgggacaatccaagatgactctcgtcgaggaccttttgtacatgaagagcctccaagggaagaagtacatgatgggcgttagcccatggttctacacaggcaaggcgaagctctggcctcccacatgctgttccttcccggctcttcgagatgctgatggtaaagacatgaagggaacgattttggcgaatctagttacatctgtgaccctgcgcctgcgcaagtggtcaagggagcggaaacctttcagggcggttctgccctatttgatcgctgcatacaagtccggatctaccaagatcgattggcagggaccggaaaccgcgatcgcttggtaccgcaccagtccggtccagacacaaaatcaccatggaaccgtttggggccagggggggacaatttcggctacgcatggcgccaaagacgtggtatcggtcatggcggtaaccaaggggtctgcatgtatcaccgtcgcggttggcgatttgtgcaggctaacatttgagacatcgagccacaaacgtgtctcatactttgagctaccattcgaccgccacaccacgggccctgtatcgctcgtcctgaatggaagaaaaacgatagggccggaaatccggcgctggcatggtgacgggaaggcgagtgacgacctatatttcgcgacattcttcaaggaatgctga

SEQ ID NO: 2245 - protein, 406 aa, Myceliophthora thermophilia
MDFEQPPQTRDPQRGLVAPDSGRKVFAHYLVGLTCNQPPERWVQDIAAAQRAGIDGFALNIGPSDPWNCTQLDHAYRAAERSGGFFLFISFDMAAGSWSVPHVVSLIKRYQGSSAQMKVEGRPLVSTFEGPDWAPNWPTVRRETGGICLIPDWSSLGPQGVGQRLDLIDGAFSWDAWPKPGQSKMTLVEDLLYMKSLQGKKYMMGVSPWFYTGKAKLWPPTCCSFPALRDADGKDMKGTILANLVTSVTLRLRKWSRERKPFRAVLPYLIAAYKSGSTKIDWQGPETAIAWYRTSPVQTQNHHGTVWGQGGTISATHGAKDVVSVMAVTKGSACITVAVGDLCRLTFETSSHKRVSYFELPFDRHTTGPVSLVLNGRKTIGPEIRRWHGDGKASDDLYFATFFKEC

SEQ ID NO: 2246 - DNA, 936 bp, Myceliophthora thermophilia
atgggtcgctggtcctatctcgacagtgacgaggagcgcctgcccgagggcatggtacgggtaggctacgatgccgacacccaagtgtacacgtaccgcgacagcgacggcagttactgggagggcgcccctggggcgcggtacggcaagctgcatcgcgtgcggtcgtcgaccccgccgctgcccagcgtgcacatcgccaacgatatccggggcgaagagcagccctacatcctgcacgacttttacggttccgacacggacgaatccagcggcgagggcgaccccgcgttcagccacggcaataacgggaaaacgggcgcttccccccgatccccaaccaaagccgttctccacggggccgatcgaccccaccacccgactcccggcaaaggcagcaagaccttgccccgcctcttcaccgccacgaaccgaaacccggacccagacccggacccggacctggacacggacacggacaagctgagcaccgcgaccaccatccgggcctcggtctccagtgcaccgtccgtcacgtcggaggccaccaccaccaccgcgactaacgacgccagcaccaacgccaggacgggcccgggcctcagacgcgccggcacgctctcccgccttgcccgcttcctgtcgccgtcttccccgtccccatcggacccgggcggacgcctcgggctggcgcggcgggctaccgtccacagcgggacggggggggaggaaaagaagaaggggtcatctccgtctcgctcctcttctttttcttctcgtcgcccttgggccgctgcgactagtggtcgtagtggtggtgatgcggcaggaaatgcccggtggcctggctccggccccggcgccggaacggggtcgggaccaggggggcagcgcaagaagtgcgcgacgacgtttgaggagattctgggggaataa

SEQ ID NO: 2247 - protein, 311 aa, Myceliophthora thermophilia
MGRWSYLDSDEERLPEGMVRVGYDADTQVYTYRDSDGSYWEGAPGARYGKLHRVRSSTPPLPSVHIANDIRGEEQPYILHDFYGSDTDESSGEGDPAFSHGNNGKTGASPRSPTKAVLHGADRPHHPTPGKGSKTLPRLFTATNRNPDPDPDPDLDTDTDKLSTATTIRASVSSAPSVTSEATTTTATNDASTNARTGPGLRRAGTLSRLARFLSPSSPSPSDPGGRLGLARRATVHSGTGGEEKKKGSSPSRSSSFSSRRPWAAATSGRSGGDAAGNARWPGSGPGAGTGSGPGGQRKKCATTFEEILGE

SEQ ID NO: 2248 - DNA, 1152 bp, Myceliophthora thermophilia
atgtcgtggccaggcgcagacgactcgccgggcgactacggcgcggaccagcaccagcccgatcgcccaaccgacatcgcctccctcggcgtcttccggaacaaccggctggtcgagcttacaccttcgcaggtcgagcgggctctgaagctgatgagccggcccttcgaggatcttccacagctgcccttcttcgcgcccttgttctcatacacgaccgactggcagaagatggagattgcctacccgctcgtcgacgcttccttccacgtcggccggttgctgacaccgcccgaggccgacgcgcttgcctactatcgcgctaagttctgctcgagggcggcctgggcgccccccgccgtcctcctcaccgccgcctacctcacccaccgcggccgctcgaccttccgcttccccttctacaccccaaaaccggcctcgttcaaccccatgtccttcccgagcgcctcgatgcccttcatctcgggcccggcggccgtgcgactgtggcaccttctccgtttcgccgcctacggtctcatgtcccaactcgtcgtcaaaaacatcatctactcgtacgcccagacgagcaccctcgtgggcgccctgcgagacgaccggctcaaggtactgcgcgagaccatgccgcaacgccgccaagggacggtgcgcccgcattctccggcaacagccaacccagcggagccggagcggacgacagcatcttcgacgcctgcgccacctacggatttctcaggagcaccacaacaagcgaggcaacagccaaggtgggcacagcaggcgccggagtcgcaaagcgcgccgcaggatgacgactcatacctctttgatgacgcttcacccgtggcaccctcacagaggcagacccctccctccggatcccgtccgtcatccggaggtggctccgcttgggacagaattagagagcgggcaaggtcagaggaaggcgcagcgtggaacccgggccagcaacaggaccgcacgccggccggccggcaacgtggtgaacagtacacttacacgcatgccgaccaggaaaaggcgtacgcgagggaacaggcacaaaaagagttcgacgctatgctggagcgggagcggcgcggcatgggcgaatccggcagccgcaattga

SEQ ID NO: 2249 - protein, 383 aa, Myceliophthora thermophilia
MSWPGADDSPGDYGADQHQPDRPTDIASLGVFRNNRLVELTPSQVERALKLMSRPFEDLPQLPFFAPLFSYTTDWQKMEIAYPLVDASFHVGRLLTPPEADALAYYRAKFCSRAAWAPPAVLLTAAYLTHRGRSTFRFPFYTPKPASFNPMSFPSASMPFISGPAAVRLWHLLRFAAYGLMSQLVVKNIIYSYAQTSTLVGALRDDRLKVLRETMPQRRQGTVRPHSPATANPAEPERTTASSTPAPPTDFSGAPQQARQQPRWAQQAPESQSAPQDDDSYLFDDASPVAPSQRQTPPSGSRPSSGGGSAWDRIRERARSEEGAAWNPGQQQDRTPAGRQRGEQYTYTHADQEKAYAREQAQKEFDAMLERERRGMGESGSRN

SEQ ID NO: 2250 - DNA, 1182 bp, Myceliophthora thermophilia
atggccgacacggaccgcccagcgcgccggtacaagtctccctccgagctctcccgcgagcccgacggcgcccccttccccccctcctccccatcctccccatcctccccaacatccccgacccgccacacggcgcgcataacgtgcacgacgcacacccacacgccaccgcagcggaccagcccgtacctgcctacgccgaccgagcgggccgtgctggccctctacccggcggtgctcgtcttcggcgccctcttctcacagctgtcgcccgagacccgcgcggcgccctacgacacggcacgccaggcgcacgtgcaggacccggccctggccccctcctactttgcccgcaaggacaacctgctcaacgtgctcttcgtcaagcgcggctgggcctggatcagcgtcgccttctgggccttcctgctcacccacccggcagcgggccccggcgcgaaaacgagggccagggcggccgtccgctgggccgcggtcacggcctggtgggtgtttgtgacgcagtggttcttcggccccgccctcatcgaccgcggcttccgctggagcgggggcaagtgcgaggtcgccgaggaggtggtgaggcagggcgaggccgggaccaaggaagtggtcaccgccgccgcgtgcaaggcctcgggagggagctggcggggcgggcacgacatcagcggacacgtgttcctgttggtcctggggagcttctttctgatgcaggaggccgggtgggtcgtcgcgaggtgggcgcggtggttgggggaggaacgctctgtggtgatgcacgacggggcggtgaagggcgcactggtggaagcggacaacaggagggacaggcaagaggaggtggtggtgctgacggctttggaggcgctgggccggggagggacgctggtagccgtggtggtggggctgtgcgggtggatgctgctcatgacggcgatttatttccacacgtggtttgaaaaggtacgtgaagtgaagcaacacaaagagccggaagctctcctcccgatcattccgatggaagaagggcttgctgacctcgacatagctcactggactgctcgttgccctgatagggttgtatgtgacctacatcctcccgcgctgggttcccgcgctgcgtggcgttgttgggttgccagggatctagcgccatga

SEQ ID NO: 2251 - protein, 393 aa, Myceliophthora thermophilia
MADTDRPARRYKSPSELSREPDGAPFPPSSPSSPSSPTSPTRHTARITCTTHTHTPPQRTSPYLPTPTERAVLALYPAVLVFGALFSQLSPETRAAPYDTARQAHVQDPALAPSYFARKDNLLNVLFVKRGWAWISVAFWAFLLTHPAAGPGAKTRARAAVRWAAVTAWWVFVTQWFFGPALIDRGFRWSGGKCEVAEEVVRQGEAGTKEVVTAAACKASGGSWRGGHDISGHVFLLVLGSFFLMQEAGWVVARWARWLGEERSVVMHDGAVKGALVEADNRRDRQEEVVVLTALEALGRGGTLVAVVVGLCGWMLLMTAIYFHTWFEKVREVKQHKEPEALLPIIPMEEGLADLDIAHWTARCPDRVVCDLHPPALGSRAAWRCWVARDLAP

SEQ ID NO: 2252 - DNA, 816 bp, Myceliophthora thermophilia
atgacaaatccgcctatgcagccgatcatcctgtccatggaagtggacgacgacaattcttttgaaagcgaataccgactgcgagtcgggaaccaagtcaagtatctcgtcatcgctcccggaacctttgacagagacacactttcatttcccatacagtccctgccccatcttccttaccacgaggaatggaccgtggccaacatctcacgagataaagccagcggcgacttgaggacctccttcttgaaccgaatcctcgctggcgtcaagtgtcaatggcatcataccaaagttgattgcctcgagctggagaagacaaagcagctcacggcactggctttcgaagccttctcgcattcgatccccctaactactctcccgccaccaaccaccgtgatcgccaaaatcgcccgtttcgaatgggaactgcctcgcatcgaacaagaaacgagggcatatcagttgcttgagggttccggactggccccgcgcttcctggcccatgttcacgagaatggacgcatcatagggattctactggagaaaaccgagggacgcccagcttccttccaggatctgagcgcctgcgagactgctctagggaagctccacaagttgggactggtacatggggatgtaaaccggtataactttctcattaccaaagcaggggtaaagctgctcgactttgaatgctttcgggagaacgctagcccggagttgatgagcaaggaattagagaatttgcgcgccgaattagtcgacgagtcgggacgcggcggaggtttcatttttcatggcgatagcaactga

SEQ ID NO: 2253 - protein, 271 aa, Myceliophthora thermophilia
MTNPPMQPIILSMEVDDDNSFESEYRLRVGNQVKYLVIAPGTFDRDTLSFPIQSLPHLPYHEEWTVANISRDKASGDLRTSFLNRILAGVKCQWHHTKVDCLELEKTKQLTALAFEAFSHSIPLTTLPPPTTVIAKIARFEWELPRIEQETRAYQLLEGSGLAPRFLAHVHENGRIIGILLEKTEGRPASFQDLSACETALGKLHKLGLVHGDVNRYNFLITKAGVKLLDFECFRENASPELMSKELENLRAELVDESGRGGGFIFHGDSN

SEQ ID NO: 2254 - DNA, 1224 bp, Myceliophthora thermophilia
atgtcttcctcccagcccgccgccgtccccttcaccatcgagaacgtcctccccggcccgctcgccttcccctcctcgccggacgtgtaccgcatccgcctccagcgcgagcacgccgccggcaggccgaccatcaagtacctggccgcgcccaacacagtccgcatcttcaccggccccgacgcccaccaccgccgcctgaccaacctcgccttcgaccgtgtgcctgcaggcgactgggtcgtcggccggctctccgccgccgagggaggaggaggcgggaccaagctggagctcatctctaccgccggcgctgacgcgctcttgggcctcggtctcgccagcgccgggccagtctggtgcggcacgaccgtcgacgaggccgactgcgccgaggcggcgcccgccagcgcgcgctggactaccgtggtcgacgcggccggcgcggaagtccgcgtgcccaagcccgccgacctgcagtgcatggactacgtgtcggcgtcggtcatccccgcgctgcaggccgtcgtcgcccgctactacccaggacaggagggagaggcgcgtgtggtgctcgtgtcggactggttcccgggccactgggcggggatcgataacgagacacgcgcgtaccgcatcatacaggagcgggatccggggctggcgccgcggttcctggcgcatgtcaccgagaatggctcgcgcgtggtggggttcctgctggagcatgtgcccgacgcgcgcgaggccgggcctgcggacttggatcggtgcagggctgttctggggaggctgcacgcgctggggattgcgaagagggggctgagtcggcactcgttccttgtaaagggggatggggaggtattggtaagggggccgtttaatgggcctcccgaggaggctagtgaggagatgttgcgggcagagatggagagcctagagcgggttttggcaaagagcccgtctgagtttgaggatcaggccgcgaggatgctgaggctggctgacccccagagggtgaagttgctaggcgagtttcagaaggcgcatggcttcgtgctgccgtttgtgtactggttggaggagcgtgcgggacgcatcacccttacgctcgaggagtatagcatcctggctaaggagtacgaggataacgactttgcttggagcaaggaactgcaggagcgggctgagaagcggtttggactgtccgcacaggggatctga

SEQ ID NO: 2255 - protein, 407 aa, Myceliophthora thermophilia
MSSSQPAAVPFTIENVLPGPLAFPSSPDVYRIRLQREHAAGRPTIKYLAAPNTVRIFTGPDAHHRRLTNLAFDRVPAGDWVVGRLSAAEGGGGGTKLELISTAGADALLGLGLASAGPVWCGTTVDEADCAEAAPASARWTTVVDAAGAEVRVPKPADLQCMDYVSASVIPALQAVVARYYPGQEGEARVVLVSDWFPGHWAGIDNETRAYRIIQERDPGLAPRFLAHVTENGSRVVGFLLEHVPDAREAGPADLDRCRAVLGRLHALGIAKRGLSRHSFLVKGDGEVLVRGPFNGPPEEASEEMLRAEMESLERVLAKSPSEFEDQAARMLRLADPQRVKLLGEFQKAHGFVLPFVYWLEERAGRITLTLEEYSILAKEYEDNDFAWSKELQERAEKRFGLSAQGI

SEQ ID NO: 2256 - DNA, 2295 bp, Myceliophthora thermophilia
atgaagttcttcaggcgaaaggacaagcggaagaccgacggcgacagcggccacggccggatgccgggcttcggcggcagctccctcggaaatggcaaacactcgaccccggcacacggcgggtacgggctcggcggttcgcgacccgatgcccgccgaccgttcggctcccccccgtccggaccctacgacccgcatacctactcgcagtccgccttcacccaattcccgccgacgcgcgcctccgccgccctcctcgcccgcctcccggcggccatcctcgagcgcatcttcgtcttcgtctgcccccacagccgcgacgagacctactcgacgtgcgagcagagctccgtcgaggatacctgtatgctgtgcgacctgcgcgacctggcgcgctgcgtcgccgtgtgcaagagatggaaggaggaggctgtcaagctgctgtaccatagcatccgtatcgacagcgtccactattgcgagctcgaagccgtccttgccgagcggcgaaagcggcgatccttcttcgaccgcaatggcgaacccgaggaccccgcgcaggcccgcctgaagctgctctgccgtaccctccgggaagatcccgtgcgtcgcggacggctggttcagtatctcaagatgccgtacatgctgcgcgagtcctgtcaagcagacctggccaggaccatcgctgtgacgccgaatctgcgctacgtcgacttgcccgagggcctgttcaccgacgaccccgccttcctgaccctccgcctggaggtgcaggcgcgctgtctcgaactccgcaagatgacatacatggaaggctccgagaacagtctccaggcgctggcgacgggcaaggtgtggaccaatctggaggtgctggagctgatccggatcgagatggagcccggtatgctgcgccacgtgctcggctacctggggaacctacgcgctctcaaagttagccagacgaaggccttcacggacgagactctggagtggaacgacatgctgccgcccttcccgccggtggaggagttcatcctcaccgacgtgcccaacgtcacctgcgagggactcaaatcgtggctgatgcttcccgaggcgcggcaggccctgagggtgctcacgctgaacgggacaggggcccgggtgtgggcgctccaggagctcctggcctacgcccctaacctcaagcacctatccctcacggaccgcgtatccgcgacgctgccggctgccgccggatcgcacaacatcccgccgctctcctctgccagcctcgagtcgctccacttcgagatcacagcggccccatccacgcccaagtactccaatgtcagcgcgagctactacaactacctagccggttccctcctctcgggcgggctccccaacctccacgccgtctacgtccgcgatcccaacttccccgacctcctcctcggcctgcccccgcccgcaccggcctacgccgagggccgcgccgcccgcccgggaagcagcggctctacctcgcctttctcgtcccctttcgcctcgccctcgacctcgccgaacaataacgccatcaggggcccccgcggcagcctcccgcccttgcaacccccctcggcgcccttcgccggcggcgggcgcggccaccgcccgcagggttccctctcatccctcagcgggcccttcggctcctcatctaccagcctcaacaacaacaacaacccgcgtttcagcagcaacaaccccttcgccgccctcgcctcctcctcctcctcctcctccgccgccgccgcgatggcgggagggttcatgaacctccccgccaagctggaggtgttcaccaagggggaggacgacgaccagctggggtggtcgttcgtgcaggtcggcagcggcgcggaggcgtcatcatcattacttggaggagaaggcggtagtggtggtggtggaggaggaggaggagtgggaggtcggaggagggggagggcggacgggggcgagcggccgctcagcagctacgggctcggggcggacgtcctgggcgggagcacggccggatggagcagcggcgcgggcgcgcggcggagcgtgctcgtcagcggcgtcggcggcgccgggaccggcttcctggccgtgcccctgcccggcgagggttcaggtggtggtggtggtggtatgggcggacagaggaggaggagggagaataacctgagcgttagcagtctcggggaggacgagtggcccaggccgaagagcagcgccggcgagaagaagagggaacggatggatctgtggcggtag

SEQ ID NO: 2257 - protein, 764 aa, Myceliophthora thermophilia
MKFFRRKDKRKTDGDSGHGRMPGFGGSSLGNGKHSTPAHGGYGLGGSRPDARRPFGSPPSGPYDPHTYSQSAFTQFPPTRASAALLARLPAAILERIFVFVCPHSRDETYSTCEQSSVEDTCMLCDLRDLARCVAVCKRWKEEAVKLLYHSIRIDSVHYCELEAVLAERRKRRSFFDRNGEPEDPAQARLKLLCRTLREDPVRRGRLVQYLKMPYMLRESCQADLARTIAVTPNLRYVDLPEGLFTDDPAFLTLRLEVQARCLELRKMTYMEGSENSLQALATGKVWTNLEVLELIRIEMEPGMLRHVLGYLGNLRALKVSQTKAFTDETLEWNDMLPPFPPVEEFILTDVPNVTCEGLKSWLMLPEARQALRVLTLNGTGARVWALQELLAYAPNLKHLSLTDRVSATLPAAAGSHNIPPLSSASLESLHFEITAAPSTPKYSNVSASYYNYLAGSLLSGGLPNLHAVYVRDPNFPDLLLGLPPPAPAYAEGRAARPGSSGSTSPFSSPFASPSTSPNNNAIRGPRGSLPPLQPPSAPFAGGGRGHRPQGSLSSLSGPFGSSSTSLNNNNNPRFSSNNPFAALASSSSSSSAAAAMAGGFMNLPAKLEVFTKGEDDDQLGWSFVQVGSGAEASSSLLGGEGGSGGGGGGGGVGGRRRGRADGGERPLSSYGLGADVLGGSTAGWSSGAGARRSVLVSGVGGAGTGFLAVPLPGEGSGGGGGGMGGQRRRRENNLSVSSLGEDEWPRPKSSAGEKKRERMDLWR

SEQ ID NO: 2258 - DNA, 969 bp, Myceliophthora thermophilia
atgcccgagtatcgcaccgggcagggccgtcatatggcggcacgtctatttgatcgcatccaatgtctgtaccagtctctgactcgacagcaagcggtagttgcctaccaggaagagactgtacagacactacaagaagcgaatgtctttgtagacgtggaacggctcaccggcattagcatggaggaggagacgcggcagctacaaaccacttgtggcatcttgaatgatctgaacactcgcctctgcgaagctattgacctctggagccaaatgtcatttgatgacggcagctgcgaggagctaactcaaactcaagcttctgcagcgcaatcgccgagtccgaacccacccgccgaagagcttaaagaactccccagacagccaaaatgccaacactccactccacccagcctcggcgatcctgcggtaggtacccagagccgctaccaaacgcagtggaagaactggatcaaagcgccagcgatacaagaccccgccagtttgatcctgtcccgaccgacgcggtggtggatggaagagcggagccattatgccctgtgccaaccttccgagcaagcccagctcgagagctctgcggacgcggtccgactccaccgggcttataatcacgccacactgcctgtggtcgcactacctgcgccggcgcagtattaccagtcgtctggtcgagaggtgagccaagccgcgtattacccatacgacccatctgccctcacgcctccgcctcttcagggagaccaagtaagcgaactgtcatacggcagtagagcgcgggagggcttgattgactttttgctcgatgatgattatgatcctgacttttggcagaagaacctccgacccgggaatatctggaccgaccccccccgccgccccatgcctgacgacgagccagtgtcgccccgggcagttccagcgagctggagcggtctgtcaaggggttaa

SEQ ID NO: 2259 - protein, 322 aa, Myceliophthora thermophilia
MPEYRTGQGRHMAARLFDRIQCLYQSLTRQQAVVAYQEETVQTLQEANVFVDVERLTGISMEEETRQLQTTCGILNDLNTRLCEAIDLWSQMSFDDGSCEELTQTQASAAQSPSPNPPAEELKELPRQPKCQHSTPPSLGDPAVGTQSRYQTQWKNWIKAPAIQDPASLILSRPTRWWMEERSHYALCQPSEQAQLESSADAVRLHRAYNHATLPVVALPAPAQYYQSSGREVSQAAYYPYDPSALTPPPLQGDQVSELSYGSRAREGLIDFLLDDDYDPDFWQKNLRPGNIWTDPPRRPMPDDEPVSPRAVPASWSGLSRG

SEQ ID NO: 2260 - DNA, 576 bp, Myceliophthora thermophilia
atgccattcggacttacgaacgcgctggcaacgttccaagccctgattaatcaagctatccgaccctttctcgacaaatttgcggtatattatctcgacgatatacttatcttctctaagacgatagacaaacatcggaagtacgtagaagcagtgctagacgcgctatatacgtacaagctatcagttaataaggaaaagagcgaattccacgttaggaaaacggtgtttttaggatacgaaatatccctaggacaaattcggatagaacctttaaaggttaaagccatcaagaattggctacgaccgatattagtcacagaagtacaaagctttatcggatttacaaacttctaccgaatgttcattaggaactttagagcgatcgtacaacctttacacgaactcaccaagaagaatactaaattccaatgggaagagcaatacaagcaagcattcacgcagatctggaatgccattaccaaagatccggtactagtactactagaccccaagaagccattcgaggtagaaacggacgcttcagactacgccatcggaggacaattaggataa

SEQ ID NO: 2261 - protein, 191 aa, Myceliophthora thermophilia
MPFGLTNALATFQALINQAIRPFLDKFAVYYLDDILIFSKTIDKHRKYVEAVLDALYTYKLSVNKEKSEFHVRKTVFLGYEISLGQIRIEPLKVKAIKNWLRPILVTEVQSFIGFTNFYRMFIRNFRAIVQPLHELTKKNTKFQWEEQYKQAFTQIWNAITKDPVLVLLDPKKPFEVETDASDYAIGGQLG

SEQ ID NO: 2262 - DNA, 495 bp, Myceliophthora thermophilia
atggtgtttttagggtacgaaatatccctaggacaaattcagatagaacctttaaagaagtacaaagcttcattagatttacaaacttctaccaaatgtttattaggaactttagagcgactatacgacctttgtacaaactcactaagaagaacgctagattccaataggaagagtaatataaatctagtactagtactactagaccctaagaaaccatttaaggtagaaacagacgcttcagactatactattagaagacaattagaacaacgagatagacaaggaaagctatatcctatagccttctttttaaagaagctcgacagactacgtcttaattatccgatctataacaaggaactacttacgattatcgaagctttcaaggaatggcgactataccttagtagtacgattaaaccaatacaagtgtatatagattataagaacttacaatacttcataacgacaaaggagcttaacggacgataa

SEQ ID NO: 2263 - protein, 164 aa, Myceliophthora thermophilia
MVFLGYEISLGQIQIEPLKKYKASLDLQTSTKCLLGTLERLYDLCTNSLRRTLDSNRKSNINLVLVLLDPKKPFKVETDASDYTIRRQLEQRDRQGKLYPIAFFLKKLDRLRLNYPIYNKELLTIIEAFKEWRLYLSSTIKPIQVYIDYKNLQYFITTKELNGR

SEQ ID NO: 2264 - DNA, 339 bp, Myceliophthora thermophilia
atgttcattaggaactttagagcgattatacgacctttatataaacttactaagaagaacgctaaattccaatgggaagagcaacataagcaagtatttatacagattcgtaacgccattactaaagatctagtactagtactactagaccctaagaagccatttaaagtagaaacggacgcttcagactatgctatcggaagacaattaggacaacgagacgaacaagggaagctacatcctatagccttctttttaaagaagcttaatagactatatctcaattatccgatctacaacaaggaactacttacgattattaaagctttcaaggaatag

SEQ ID NO: 2265 - protein, 112 aa, Myceliophthora thermophilia
MFIRNFRAIIRPLYKLTKKNAKFQWEEQHKQVFIQIRNAITKDLVLVLLDPKKPFKVETDASDYAIGRQLGQRDEQGKLHPIAFFLKKLNRLYLNYPIYNKELLTIIKAFKE

SEQ ID NO: 2266 - DNA, 279 bp, Myceliophthora thermophilia
atggaaccttcaaaggaagagcaatacgagcaagcatttacgcaaatccgcgacgccattactgaagatctagtactagtactaccagaccctaagaagccatttaaggtagaaacagacgcttccgactacgctattagaggacaattgggacaacgagacgaacaagggaagctacatcctatagccttccttttaaagaagctcgatagaccacgtctcaattatccgatttacaacaaggaactacttgcgattgtcaaagctttcaaggaatag

SEQ ID NO: 2267 - protein, 92 aa, Myceliophthora thermophilia
MEPSKEEQYEQAFTQIRDAITEDLVLVLPDPKKPFKVETDASDYAIRGQLGQRDEQGKLHPIAFLLKKLDRPRLNYPIYNKELLAIVKAFKE

SEQ ID NO: 2268 - DNA, 936 bp, Myceliophthora thermophilia
atgcatacaacatacaccacctaccctttaatcccagccctacgcagtgcaatacgcctcgataacccactctaccaaaccagaacccctccccgccccgcgcggtgcgccatccaacctcaagaactgtttatggagtcgtcacctctgatcaaggcgcacgatcacgcccgagcggcggcaattgcgacgcaaacgtccgacacaacggtcgccatcaacgagcacgcccaggctgccggcgagtttgcgaacgcctccaagatcacaagcagccatgaggctctgcggacgctgaagctgctagagcagcaccacaagcggctgtccgagctgctgaagtttcctacggccccgccccgccaggccagttccgacgagatggccgaggatgacgagaaggatgacgagaaggagggactggcagtgaacgagtccaagacgccgtcgccgtcgccgcggaacgagccaccccccgccaagaagacgtctccggcgaagcctccccccaccctctcccaccagcgataccccggccggaacctttcgtcctcgatcgcgagcaatctggcttccgcgcgaggcatccgggcgagctatagcacgaaaccgctgacgccgagcgtgtccaacgaccaggctccggggactgggcggcgaccggcgcggcccggctcgcccccgtcctcgagcggcgccggggccggggccggggccggggccgggccgagcgaggaggcgctgcggaggcgcaaccgcgagctcgaggagcagatggccgagatggtcaagcgcatgaacagcctggagaaggaccatctcaaactgcaggtcaccctcgagaagtaccgggacaggtgggagaagctcaaggcgggcgccaaggcccgcagggaggctcttgactcggcccaggagggcgaggccaagaagtga

SEQ ID NO: 2269 - protein, 311 aa, Myceliophthora thermophilia
MHTTYTTYPLIPALRSAIRLDNPLYQTRTPPRPARCAIQPQELFMESSPLIKAHDHARAAAIATQTSDTTVAINEHAQAAGEFANASKITSSHEALRTLKLLEQHHKRLSELLKFPTAPPRQASSDEMAEDDEKDDEKEGLAVNESKTPSPSPRNEPPPAKKTSPAKPPPTLSHQRYPGRNLSSSIASNLASARGIRASYSTKPLTPSVSNDQAPGTGRRPARPGSPPSSSGAGAGAGAGAGPSEEALRRRNRELEEQMAEMVKRMNSLEKDHLKLQVTLEKYRDRWEKLKAGAKARREALDSAQEGEAKK

SEQ ID NO: 2270 - DNA, 933 bp, Myceliophthora thermophilia
atggacgaacaccggaagcacgtgagagcagtgctagacgtattacacgcgtataagctatcagttaacaaggaaaagagcgaattccacgtcaggaagacggtgtttttgggatacgaaatatccccaggacaaatccggatggaacctttaaagattaaagccatcaagaattggccacgaccgacgtcagtcacggaagtacgaagtttcatcggatttgcgaatttctaccaaatgttcatcaggaactttggagcgatcgcgcgaccattatacgaacttaccaggaagggcgctaagttccaatgggaagagcgacatgagcaagcattcgcgcagattcgcgacgccatcaccgaggatccagtactggtattgccagaccccaagaagccatttgaggtggaaacggacgcttcagactacgccatcggaggacaattgggacaacgagacgaacaagggaagctacaccctgtagccttcttttcaaagaagctcgatggactacgtctcaattatccaatccatgacaaggaactacttgcgattgtcgaagctttcaaggaatggcgactatacctcagcggtacaattaaaccagtacaagtatatacggatcacaagaatttgcgatacttcacgacgacaaaggagctcaacggacgacaaatacgatgggcagaattccttgcggaattcaattttgagatccgctataagaaaggcaaagagaacgcacgagcggacgctttaagccaacgaacggatcatacggaaggacgaacggaaacgacaccaccgttgttcaaggaacaaacagacagaacgctacatcacgaaacgcagacacctgtggaagatgatccactcgactcgttcctagaatgttgcgcaatccttcgagaagaaaggatcaacgagacatag

SEQ ID NO: 2271 - protein, 310 aa, Myceliophthora thermophilia
MDEHRKHVRAVLDVLHAYKLSVNKEKSEFHVRKTVFLGYEISPGQIRMEPLKIKAIKNWPRPTSVTEVRSFIGFANFYQMFIRNFGAIARPLYELTRKGAKFQWEERHEQAFAQIRDAITEDPVLVLPDPKKPFEVETDASDYAIGGQLGQRDEQGKLHPVAFFSKKLDGLRLNYPIHDKELLAIVEAFKEWRLYLSGTIKPVQVYTDHKNLRYFTTTKELNGRQIRWAEFLAEFNFEIRYKKGKENARADALSQRTDHTEGRTETTPPLFKEQTDRTLHHETQTPVEDDPLDSFLECCAILREERINET

SEQ ID NO: 2272 - DNA, 399 bp, Myceliophthora thermophilia
atggactatgggatcacgagatcaagctcaagattatcgacaaaggagagtgaacgcttagatcctagtatcgagtactgtcatgcattgactacgacggccgcaacgtccagccctgatgatcagctatccgacctttctgacaaattgcgacgatggacgaacaccggaaaccccaagaagccatttgaggtggaaacggacgcttcagactacgccatcggaggacaattgggacaacgagacgaacaagggaagctataccctatagccttcttttcaaagaagctcgatagactacatctcaattatccgatccacgacaaggaactacttacgattgtcgaagctttcaaggaatggcgactatacctcagcggcacgattaaaccagtataa

SEQ ID NO: 2273 - protein, 132 aa, Myceliophthora thermophilia
MDYGITRSSSRLSTKESERLDPSIEYCHALTTTAATSSPDDQLSDLSDKLRRWTNTGNPKKPFEVETDASDYAIGGQLGQRDEQGKLYPIAFFSKKLDRLHLNYPIHDKELLTIVEAFKEWRLYLSGTIKPV

SEQ ID NO: 2274 - DNA, 201 bp, Myceliophthora thermophilia
atgatcacttcccgttcagccgaagctgataataccataccccactgtcaggtcgagggcgaagcccagggcgaagacgatgccattgcgaccttcctcaagcacatagacaacgggccacggcatgcccacgtggtcaagctggacaaggaggagagggagccggtggagggcgagaccgagttcgagattcgccggtga

SEQ ID NO: 2275 - protein, 66 aa, Myceliophthora thermophilia
MITSRSAEADNTIPHCQVEGEAQGEDDAIATFLKHIDNGPRHAHVVKLDKEEREPVEGETEFEIRR

SEQ ID NO: 2276 - DNA, 1176 bp, Myceliophthora thermophilia
atggcgtcagaccaggagcgcgagcacgccctcgcctccttcaagcagaagctgattgagtcgcgggaatgggagacgaagctcaagaacctccggatggaaatcaagagccttcaaaaagaatacgagcagacagaagagaacatcaaggcgttgcaaagcgtcgggcagatcatcggcgaagtgctcaagcagttggacgacgagagattcatagtaaaggcctcgtccgggccacgctacgtcgtcgggtgccgatccaaggtggacaagagcaagctgaagcagggtacgcgcgtggcgctcgatatgacgacgctcaccatcatgcgcatgcttccgcgcgaggtcgacccgctggtctacaacatgtctctcgaggacccgggacaggtcagcttcgccggcatcggcgggctcaacgagcagatccgcgagctcagagaggtgattgagctgccgctcaagaatccggagctgttcctgcgcgtcggcatcaagccgcccaagggtgtgctcctctacgggcctcccggcacgggaaagacgctgctcgcgagggcggtggctagcagtctcgaaactaacttcttgaaagtcgtctcctcggctatcgtcgacaagtatattggcgagtcggcacgcctgatccgcgagatgttcggctacgccaaagagcacgagccgtgcatcatcttcatggacgagatcgacgccatcggagggcggcggttcagcgagggcacgagtgcggaccgcgagatccaacgcaccctcatggagctgctcaaccagctcgacggcttcgactaccttggcaagaccaagatcatcatggcaactaaccggcccgacacgctcgacccggcgctgctgcgcgccggccgcctggaccgcaagatcgagatcccgctgcccaacgaggtgggccggctggagattctcaagattcatgcggccggcgtggccaaggagggcgagatcgactttgagagcatcgtcaagatgagcgacgggctgaacggggccgatctgcggaacgtggtgaccgaggcgggcctatttgccatcaaagatgacagggacgctatcaaccaggacgacttcaacaaggcggtgcgcaagctggtcgaagcgaagaagctggagggcaagcttgagtaccagaagttgtga

SEQ ID NO: 2277 - protein, 391 aa, Myceliophthora thermophilia
MASDQEREHALASFKQKLIESREWETKLKNLRMEIKSLQKEYEQTEENIKALQSVGQIIGEVLKQLDDERFIVKASSGPRYVVGCRSKVDKSKLKQGTRVALDMTTLTIMRMLPREVDPLVYNMSLEDPGQVSFAGIGGLNEQIRELREVIELPLKNPELFLRVGIKPPKGVLLYGPPGTGKTLLARAVASSLETNFLKVVSSAIVDKYIGESARLIREMFGYAKEHEPCIIFMDEIDAIGGRRFSEGTSADREIQRTLMELLNQLDGFDYLGKTKIIMATNRPDTLDPALLRAGRLDRKIEIPLPNEVGRLEILKIHAAGVAKEGEIDFESIVKMSDGLNGADLRNVVTEAGLFAIKDDRDAINQDDFNKAVRKLVEAKKLEGKLEYQKL

SEQ ID NO: 2278 - DNA, 2700 bp, Myceliophthora thermophilia
atggcggggttcttccagaagctcaaaggggccggatctggtgtctcaaaatccgataacaccgcatccgcaaaaagcaaaaaggacgaacctcagccagacctgacgccgctcgagaagctgttacaaaatgctggtccgatccgggaagacggcagcgacaaattctttgggttagaaaacttcggcaatacatgttattgcaactcgattgttcaggcactatatcactcggagcagttccgacggcatgtcgtcaactaccccccgccgttacccggggacgaggggaacaggcagaggcggaaggtcaatgttacaatacgacctccggtgcagccggagcagagcgggaatgccgccggcccgagtaagccgcggcagtccttcggcggaggaccgcagctccctcctgctgtcccacctttgcgcccggaggacaaaccggactcgccggagtacaagaagaagcaggccatgctgagggggccgatattagagctcgcgcaagagagcgtcgacccttccggcatggaggagtgtacctttacggcactcagagacatcttccaggccatgatcgaaagtcagtccaggacgggcgtgataagcccgcagaggttcctggacatcttcaagcgtaacaacgagatgttccgcaactcgatgcaccaggacgctcatgagttctacggcatagttctcaacgacgtgatcgcgaacgtcgaggcttacgccaagaggacgcaagagctggcagacagcacaagcaaggaggatccgtcgtctcatcaggccgcaggcgcaatagccttgacgacgacgacgatgacgacgaccaccaccaccaccaatgccggttctgtgacgcggtcgtcggggaccggctgggtgcacgacatcttcgagggcgtgctgacttcagaaaccaggtgcctgacctgcgagacggcatcacaacgcgacgagacgtttctagacttgtcaatcgacttggaggagcattcgtccgtgactgcgtgcctgctcaacttctcggccgaggagatgctgtgcgagaggaacaagttccactgcgaccactgcggcggcctgcaggaagcggaaaagcggatgaaggtcaagaaactgcccaagattctcgcgttgcatctgaagcggttcaagtacaccgaggactacagccggttgcagaagctcttccatcgtgtcgtctacccctaccacctccggatgttcatgacgaccgacgacgccgaagatcccgacaggatgtacgagctctacgccgtggttgtgcatatcggagggaacgcgtaccacgggcactacgtcgcggttatcaagaccaaagaccgtgggtggctactcttcgacgacgagatggtcgagccggtggacaagcatttcgtccggaacttcttcggagacaagcccgggatggcgtgcgcctacgtgctgttctaccaggagacgacgttcgagaaggtgcgggaagaaatggatgccgaaggcctggaccaggtgaagctggccacccagacggcagacaccgcggcgaccacggagttgcctaacgggtcaagcaccgctctgctctcgaagctcaactcgcagcccctgtctccggtggacgagaacgaaacgctagccacgctcgatcaggccaggtcggcccctcccgagatccacgtgaccacaagcaccacctcgggcggtccgccgccgcctcccctgtccgcttcggaagtccaccctctagtcgcagcgccaccccccggctcggccgtcgcgacaggagaggacaagggcaccgctgttacgtcaaagaccaaggcgcaactagccaaggaaaagaaggaagccaaggcgcgggagaaggccgaggagaaggcacggaaagccgccgaaaaggaacaggctcgcctcgctgcgaaggagcgcaacgaggcgcaacgcaggcgaatagaggcggccaggctcgaacgcgagcagttagcccaggtgttaaaggagagcaggcggatggcggaagaggaagagaagcggcgcaggaaagaagtcggggcaataacgaccacggacacaaccacctcgtccgacgcgggtgctggcggcggcggcggcggacgcggcggcgatggcgatggtggcgacgagcagcagcaccaccgaaacggtctgttcaaccgcgccggtcggacgagcaagtccatgacccgcaaaagcttcgccttcctgcacatcggccagaacaaggacgaggataagggcgacccgaaggggtacagaaccgatcgcagcgaggcaggcgagagcgggagcgtccagggcgagagcatcccgtcgtcgggcgccaaggagaacggggcgccctcgccctactcccacaacaagaacggcggcggtagcaacggcaacggcaacggcaccagcaccagcaccagcaccagcatcggcggcatcaacggatcgcccgccaaaaagccgagcaaccccttcctggcgcgggccatcccacggtcggacacggcgcccgccggggcggtcagccagctgcgacgtactcccgacaagcacgacagggagaaggatagagacggcaaggagaaccagaaccagaaaccggcgctcaaggagaggttcagcttcgggctcggcaggaaaaagagcagcaggttcctgtcttcggcgtcctaa

SEQ ID NO: 2279 - protein, 899 aa, Myceliophthora thermophilia
MAGFFQKLKGAGSGVSKSDNTASAKSKKDEPQPDLTPLEKLLQNAGPIREDGSDKFFGLENFGNTCYCNSIVQALYHSEQFRRHVVNYPPPLPGDEGNRQRRKVNVTIRPPVQPEQSGNAAGPSKPRQSFGGGPQLPPAVPPLRPEDKPDSPEYKKKQAMLRGPILELAQESVDPSGMEECTFTALRDIFQAMIESQSRTGVISPQRFLDIFKRNNEMFRNSMHQDAHEFYGIVLNDVIANVEAYAKRTQELADSTSKEDPSSHQAAGAIALTTTTMTTTTTTTNAGSVTRSSGTGWVHDIFEGVLTSETRCLTCETASQRDETFLDLSIDLEEHSSVTACLLNFSAEEMLCERNKFHCDHCGGLQEAEKRMKVKKLPKILALHLKRFKYTEDYSRLQKLFHRVVYPYHLRMFMTTDDAEDPDRMYELYAVVVHIGGNAYHGHYVAVIKTKDRGWLLFDDEMVEPVDKHFVRNFFGDKPGMACAYVLFYQETTFEKVREEMDAEGLDQVKLATQTADTAATTELPNGSSTALLSKLNSQPLSPVDENETLATLDQARSAPPEIHVTTSTTSGGPPPPPLSASEVHPLVAAPPPGSAVATGEDKGTAVTSKTKAQLAKEKKEAKAREKAEEKARKAAEKEQARLAAKERNEAQRRRIEAARLEREQLAQVLKESRRMAEEEEKRRRKEVGAITTTDTTTSSDAGAGGGGGGRGGDGDGGDEQQHHRNGLFNRAGRTSKSMTRKSFAFLHIGQNKDEDKGDPKGYRTDRSEAGESGSVQGESIPSSGAKENGAPSPYSHNKNGGGSNGNGNGTSTSTSTSIGGINGSPAKKPSNPFLARAIPRSDTAPAGAVSQLRRTPDKHDREKDRDGKENQNQKPALKERFSFGLGRKKSSRFLSSAS

SEQ ID NO: 2280 - DNA, 327 bp, Myceliophthora thermophilia
atgggctctaaccagtccacgcttgctgagccctctgccgttgccatctcggtggtggccgaatggcaggatgcgctgctcaaggatcccaagaacagacggtgctcgcctcgccagcgcaagattgccgaccagcacgtgttcaacatcaagattccgttcgagggcggacccatcaccaaccagaggcagagcggccgctgctggctctttgcgagtacgaacatcttccggatcgccctgatgcaaaagtacaacccggattcgtttgagttgtcgcaagcccacctcttcttctactgggacaagcttgagaagagcaactga

SEQ ID NO: 2281 - protein, 108 aa, Myceliophthora thermophilia
MGSNQSTLAEPSAVAISVVAEWQDALLKDPKNRRCSPRQRKIADQHVFNIKIPFEGGPITNQRQSGRCWLFASTNIFRIALMQKYNPDSFELSQAHLFFYWDKLEKSN

SEQ ID NO: 2282 - DNA, 564 bp, Myceliophthora thermophilia
atggtctacaacctggtcgccaagcacggcatcgtccggcagggcctctaccccgactccttctcggccggcgccagtagtaccctcaacagcatcctcttcaccaagctccgcgagtacgccctcgtcctccagcacctcttctcctcctcctcctcctcctccgcctcctctctgtcagagaccaaggccaagatgctccgcgagatccacacgatcctcaccctgacgctggggccctcgcagtcggccgaggagcccttcacctgggagttcacggacaagtccgggcgggcgcggacggcgcggcgcggcatgcccgtctttcttcggctgcgacgtcggccaggccagcccagcgactcccgcgccgcgcctcatggacctccgcccgtcgactgggaggccgcattaaacgtgtcgctgctgctgctgccgccggcgcggctgcggacgggcgagtcgctcatgacgcacatcatggtcctcaccggcgtgcacgtggacgaggagacggaaccggtcgtgctgccgcgctgggacccgatggggagcttggcgtag

SEQ ID NO: 2283 - protein, 187 aa, Myceliophthora thermophilia
MVYNLVAKHGIVRQGLYPDSFSAGASSTLNSILFTKLREYALVLQHLFSSSSSSSASSLSETKAKMLREIHTILTLTLGPSQSAEEPFTWEFTDKSGRARTARRGMPVFLRLRRRPGQPSDSRAAPHGPPPVDWEAALNVSLLLLPPARLRTGESLMTHIMVLTGVHVDEETEPVVLPRWDPMGSLA

SEQ ID NO: 2284 - DNA, 3888 bp, Myceliophthora thermophilia
atggttttggcaccgccgccgcttccgacgcgcttcccgtgctgggtgcgcgcggtgtattcatgggggggcgagtccaagagagatctcgggttcatcgagggtgacttgatcgagtgcctgaacgcgggcgacggtgcttggtggacgggaaggctgtttcgcgaccggagagcggtgggcttgtttccgtccaacttcgtcgaggtgttaccggaaaacttccgccctacaacaaggtccgtcagcccgctgccgagcagcaacacgcccagccccaaagggacgccgcaaaagtcgaggaccttccgcaagcccttcgaagcctacgcgaaggccccgcactacacaacagccaaaactccagagacgtggaaggatggcgccaagccgcgcgatgctgtagagccgttgagggaggttgcagcccgctcccgcgagaccccgagaaactcgtttgatcactcaagcgccgctcccggcagcgacgttagagggacccaatccccttcacgggcttccagccgtcatcttgcacgggatccgtctcctgccatagctgcaggccatttcggtcgagagcactctcccgcgggggcccctagtcataatatgggacgggacagctcgcccggggtagccccgcaccacatgttacgggaacactctcccgggagagctcctagtttcattgggcgggattcatctccacaagtcccagctcatgtcaaccgggatccctctccttcccgggtttccagccatgttagccacatgagccgggatctgtccccttcgagggccccgagtttcgactccagggcaccatctccggcgccgtcatacataccctaccggccgccgcaaaatcgccagcatgcctaccatctcagcttggacacggcacagccataccggccggatctacaagggggtgattcccctcctccgcccccgcccccgcctcatcgttcgagattggcgcggcatgggcctcacgcgtcctacgacgagggttactttgggggcctgtcgagggaagcttcagccctgtctacagagccctccgatttgtcgtatccgtaccagcagccgccgcctcagccggaggcatcctacgagcaccatgctccaacctcgggttatcatacacccaggatgccgtcgccatgccccccttcgcctggggggctgacaccatcccctctaagagaagccatggacgatgtgatggagcagctcgatgcgctaggggccggccgggaccccgaaccgccggaacgggagctagacccttggtctccggagtcgtttgatatggtgcaacacctatcgagaagaaagcgagaccagcaacatcgcccacaaacctctatggggatcccacttcatgcagatgaaggatacgaaacgttcggtgggagtgcagagtcctcgcaagagccaatctcccacgacggtacccagcaaccgcttcctcaactgagcaactacgtcgagcgaatggagtccaggttgagaaccatgcaccaacgcagctccggcatgctcgacgaggacgacgaggcgccgccgccgcccccaaagcgaggcaatctattcgagcgccccaaatcctccatggatatccacacggagcaggaacaaaagctgcggcagaagaagtcggcgtacgagatcagccggcaagtcctcaaccgaacttttactaccaagaccaactcgacaaacagctcgtcggcaacccagagcaccgatcggagcttgatgagcggcgtgtcggcggggggaatcagcgccacgagtgccgggagcctggcgagaaagaaccggactagggctctgagcgcactcgccatgcgggacctggacaatgaccgtccggagactccctttaccggtgtgacctaccatagcagccacgcctccggagaacagcggtccaagtcgcagatgggcttccacgatgaccccatggccgccgtgggaggtctcgtttcgccaaagccaaagaagcagaatttcatcaagcgcatcctggagtctgccaagacgggggttgccagcaccagggggagcatcgccactgccagcgccgcccagtccccttcgggtcgatcggcgcccgctcttgccgctctctcggggccccttttcagcaaaacggggcgagaacccggcagagaaccgaatcatggcagcggcgtagattgggttcaggtgcgccgcgacgttaaccgatccaactctctgagccagaaggagctcatcgagagaaaggagaggtgtcaaatgctggactaccctgcgatagacccgatagacgagttgtacaatagcatcgaaggcgacgagggagcggacgggatgccagtggccgagccggtgaactacaacgctctgaacctgagccaggtggacaagaactcgcgcttcctgaccaatcttcctccgactacgacacccatctcgctggccacaacgtacgtctgccgaccttaccgcagcgacgtacagcggctgcgctcgatcttcacctgggtgtccgagaagatctgctgggaggaagactttgacggccccatcgacacgcggcgggtcattcagacgaagcgggcgtgtgcggaggagtatgcgactttggtgatggaaatgtgtgcggcggtcgggctgacgtgcgagatcgtccggggctatctcaagtcgcccggagagatgcccgaagtcaacatgatgccgcggtccaaccactggtggaacgcggtgctggtcgacaacgagtggcggatcatggactgctgcctcgccagcccttcgaacccgcgcagagtcctgtattcgagccacagcagctcgtcggcggatccgtggtggttcttggcgcgtcccgtcgagatctgctggacgcatatccccgagcaccacgagcaacagcatatctgcccgcccgttgcgcacgagatccttctcaatcttccctgcgcctgcccgccgtacttcgagaacgatttggaaatgatcgattacaacacctctctcgtccggattgaagacctcgagatggtgcacatcaagtgcaacgtcccggcggacgttgaactggctgccgaggtcgaggtgcgcagctacgcccgtgacgcagacggcgacctcttcgaatcgggcgacacggtcaagaagcgggcgctcgcgcaggcagaatgggtcaacggcaccaagcgctacaccatcaaggccctgctcccgggcgacgagggctccggcacgctcaaggtgtatgccgggaaacgcggcctcatgcacagcatcaaggacataccgcacccgctcgcgttcgccctgcccatcatccacacgggcgagaacccgccgtacgagttcgtgacgcgccacccgacgccacacgcgcagcgccacgacatctacgtcgtccagccgcagtgccagcgcctcgctctcaacaacacgttcgtcttcgcgatccgccaacacccgagctcgctggggtcatcagccgccggcgcgtccccgatgacgccctcgaccaacccgcgctcgtccagccccatccccttcgtaagaccgagctccgcgttgagcatgacgtccagcgcggccggatcaaaccccagcaccgtctccagcggcggcagcggcgggtcctccaagaagccggccaagttggcgatccagacgcccgggggcaagatcctgaggctgatgcgcaaagaggagaggcgcgggataggcggcgtgctgggcggcaatcgggggccggcctcgcctgggcctttgttgggggaggacgagaccgcaggcggggggcgtttgggagacgatcatcaagtgctccgagcgaggcgtctggaggggcctggtgctcgctga

SEQ ID NO: 2285 - protein, 1295 aa, Myceliophthora thermophilia
MVLAPPPLPTRFPCWVRAVYSWGGESKRDLGFIEGDLIECLNAGDGAWWTGRLFRDRRAVGLFPSNFVEVLPENFRPTTRSVSPLPSSNTPSPKGTPQKSRTFRKPFEAYAKAPHYTTAKTPETWKDGAKPRDAVEPLREVAARSRETPRNSFDHSSAAPGSDVRGTQSPSRASSRHLARDPSPAIAAGHFGREHSPAGAPSHNMGRDSSPGVAPHHMLREHSPGRAPSFIGRDSSPQVPAHVNRDPSPSRVSSHVSHMSRDLSPSRAPSFDSRAPSPAPSYIPYRPPQNRQHAYHLSLDTAQPYRPDLQGGDSPPPPPPPPHRSRLARHGPHASYDEGYFGGLSREASALSTEPSDLSYPYQQPPPQPEASYEHHAPTSGYHTPRMPSPCPPSPGGLTPSPLREAMDDVMEQLDALGAGRDPEPPERELDPWSPESFDMVQHLSRRKRDQQHRPQTSMGIPLHADEGYETFGGSAESSQEPISHDGTQQPLPQLSNYVERMESRLRTMHQRSSGMLDEDDEAPPPPPKRGNLFERPKSSMDIHTEQEQKLRQKKSAYEISRQVLNRTFTTKTNSTNSSSATQSTDRSLMSGVSAGGISATSAGSLARKNRTRALSALAMRDLDNDRPETPFTGVTYHSSHASGEQRSKSQMGFHDDPMAAVGGLVSPKPKKQNFIKRILESAKTGVASTRGSIATASAAQSPSGRSAPALAALSGPLFSKTGREPGREPNHGSGVDWVQVRRDVNRSNSLSQKELIERKERCQMLDYPAIDPIDELYNSIEGDEGADGMPVAEPVNYNALNLSQVDKNSRFLTNLPPTTTPISLATTYVCRPYRSDVQRLRSIFTWVSEKICWEEDFDGPIDTRRVIQTKRACAEEYATLVMEMCAAVGLTCEIVRGYLKSPGEMPEVNMMPRSNHWWNAVLVDNEWRIMDCCLASPSNPRRVLYSSHSSSSADPWWFLARPVEICWTHIPEHHEQQHICPPVAHEILLNLPCACPPYFENDLEMIDYNTSLVRIEDLEMVHIKCNVPADVELAAEVEVRSYARDADGDLFESGDTVKKRALAQAEWVNGTKRYTIKALLPGDEGSGTLKVYAGKRGLMHSIKDIPHPLAFALPIIHTGENPPYEFVTRHPTPHAQRHDIYVVQPQCQRLALNNTFVFAIRQHPSSLGSSAAGASPMTPSTNPRSSSPIPFVRPSSALSMTSSAAGSNPSTVSSGGSGGSSKKPAKLAIQTPGGKILRLMRKEERRGIGGVLGGNRGPASPGPLLGEDETAGGGRLGDDHQVLRARRLEGPGAR

SEQ ID NO: 2286 - DNA, 1272 bp, Myceliophthora thermophilia
atgtcctacggatccaccgcaagagacggacagtggcaggcagaccactacggactctggaagaggcagtataacgacatcgatattgcgtgggttgagataggagaaatcgccagcatcgctatagacggaaccaagtttacatactaccagaaaactgagagacgagacaagactagggaagtaccgaaggagtacgagggacacctagcattcgaaccgaagcatctggaaggattaccagaacacggcccatgggatcacgagatcaagctcaaggaaggagcacgactgaagttctttaagatttactacacgagccaagcgcagaacgaagaacttaagcgatatttggaggagaaccttcgaagaggatatatctgcccgtcgacatcgccagcaggctacctaatcctgtttgtgcctaagaaagacggaaagctacgccactacgagtacctcgtcatgccattcggacttacgaacgcgccggcaacgttccaagccctgattgatcaagctatccgaccctttctcgacaaatttgcggtatattatcttgacgacatacttatcttctctaagatgatggacgaacaccggaagcacgtgagagcagtgctagacacgctatatgcgtacaagctatcagttaacaaggaaaagagcgaattccacgttaggaaaacggtgtttttgggatacgaaatatccctaggacaaatcaggatggaaccttcaaaagtcgaagccatcaagaattggccacgaccgacgtcagtcacggaagtacgaagtttcatcggatttgcgaacttctaccggatgttcatcaggaacttcggagcgatcgcacgacctttgcacgaacttactaggaagggcgctaagttccaatgggaagagcgacataagcaagcattcgcgcagattcgcgacgccatcaccgaggatccagtactggtattgccagaccccaagaagccatttgaggtagaaacggacgcttcagactacgccatcggaggacaattgggacaacgagacgaacaagggaagctacatcctatagccttcttttcaaagaagctcaatagactacatctcaattatccgatccacgacaaggaactacttgcgattgtcgaagctttcaaggaatggcgactatacctcagcagcacgattgaaccagtacaagtatacacggatcacaagaatctgcggtacttcacgatgacgaaggagctcaacggacgacaaatacgatag

SEQ ID NO: 2287 - protein, 423 aa, Myceliophthora thermophilia
MSYGSTARDGQWQADHYGLWKRQYNDIDIAWVEIGEIASIAIDGTKFTYYQKTERRDKTREVPKEYEGHLAFEPKHLEGLPEHGPWDHEIKLKEGARLKFFKIYYTSQAQNEELKRYLEENLRRGYICPSTSPAGYLILFVPKKDGKLRHYEYLVMPFGLTNAPATFQALIDQAIRPFLDKFAVYYLDDILIFSKMMDEHRKHVRAVLDTLYAYKLSVNKEKSEFHVRKTVFLGYEISLGQIRMEPSKVEAIKNWPRPTSVTEVRSFIGFANFYRMFIRNFGAIARPLHELTRKGAKFQWEERHKQAFAQIRDAITEDPVLVLPDPKKPFEVETDASDYAIGGQLGQRDEQGKLHPIAFFSKKLNRLHLNYPIHDKELLAIVEAFKEWRLYLSSTIEPVQVYTDHKNLRYFTMTKELNGRQIR

SEQ ID NO: 2288 - DNA, 2334 bp, Myceliophthora thermophilia
atgaacaccgacacgaggcgcatgctcagcaagttcgattctcgcggccatcctgacttttatcagcactacagtgacggacaactgcggattcggctcaccaacccgagcgtggtcgttaccgctgcgctgctcgtcgttagcatagtataccaggcagtccgccaacagcgccgactcccatcgctccctcagcttctatgggacgcggcagtgactgtgattccggctcgcatcctctttgccgttgatcgcttcataacccccccgcttgttccaacacacatgctcaagacgcagccgccgacccgcgccgccaagagcgaagccttgaggaggattctcgggatcgacaatgggggcgggataatcggctcggtatctcaggctggccgccggagtctgagcagcctttccggcgctgctctgggacccaaaaccgcgagcgaccggccacccggcctggggaactatgacaattcgtgttttcagaacagcattctgcagggccttgcggctctcaagccgctcccggcctacctgtcggcagtctccctcgggcgaaggatagaatcctctccgactagcacggtcgacacgctccgcgaactgatcgccgagctcaccgatccttcgagcaatggcaagacgctctggacgccgagagtcttgaagaatatgaatacttggcagcagcaagacgcgcaggagtattactcgaaactcctggatcagatcgacaatgagattgcgagggcgacacgtgcccttaaacaccaccccgggctcgaaaccggccgcaccagctacgatgcttcggcgagccaacacagcgatgatagcggctatgatagtcttcacggccactcgaagccgggtcccgagccccgtatcacgcgcaatccgctcgaagggctgatggcgcagcgcgtggcctgcgtcaactgcggctattgcgaagggctgaatctgattcccttcaactgcttgacactgaccctcggaaacctgccagagcacgatctctatgagcggttagatcattacaccaaggtcgaatcgatcgagggcgtcgagtgcctgaaatgctcccttctgatgtgccgagatcttatcaaagctctcgccgagcgtgccggggcggttcccgagttccagcggagattggagagcgtggaagaagcgctggaggaagaagcgtttgacgaagagacattgacgaagaagtgcggcctcacgccgaaaatgcgggctagctcgacaaagacaaagcagattgtgctcgcccgtccgccgcagagcctggttttccacattaaccgatctggttttgacgaacaaacgggctacatgttcaagaactcggccgctgtccggttccccatggtgctcgacctgggtccttggtgcttgggtagtaccgatgcgcgggtgcacctggaggagggcacggtggctgcgcgggacgtcgagcagtggacgctggatcccaaggcatctatggttgcgggagaccgggagccatctaggataaccggccccatatacgagctgcgcgctgtcgtcacgcactacggacgtcacgagaatgggcattacgtctgctaccgaaaacatcccgtgttttcgcatgcggtgacgaacaagcaggaaacagccgagacgttcgatgatggggtatggcaggagaaggaggaggtcgacgagggcatgatcttggacgaggcgacaagacagggggatgacgggaatggcgcgagcgaggctgatgagtcggcatcagctcgggacagcccgccgtcgcagtggtggcggttaagcgacgaggacgtatacccggtggatgagcaaaccgtcctctcccagggtggtgtcttcatgctcttttacgattgtgtggatcccaacccagtcctggtttcggacatcgacaagcctaccacggaggaggagcaaaccgcagacgattgcaacataaccgatgcggccgctgcatcccgcgttgccactcagagcccaagccttgtgcaggaagatggaacattgttggaggacccggattcttcggtggtgctcggcgatccccataccccatgcgagacggtgggatcaacaaataccgcatcggaggatccgggactagtcgagactgctggtcaaccgcaacctgccttgccaacttccgatggatccgcggcgacacccacccccggtgttccgactctggacgaggtggggggtcagaatgtcggtccgccgtctgcggacctggttacacagccgacggatgacgtcgcgatcccacagcctctttcccgggttactgaagtctag

SEQ ID NO: 2289 - protein, 777 aa, Myceliophthora thermophilia
MNTDTRRMLSKFDSRGHPDFYQHYSDGQLRIRLTNPSVVVTAALLVVSIVYQAVRQQRRLPSLPQLLWDAAVTVIPARILFAVDRFITPPLVPTHMLKTQPPTRAAKSEALRRILGIDNGGGIIGSVSQAGRRSLSSLSGAALGPKTASDRPPGLGNYDNSCFQNSILQGLAALKPLPAYLSAVSLGRRIESSPTSTVDTLRELIAELTDPSSNGKTLWTPRVLKNMNTWQQQDAQEYYSKLLDQIDNEIARATRALKHHPGLETGRTSYDASASQHSDDSGYDSLHGHSKPGPEPRITRNPLEGLMAQRVACVNCGYCEGLNLIPFNCLTLTLGNLPEHDLYERLDHYTKVESIEGVECLKCSLLMCRDLIKALAERAGAVPEFQRRLESVEEALEEEAFDEETLTKKCGLTPKMRASSTKTKQIVLARPPQSLVFHINRSGFDEQTGYMFKNSAAVRFPMVLDLGPWCLGSTDARVHLEEGTVAARDVEQWTLDPKASMVAGDREPSRITGPIYELRAVVTHYGRHENGHYVCYRKHPVFSHAVTNKQETAETFDDGVWQEKEEVDEGMILDEATRQGDDGNGASEADESASARDSPPSQWWRLSDEDVYPVDEQTVLSQGGVFMLFYDCVDPNPVLVSDIDKPTTEEEQTADDCNITDAAAASRVATQSPSLVQEDGTLLEDPDSSVVLGDPHTPCETVGSTNTASEDPGLVETAGQPQPALPTSDGSAATPTPGVPTLDEVGGQNVGPPSADLVTQPTDDVAIPQPLSRVTEV

SEQ ID NO: 2290 - DNA, 2853 bp, Myceliophthora thermophilia
atgggtcccgcgcccgccggcggtcctctacctcgccgcggcggccggccccagcactaccccccagcccacgcctaccaccacggccatcacagtcaccacaaccatccacaaccacatgtcagccagccaatgtatcccgccggctacatggccgccccctacgccggcgcccactactacatgcctccgccctaccagaacggcgccatgcccggcccggccggctacatgccctatcccaacccaggatatgtccggtcgcctcccgcgatgcagcacttcgtaccgatgcagcagtcgtatggccgccccccgcaacactcccccattgtctcttcaccctaccaccccccacctcccgccgccgcgcccgtcgtcccgcccatgccacacactccgtcctccacccactctcacgtcctcccgcctcctatgactcctccagtccagcagtttcacgagactgctgttcaaccccagatgcccgttccagtgcaactccctcctcagccccagccggagcagcctcctcagtccgagccccagcctgggtcgcgcccggtgtcgcagcaagaggcgtatcccccccctccccctcctcagcaggcgtccgaacctgccaccaagccatccccgactccctctgtccagccgcccagacagcctttcaggccaccgctcccctggctctctcagcctgatcttcccttcccccaacgcacatcgaagctgaggaggagaaagaagcaccttggcgctgatgccgagagagtcgagttgcccggacagcacgcacccactactgacgctcccgtcgaagacccggtggctcggcaaccttcggaggatgcgcagcaagccggtggttctaccccgaaagcggagtccaagaccgaggcccccgccacccggtctgagacaccttccacccaagatcagccctccgagcccgctgtttcgagcgcaccaaccacaccgagttctgcgcagccgcccaaggtgtctgccgctaccccaagcactccggccggcgtgaagcctgcggtacccgcagttcccgttgtccctgcgttgcccaaggcgagcccgaaagaggccaagtcatcggctgccgttgagaaggcggcccctgccagggcccaagccgccgtcgcccctgccgaacagccggccgaggccgccaagctggctggggagaaggtggatgggagcgccgaggttgcccagccggcacctgcctggtccaagccgaagctttggacgggtcttttttccaagcctggcagctctgtcgcaagcacaagctctgcagccgctgccgcccaggcgcagaccaacggcaacacggcagagggttcgaccgtggtgcccggacccggcggcttcgccaaggccaacgcgaactcgctcgcgcaggccctgcaagcctaccgccccggcatccccgaccggcttgccttcctagagccgaggggtctcgtgaataccggtaatatgtgttatatgaattcggttttgcaagttctcatcttttgcattcctttcttggacttcctcgaccaagtcagcaagaaggccgcccacagtttcaagagcgagacgcctctgttggatgcgatgatcatgttcatgcgcgagtttaaggtgatagactcggccacgtcggcggagcagctcaggaagcgcctcaagagcgaggagtacgagaagttcggcgagcctttcacccccgagttcgtttatgacgccatccggacgcttcctcgctttgcgagcatgaggcgcggtcatcaacaagatgcccaagaattcctcgggttcctcctcgagggtctccatgacgagtgcgtccaggtgatgcgtacggtgcccgcttcgactgcatctaccgctcctaactcgtcacttccgtctccgacctcgtcgagggcaaacgatgcctcagagggtggtgatgactggctcgaggttggtccccgtcagcggtccgccgtcacgcggtcctcaggtcactcgaatacgttgtcacccatcaccaagatcttcggcgggcagctgcgctcggaactgcgcgtcccgggcaacaagaattctgtcacgctcgagccataccagcctctgcagctcgacattggctctcctgaggtgcggaacattatcgacgccctcaagggcctcacgcgacccgaagtgctccatggcgacttcaactcaccccacggcaaggacgtccgggcgaccaagcaggtcttcatcgagtctgtgccgccggtcttgatcttgcacctgaagcgcttccaattcgacgccgagggctacggcggcaccgttaagatctggaagaaggtcggttatccgctcgagttcgagttcccccgggaagtgctgtcgcgccagacccgcaacagcatccttgcggagaactcgggcactcctcggtaccgtctgattgcggtcgtctaccaccacggcaagaacgccagcggcggtcactacactgtcgacgtccgccgccaggacggccgggaatggatccggattgatgacacagtcattcggcgggtgcgggatgaggatgtcgccgagagcggcgccgaggaggacgccggcaagatcgacggccgaagagacgcgggcgccgctgcctcgggcaaccgcttccttggaatcgacgacgaggacactggggatgacgacggctggaagcaggcggctggcggcaagaaatggagcagcgtcgtcaacggcgcgtcgacggcttcctccaacggccagaaagccaagcagcagcacaaggagagcatgaaggagaacaaggtcgcttacctgctgttctaccagcgcatctga

SEQ ID NO: 2291 - protein, 950 aa, Myceliophthora thermophilia
MGPAPAGGPLPRRGGRPQHYPPAHAYHHGHHSHHNHPQPHVSQPMYPAGYMAAPYAGAHYYMPPPYQNGAMPGPAGYMPYPNPGYVRSPPAMQHFVPMQQSYGRPPQHSPIVSSPYHPPPPAAAPVVPPMPHTPSSTHSHVLPPPMTPPVQQFHETAVQPQMPVPVQLPPQPQPEQPPQSEPQPGSRPVSQQEAYPPPPPPQQASEPATKPSPTPSVQPPRQPFRPPLPWLSQPDLPFPQRTSKLRRRKKHLGADAERVELPGQHAPTTDAPVEDPVARQPSEDAQQAGGSTPKAESKTEAPATRSETPSTQDQPSEPAVSSAPTTPSSAQPPKVSAATPSTPAGVKPAVPAVPVVPALPKASPKEAKSSAAVEKAAPARAQAAVAPAEQPAEAAKLAGEKVDGSAEVAQPAPAWSKPKLWTGLFSKPGSSVASTSSAAAAAQAQTNGNTAEGSTVVPGPGGFAKANANSLAQALQAYRPGIPDRLAFLEPRGLVNTGNMCYMNSVLQVLIFCIPFLDFLDQVSKKAAHSFKSETPLLDAMIMFMREFKVIDSATSAEQLRKRLKSEEYEKFGEPFTPEFVYDAIRTLPRFASMRRGHQQDAQEFLGFLLEGLHDECVQVMRTVPASTASTAPNSSLPSPTSSRANDASEGGDDWLEVGPRQRSAVTRSSGHSNTLSPITKIFGGQLRSELRVPGNKNSVTLEPYQPLQLDIGSPEVRNIIDALKGLTRPEVLHGDFNSPHGKDVRATKQVFIESVPPVLILHLKRFQFDAEGYGGTVKIWKKVGYPLEFEFPREVLSRQTRNSILAENSGTPRYRLIAVVYHHGKNASGGHYTVDVRRQDGREWIRIDDTVIRRVRDEDVAESGAEEDAGKIDGRRDAGAAASGNRFLGIDDEDTGDDDGWKQAAGGKKWSSVVNGASTASSNGQKAKQQHKESMKENKVAYLLFYQRI

SEQ ID NO: 2292 - DNA, 2778 bp, Myceliophthora thermophilia
atgaattcaaaaatggagttcaccgacagggccaaaaaggcgttggaagacgccatggcgctggccgagcaatacgcacattcacagctgctgccggttcatctggcagtagcccttcttgatcctctgccagacccgagtagggaccagcagaatgccgccccaggcaccacgagcaccctcttccgccaggttatcgagcgcgcccacggcgacccacagcagttcgaccgtgccctcaagaagacactcgttcggctgccgagtcaagatccgcctccggaccaagtctcgatggcgcccagcttcaatacggtcctccggaaggcaatggagctgcaaaaagtacagaaggacacatacattgccgtcgaccacctcatcaccgccctagccgaggatcacacgatccagacggccctcaaggaggccaacatcccgaagccgaagctcatccaggacgccatctctgccatccggggcaccaagcgcgtagactcgcggaatgccgacgcggaagaggagaacgagaacctcgcaaagttcaccgttgacatgaccgccatggccagggaaggcaagttggacccggtcatcggccgtgaagaggagatccggcgcgtcatccgcattctctcgcgccgtaccaagaacaacccggttctcatcggcgagccaggcgtgggcaagacgaccgtcgtcgagggtctcgcccagcgcatcgtcaatgcggacgttcccgacaacctggccgcttgcaagctgctttccctcgacgtgggagccctggtggccggcagcaagtacaggggcgagttcgaggagcgcatgaagagcgtcctcaaggagattgaagaatccaaggacatgatcgtcctcttcgtcgacgagatccacctccttatgggtgccggctcgtcgggcgagggcggcatggacgccgccaacctgctcaagcccatgctcgcgaggggccagctccactgcatcggcgcgaccacgttggccgagtaccgcaagtacatcgagaaggacgccgcctttgagcggcgcttccagcaagtcatcgtcaaggagccgtcgatcccggagaccatctccatcctccgcggcctcaaggagaagtacgaggtccaccacggtgtcaacatcgccgacggagccatcgttgccgcagcaaacctcgcggcccgctacctgacgtcccggagactccctgattcggccgttgacctgatcgacgaggcggcagccgccgtccgggtcgcccgcgaatcgcagcccgagatcatcgactccctcgagcgtcggctgcggcagctgaagatcgagatccacgccctgtcccgcgagaaggacgaggcttccaaggcccgccttgcccaggcgaagcaggacgcccagaacgtcgaggaggagttacggcccctgcgcgagaagtacgagcgggagcggcagcgcggcaaagacatccaggaagccaggctgaagctggagaacctccgcgtgaaggcggaggatgccagcaggatgggcgaccacagccgcgccgccgaccttcagtactacgccattcccgagcaagagcagatcatcaagcggctggagaaggaaaaggccgccgccgacgctgctctcaacgagagcgggcccgacacgggcggtgctatggtcaccgacgtcgtcgggcccgatcagatcaacgagatcgtggctcgctggacgggcatcccggtgacgcggctgaagacgtccgagaaggagaggctgctccatatggagcaggccctgagcaagatcgtggtcggccagaaggaggcggtccagtcggtttccaacgccatccggctacagcggtccgggctcgcgaacccgaaccagcctccgagcttcctcttctgcggcccgtccggtaccggcaagacgctgcttaccaaggcgcttgccgagttcctgttcgacgaccccaaggccatgattcggttcgacatgtccgagtaccaggagcggcactcgctcagccgcatgatcggtgccccgcccggctacgtcggccacgacgccggcggccagctgaccgaggccctccgccgcaagcccttctcgatcctgctgtttgacgaagtcgagaaggcggcgaaggaggtcctgaccgtcctgctccagctcatggacgacggccgcatcacggacggccagggccgcatcgtggacgccaagaactgcatcgtcgtcatgacgtccaacctcggcgccgagtacctgtcccggcccaacggcaaggacggcaaggtcgacccgacaaccaaggagctggtcatgaacgcgctgcgtaactacttcctcccggagttcctcaaccgcatctcgtcgatcgtcatcttcaaccgcctcacgcgccgcgagatccgcaagattgtcgacctgcgcatcgccgagatccagaagcgcctgcaggacaacgaccgcaacgtcaccatccgcgtctcggacgcggccaaggacaagctcggcgccgccgggtactctcccgtctacggcgcccgcccgctgcagcgcctgctcgagaaggaggtgctcaaccgcatggcgatcctcatcctgcggggcagcatccgcgatggcgaggtggctaacgtcgacctggttgacgggaaggtgactgtcattccgaaccaccccgacagcgagggtgaggacgaggatatgatggttgacgaggacgaggcgctggacgaggttgcgccggattccatggacgaggacatttatgactaa

SEQ ID NO: 2293 - protein, 925 aa, Myceliophthora thermophilia
MNSKMEFTDRAKKALEDAMALAEQYAHSQLLPVHLAVALLDPLPDPSRDQQNAAPGTTSTLFRQVIERAHGDPQQFDRALKKTLVRLPSQDPPPDQVSMAPSFNTVLRKAMELQKVQKDTYIAVDHLITALAEDHTIQTALKEANIPKPKLIQDAISAIRGTKRVDSRNADAEEENENLAKFTVDMTAMAREGKLDPVIGREEEIRRVIRILSRRTKNNPVLIGEPGVGKTTVVEGLAQRIVNADVPDNLAACKLLSLDVGALVAGSKYRGEFEERMKSVLKEIEESKDMIVLFVDEIHLLMGAGSSGEGGMDAANLLKPMLARGQLHCIGATTLAEYRKYIEKDAAFERRFQQVIVKEPSIPETISILRGLKEKYEVHHGVNIADGAIVAAANLAARYLTSRRLPDSAVDLIDEAAAAVRVARESQPEIIDSLERRLRQLKIEIHALSREKDEASKARLAQAKQDAQNVEEELRPLREKYERERQRGKDIQEARLKLENLRVKAEDASRMGDHSRAADLQYYAIPEQEQIIKRLEKEKAAADAALNESGPDTGGAMVTDVVGPDQINEIVARWTGIPVTRLKTSEKERLLHMEQALSKIVVGQKEAVQSVSNAIRLQRSGLANPNQPPSFLFCGPSGTGKTLLTKALAEFLFDDPKAMIRFDMSEYQERHSLSRMIGAPPGYVGHDAGGQLTEALRRKPFSILLFDEVEKAAKEVLTVLLQLMDDGRITDGQGRIVDAKNCIVVMTSNLGAEYLSRPNGKDGKVDPTTKELVMNALRNYFLPEFLNRISSIVIFNRLTRREIRKIVDLRIAEIQKRLQDNDRNVTIRVSDAAKDKLGAAGYSPVYGARPLQRLLEKEVLNRMAILILRGSIRDGEVANVDLVDGKVTVIPNHPDSEGEDEDMMVDEDEALDEVAPDSMDEDIYD

SEQ ID NO: 2294 - DNA, 216 bp, Myceliophthora thermophilia
atgttcattaggaactttagagcgatcgcacgacctttgcacaagcttaccaagaagaatgctaaattccaatgggaagagcaacacgagcaagcattcacgcaaatccacgacgccattactgaagatctagtactagtattgctagaccccaagaagccattcgaggtagaaacggacgcttcagactacgccatcggaggacaattgggataa

SEQ ID NO: 2295 - protein, 71 aa, Myceliophthora thermophilia
MFIRNFRAIARPLHKLTKKNAKFQWEEQHEQAFTQIHDAITEDLVLVLLDPKKPFEVETDASDYAIGGQLG

SEQ ID NO: 2296 - DNA, 231 bp, Myceliophthora thermophilia
atgcagcagatccaggagttagaccagagagacaaggctgctcaagctcaaatcaaggaactcgagaatcgcgaaaagtactcgcagaagttagtcaacgaggcctacgccaaaatcggagcgctcgagaccgccaaggcaagccgtatcaagatcgaactacctagtaaatatagaggaaccaaggaggatcttataggattcctgacaaacctccgatcctacttctag

SEQ ID NO: 2297 - protein, 76 aa, Myceliophthora thermophilia
MQQIQELDQRDKAAQAQIKELENREKYSQKLVNEAYAKIGALETAKASRIKIELPSKYRGTKEDLIGFLTNLRSYF

SEQ ID NO: 2298 - DNA, 2352 bp, Myceliophthora thermophilia
atggtttgctcgcacatcggaccggccaacctggccaagccgacagccgccgattcggtgtaccgcgaggactgcacccagtgcttcgattccatcgatgatcccgctgggcttgatgtatgcctcaagtgcttcaacggcggctgcgcaggtgaccgccaccatgcaaagctacacagcagcgcccggaaacatcccctagtcctcaacatccgccgcacgcggaagatggttgtcagggacgagcccccgccgaagatgtccaagcttgccattgccgccgagactgaagccgaccgctacgacacggcgctgaaggtcaagtgcctcgagtgcgggatcgacgacatcgacaagagcgaccccacgatcgctgcgacggtggacgccatcatgaaggccaatacattttcgcggaaagaggaggtcaaggcgtgggagcaggagctgaccacctgtgaacacattcttacgctgcagcaagaacctccccggcaaatcgagtcacaggacctaggccactgctccaactgcgacttgaaccagaatctctggctttgcctcgagtgtggtaaccttggttgcgggcgggcgcagtttggcggagtgggcggaaactcgcatgccctcgctcactctaaggagtcctcacacggagtggccgtcaagctgggttcgatcacgcccgaggggaccgccgacgtgtactgttatgcttgcgatgaagagcggatagatgataacctgggtgcccatctcgccaactggggcatcatcctggccgagcggcagaagacggaaaagagcttgaccgagatgcagatcgagcagaacctacggtgggagttctccatgacaacagacgacggcaaagagttgaccccgctcttcggacccggcctgacaggtctcaagaaccttggtaacagctgctacctcgccagtatccttcagtgcctctttgacatgccgtccttccggcaacggtacggtggtggcgttgagtcccccccggacgtgctagatcctgcccaggacctggagactcagctgcgcaagattggggacggcctgctctctggtcggtactccaagccggatccggatgtgattgcttcggagcactctcccgaggtcccgcatcagaagggtcttcagccatccatgctaaaacacctcatcggccgcgggcacgccgagttctcaaccatgcggcagcaagacgcctttgagcttctccagcacctcgtcaaactcatcaccaggtcccagcacccggccggcctcggcgaccccacgcgggccatgcgcttcgtgatggagcagcggctgcagtgcctggggtgcaagaaggtgcggtacagcagcacggagcaggacagcatcttcatcgacgtcccgctcgagaagctcccggcggaggagggccaagagcccaagtacaagccggtcaacttcaaggagtgtctcgataccctgacggctcccgagatggtcgagttgacatgctcggcgtgcgggagcagggacggtttcagcaagcggcagctcttcaagacctttccagaggtgctggttgtcaatgcgcgcaagatggccgtggtgaactgggtccccgtcaaggtggacgtgccggttctggttggagaagaaccctttcctctggatccgtatctctccaagggacagcagcccgacgaggaattgttgccggaggagccggccacgagcaacgtgccggcgtttgtgccgaaccaggaagcgctcgccatgctggaaggcatgggattcccaagggtccggtgcgaaaaggcgctccacgcaacaggaaacgcggatgcgaatgtggcgatggagtggctgtttggccacatggatgatccggacatcgacacccccctcgacctcgggggtagtgttggcaacgccggatacacgcccgacccggagaagctcgctatgctcgagtcgatggggctgggcgggccgcgcgcgaccaaggcgctcaaggaaaccaacggggacgttgagcgggcgatcgagtggctgttcagccaccccgacgactcgggcgagatcgagattgaggaggcggccggtgacggtggggagggtgcgaagaagggcgcggtcgaggcaggtagcagcacgctgccggtcaacttccaactgcagtccattgtgtgccacaagggaacgagcattcacaccggacactacgtggcattcatccgcaagaagctcggtgacgagacatcgtgggtgctcttcaatgacgagaaggtggtcaaggtggtggatgtggaggaaatgaagaaatttgcctatgtctacttcttccggcgagtttga

SEQ ID NO: 2299 - protein, 783 aa, Myceliophthora thermophilia
MVCSHIGPANLAKPTAADSVYREDCTQCFDSIDDPAGLDVCLKCFNGGCAGDRHHAKLHSSARKHPLVLNIRRTRKMVVRDEPPPKMSKLAIAAETEADRYDTALKVKCLECGIDDIDKSDPTIAATVDAIMKANTFSRKEEVKAWEQELTTCEHILTLQQEPPRQIESQDLGHCSNCDLNQNLWLCLECGNLGCGRAQFGGVGGNSHALAHSKESSHGVAVKLGSITPEGTADVYCYACDEERIDDNLGAHLANWGIILAERQKTEKSLTEMQIEQNLRWEFSMTTDDGKELTPLFGPGLTGLKNLGNSCYLASILQCLFDMPSFRQRYGGGVESPPDVLDPAQDLETQLRKIGDGLLSGRYSKPDPDVIASEHSPEVPHQKGLQPSMLKHLIGRGHAEFSTMRQQDAFELLQHLVKLITRSQHPAGLGDPTRAMRFVMEQRLQCLGCKKVRYSSTEQDSIFIDVPLEKLPAEEGQEPKYKPVNFKECLDTLTAPEMVELTCSACGSRDGFSKRQLFKTFPEVLVVNARKMAVVNWVPVKVDVPVLVGEEPFPLDPYLSKGQQPDEELLPEEPATSNVPAFVPNQEALAMLEGMGFPRVRCEKALHATGNADANVAMEWLFGHMDDPDIDTPLDLGGSVGNAGYTPDPEKLAMLESMGLGGPRATKALKETNGDVERAIEWLFSHPDDSGEIEIEEAAGDGGEGAKKGAVEAGSSTLPVNFQLQSIVCHKGTSIHTGHYVAFIRKKLGDETSWVLFNDEKVVKVVDVEEMKKFAYVYFFRRV

SEQ ID NO: 2300 - DNA, 201 bp, Myceliophthora thermophilia
atgaaacgcgataacaacgaaccatatgcggggaggatgacgtcgcgtgccgggaccagcaaagggcgcgtctccatcatgcagacccacttcgaaactttacggattacggatacagtttgggggaatgggggcctcaatcaatgcggggggacccagctcatcaaacccgagactaccaactttctgcaaatcgggtag

SEQ ID NO: 2301 - protein, 66 aa, Myceliophthora thermophilia
MKRDNNEPYAGRMTSRAGTSKGRVSIMQTHFETLRITDTVWGNGGLNQCGGTQLIKPETTNFLQIG

SEQ ID NO: 2302 - DNA, 1386 bp, Myceliophthora thermophilia
atgacctctcagcggcaaggcaacaacagcagctggcagttcgccgtctccagcacgtcccccaagctagtgaatgccatggaggctgctatagcggccggcgcagaagtcagccgtgtaagtcgtcgcattctgcagaagatttgggacccggagcctatcaacgaccggaactcgaacgaaccggcctggtgtttaggccgcgcatacatactcggtccgaaggcgtcgggagcacctcagcctgtcgttgcaagtacacctcccgcagaccccgcaacagataaaataggtacaaaagcggcgtcggtgccctcagttgtgcggcggggagcaactacccaacaatcacccgacacgccaccggattcgctcgccagcagcctcgattcgtcactcgcatacgaagagtctagcggagacagcggttggccacccgccttcttggatgacttcgaatctcgaatatggatgacttaccggactggattcgagctgatccccaggtctactgacccgagagcaacctcgtctttctcaatcgcgatgcgccttaaaacgacattgggggatcagacagggtttacatcagatacaggctggggttactggaggcgaatgacagatcctgatgctgagcggcccatattggcgttatttgctgacgactcccgcgccccatactcattgcataatttcgtcaaacatggagaactggcatgtggtaaatatcccggagagtggttcggaccgtcggcaacagcccgctgcatccaagctttagcaaacaaacacgagtcctccttgcgggtttactccacgggtgatcttcctgatgtctatgaggacagcttcatggccacggccaagcccgacggcgagactttccacccaactctgatcttggtatgcacaaggttgggtattgacaagatcaaccaagtatatgtggaggctttgatttctactctgcagatggagcagtctattggaattgcaggaggtcgtcctgcatcatcgcactactttgtcggagttcagggacaatggctcttttatcttgaccctcatcaccctagaccgaaactaccataccgcgagaatcctgatgactatacgtcggaggaactggattcctgccacactaggcggctacgccgtctccatgttgaggatatggaccccagcatgttgatcggattcctaatcaaagacgaggatgactgggacatgtggaagagtgcagtgaagcacgtgcaagggaagtccatcatcaccgtctcgccttacgatcctacacgggatatgggctcggctcgagcggaggccatcgaagaagtacagacactgagcgacgacgacgacgacacggtgcttgaagcatag

SEQ ID NO: 2303 - protein, 461 aa, Myceliophthora thermophilia
MTSQRQGNNSSWQFAVSSTSPKLVNAMEAAIAAGAEVSRVSRRILQKIWDPEPINDRNSNEPAWCLGRAYILGPKASGAPQPVVASTPPADPATDKIGTKAASVPSVVRRGATTQQSPDTPPDSLASSLDSSLAYEESSGDSGWPPAFLDDFESRIWMTYRTGFELIPRSTDPRATSSFSIAMRLKTTLGDQTGFTSDTGWGYWRRMTDPDAERPILALFADDSRAPYSLHNFVKHGELACGKYPGEWFGPSATARCIQALANKHESSLRVYSTGDLPDVYEDSFMATAKPDGETFHPTLILVCTRLGIDKINQVYVEALISTLQMEQSIGIAGGRPASSHYFVGVQGQWLFYLDPHHPRPKLPYRENPDDYTSEELDSCHTRRLRRLHVEDMDPSMLIGFLIKDEDDWDMWKSAVKHVQGKSIITVSPYDPTRDMGSARAEAIEEVQTLSDDDDDTVLEA

SEQ ID NO: 2304 - DNA, 972 bp, Myceliophthora thermophilia
atgtcagcgaggccagctacaccggcttcgccgaagaactacaaagtcaagtcgcctcaaccagggcagcccatgtacgggtgtggtaagctgtgtcctcctcggggtcgcatcttccccttccccccaccactaacagctacagaacacctccagagactcttcaaccaggaccaagcgaccacgaacacctccattcaacactacaaggcgatcctgcggagcatcttcgatacaaaccccctggtcccgcagacctccaaggccgccgacggcattgtcattacttcgctcactcccacatacctttgcctccaatgcccctcgaccctcaccgaggacgataggaccaagcatggcagcaagaagtcgcacagattctatgttgactcaaagagcggtgctctgtactgccaaatgtgtgatgacatcgtttgggatcctacctttgaggagctgaggttgaagaagatcggaacagggaccttttcgagccccgcctcgaagcaccgaatgctgacgtactacacgcagcgattcgagtataagcaaggccgcaatgaacgtgccgccaagattgacacgcccgttcagtttccgctcgagctcaacatgcttccctacaccaaccgcggccgcaccatcagcagcaacggccacgacggtggcaaggagaactacgagctggcgcgctcctgtacctacgatctgctcagcgtggtcgtgcacgtgggcgagatcgacacgggccactacgtgtcgtactgccgggttggcgaccaggtgagtatcagccctcccactgccggctctggcagccccacccccttgggagatcttgtcaaggaaagacgccaacagacgggacagtggtttgccttcaacgaccaccgggtagaacttgcgcagaagtcggacgtgctcaattccaaagcctacttacttttttatatcgtcaggtcgttgtcctga

SEQ ID NO: 2305 - protein, 323 aa, Myceliophthora thermophilia
MSARPATPASPKNYKVKSPQPGQPMYGCGKLCPPRGRIFPFPPPLTATEHLQRLFNQDQATTNTSIQHYKAILRSIFDTNPLVPQTSKAADGIVITSLTPTYLCLQCPSTLTEDDRTKHGSKKSHRFYVDSKSGALYCQMCDDIVWDPTFEELRLKKIGTGTFSSPASKHRMLTYYTQRFEYKQGRNERAAKIDTPVQFPLELNMLPYTNRGRTISSNGHDGGKENYELARSCTYDLLSVVVHVGEIDTGHYVSYCRVGDQVSISPPTAGSGSPTPLGDLVKERRQQTGQWFAFNDHRVELAQKSDVLNSKAYLLFYIVRSLS

SEQ ID NO: 2306 - DNA, 555 bp, Myceliophthora thermophilia
atgccaacggaaacgaccaaagtcacaccgttcttcgcgaactacagatatgaagcagaccttaggcaaggaccagaggtcacagtgccaagagcagcagtgaaagcaaaacagatgcacgcactatacgagaagctcaagaaggaactcgagtttgtcaaaaccagaataaagaactactacgacaaacacaggctcaagggacctcgcctagagaggggagacaaagtctacctaattgtacgaaacctgcgaaccaaacaaccaagcacgaagctggactttaagaaggtcggacccttcgttatcaaagaacgaatttcgacatctaactaccgactatcgttaccgtcatctatacgactacggacggatgtttttcatatttcacttctcgaaccagcaccaaagaacgccaaggttgctacgcacatcgaagcagaggacgaagaggaagaatgggatgtcgaagaaattctagattcacgcattatcaacggggaactgcagtacctggtcaaatggcttgattttggactagaagacaactcatag

SEQ ID NO: 2307 - protein, 184 aa, Myceliophthora thermophilia
MPTETTKVTPFFANYRYEADLRQGPEVTVPRAAVKAKQMHALYEKLKKELEFVKTRIKNYYDKHRLKGPRLERGDKVYLIVRNLRTKQPSTKLDFKKVGPFVIKERISTSNYRLSLPSSIRLRTDVFHISLLEPAPKNAKVATHIEAEDEEEEWDVEEILDSRIINGELQYLVKWLDFGLEDNS

SEQ ID NO: 2308 - DNA, 1665 bp, Myceliophthora thermophilia
atggcaactgtcaatgtggtgattaagcaccaaggaaagaagtacgacgtcgaggtcgacacttcttcgaccggcgaagtcctcaaataccaactctacagcctgaccggtgtcgagcccgatcgccagaagattctcgtgaagggtggccagctcaaggatgacgccgacatgagcaagctggggctgaaacccggccaggttatcatgatgatgggtacgcctggagaggggggtccccaggttgttcggccgaccgagaagatcaagttcctcgaggatatgactgaagccgaagccgcacagcaagcgggcgccactccggccggcttggtaaacctgggcaacacttgttatctcaatgccacgcttcaggcgctgcgctcgatccccgaactccaggaagcccttgcgaagcaccagcatacatccatgtcggaggtccctcagctggatcttacgtaccagctgaaggaactcttcaaggaaatgtcggagacgcagggcggcatgacgccattcaccttcctgaacgcccttcggatggccttccctcagtttgccgagcgatcgaagaagggcccggggtttgcgcagcaggatgccgaagaagcgtggtcgcagattgtgtcgcagttgaggcaaaagctaaagtggccgagtcccaccgagggcgaaattgctggcgcgacttccttcgttgacaagtacatgtcgggcgagttctcgagcacgctcgagtgtgacgacccggcggctcgcgaaggtggcgagcaaccgacctcggccaaggagacgtttctcaagctcaactgccacatcgacggccagactgcccatctgagggacggtttactcggcggcttgacggagaagatcgagaagaggtccgaggtcctgggcagggacgtgatgtacactaagaggtccaagatctcacggttgcccaagtacctcacagtccacttcgtgcgcttcttctggaaacgcgacgtccagaagaaggccaagatcatgcgcaaggtcacgtttccgcacgagctggacgcggtcgagttttgcacggatgagttgaagaaggctctcattccggtcagggacaaggtgcgcgaggtgcgcaaggaggaggaggatgtcgagcgggctcggaaacgccggaagaggaacccgacgcttgacaacgggcagggcgaggaaaagaaggaaagcgctaagaaggacggcaagaagtctgccccctctgcggacggcgatgtcgagatgacggagacgttcaagacggatgccgagtgggaagcggagaaggacgcggcgctcctggaggccaagaaggagctgaacgccttgatcgacccggagctccggaaagacgaaggtgccaacaagtcgggcatctacgaactccgcgcggtggtgactcaccaaggtgccagcgccgacagcggccattacacggcctacgtgaagaagacgggccccaaggacccggtgaccgggaaggtcggcaaggaggacggcaactggtggtggttcaacgacgacagggtcaccgaagtgactccggacaagatcgatgcgttggctggtggcggtgagtcacactcggcgctcatccttctgtacaaggctattcctctgcctacggcggaaggcattctggagtaa

SEQ ID NO: 2309 - protein, 554 aa, Myceliophthora thermophilia
MATVNVVIKHQGKKYDVEVDTSSTGEVLKYQLYSLTGVEPDRQKILVKGGQLKDDADMSKLGLKPGQVIMMMGTPGEGGPQVVRPTEKIKFLEDMTEAEAAQQAGATPAGLVNLGNTCYLNATLQALRSIPELQEALAKHQHTSMSEVPQLDLTYQLKELFKEMSETQGGMTPFTFLNALRMAFPQFAERSKKGPGFAQQDAEEAWSQIVSQLRQKLKWPSPTEGEIAGATSFVDKYMSGEFSSTLECDDPAAREGGEQPTSAKETFLKLNCHIDGQTAHLRDGLLGGLTEKIEKRSEVLGRDVMYTKRSKISRLPKYLTVHFVRFFWKRDVQKKAKIMRKVTFPHELDAVEFCTDELKKALIPVRDKVREVRKEEEDVERARKRRKRNPTLDNGQGEEKKESAKKDGKKSAPSADGDVEMTETFKTDAEWEAEKDAALLEAKKELNALIDPELRKDEGANKSGIYELRAVVTHQGASADSGHYTAYVKKTGPKDPVTGKVGKEDGNWWWFNDDRVTEVTPDKIDALAGGGESHSALILLYKAIPLPTAEGILE

SEQ ID NO: 2310 - DNA, 375 bp, Myceliophthora thermophilia
atgctattactaacagcacaactcgcctacaatacgacgccgatagaaacgaccaaagtcacaccgttcttcgcaaactacggatataaagcagaccttaggcaaggaccagaggtcacagtgccaagagcagcagtcaaagtagaacagatatacgcactatacgagaagcttaagaaggaactcgagtttgtcaagactagaatgaagaactactacgacaaatacaggctcgagggaccttgcctagagaggggagataaagtctacctaatcatacaaaacttacgaactaaacgaccaagcacaaagctagacttcaagaaggtcggacccttcgttatcaaagaacgaatttcgacatccaactactga

SEQ ID NO: 2311 - protein, 124 aa, Myceliophthora thermophilia
MLLLTAQLAYNTTPIETTKVTPFFANYGYKADLRQGPEVTVPRAAVKVEQIYALYEKLKKELEFVKTRMKNYYDKYRLEGPCLERGDKVYLIIQNLRTKRPSTKLDFKKVGPFVIKERISTSNY

SEQ ID NO: 2312 - DNA, 489 bp, Myceliophthora thermophilia
atggacggaaccaagttcgtatactaccagaaaactgagagacgagacaagactagggaagtaccgaaggagtacaagggacacctagcattcgaaccgaagtatctagaaggattaccagaacacggcccatgggatcacgagatcaagctcaaggaaggagcacgactgaagttcttcaagatttaccacacgagccaagcacagaacgaagaacttaagcgatatttggaggagaaccttcgaagaggacatatccgcccgtcgacatcgccagcaggctacctaatcctgtttgtgcccaagaaagacagaaagctacggttatacgtcgactatcggcaactcaacgaacagaccgtgaaaaatcgatacccgttaccgctaatctcacggctccaagatcagttggcaggagcccaatatttcacgcgtcttgacttgccatcggcctacaaccatatacagatcaaagaaggcgacgagtag

SEQ ID NO: 2313 - protein, 162 aa, Myceliophthora thermophilia
MDGTKFVYYQKTERRDKTREVPKEYKGHLAFEPKYLEGLPEHGPWDHEIKLKEGARLKFFKIYHTSQAQNEELKRYLEENLRRGHIRPSTSPAGYLILFVPKKDRKLRLYVDYRQLNEQTVKNRYPLPLISRLQDQLAGAQYFTRLDLPSAYNHIQIKEGDE

SEQ ID NO: 2314 - DNA, 2229 bp, Myceliophthora thermophilia
atgcctcgttgctggccttcgttccgcttccgttccaagaaggaagcgggggtgtccaccaagccgggcaagctcccggacagcgggtccagcgcctccacgctcggctccgacgccaagagcaagacagcggaggagagcgaaaaggtcaacgggctggaagagggtcaggaagagaagaaggacgacaagaagaaaaacgacaagaagaaggtcaagaaaaagaaggacaagaagaaggaggatgaggactccaaggaggatggagatacgaaggacaaaaaggaggacgacaaaaaagaggacgacgatgaagatggcgacgaagacaaggacaacaaggatgacgaagacaaggaaaagaaggtgattgtaggctcggtcagcgaggccaagaatatttacaggggcgcctcggacgacgacgggaactggacctgggtcgacaagtatcccgatggcgtcgaggaggcggccgagaacgaggagacggccaagtacgccatcgtcgtgcgaaatcagaagagcaacgacagccgcaaaaagctcgaagcccacagcatcatcgtgcagagcccgcagatcagggctgcactggccgaaatcatggccgactacccgggagtcgcctgcgagctgacgcgcctcgagttcgaggcgcccttcaagccgtttgtgcaccgatggaacgagttccagaaatacattgagaagccagatctcgatgagaagaccaagaaggacatgaaggtgctgattgacattatgaactacgagattggcgacaatgtcaagacgttccaggattacgtcaagaacggggtcgtgtgcttcaaggacctatggatgatcttccaaccgggcaccgtcgtcatcgcgacgggccagggccagctcagcgccttcgagatggtcgagaccgagtaccagacgaccaaccggggccggttcctggtggtgcggtgcgactgcgtcgactacggcggcaaggagtttggcaggtaccaggagcagatcctcatccccgagttcatcggcaccaagaagatcacgggactcaaggtgtaccccctgcacttccacaaggacaaggagtcggtcgaggccaagctgatcaagcggggcgagctctttgagaagctggccgggcatcactacaagcagtactcgggcaaggcgatcgggtgggaccgcgacgagaacgagatcgagttggaggtctcgggccgcatcattgtcgacatcgacagcttcaatcgcttcagcccctggcgggtccggtacgtcaacgaatggagcgcgaccgacctggaccgcttcagcaagtacaaggagaagatgggcatcacggacgacaagttcgtcctgccgccctactaccagatgctcgcccgggcgcggacgcgcggctactcgctcaagttcaagaagtggctcgacttcttcgtcgaccagatcaccgaggtcgagtggaacacgacggcgttcgacaggctggtcctcccgccggaccagaaggagctcatcatgtccttctccgagtcgcagatcgcgggtagccagttcgacgacatcatccagggcaagggcaagggcatcatctgcctgctgtcgggcccgcccggcgtgggcaagacgctgacggccgaggcggtggccgagacgctccgggtgccgctgcacatgctgagctcgggcgacctcgggtcgagcccgtgggaggtcgagcgcgagctcaactcgatcctggagctcgtcgcccggtggaacgcgatcctgctgctggacgagtgcgacgtcttcctggaggcgcgcagcacgcacgagctggagcgcaacaagatcgtctccatcttcctgcgcacgctcgagtactacgagggcatcatgttcatgacgaccaaccgggtcgaggagatcgacgcggccttccagtcgcgcatccacgtcagcatcgagtaccccgacctgacggccgcctcgcgccgcaccatctggaccaacttcctccgcggctccaccatcaagagctccctcaccgaccgcgacattgccgagctggccgagctcaagctcaacggccgccagatcaagaacgtgctcaagacggcgcagctgctggcggccaggaagaagagcgagacgctggaccgcaagtacatcgagaccgtcctgggcatcgagaagaagcggcccggggcaccccagcagatgatgcactatctctaa

SEQ ID NO: 2315 - protein, 742 aa, Myceliophthora thermophilia
MPRCWPSFRFRSKKEAGVSTKPGKLPDSGSSASTLGSDAKSKTAEESEKVNGLEEGQEEKKDDKKKNDKKKVKKKKDKKKEDEDSKEDGDTKDKKEDDKKEDDDEDGDEDKDNKDDEDKEKKVIVGSVSEAKNIYRGASDDDGNWTWVDKYPDGVEEAAENEETAKYAIVVRNQKSNDSRKKLEAHSIIVQSPQIRAALAEIMADYPGVACELTRLEFEAPFKPFVHRWNEFQKYIEKPDLDEKTKKDMKVLIDIMNYEIGDNVKTFQDYVKNGVVCFKDLWMIFQPGTVVIATGQGQLSAFEMVETEYQTTNRGRFLVVRCDCVDYGGKEFGRYQEQILIPEFIGTKKITGLKVYPLHFHKDKESVEAKLIKRGELFEKLAGHHYKQYSGKAIGWDRDENEIELEVSGRIIVDIDSFNRFSPWRVRYVNEWSATDLDRFSKYKEKMGITDDKFVLPPYYQMLARARTRGYSLKFKKWLDFFVDQITEVEWNTTAFDRLVLPPDQKELIMSFSESQIAGSQFDDIIQGKGKGIICLLSGPPGVGKTLTAEAVAETLRVPLHMLSSGDLGSSPWEVERELNSILELVARWNAILLLDECDVFLEARSTHELERNKIVSIFLRTLEYYEGIMFMTTNRVEEIDAAFQSRIHVSIEYPDLTAASRRTIWTNFLRGSTIKSSLTDRDIAELAELKLNGRQIKNVLKTAQLLAARKKSETLDRKYIETVLGIEKKRPGAPQQMMHYL

SEQ ID NO: 2316 - DNA, 1203 bp, Myceliophthora thermophilia
atgacgatcgagaccttgcgcagttccatacaagccgaaaccacccaccaccccagcgcccaacacctctaccacaatggccagctggtcagcgacaactccaagaccctggccgagctcggcgtgactgacggcgacatgctcgccctccacgtccgcgacatgaggggcagcacgacggttccggcaggggggggcaggtcaggacgtcccgcggcgcgccagcaccagccggtgcaggatcccgaagtgatccgtttgcagattctgggcgaccccaacctgaggggcgagttggccaggtcgcggcccgacttggtggcggcactggaggacccccagaggttcgcacgcctgttcgccgacagcctggaccgggagcggagggagcgcgaggagcgccagcgacagattcagctgctgaattcggacccgttcgatgtcgaggctcaggcgaaaatcgaggagatcatccgccaggagcgggtcatggagaacttgcagaatgccatggagcacaaccccgaagtttttggtaccgtgcacatgctgtatatcgaggtcgaagtcaacggatacaaggtcaaggcgttggtcgactcgggcgcgcaagccaccatcatgagcccccagtgcgccgaggcctgcggcatcatgcggctcgtcgacaagcgctttgccggcatcgcacggggcgtgggaacggccaacatcatcggccgcgtgcactcggccccgatcaagatcggacccctcttccttccttgcagcttcaccgtcatggagggcaagcaggtggaactgctgctcggcctcgacatgctgaagcgtcaccaggcgtgcatcgatcttgccaaggacaagctgattatccagggagccgaggtgccgttcctgggcccggccgacattccgaccgagaccgaggaggcctatcagcaggagccgaccgtccctgggccggcgggcacgacgatcggccagcgctccggtgccgtgcatgcgccgagcgcggcagctcatgcggcccagtcgagcggtggtggtccctcaggtccgcaaagtgcagcgagaccgtcgttccccagagaacacatcgaccaattgatggcgctaggggcctccgagcagagagccattcaggcgctggaggcaaccggcgggaacgtcgagtatgcggccagtctgattttccaggactga

SEQ ID NO: 2317 - protein, 400 aa, Myceliophthora thermophilia
MTIETLRSSIQAETTHHPSAQHLYHNGQLVSDNSKTLAELGVTDGDMLALHVRDMRGSTTVPAGGGRSGRPAARQHQPVQDPEVIRLQILGDPNLRGELARSRPDLVAALEDPQRFARLFADSLDRERREREERQRQIQLLNSDPFDVEAQAKIEEIIRQERVMENLQNAMEHNPEVFGTVHMLYIEVEVNGYKVKALVDSGAQATIMSPQCAEACGIMRLVDKRFAGIARGVGTANIIGRVHSAPIKIGPLFLPCSFTVMEGKQVELLLGLDMLKRHQACIDLAKDKLIIQGAEVPFLGPADIPTETEEAYQQEPTVPGPAGTTIGQRSGAVHAPSAAAHAAQSSGGGPSGPQSAARPSFPREHIDQLMALGASEQRAIQALEATGGNVEYAASLIFQD

SEQ ID NO: 2318 - DNA, 1086 bp, Myceliophthora thermophilia
atggcctcagtctcggaccatagcggccccaagggcaaggccccaaccccaccgaccacatccggcaatggaggtttccaggcccagcagcccatgcgtgtcgagcctcccaagcccgaggatcttcagcggagctatgccagcgtcgtcgacgaggcgcacttcccgggctggtacggagccatgatcgactgcctcggcgaggttatcggcaccttgggcgccattccctgctgcatctgtttccccaaccccttcaagagagtcaatcagggccacgtcggcctggtcaccaagttcggccgcttctacaaggccgtcgatccgggccttgtcaagatcaacccgctgagcgagcatctcacctcggtcgacgtgaagatccagatcgccgaagtgggccagcagacgtgcatgaccaaggacaacgtcacgctcaacctgaccagcgtgatctactaccatgtcgtctcgccccacaaggccgccttcggcatctccaacatccgccaggccctgattgagcggacccagacgacgctgaggcaagtcgtgggttctcgcatcctgcaagatatcatcgaacggcgcgaggaggtcgcccagagcatcggcgagatcatcgaggacgtggccaccggctggggcgtgcaggtcgagagcatgctcatcaaggacatcatcttcagccaggagctgcaggagtcgctctccatggccgcccagagcaagcggatcggagagagcaagatcattgccgccaaggccgaggttgaagcagccaagctgatgcgccaggccgccgacatcctgtcgtccgcgccggccatgcagattcgctatctcgaggccatgcaggccatggccaagagcgccaacagcaaggtcatcttcctgcccgccgccaaccagaccatgcccagtaccgccgccttcaacgccgccctgtccggcaacaacaacaacaacaacaacatcaacgaccccttcgccgagggcagcagcactgccgacccctccggcgccggcgccggcgactcgggcttccagcaggcgctgcacgccagaataattgagaacatctga

SEQ ID NO: 2319 - protein, 361 aa, Myceliophthora thermophilia
MASVSDHSGPKGKAPTPPTTSGNGGFQAQQPMRVEPPKPEDLQRSYASVVDEAHFPGWYGAMIDCLGEVIGTLGAIPCCICFPNPFKRVNQGHVGLVTKFGRFYKAVDPGLVKINPLSEHLTSVDVKIQIAEVGQQTCMTKDNVTLNLTSVIYYHVVSPHKAAFGISNIRQALIERTQTTLRQVVGSRILQDIIERREEVAQSIGEIIEDVATGWGVQVESMLIKDIIFSQELQESLSMAAQSKRIGESKIIAAKAEVEAAKLMRQAADILSSAPAMQIRYLEAMQAMAKSANSKVIFLPAANQTMPSTAAFNAALSGNNNNNNNINDPFAEGSSTADPSGAGAGDSGFQQALHARIIENI

SEQ ID NO: 2320 - DNA, 348 bp, Myceliophthora thermophilia
atgtacgcactatacgagaagctcaaaaacgaactcgagtttgtcaagatcagaataaagaactactacaacaaacacaggctcgagggacctcgcctagagaggggagacaaagtctacctaattgcacgaaacttgcgaaccaaacgaccaaatacaaagctagacttcaagaaggtcggacccttcattatcaaagaacgaatttcgacatctaactatcgactatcattaccatcatctatacgactacggacggatgtttttcatatttcacttctcgaaccagcaccgaagaacgccaaaatcgccacaaacatcaaagcggaagacaaagaggaagaatag

SEQ ID NO: 2321 - protein, 115 aa, Myceliophthora thermophilia
MYALYEKLKNELEFVKIRIKNYYNKHRLEGPRLERGDKVYLIARNLRTKRPNTKLDFKKVGPFIIKERISTSNYRLSLPSSIRLRTDVFHISLLEPAPKNAKIATNIKAEDKEEE

SEQ ID NO: 2322 - DNA, 864 bp, Myceliophthora thermophilia
atggggcagtttttcgagacgattccagagtacctgatgaaatggatcctggaacaaaagatgttctgggtggccaccgcgccgctggcggcgtccgggcacgtcaacgtgtcgcccaaggggggcccgtcctttggcctgctggacgaccggacgttctggtacatggacctcacgggcagcgggaccgagacgatcgcgcacctgtacgagccgggcaacgggcgcatcaccgtcatgttcaactcgttcgagggcccgccgcgcatcgtccgcctcttcggccacggcaccgtcctcgagcggccgggccacgagacccgcctaataataccgataataataagcccggagcagggcggggcgggcagcacgtttgacgactttgtcaagaagcacgacgtcgaggtcatcccgagctcccgctccatcatcatcgtccgcctgcaccaggtcgccacctcgtgcggctactcggtgcccttttacgagttcaagggcttccgtgctaccctgaacgaggtgtttgccaagaaggaggagaagttcgtgcagggcgcgtcggatgagagcagggaaaggtactgggcgtacaagaactcgtacagcgtggacggcctgccaggaatgcgcatcggctacgagacgcacaagagggaggggatcgcgcccatcgagaagatggtcggccccggcgcgccacgggggtacgcgtaccgcaacagccggaggtacagtgcctcgcacctcgttctcgtcgccttgctctcggtcctctgcaccgtgctgtcgttcccattgctcgtcccattactccaacgcatttatgatcccgccgttctatcatcgttccgctcttcttaa

SEQ ID NO: 2323 - protein, 287 aa, Myceliophthora thermophilia
MGQFFETIPEYLMKWILEQKMFWVATAPLAASGHVNVSPKGGPSFGLLDDRTFWYMDLTGSGTETIAHLYEPGNGRITVMFNSFEGPPRIVRLFGHGTVLERPGHETRLIIPIIISPEQGGAGSTFDDFVKKHDVEVIPSSRSIIIVRLHQVATSCGYSVPFYEFKGFRATLNEVFAKKEEKFVQGASDESRERYWAYKNSYSVDGLPGMRIGYETHKREGIAPIEKMVGPGAPRGYAYRNSRRYSASHLVLVALLSVLCTVLSFPLLVPLLQRIYDPAVLSSFRSS

SEQ ID NO: 2324 - DNA, 921 bp, Myceliophthora thermophilia
atggcgtcgacgatgctgaacacaaccatcgcagatcttggctcatcggcttccctgacaaccgtcttcgaggaggtatccaagtacaatgttcacctgaatatcttggagcgcctatgggcctcctggtatctctggatgcagaatgacacgatcgcgacgggtgtcatgagcttcatcatgcacgagctcgtctatttcggcaggtccctcccctggatcatcatcgatgcgatcccatacttcaacaagtacaagattcagaagaccaaggttccaacatggaaggagcagtttgagtgcgcagcgctcgtcctactgagccactgcactgttgagcttccccagatctggctcttccatcccattgccacctactttggcctcgactatggcgtcccgttcccgcctgcctggaaggttgccatgcagattgccatcttttttgtcattgaggacgcctggcactactggttccaccgggcgctgcactacggccctctctacaagtcgattcacaagctgcaccacaactacagcgcgcccttcggtctcgccgccgagtatgcctccccgattgaggtgatgctcttgggcttcggcatcgtcggcacccccattgtctgggtatcgatcaccagggacctgcatcttttcacaatgtatatgtggatcatcctccgcctgttccaggccatcgatgcccactccggctatgacttcccctggagtctgcgccacttcctgcctttctgggccggtgccgaccaccacgacctgcaccacgaacgcttcattggcaactatgcctccagcttccgctggtgggactactgcctcgacaccgaggctggcgaagaggcgagcaagaggcgtcgcgagaagaagctcgccgagctccgggccaagaaggtgcaatga

SEQ ID NO: 2325 - protein, 306 aa, Myceliophthora thermophilia
MASTMLNTTIADLGSSASLTTVFEEVSKYNVHLNILERLWASWYLWMQNDTIATGVMSFIMHELVYFGRSLPWIIIDAIPYFNKYKIQKTKVPTWKEQFECAALVLLSHCTVELPQIWLFHPIATYFGLDYGVPFPPAWKVAMQIAIFFVIEDAWHYWFHRALHYGPLYKSIHKLHHNYSAPFGLAAEYASPIEVMLLGFGIVGTPIVWVSITRDLHLFTMYMWIILRLFQAIDAHSGYDFPWSLRHFLPFWAGADHHDLHHERFIGNYASSFRWWDYCLDTEAGEEASKRRREKKLAELRAKKVQ

SEQ ID NO: 2326 - DNA, 183 bp, Myceliophthora thermophilia
atgaagcagcccgaggctcggtacttccagaatacagcggacatcaagcgcgttcagttgcgtctcgaatcgaatagcctggttcaacgctgttgcagcaccgcggccgtcacggttcgatacaagattccacaacccaccaagcgcactacggcagagggccggcgaaacaggggcaattaa

SEQ ID NO: 2327 - protein, 60 aa, Myceliophthora thermophilia
MKQPEARYFQNTADIKRVQLRLESNSLVQRCCSTAAVTVRYKIPQPTKRTTAEGRRNRGN

SEQ ID NO: 2328 - DNA, 1311 bp, Myceliophthora thermophilia
atggcgaccactgaggtgccggtgcatagcaaggctcctgcaagtacggaccccgcggtctaccaggaatacgaatcgaaatggtcgacgtatcccaccgacgctgagggttggctccagcgcgcgcgggacgtagccgccgtgctggctgtggatgcagccgcgcgtgagaaggccaacaaatcgcccagggcagaagtggccctccttaagcattccggcctgctgcggattctcggccccaagaagtacgggggcggcgagcagtcatggagcgtggcatacaaggcgatccgcgaggttgccaagggagatggatctatagggatgctcttgggctaccaccttctctggtcacgcaccgccaatgtggtcggcaacgatgagcaggcggaccggctgcagaaactcatcatcgagaacaactactacgtcggcggcgccgtcaacccgcgcgacagtgacctcaagatcacctatgacgacgagaagatcacgtacaacggcttcaagaacttcaccacaggcgccgccgtctctgacctgatcgttctcgagggcgccgtggagggacgccccccagaggaacacatcttcgccattgtcccgacggcccaggcgggcatcatcttcagctacaactgggacaatatcggactgcgcttgaccgagtcgggtgctgccaagatcgagaatgtgtccgcaccgtgggcagatgctctcgggtgggatccagcgaccaagaagcccgatccggcagtgctagggattgccttcccgtcactgctgctgcctagcatccagctcgtctttagcaacttctacctcggcatagccattggcgcgctggagtttgccaagcagtacaccgtccgccacactcgaccatggccgtacggcggcgagaacaaatccgctgcgaccgacgagttctatatcctctccacctacggcaacttcttcgcgcacctgcgcgcggccgaggcactcgccgacaaggccggcgaggaggccgacaggatttttgccacgtacgggaacaaccgggcggcactgacggcccgggagcggggcgactgggccgagtgggtggccagcatcaaggtggtggcgaccgacacgggcctgcgggtgacgtcgggcgtcttcgaggtgacaggcgcccgggcgacggcgagcaaggtcgggctcgaccggttctggcgcgacatccgcacgcacacactgcacgacccggtggcgtacaagaaccgcgagctggggaggtacttcttgctggaccaggtgccggagccgacgtggtatacgtaa

SEQ ID NO: 2329 - protein, 436 aa, Myceliophthora thermophilia
MATTEVPVHSKAPASTDPAVYQEYESKWSTYPTDAEGWLQRARDVAAVLAVDAAAREKANKSPRAEVALLKHSGLLRILGPKKYGGGEQSWSVAYKAIREVAKGDGSIGMLLGYHLLWSRTANVVGNDEQADRLQKLIIENNYYVGGAVNPRDSDLKITYDDEKITYNGFKNFTTGAAVSDLIVLEGAVEGRPPEEHIFAIVPTAQAGIIFSYNWDNIGLRLTESGAAKIENVSAPWADALGWDPATKKPDPAVLGIAFPSLLLPSIQLVFSNFYLGIAIGALEFAKQYTVRHTRPWPYGGENKSAATDEFYILSTYGNFFAHLRAAEALADKAGEEADRIFATYGNNRAALTARERGDWAEWVASIKVVATDTGLRVTSGVFEVTGARATASKVGLDRFWRDIRTHTLHDPVAYKNRELGRYFLLDQVPEPTWYT

SEQ ID NO: 2330 - DNA, 2499 bp, Myceliophthora thermophilia
atgcaatgcaaaggggctgcacaagactctcagcaggttggcggccactgtggcaggatagtcgacattgacctgttctttgaccgaggttttgcctctgcttcggctcaacctaaccttagcggatccggctccggagccgatcccgctcgggccggctacacataccgaaagactgcgtaccttatgcataaattcgtcaacctcttcccgcctcttcgctgcaagtctctccggcaagacaccccgttcctcgatccggtattccgcatcccccctcgcaaaatttcaaaaattgagaaaggccaaacattgggctgctggatcaacctagccttcacgatgagtctgcggcatcatccctttgaccccctgacgtcgagcgagatccggcaggccgctgatattctgcgacgctatgtccctggcacggacattcatttccgggtcatcaccctctgggagcctcccaagtccgagatggtccctttcctggaaatggagcatgggggctccgagacagcaaaaactccagcgcgaatggccagggtgcaggcatatgtcgacagcactttcaccgagtacaaggtcaacctcgaccagcaagccgtggtcgccgaggagactctccacggccggcatgcgcacattgacggagagtacatgcgcaaggtcgaactggcatgcatggccgacccccgcgtcaaggagcaagtggccgcccttaacctcccagaagggtccacagtggtagtcgagccgtggacgtacggccccgacggcatgaacgacatgtccaagcggatgaccatgtgctggttctacatgcgcctctccgacgacaaggacgccaactactacgcgtacccgctcgagttatgcgtcgaggtgtccgacgatctcaaagtggtcaagatcttgcacctcccgtcaggggagcatgatcgtgtgcggaccgaaggcaacccgaaggagtttgaccgccgcaagatccacgaaggaagcgagtactacccgaccctcaataccaagcagcgcaccaccacgaagccctaccacgtctcccagcccgagggcccgtccttctccatcgaggggaacaagatcacctgggagaagtggacgatgcgggtgggattcaactaccgcgagggcatgactctgcacgacgtccgcttcgacgaccgcagcctgtactaccggctgtccctggccgagatgtttgtgccctacggcgacccccgcacgccgtacccgcgcaaggccgccttcgacctgggcaacgacggggcgggcgtctgcgccaacaacctccagctgggctgcgactgcctgggccacatcaagtactttgacggctggctcgtctcgcgcgacggcactccgctcaagatgccccacgtcatctgctgccacgagatcgacgacggcatcctctggaagcacaccaacccgcgtaccggcaacgccgccgtggcgcggtcccgcgtgctggtcctccagaccatcatcacggccagcaactacgagtacgtcttctgcttctacttcggtcaggacgcgtccctgcactacgaggtgcgcgccaccggcatcctctccacggcgcccgccgacttctcgtccccggccccgctcccctacggcacgacggtggcccccggcgtgctggcccccttccaccagcacctcttctgcctgcgcatcgacccggccgtggacggctaccgggccaactcgctgttggtcgaggagtcgcacccgctgccgccctcggcggccgacaacccgcacggggtcggctacgtcacccggcagacgtacgtcgagcacgagacgggcctggacctcgaccacaccaccaaccgcgtcttcaagatcgtcaacgagcgcaggcaccacccggtcgcgcgcacccccgtcggcgtccgcctgctgccctgctacagccagctgctgctcgcgcatccggacagcctgcacgcgcgccggtccgagttcggcgcccacgcggtctgggtcacgcgccacgccgacgacgaggccttccccgccggccgcttcaccatgcagtcggcgggcggcgaggggatcgcctcgtggatccgcaagcgcagggagcgaaggagaggagaagaggtcggagggagcagcagcaaccgagagggaaggggaaacgagaagaaaggcggaaaggaagggaacgtggtggaggaagaggatgatacgtgcgtcaggaacgcagacattgtcgtgtggcatacctttgggtccacgcacaacccccgcgtcgaggactggccgatcatgccggccgagaagatggttgtcgggctgaagccggtcaacttctttgagcggaacccggctctggacgtaccgccgtcgacacaggagaggaacctgagcgtgttggttgaaactgggggcggggttggagaggaacggaaggaagagaaagaggcggagtgctgtgtcgagagattcagggggcggtaa

SEQ ID NO: 2331 - protein, 832 aa, Myceliophthora thermophilia
MQCKGAAQDSQQVGGHCGRIVDIDLFFDRGFASASAQPNLSGSGSGADPARAGYTYRKTAYLMHKFVNLFPPLRCKSLRQDTPFLDPVFRIPPRKISKIEKGQTLGCWINLAFTMSLRHHPFDPLTSSEIRQAADILRRYVPGTDIHFRVITLWEPPKSEMVPFLEMEHGGSETAKTPARMARVQAYVDSTFTEYKVNLDQQAVVAEETLHGRHAHIDGEYMRKVELACMADPRVKEQVAALNLPEGSTVVVEPWTYGPDGMNDMSKRMTMCWFYMRLSDDKDANYYAYPLELCVEVSDDLKVVKILHLPSGEHDRVRTEGNPKEFDRRKIHEGSEYYPTLNTKQRTTTKPYHVSQPEGPSFSIEGNKITWEKWTMRVGFNYREGMTLHDVRFDDRSLYYRLSLAEMFVPYGDPRTPYPRKAAFDLGNDGAGVCANNLQLGCDCLGHIKYFDGWLVSRDGTPLKMPHVICCHEIDDGILWKHTNPRTGNAAVARSRVLVLQTIITASNYEYVFCFYFGQDASLHYEVRATGILSTAPADFSSPAPLPYGTTVAPGVLAPFHQHLFCLRIDPAVDGYRANSLLVEESHPLPPSAADNPHGVGYVTRQTYVEHETGLDLDHTTNRVFKIVNERRHHPVARTPVGVRLLPCYSQLLLAHPDSLHARRSEFGAHAVWVTRHADDEAFPAGRFTMQSAGGEGIASWIRKRRERRRGEEVGGSSSNREGRGNEKKGGKEGNVVEEEDDTCVRNADIVVWHTFGSTHNPRVEDWPIMPAEKMVVGLKPVNFFERNPALDVPPSTQERNLSVLVETGGGVGEERKEEKEAECCVERFRGR

SEQ ID NO: 2332 - DNA, 1632 bp, Myceliophthora thermophilia
atgtttctcgctcctgtacctaccggatacgcctcctggttctgtgtctcaaagagctgttgttcgcctcccccgttgccacatgacagaatgccagggttgcaggttgaagcaatcttagacgccatcggagcccggctgtcgcccatcctgccgaccctcgctgctctcgttgcggtcgtgctgctgcagcatgtcctgagccggggccctcttgccaacatccccctcgtgggccaagaactcggcggcgatgagaagcggaggcaggcatacctttccaaagcgggcgacttgtaccttgagggttacaggaagttcagggacagagtcttcaggatcgtgacgtcaaacaagttcaccgtcgttgtcgtgccacccaagtacctgggcgagctgagaaaactcccggacgatgtcgtcgactttgaccaggccatcgcccagacgatgcatgccaagtacaccaagatacccatcggccagccattgatccctcacacgataaaggcgagcctcacgccggccctggtccggatcaacccgacgattgccagtgaagtgcagctgtccatccggaaagagctccccccttgtgacgactggacctccatcaacatcaaccggaaacttctccgcatcgtcgccctcgtctccggccgggtcttcattggcgaggagctcagccggtcccaggagtaccttgacgccgccatcaattacaccgtcgagctgatggacgcccgccgcgccatcgagaggctacgcgcgtggcagcgtcccttcctcgccaaccggctacccgaggtgaagaaactcgaccagcggctcgcccaggcggaccggttcctgcgccccatcgtggctgcccggcgccagctgcaggacagcgagaagcccaatgacatgctgcagtggatcatggacggccaagataagttccggcaatactcgaccgaggagctcgcgaggctgcagttagctctctcttttgcggcaatccacacaacgtccctgacggcaacgaatgtgttttacaatctcgcggcttatccgcactatatcccggaactgcgtgacgagatccgcagcgtcctggccgagcacgacggcgtcttcacgagcccggcattgcaagccatgaagaaggtcgacagcttcgtcaaggagaccatgcgcctgtacccgaccggcttcgccgggtttcagcgcaaggtcaccaagacctttaccctctccaacggacaggtcatcccggccggcgtggtgatccaggttcccgccgatgccatcgcccgcgacccggaagtgttcccaaatgccgaccagttcgacccctggcgcttctcccggctgcgcgaggaagcacgccgcgctgggaaggctgaggaggccgctcatcaccagttcgtttccgtcagccccgaagtcctgacgtttggctatgggcgacacgcgtgcccgggccgcttctttgccgccaacgagatcaagatgatcattgccaactttatcctcgcctacgacatgaaactgccggacggggtgaccgagaggtacccgaacctaacgttcggctcgacgtgcgttcccgaccctcgtaaggagttgctgttcaagaggctggcataa

SEQ ID NO: 2333 - protein, 543 aa, Myceliophthora thermophilia
MFLAPVPTGYASWFCVSKSCCSPPPLPHDRMPGLQVEAILDAIGARLSPILPTLAALVAVVLLQHVLSRGPLANIPLVGQELGGDEKRRQAYLSKAGDLYLEGYRKFRDRVFRIVTSNKFTVVVVPPKYLGELRKLPDDVVDFDQAIAQTMHAKYTKIPIGQPLIPHTIKASLTPALVRINPTIASEVQLSIRKELPPCDDWTSININRKLLRIVALVSGRVFIGEELSRSQEYLDAAINYTVELMDARRAIERLRAWQRPFLANRLPEVKKLDQRLAQADRFLRPIVAARRQLQDSEKPNDMLQWIMDGQDKFRQYSTEELARLQLALSFAAIHTTSLTATNVFYNLAAYPHYIPELRDEIRSVLAEHDGVFTSPALQAMKKVDSFVKETMRLYPTGFAGFQRKVTKTFTLSNGQVIPAGVVIQVPADAIARDPEVFPNADQFDPWRFSRLREEARRAGKAEEAAHHQFVSVSPEVLTFGYGRHACPGRFFAANEIKMIIANFILAYDMKLPDGVTERYPNLTFGSTCVPDPRKELLFKRLA

SEQ ID NO: 2334 - DNA, 1626 bp, Myceliophthora thermophilia
atggccgaccacggccctcctccctcttccgcggccccgtccgggccatccggcccgttagggggcttcggcttcccaatctcgggccctgccgccacgctcggcgccctgccggcttcggtaccgtatcatccttacctgctagccgccgggctggccgtgctgtttctcttctggctccagcctctatcgtcgtcgtcgacgtccaagttcccacatctcaacccgcgcaagccgctcgagctcaccgagactcgtcgcaagcaggagtttgtcatcaactcgggcgccatgctggatgcctggttccgcgagcacccgaaccagccggcccgcgtcatcggcgacgccggcgaggtcattgtgttgccgccccatctgaccaacgagttgcgcaacgacccgcgcctcagcttcgccggttggattgtaaagaacttccacgctcacatccccggtttcgagggtttccgcgagggtagccgagactcgcaaattgtccaggaggtcatcatgaaagaccttacaaagtatctaaacaagatcaccgagccactctctgaggagaccgccctggccgtgaacgagttgtaccctgcagacaacgatcaagaatggcacacgatctcgccgcgcgagcgtctcctccgcctggtcgcccgcgtctcctcccgcgtgttcctgggcgaggagatctgccgcaacgaggcctggctccgcgtcacgcgcgagtacacggtcgacgccttcggcgccgccgaggagctgcgcctgtggcccgccccgctcagggccctcgtgcactggttcctcccctcgtgccgccgcgcccgcgccgacgtcgccgaggcccgccacatcatcggcgccgtgctcgacaagaggcgcttgcagaagcagcgcggcgagaaggtcgagtacgatgatgccatcgactggttcgaacgcgaggcccggggaagggaatatgacccgaccgttgcccagctcactctgtcgatggccgctatccacaccacaacggagctcgtgacccaggtcatgagtgacattgctcaggaccccgacatcctggacgagctgcgtcacgagatggtccaggtcctccgcgacggcgggtggaagaagacgtcgctctacaacatgaaactgctcgacagcgtcctcaaggagagcctgcgtctgaagccgaccggcattatcagcatgcgccgcctcgcgtcggacaacatccgcttctcggacggcacctcgatccccaagggcagcatggtggcggtgacggcgcggaaccactgggacgcgggcgtgtacgagaagccggaggcgtgggacggccggcggttcctgcgcatgcgcgagacggccgggcgcgagcacgtcgcgcagatggtcagcacggcgcccgactacctctccttcggccacggccagcacgcctgcccgggccgcttcttcgccgccaacgaggccaaggtcatcctgatccacctgctgctcaagtacgactggcgcctctcgcccgatgcgccccggccccggatccgccactacggctggactctccgcgccgatccgaccaccacgatgcagtatcgccgccggagacccgaaatcgacctctga

SEQ ID NO: 2335 - protein, 541 aa, Myceliophthora thermophilia
MADHGPPPSSAAPSGPSGPLGGFGFPISGPAATLGALPASVPYHPYLLAAGLAVLFLFWLQPLSSSSTSKFPHLNPRKPLELTETRRKQEFVINSGAMLDAWFREHPNQPARVIGDAGEVIVLPPHLTNELRNDPRLSFAGWIVKNFHAHIPGFEGFREGSRDSQIVQEVIMKDLTKYLNKITEPLSEETALAVNELYPADNDQEWHTISPRERLLRLVARVSSRVFLGEEICRNEAWLRVTREYTVDAFGAAEELRLWPAPLRALVHWFLPSCRRARADVAEARHIIGAVLDKRRLQKQRGEKVEYDDAIDWFEREARGREYDPTVAQLTLSMAAIHTTTELVTQVMSDIAQDPDILDELRHEMVQVLRDGGWKKTSLYNMKLLDSVLKESLRLKPTGIISMRRLASDNIRFSDGTSIPKGSMVAVTARNHWDAGVYEKPEAWDGRRFLRMRETAGREHVAQMVSTAPDYLSFGHGQHACPGRFFAANEAKVILIHLLLKYDWRLSPDAPRPRIRHYGWTLRADPTTTMQYRRRRPEIDL

SEQ ID NO: 2336 - DNA, 4296 bp, Myceliophthora thermophilia
atggataagccctcgtctcacaaccagacagggtcattgcaggtcaacggccctctctctcctccccttactccggccgtgaacggcacgggcaacgccacgggcaccctggatggtaccaacaaatccttccccggcgggcgaccagcgtctccggacccaagtatctcctcgaggtccggctctagctcgaaaaatgtatccagcacgacctcgagcccacggccccagccagcgtcgatctttacagcaccctcctcgacctactctcagccgtcctccactccggacctgcgccttctcgaggactctactccccaactgccaaaacgctctctccttgaggccgaacacaaaggacatgccaccccacaagcaccacaagcagcagcagcagcagcagtgacagcagcgacagcatcatcacaacaaaaacaacaacaagcacccggctggcgcaaacggcgcgtctacacggacgggaggcaggacgcgccgttcccgcggctgtccaagccggtggagctgctccgcggcgcgtacgacgtggtggtgatcgggtccgggtacgggggcggggtggcggcgtcgcggatggcgcggacgggccagtcggtctgcgtgctggagcgcggccgcgagaagtggccgggcgagtacccgcgcgggacggccgacgcggtccgcgagctgcactgctccggcgccttcgccccgggctggctcaagggcctcccgatcgacgccggcgaccccaccggcctgttccacctcatcatgggccgcggccagagcgccgtggtgggcaatggccggaggcagttgttaaaagggggaagaaaagggaaaagggggagagtacgcccatcaggactcggagggacgagcttgatcaacgcgaacgtgttcatggaggcggataaggagacattggccatgaaggtgtggccgccggaaatcagggagaatgtggatgagttggataagtactacgcaaaggtggaggccgtcctcgagccccaggagtatccggacgagtggcccaaactggccaaggcggagctgttcaagaagcaggccgagcttctgggactggggcacaagttcaagaaggtgcggcagaccacgcgcttcaccaacgggcccaacagctgcggcgtcgagatgtcgccctcgacattgactggccaggacacgacggggatcaacgacgggtccaagaactcgaccctggtcacgtacatcgccgacgcctggaactggggcgccgagatcttttgcgagtgcgaggtgcgctacatcgagaaggtcgagcacgacgaggggtatcgggtctactttgcctggcacggccgcaatcggggcttgttcaaggccaacttgcatggcgacctcatgtgggtgcatgcgaagaaggccgtcttcctcggcgcgggagccattggctcgaccgagatcttgctacgtagcaacgccatgggcctcgggatgagtgacctggttggccagaacatgagcggcaacggtgacatgctggcgtttggctacaacacggacgaaaagacaaacattctcggatctgagaagccgtctccgtatgatcccatcggccctaccatcaccagcgtcatcgactgccgggaagggaacgagaacccgttgaacgggtttgtcattgaggagggcgccatcccgcacgccctggcccctttcttccaagccatgttggatctcatgccggggaagaaggaatccgagaacgagactctgttcgagaagacgcaggccgccctggcacgctatggcagcaggatcctcgggccgtacttcaagaagggggccgtggagaagacccaggtctacctcgtcatgtcccacgacagcagccaagcggtcctgtcccttgtggacgacaagccaatgctcgaattcaccgggttctgccggagccatcacgtcaagaggctcaaccagctgctcgagaaagctaccgaggctgtcggcggcaccctcgtgcatagccccttccaggcggtgctggaccagcagatcacggtccatcctatcggcggtgcctgcatggcccgggacaacacgggtaagacgggcgtgaccaaccatgcgggccaagtcttcacgggaaggggctctgagacgtacgacggcctgatcgtgacggacgggtcggtcatcccggctgcgctcggggccaacccattcgccaccatcgcggccctggctgagcgctcggtcgagatgtatgcaaagtccaaggggctcaccatcagcgaggagaagaacgggatcctggacctgctcggcgagccccagcacgcgccgcggcgcgaccggccgagccacaaacgggagcagatccggatgatggaggagcaggagagtctcgacatggcggacaaggtgatccggtcagcccgcgagctcagcgcgggcggcatcggcttcaccgaggtcatgtctggcttcatccaccacgacgagaacctgacgggcgacgaccgcgagacgtacgagctcgcgcaccgggtggccaagtcgcggtgcgagagcgcgcgcttcttcctgagcgtgcaggccttcaacacgcgcgagctggtcaggcactcgcagcaccgcggcatgctgacgggcaccttcgtctgcccggccatcccggggtcgcccttcatggtgcagcggggcgagttcaacctcttcatcctcaacaacaaggcgccgggcacccgcaacctgacgtacgacttcgacatgacgggcgtcgacggccggaggctgcacttccacggctacaaggtggtcgactcgtccgtcgccctggccccgttcgagttctggagggccaccagcaccctgtacgtcaccgtcagcaagcacgtcgagggcatgtgcgccgacctcgacgacgaggacgcctggcgccgcggccccgtcgtcgccaagggcgtcatgcacatccggccggccgacttcctctcccagatcgagaccatgacgccgaccgggagcaacgtcgtccggagggccctcagcgccgccagcttcctgacctacttcacccgcaagtcgctgtccctcctgctcacgcccctgacgccgctcgagtacccgaccaagacgtgcagcggctacatcaaccacacgcccccggaccgctccgtcgacatcgtcgccccggacggcgtgtgctcgcgcatgcacgtctgggagcccacccacgtgccggaggactcgggcgtgcgcaacctcttcatgatccccggcgcctcggtcgaccaccagatcttcgccctcccgaccatcccgttcaacgcggtcaactacttcacccgggccggctaccgcgtcttcgtctccgtccaccgcatcagccagctcatgatggccggcagccactggacgacctacgacgcccgcctggacctgcgggcctgcctggagcacatccgcaccgcctacgggcccgagcccgtctacacggtcgcgcactgcatgggcagcgtcgccttcgcgtcgggcctcctggacggcaccatcccggcctcgtggatcctcggcatcacctgctcgcaggtcttcatgcacccgatctggtcgccgaccaacatggccaaggtcctggccgggccggtgcccatggaccggctctactcgctcgtcgccggcagctggttctcgtgcggcgcctcgccgcccggcgacgccccctggccgcagcgcgcgctcgaccagctgctgcgcctgtacccgcagccgcggcgcgagatgtgcagcagcgcgtcctgccaccggaccagcctcgtcttcggccggtgctggaaccacgcgaacctcaacgaggccacccaccggcagatcgaccgcttcttcggcggcgtcaacatgacccagctgcgcctgctcatgcgcatgggccgcgacggccacgtcatggccaacccgcccctcttcgagcgcctcacggggcccgacaacgtcgcccgcctgcgcggcctccccgtcttcctcttcgtcggccgcgacaacgccgtcctctcgcccgagtccaccgtccgctcctacgaggtgctctgcgacgccttcgaccccgccgactaccgccgcaccgtcgtccccggttacggccacctcgactgctggatgggccgcaacgcctggaaggacgtctaccccctggttcgcgaggaggtcgaccgcgtcacccgctgcgagcactacgagttcgtcgagcccgacgaccgcttcaaggccatggtccacgccggagagctgctctattga

SEQ ID NO: 2337 - protein, 1431 aa, Myceliophthora thermophilia
MDKPSSHNQTGSLQVNGPLSPPLTPAVNGTGNATGTLDGTNKSFPGGRPASPDPSISSRSGSSSKNVSSTTSSPRPQPASIFTAPSSTYSQPSSTPDLRLLEDSTPQLPKRSLLEAEHKGHATPQAPQAAAAAAVTAATASSQQKQQQAPGWRKRRVYTDGRQDAPFPRLSKPVELLRGAYDVVVIGSGYGGGVAASRMARTGQSVCVLERGREKWPGEYPRGTADAVRELHCSGAFAPGWLKGLPIDAGDPTGLFHLIMGRGQSAVVGNGRRQLLKGGRKGKRGRVRPSGLGGTSLINANVFMEADKETLAMKVWPPEIRENVDELDKYYAKVEAVLEPQEYPDEWPKLAKAELFKKQAELLGLGHKFKKVRQTTRFTNGPNSCGVEMSPSTLTGQDTTGINDGSKNSTLVTYIADAWNWGAEIFCECEVRYIEKVEHDEGYRVYFAWHGRNRGLFKANLHGDLMWVHAKKAVFLGAGAIGSTEILLRSNAMGLGMSDLVGQNMSGNGDMLAFGYNTDEKTNILGSEKPSPYDPIGPTITSVIDCREGNENPLNGFVIEEGAIPHALAPFFQAMLDLMPGKKESENETLFEKTQAALARYGSRILGPYFKKGAVEKTQVYLVMSHDSSQAVLSLVDDKPMLEFTGFCRSHHVKRLNQLLEKATEAVGGTLVHSPFQAVLDQQITVHPIGGACMARDNTGKTGVTNHAGQVFTGRGSETYDGLIVTDGSVIPAALGANPFATIAALAERSVEMYAKSKGLTISEEKNGILDLLGEPQHAPRRDRPSHKREQIRMMEEQESLDMADKVIRSARELSAGGIGFTEVMSGFIHHDENLTGDDRETYELAHRVAKSRCESARFFLSVQAFNTRELVRHSQHRGMLTGTFVCPAIPGSPFMVQRGEFNLFILNNKAPGTRNLTYDFDMTGVDGRRLHFHGYKVVDSSVALAPFEFWRATSTLYVTVSKHVEGMCADLDDEDAWRRGPVVAKGVMHIRPADFLSQIETMTPTGSNVVRRALSAASFLTYFTRKSLSLLLTPLTPLEYPTKTCSGYINHTPPDRSVDIVAPDGVCSRMHVWEPTHVPEDSGVRNLFMIPGASVDHQIFALPTIPFNAVNYFTRAGYRVFVSVHRISQLMMAGSHWTTYDARLDLRACLEHIRTAYGPEPVYTVAHCMGSVAFASGLLDGTIPASWILGITCSQVFMHPIWSPTNMAKVLAGPVPMDRLYSLVAGSWFSCGASPPGDAPWPQRALDQLLRLYPQPRREMCSSASCHRTSLVFGRCWNHANLNEATHRQIDRFFGGVNMTQLRLLMRMGRDGHVMANPPLFERLTGPDNVARLRGLPVFLFVGRDNAVLSPESTVRSYEVLCDAFDPADYRRTVVPGYGHLDCWMGRNAWKDVYPLVREEVDRVTRCEHYEFVEPDDRFKAMVHAGELLY

SEQ ID NO: 2338 - DNA, 1791 bp, Myceliophthora thermophilia
atgcgtgctctcaaggctttacggatagggagacggtccatcaaggacgaaaagggcaagccgcatatcagcatcccgcagaaatctgcagtcgccatcgttcctcccaagaaggtcatccgggcgctttacgactataccgcccagagtccgcaagagctgagtttttcgcgcggcgattttttccacgttatcgggcgggaaaacgacccagactggtatgaggcatgcaaccccgcactgcctgacgcccgcggcctggtgccggtaagcttcttccaagctctcggtcgcaacgaacgcgacagcggccagtcgcagccggacagtgcgcaatcggcgaaacaccccgaccatgattccggttacggcgaagcaccggcggcggttactccatcggcccccgccagccagcggaactcgaagtcgagcggcaaacccggagctatggtctacggcgttgttgtctacgattttcatgctgagcgaggcgatgagctggaggccaaggcgggcgaggcgatcatcgtcatcgcgcagtcaaaccccgagtggttcgtcgcaaagcccatcggaaggctcggcggtcccggcttgattcccgtctcgtttgtagagattagggacatggcaaccaacaccccggttgctaatccccaggaagcggtgcggaaagcgggcattcccaaggtcgaggagtggaagaagatggctgccgattataagaactcaagcatcacactcgggaagttcgaaacgggaactcaggcgcaaccgatcgagcagggaatggagcgcatgagcctccagcaatctagcgggcgagtgagccaaaactcggggtccaatatgcagcagcaagctcagcagggtggctacgttacgcagcagagccctgttcagcaaacccagccgtcgctgcagaactcgcagctgcccgcgcccgtctcagcccgcattcccaggtactgctttgcggaagacaagtactggttcgttattgaagccgaactggaggacggcagaacctgggagctggcacgatattacgaagatttttacgacttccagatcgcgctcctgaccgaatttcctgtggaggccggaactaccgggaagaagcagcggacgcttccctacatgccgggtcccgtcaactacgtgaccgatgccattacggaagggcgccgccacaacctcgatgcctatgttaagaatctacttgcacaaccgccatacatatcaaaatgcaacctggtcaggcagtttttcgccccaagggagggtgattacgaaattgatccgagcacgctcgacgaggaataccgcctatcagccggctcgcggccctcatctgccgattcacccgccaactccgcttcacgccagccgtcccagcaaaacctgggcggttccggctacggcaaccttggcggcgctcgccaacccggccagcaacagcaacagcaacaaccgcccatggcacgtcaagtctcctctctctcgcaaccatcccagagctccctctcgcctggaatgcagacagctgggtccttcatgaaggttaagctcagctacaatggggatatcattgccatcaaggtgcccaccgacgttacgtttgagagtctgtatgacaagattgtcgaccgcctcaagatcccgcctggcgaggagccccagttatcgtacaaggacgaggcgacaggcgacaagcctccgctgatgagcaatcatgacttggacgtggcgctgcagaggaacgagaaactgctgttgtatgttgagtaa

SEQ ID NO: 2339 - protein, 596 aa, Myceliophthora thermophilia
MRALKALRIGRRSIKDEKGKPHISIPQKSAVAIVPPKKVIRALYDYTAQSPQELSFSRGDFFHVIGRENDPDWYEACNPALPDARGLVPVSFFQALGRNERDSGQSQPDSAQSAKHPDHDSGYGEAPAAVTPSAPASQRNSKSSGKPGAMVYGVVVYDFHAERGDELEAKAGEAIIVIAQSNPEWFVAKPIGRLGGPGLIPVSFVEIRDMATNTPVANPQEAVRKAGIPKVEEWKKMAADYKNSSITLGKFETGTQAQPIEQGMERMSLQQSSGRVSQNSGSNMQQQAQQGGYVTQQSPVQQTQPSLQNSQLPAPVSARIPRYCFAEDKYWFVIEAELEDGRTWELARYYEDFYDFQIALLTEFPVEAGTTGKKQRTLPYMPGPVNYVTDAITEGRRHNLDAYVKNLLAQPPYISKCNLVRQFFAPREGDYEIDPSTLDEEYRLSAGSRPSSADSPANSASRQPSQQNLGGSGYGNLGGARQPGQQQQQQQPPMARQVSSLSQPSQSSLSPGMQTAGSFMKVKLSYNGDIIAIKVPTDVTFESLYDKIVDRLKIPPGEEPQLSYKDEATGDKPPLMSNHDLDVALQRNEKLLLYVE

SEQ ID NO: 2340 - DNA, 144 bp, Myceliophthora thermophilia
atgcccgagggcccgagagaaggcacaaactatcgcacccactggttgagggcaacggatcctgatgcggcatgtttgtggtatcgaaccacaggagattcaggcagtgacaagcctctggcgaggcaatccgaggtgcgctag

SEQ ID NO: 2341 - protein, 47 aa, Myceliophthora thermophilia
MPEGPREGTNYRTHWLRATDPDAACLWYRTTGDSGSDKPLARQSEVR

SEQ ID NO: 2342 - DNA, 1551 bp, Myceliophthora thermophilia
atggcggatattaatgtcgacgttcttgttatcggcgccggcccgaccggtctcggtgcggccaagcgtctcaaccatatcaatgggccgtcctggttgattctggatgccaacgagaaggctggtggtcttgcgtccaccgatgttactcctgagggcttcctctacgacgttggcggccacgttatcttctcgcattacaagtacttcgacgactgcctcgacgaggcccttcccaaggaggatgactggtaccatcaccagcgcatctcgtacgtccggtacaagggcctctgggttccttatcctttccagaacaacatctcgatgctgcccaaggaggaccaagtcaagtgcatcgacgggcttatcgacgccgccatggccgctcaggtctccaccaccaagcccaaggacttcgacgagtggattctgcgggtttgcggcgaaggcgtcgccgatgtcttcatgcggccgtacaactacaaggtctgggctgtgcccacgaccaagatgcaatgcgagtggctcggcgaacgtgtcgcggcgcccaacctcaagctggtcaccaagaacgtgatcctcaacaaggttgccggcggctggggtccgaacgccactttccgattccctgccagagacggaacgggcggtatctggatcgccgtgtcgaacacgcttcccgaggagaagaagcgctatggcgagaagggtgaggtcaccaaggtcgacgcgcaaaagaagattgtcactctgaaggacggcacgacgatcggctacggcaagctcatcaacaccatgcccgtgaaccagcttgtcgagaagatgggcgaccaggagctcatcaacctggccaagggtctctactactcgtccacccacgttatcggcgtgggcatccgtggcgagcgcccggagcggatcggcgacaagtgctggctctacttccccgaggacaactgccccttctaccgcgctaccatcttttccaactactcgccgtataaccagccgcaggctgacgtcaagctgccgactctctaccacgccgacggtagcaagccgaagagcagcgagcccaaggagggcccgtactggtccatcatgctcgaggtctcccagtcgaccatgaagccggttgacgaggagaacctgctgaaggactgcatccagggcctcatcaacacggatatgctcaagcccgaggacgagatcgtctcgacctaccaccgcaagttcaaccagggctatcccaccccgacgctcgagcgggagggcgtcctcaagcagcttctgcccaagctccaggacttggacatctggtctcgcggccggttcggcagctggaggtacgaggttggtaaccaggaccactcgttcatgctcggtgtggaggcggtcgacaacatcgtcaccggcgccgttgagctgacgctcaactaccccgacttcgtcaacacgcgccagaacaatgagcgccggctcgcccagaacttctacagtgcggggtcctcaagcaacctcccctcccggcctgcgcccaaggcttaa

SEQ ID NO: 2343 - protein, 516 aa, Myceliophthora thermophilia
MADINVDVLVIGAGPTGLGAAKRLNHINGPSWLILDANEKAGGLASTDVTPEGFLYDVGGHVIFSHYKYFDDCLDEALPKEDDWYHHQRISYVRYKGLWVPYPFQNNISMLPKEDQVKCIDGLIDAAMAAQVSTTKPKDFDEWILRVCGEGVADVFMRPYNYKVWAVPTTKMQCEWLGERVAAPNLKLVTKNVILNKVAGGWGPNATFRFPARDGTGGIWIAVSNTLPEEKKRYGEKGEVTKVDAQKKIVTLKDGTTIGYGKLINTMPVNQLVEKMGDQELINLAKGLYYSSTHVIGVGIRGERPERIGDKCWLYFPEDNCPFYRATIFSNYSPYNQPQADVKLPTLYHADGSKPKSSEPKEGPYWSIMLEVSQSTMKPVDEENLLKDCIQGLINTDMLKPEDEIVSTYHRKFNQGYPTPTLEREGVLKQLLPKLQDLDIWSRGRFGSWRYEVGNQDHSFMLGVEAVDNIVTGAVELTLNYPDFVNTRQNNERRLAQNFYSAGSSSNLPSRPAPKA

SEQ ID NO: 2344 - DNA, 7515 bp, Myceliophthora thermophilia
atggggtctgtccagggccttgaacagcgcccgcagaaggcggaagaggcgacagtcgcggtcccgcagaccaatggcctagcaagagcagcagcgtcgacggcggcgacggcggcgacggcggcaacggcggcaagcgaggaggtggtgctgctggcatggctcatcgtcctcctccggacgcgggaagaccaccagttcacctttgagtgggcatactaccggacaggaagaacggaagcggagacgggagagggcggcggcggcggggacaagctgtctagcgtggtacggctgtcggcgagcgaggtcgtgccggacctgagcacgcgcgtggaccgggcggcgtcggctattgcgagccggatcgcggcgtcctcgccgaggccgcggactggtcccatctcgctcctgctcagcaccggttctctgtccccccagggcagcagtaagggggaaggagaggaggaggccaacaaggacgagccgtccctacatgtcgaggtacacctcgggggcggcggcgacggcggctcagcggtagaggtccggccggtgtggcacagcgaggacatgctcccgtttacggttcggcggcacgtcgagaacctcaaggagacggtgggccagtgcctgtcgcggcccgaggcggaggtgaagagcctgctggggccgacggagcacgacctggatcagatctgggggtggaacggcgagctgccgccgacgtacgactgctgcatgcacgaggtcgtctcggagcgggcgcggcggcacccggacaaggaggccatctcgtcctttgacgggcggctgacgtacgggcaggtggacgggtactcgacggcgctggcgcggcggctgcgggccgagctgggcgtgcggctgcacgacgtggtgcccgtgtgcttcgagaagtcgaggtggaccgtcgtcgccgtgctcgccgtcctcaaggccggggccaccatggtcatgatggatcccagcctcccgctcggccgcctgcggaacatggccggccaggtgggcgccaaggtcatggtctcgtcgcggaagcagcgcggcctggcggagagcattctcgggtcgggagaggacgaagaaggggggggaggaaaaggagacagcagcagcatcagcagcagcatcagcagcaggatcgtggtggtggaggaggagacgttcgcgtccgtgtccttggagattgacagagtagaggggacaaaagaagaagagctgccgcgggtgccgccgtcgaccatcatgtacatcatcttcacgtccggcagcacggggacgcccaagggggtgcagatctcgcaccggacgtactcgagcagcgcgttcccgcgggcgcgggcggtcgggtacgccgaggactggcgggtgctcgacttcgcgtcgtacgccttcgacgtgagcatcgacagcatgatgctgacgctggccaacgggggctgcctgtgcatcccgtcggacgaggagcggctggacgacatcaacggggccatgcggcggatgcgggtcaactacgccggcatcaccccctcggtggcccgcatcctcgacctcgacgtcatcgactcgctccggggggggctcgggctgggcggcgaggccgtgtcggcgcgcgacgtcgacgtctggggccgccacgcccgcatcgtcatcggctacgggccctgcgagtgcaccatcggctgcaccgtcaacccgagcgcggccacggggcgcggatacatctcgatcggccggggcaacggcgcggccatctggatcgtcgacccggccgaccacgaggtgctcgtgcccgtcggcgccgtcggcgagttgttggtcgagggacccatcgtcggccagggctacctcggcgacccggagaagacggcggcggcgttcgtcggggccccgcgctggctcgccgccggccacggctccggctccggctccggccgctacccgggccgcggcggtcccgaggtgcgcctgtacaagacgggcgatctcgggaggtacgacccggacgggtcgggcggcatcgtcttcgtcggccgcaaggacacgcaggtcaagctgcgcgggcagcgggtcgagctgggcgagatcgagagccagctgagggcccggctgccgcccgagacgaccgtgatcgccgaggtcatcaccccgtcctcgtcctcgtcctcgtcctcgcaggccgttctggtggccttcgtggcaccgcggcccgccaacgcgcacgggcaggaggtggcgctcgagacggtcgaactgggcccggagctgggcgcggccctggcccgggccgaccgcgaggtggccgaggtgctgccgcgctacatggtgccgacggcctacatccccgtcagccgcatcccgacgctcatctcgggcaagacggaccgcaagaagctgcggcagtttggcgccggcgtcgacctgcggcagatgacggccgaggcggcggcggcggcggcggcggcggcggcggtggcggcatcggtggatcatagaaatggtattatcccccgcgccgccaatggtgatgaccatgatgatgatgatgctgtcaatggcgaccagggaaaccagcagcagcagcagcagcagcggcagcagaaatgcccccccctgagcgagacggaggaccggctgcggcatgcctgggcgcgcacgctccggctggacccggagaccatcggggcggccgacaacttctttgcgctggggggtgactcgctggcggccatgcggctcgtgtcggtgtgccgcgagggcgggctcgacctcagcgtcgtcaagacgttttccaacccgacgctgtccgccatggccgcggtagccaaccccctggacttctcttcttcttcctcctcctcctcggccgggtccgggtccgggtccgggtccggctcaggggagtccccagacggcgtggggccggcggggagggggagcggcaggagggagcccttctcgctgatgccccagccggccgaggaggtcatcaaggaggcggctcgggcctgcggcgtcgacgtggccgaggtgcaggacatgtacccgtgcacgccgacgcaggagtctctcttcaccttctcgctcaagtcggccgagccgtacgtcgcccagcgggtggccgccatccccgcccacgtctccctgggcgcgtggaagcgggcgtgggaggccgtggtggcggcgacgcccgtcctgcgctcgcgcctggtgcagatccccgaccgtgccgggctcgaccaggtcgtgctcgccgagggaatccggtggcggcacgttaccatcgccgtcgccgacggcctggaccgctacctcgagcaggaccggcgcgagcgcatggacttgggccagagcctggcccgctacgccatcgtcgaggtcgagggcgagggcggacagcagcgctacatggtctggaccctgcaccacgccgtctacgatggctggtccgagccgctgctgctcgagcaggtccgcgacgcgttgaagaatgatgacaacaaacaccaggaggatattaacggcgatgatgacggcgtcaccaacaacaacaacaataacaagaacgataaaacgagcaaacccaattcccccacccccaccatggccgacttcgtccagttcctgcgcgagacggacgaggccgagacccgggcgttctggcgccgggagctccagggggcgacgggcccgcagttcccgcgggtgccctcgcgcgacttcgtcccgacggccgaccggatcgtggagcggcggatatcgctgccccccggcgccgtctcggccctccccttcacgctggcgaccctgatccgggccgcttgggcgctggtgtcgtcgcgtcacaccctcagcggcgacgtcgtctttggcgagaccctcacgggccgcgacgtcgccctgcccggggtcgaggccatcgcgggccccctgatcgccaccgtccccgtgcgcgtgcgcgtgccctggggtcgccgcggcagcgccggcgccggcaccgtggcttccttcctcgcctccgtccagcgggccgccctcgcccgtacccctttccagcacatgggcatgcagaacatccgccgcgtcagccgcgacgcccagcccctgcccgacgaggaccgcatcgccgccctcgccgacctcggcttcggtccgggcgaccccgtccgcgaggccatccacttcaacccctacccgctcatgctggcctgcggcatcgagccgggagtaggaagccagcacgccttccgcgtctgcgcaagcttcgacggctccctgctgaccgacgaccagatgggccgcgtcctggcccagttcgaggccgcctgcgtcgggctcgccacgggcgacctcgaccggagcctcgacgacgtgtcctgcctcccggccgacgacctggccgcgatctggcgctggaaccgcgacccgcccctcctcaccccggaccgggccaccgggcgcctccggaccgaccccgtcgccgtccgcccgggagccgtctacgctccgcgcgccgtggtcccctgggtctgcgacctggccaacccgtcctccctgctcgccccgatcggctgccccggcgagctgtggctcgagggggggttcctcaccggcgacgacgtggtcgactcgcccccctggctcctggccggtgctccgggcgagactgccggcggccggaggggcaaggtcgcgccgacgggcgacgtcgtcgagctccgcgaggacggccagctggtgtatctgggccgcaaggacggcgacggcgccctggccatcctccggggcctcggagccgatccggccgagctcgaggctcacctgtcggcatacctcccgccctcgtcgactcgtgccgccgccgtgcccgtgcccgtgcccgtgtccgtgtccgctacgaccgaggaggaggaggaggaggaggagagcaacagcaactccgtctcccggcaaaacctgatggttcttatccagcatccccggacgacctcgccggagtccgagtccgagcccagtagcatcatcagggtcctgcccgaggactaccgtgtccccctccccgagggagtattcgaggccgtcgtctgcgctgagctgcccctcgacctcgccggccggctcaagaggctcgacaagtacgcccaaaactcgctcgcgtcccacctggtgccctcggcctacgtcgtcgtcgacaagctgcccgccatcgagggaggggaaggtggtgagatcgatcgccctcttctccagaagctcgcctccagcatcccgcgtcaggtcctcgaccggctccgcgagggcctcgaggccgcgtggaagagcagcagcagcagcagcaacttcctccctacgcagcagcagcagcagcccacgacgacgacaacaatgacaacgacgataaagacaaacgacggcaccacgaacacgacgacaacaacaagtccgacagcggttgcccaagacatcctgcgcaacgcctgggctggcgtcctcggcctcgacgccggccagatcgacgtcgacgacaacttcttccgcctcggcggcgactcggtcctggccatgaagctcgtctcgcgcctgcgcgcccggggacacaagctgaccgtggccgacatcttccggcacatgcgcctcggcgacgccgccaaggtgctcaaggtcaacaacagcagcaacagagcggcgacaacaacctcgttcgtcctctcctggcgacgcctaacaacatctataccaccaccaccgcagctgccgccccggccccgtccccggcccccgcctccgcctcaccgccgccctaccggcctttctcgatgctgtcgtcaccaacaacagcagcagcaggaggaggaggagcagcagcagcaggaggaggaggagggggagggggaggaggaggaggaggaggagacccccagcggttcgtcgaggaggtcgtccggccgcagctcggcgaccccaactgggccgtccaggacgtgtacccggccacggactcgcagatgctcgacgtccgggccaccatccggccgccgcggacgtcggtccagtacacgatgctgtactcggacccgagcaccggcacccggcttcgaccggccgcggctgctccgggcctgcgccgccctcgtcgccgcccacgacatcctgcgcaccgtctttgtccagcacgcctcggccctctaccaggtcgtcatcgacaaggcccatctcgacgtccccgtcgccgtggtccgggccgccgccgagagcgaggatctcgagcacgccgtccgcgcgcactgctcggcccacgtcgagtccgaggaggccttccggctgggctcgcccatggtccacttcttcctcgtcgaggagagtgtcgaggagacggaggaggtgggcggcgagccgagaagaagaagagaaagaagagactgcctggtgatctgcctgtcgcacgcgctctacgacggcgtctcgctgcccgcgctgctgcgcgacctcgacgggctctacacgagcggcgccgccaacacaccgtcgtctaccccttcggccccgttctcctcctacctcgcccgcgcccgcgccgagcccgcccggtccgaggcgctcgcctactggaagaccctcctcgccggctcctccctctccgtcctcccgggccagacgacgacgacgacgaccgctagcagcagcagggccatcttccacttcaaccccgtcccatcctcttcttcttcttcgtcttcttcacccaatggtgatggacccgccctgaacgggacgacaacaacgacgaacgacgactcgcccgtggccacgacggcgacgctgctgacggccgcgtgggcgctggtgctcgcgcggcggctgcgcaacccggacgtcactttcggcgccgtcacgtccgggcgggccgccgaggccgtcaccgttcccgttcccgtcgcctcggggcgaggaggaggaggagaccagggggacgaggcggaggcggcggtggtggcgggcccctgctaccagctgacgccggtgcgggtgccctttgcgcgcggctgggccgccgccgacctgctggcctacgtgcagcggcaggcggccgagtcgtcggcgcacgactttgtcggcttctctgccgtcgccgaggccgtcggctggacgtcgtcttcgtcgatgtggacggggacgaacaacaacaacatcttcttcgactcgatcgtgcaccaccaggactgggaggactttgacgagatgcccttcgccggcggccgctgcgccgtcgacatcctcaacccgcacggcgacgccgcccggccgctcaaggccgtctcctttgtccgcgacggccgcctccacgtcggcgtcgtcggcagcgagcacgacgccgccctcgacgacctcctcgcccagctgaccgccgccgcccagctgttgttgctccgcgccggcggcgactcccgcgagccgctgctccccgacgacgtctttgagactgccagggagtga

SEQ ID NO: 2345 - protein, 2504 aa, Myceliophthora thermophilia
MGSVQGLEQRPQKAEEATVAVPQTNGLARAAASTAATAATAATAASEEVVLLAWLIVLLRTREDHQFTFEWAYYRTGRTEAETGEGGGGGDKLSSVVRLSASEVVPDLSTRVDRAASAIASRIAASSPRPRTGPISLLLSTGSLSPQGSSKGEGEEEANKDEPSLHVEVHLGGGGDGGSAVEVRPVWHSEDMLPFTVRRHVENLKETVGQCLSRPEAEVKSLLGPTEHDLDQIWGWNGELPPTYDCCMHEVVSERARRHPDKEAISSFDGRLTYGQVDGYSTALARRLRAELGVRLHDVVPVCFEKSRWTVVAVLAVLKAGATMVMMDPSLPLGRLRNMAGQVGAKVMVSSRKQRGLAESILGSGEDEEGGGGKGDSSSISSSISSRIVVVEEETFASVSLEIDRVEGTKEEELPRVPPSTIMYIIFTSGSTGTPKGVQISHRTYSSSAFPRARAVGYAEDWRVLDFASYAFDVSIDSMMLTLANGGCLCIPSDEERLDDINGAMRRMRVNYAGITPSVARILDLDVIDSLRGGLGLGGEAVSARDVDVWGRHARIVIGYGPCECTIGCTVNPSAATGRGYISIGRGNGAAIWIVDPADHEVLVPVGAVGELLVEGPIVGQGYLGDPEKTAAAFVGAPRWLAAGHGSGSGSGRYPGRGGPEVRLYKTGDLGRYDPDGSGGIVFVGRKDTQVKLRGQRVELGEIESQLRARLPPETTVIAEVITPSSSSSSSSQAVLVAFVAPRPANAHGQEVALETVELGPELGAALARADREVAEVLPRYMVPTAYIPVSRIPTLISGKTDRKKLRQFGAGVDLRQMTAEAAAAAAAAAAVAASVDHRNGIIPRAANGDDHDDDDAVNGDQGNQQQQQQQRQQKCPPLSETEDRLRHAWARTLRLDPETIGAADNFFALGGDSLAAMRLVSVCREGGLDLSVVKTFSNPTLSAMAAVANPLDFSSSSSSSSAGSGSGSGSGSGESPDGVGPAGRGSGRREPFSLMPQPAEEVIKEAARACGVDVAEVQDMYPCTPTQESLFTFSLKSAEPYVAQRVAAIPAHVSLGAWKRAWEAVVAATPVLRSRLVQIPDRAGLDQVVLAEGIRWRHVTIAVADGLDRYLEQDRRERMDLGQSLARYAIVEVEGEGGQQRYMVWTLHHAVYDGWSEPLLLEQVRDALKNDDNKHQEDINGDDDGVTNNNNNNKNDKTSKPNSPTPTMADFVQFLRETDEAETRAFWRRELQGATGPQFPRVPSRDFVPTADRIVERRISLPPGAVSALPFTLATLIRAAWALVSSRHTLSGDVVFGETLTGRDVALPGVEAIAGPLIATVPVRVRVPWGRRGSAGAGTVASFLASVQRAALARTPFQHMGMQNIRRVSRDAQPLPDEDRIAALADLGFGPGDPVREAIHFNPYPLMLACGIEPGVGSQHAFRVCASFDGSLLTDDQMGRVLAQFEAACVGLATGDLDRSLDDVSCLPADDLAAIWRWNRDPPLLTPDRATGRLRTDPVAVRPGAVYAPRAVVPWVCDLANPSSLLAPIGCPGELWLEGGFLTGDDVVDSPPWLLAGAPGETAGGRRGKVAPTGDVVELREDGQLVYLGRKDGDGALAILRGLGADPAELEAHLSAYLPPSSTRAAAVPVPVPVSVSATTEEEEEEEESNSNSVSRQNLMVLIQHPRTTSPESESEPSSIIRVLPEDYRVPLPEGVFEAVVCAELPLDLAGRLKRLDKYAQNSLASHLVPSAYVVVDKLPAIEGGEGGEIDRPLLQKLASSIPRQVLDRLREGLEAAWKSSSSSSNFLPTQQQQQPTTTTTMTTTIKTNDGTTNTTTTTSPTAVAQDILRNAWAGVLGLDAGQIDVDDNFFRLGGDSVLAMKLVSRLRARGHKLTVADIFRHMRLGDAAKVLKVNNSSNRAATTTSFVLSWRRLTTSIPPPPQLPPRPRPRPPPPPHRRPTGLSRCCRHQQQQQQEEEEQQQQEEEEGEGEEEEEEETPSGSSRRSSGRSSATPTGPSRTCTRPRTRRCSTSGPPSGRRGRRSSTRCCTRTRAPAPGFDRPRLLRACAALVAAHDILRTVFVQHASALYQVVIDKAHLDVPVAVVRAAAESEDLEHAVRAHCSAHVESEEAFRLGSPMVHFFLVEESVEETEEVGGEPRRRRERRDCLVICLSHALYDGVSLPALLRDLDGLYTSGAANTPSSTPSAPFSSYLARARAEPARSEALAYWKTLLAGSSLSVLPGQTTTTTTASSSRAIFHFNPVPSSSSSSSSSPNGDGPALNGTTTTTNDDSPVATTATLLTAAWALVLARRLRNPDVTFGAVTSGRAAEAVTVPVPVASGRGGGGDQGDEAEAAVVAGPCYQLTPVRVPFARGWAAADLLAYVQRQAAESSAHDFVGFSAVAEAVGWTSSSSMWTGTNNNNIFFDSIVHHQDWEDFDEMPFAGGRCAVDILNPHGDAARPLKAVSFVRDGRLHVGVVGSEHDAALDDLLAQLTAAAQLLLLRAGGDSREPLLPDDVFETARE

SEQ ID NO: 2346 - DNA, 1134 bp, Myceliophthora thermophilia
atggcttctcctcagcaaatccgcaccgaacttaccgatcttttcaagatcaaccaccccatccttctcgccggcatgaacgttgccgccggtcccaagctggctgcggccgtcacaaacgccggcggtctcggtgttctgggtggtatcaactacacccccgagatgctcaaggagcagatcgaggagctcaagtcgcacctccacgacaagaatgcgccgtttggcgtggacctcctgctgccccagatcggtggcaacgcccggaaaacaaactacgactacaccaagggcaagcttaatgagctgatcgacatcatcatccaatccggcgccaagctcttcgtctcggccgtcggtgtccccccgaggcacgtggtagagaagctgcacaagcacggcgtcatctacatgaacatgattggccaccccaagcacgtcaagaagtgcctcgacctgggcgtcgacatcatctgcgcccagggcggcgagggtggtggccacaccggcgacatcgccaccacagtcctgatccccgccgtcgtggacgcctgcaagggccacaagtcgcccctcaccggcaagcccgtccaggtcctcgccgcgggcggcatccacaacggccggatgctcgcggccgcgctcatgatgggcgccagcggcgtctgggtcggcacccgcttcgtcctgtccgaggaggccggcgctcccgagtcgcacaaggaggccgtccgcaccgccggcttcgacgacacgatccgcaccctcatcttcaccggccgcccgctgcgcgtgcgcaagaacccttacatcatgaactgggaggaggagcgcgcccaagagatcaaggagctcacctccaagggcaagatcccgtacgaggccgatctcgacaaggtcatgtcgggcgaggccgaggcaactcccgccatcaagggctccggcctcatgaacgccagcgccgatgacgataccgatgtcgacgacctgctcgaccagttccggcctttcctcatgggccagtgcgccgccgttgtgaacgagaagaagccggccaaggagattgtcgacgagttcatcaacgatgcggttgccagcatcaagaagggccattcctacacggcgaagctttga

SEQ ID NO: 2347 - protein, 377 aa, Myceliophthora thermophilia
MASPQQIRTELTDLFKINHPILLAGMNVAAGPKLAAAVTNAGGLGVLGGINYTPEMLKEQIEELKSHLHDKNAPFGVDLLLPQIGGNARKTNYDYTKGKLNELIDIIIQSGAKLFVSAVGVPPRHVVEKLHKHGVIYMNMIGHPKHVKKCLDLGVDIICAQGGEGGGHTGDIATTVLIPAVVDACKGHKSPLTGKPVQVLAAGGIHNGRMLAAALMMGASGVWVGTRFVLSEEAGAPESHKEAVRTAGFDDTIRTLIFTGRPLRVRKNPYIMNWEEERAQEIKELTSKGKIPYEADLDKVMSGEAEATPAIKGSGLMNASADDDTDVDDLLDQFRPFLMGQCAAVVNEKKPAKEIVDEFINDAVASIKKGHSYTAKL

SEQ ID NO: 2348 - DNA, 1137 bp, Myceliophthora thermophilia
atgtccttcacctcgatccctattctggatttgtcgctggccaaggatccggctacgaagcccggattcctatccgacttgcgacacgccttgatggaggtcggcttcctctatctcaaaaacgtcggcatcccggatgagctattcaagcgggtgatcgaggagggcaaggccttcttcgacattcccatggaggaaaaactcaagatcgagatgaagaacgcgccatccttccttggctactcacgcctgtcggcagagatcactgcgggcgcaatcgaccatcgcgagcagattgacctgtcgacggagcacccgctgcccgggccagacgcaccgaggtactacaacttgctggcgccgaaccagtggccgtcaccggaggtgctccccgacttccggcccgtcttcaccgagtacatgaagcgcatgggcgagatctccatctacttcaccagtctgatcgccgaggccatcgagcttccgagcggggctttcaacaagtactttgacgccgaccagcagcacaagctcaagattgtcaagtacccggacgtgggcgagctgggcgcggaagggaaaggcgggaaccaaggggttgggccgcacaaagatagcatgcttacctcgtacctcctccaagccacgcaccaccggggcctgcaggtgcagaacatgcgcggcgagtggatcgactgcccgcccatcgacggcacgctggtggtggccatcggccaggggctcgaggcgctcacgcagggcgtgtgcgtcagcacgacgcaccgggtgctgtccccggccgcgggggagggcccgcgcttctcgatccccttcttccagggcgtcagcggcgacgcgagcttcgaggacctcgagaccgtcggggtcgggcaggtgcccgagcacgtccgggagcagcggagggcggtgctggagcgcaacggcggcaggcggctggacgacgtcgagttcaccttccgcaggggcggcgcggcgcgcacgctgggcgaggccacgctgcggaaccgcgtcaagagccacccggacgtcggggagcgctggtacccggacattctggagagcctgagggcggagcagcagcagaaggcggggaatgtgggggttgcggcggcataa

SEQ ID NO: 2349 - protein, 378 aa, Myceliophthora thermophilia
MSFTSIPILDLSLAKDPATKPGFLSDLRHALMEVGFLYLKNVGIPDELFKRVIEEGKAFFDIPMEEKLKIEMKNAPSFLGYSRLSAEITAGAIDHREQIDLSTEHPLPGPDAPRYYNLLAPNQWPSPEVLPDFRPVFTEYMKRMGEISIYFTSLIAEAIELPSGAFNKYFDADQQHKLKIVKYPDVGELGAEGKGGNQGVGPHKDSMLTSYLLQATHHRGLQVQNMRGEWIDCPPIDGTLVVAIGQGLEALTQGVCVSTTHRVLSPAAGEGPRFSIPFFQGVSGDASFEDLETVGVGQVPEHVREQRRAVLERNGGRRLDDVEFTFRRGGAARTLGEATLRNRVKSHPDVGERWYPDILESLRAEQQQKAGNVGVAAA

SEQ ID NO: 2350 - DNA, 654 bp, Myceliophthora thermophilia
atgggctgctcaaaccagaagtaccctgctatctttgatagggatcatatcgaggagtatatacgccggcccgtcacggaatgtgagcggtttttttatgacggccggcatcatccgctagacaagacgccgcatcacctgccaagccgtcagcgggagaggttccgcccgccccgggaacggagtcgttaccctctcgctccatcattgggagcacagaaaagtcagatggtgggcagaggcagaagagagcacgccttcgcggcctgccaggggatcactcgttcgatgattggtaatgagtggggtcttggtttgcttactctacaagtacggattagagacccatatcatcgggtttctcgatgtctcagctcagcagcgagcggaactccatcactttttgtgcatattgcctccccgccaagagaggtcgggaaccatcagctagctccgcttaagtttaaatatagatatttacccatcgccggggctgcgggtgctgccgacctgcaaccgacactaaccttttcttacgcttctccacccctcgactcgccccctcccctctctgccttcataaccgtgagccagcctggagacaattgctacacagtactagtaaccaaatgggtgacattttcgtacctctag

SEQ ID NO: 2351 - protein, 217 aa, Myceliophthora thermophilia
MGCSNQKYPAIFDRDHIEEYIRRPVTECERFFYDGRHHPLDKTPHHLPSRQRERFRPPRERSRYPLAPSLGAQKSQMVGRGRREHAFAACQGITRSMIGNEWGLGLLTLQVRIRDPYHRVSRCLSSAASGTPSLFVHIASPPREVGNHQLAPLKFKYRYLPIAGAAGAADLQPTLTFSYASPPLDSPPPLSAFITVSQPGDNCYTVLVTKWVTFSYL

SEQ ID NO: 2352 - DNA, 567 bp, Myceliophthora thermophilia
atggagcggataatcggaaccctgcagatgcgaaagagtggaattcagctccacagcttgtcgcttgagacatgcgaagccggaccggatgtcggagtcacctcgatcacgaaacaaaatagacccaagaaaaaaacggcgaatttgtcagtcttggcccgcttcgactggatcaaaagggatattcgatacgctcttctgctgtggctatcccctacttgtccacgggtcctgcggtatttctccgggggcaattaccgccttgcgacgcatgcacgttggcaagagctttctcggctcgccgcgaccgacctgatcttgctccaccaccaccatcccaacaagatgcgaatgccccgcagcggctggatcaacagccctgcgttacctctgagcccttccgaccttagatgctgcagagggtccaaccccgagatgagattagccaaattaccgggagagccttcgacatggtgtccccacgggttcggctatgggcgcgatgcttggctgcttctcctggaattgaaatgggcacttggtaaagcgcttgggttgtggaggtga

SEQ ID NO: 2353 - protein, 188 aa, Myceliophthora thermophilia
MERIIGTLQMRKSGIQLHSLSLETCEAGPDVGVTSITKQNRPKKKTANLSVLARFDWIKRDIRYALLLWLSPTCPRVLRYFSGGNYRLATHARWQELSRLAATDLILLHHHHPNKMRMPRSGWINSPALPLSPSDLRCCRGSNPEMRLAKLPGEPSTWCPHGFGYGRDAWLLLLELKWALGKALGLWR

SEQ ID NO: 2354 - DNA, 501 bp, Myceliophthora thermophilia
atggctcctctcgaagtcggctcccctttccctgagggtgtgaccttctcgtacatccaccccacgggcagcctcgacctcacttcttgcggcctgcccaccaagtttgaggccagcaaggagttccaaaacaagaaggcggtcctggtcgccgtccccggcgccttcacgcctacctgccaggagcagcacatcacgtcgtacattgccaatctggagaagctccgggccaagggcgtcgacagcatcgtcttcatcgcgtccaacgacgccttcgtcatgtcggcctggggcaaggccaacggcatcaaggacgagtccatcctcttcgcctccgacgatggcgccgcgttcagcaagagcatcggctgggcgtccggggacaggactgggcggtacgctgttgtgatcgaccacggcaaggtggtctatgccgcgatcgatacccagcggggaagcattgagaactctggggccgaggccgttttggccaagctttga

SEQ ID NO: 2355 - protein, 166 aa, Myceliophthora thermophilia
MAPLEVGSPFPEGVTFSYIHPTGSLDLTSCGLPTKFEASKEFQNKKAVLVAVPGAFTPTCQEQHITSYIANLEKLRAKGVDSIVFIASNDAFVMSAWGKANGIKDESILFASDDGAAFSKSIGWASGDRTGRYAVVIDHGKVVYAAIDTQRGSIENSGAEAVLAKL

SEQ ID NO: 2356 - DNA, 1254 bp, Myceliophthora thermophilia
atggcgctcacatatcaacagtccaagttggtcaaggacaccataccggtcctgcgggagcgcggagagcagatcacgaccacgttctacaggaacatgctgcgggaccacccggaactccgcaactacttcaacagcgtcaaccagaagaacgggcgccagccgcgggcgctgactgcggtcatcctcagttttgcctccaacatcaaccacatcagcgaactgatccccaagttcgagcgcatgtgcaacaagcactgctcgctcggcatccagccggagcactacgacattgtcggaaaatatctcctccaggcctttggcgaggtgctcggtccggacatgacgccggccgtcttcgccgcctgggagaaggcatactggctgctggccaagatgctcatcgggcgcgaggcgcatctgtacagggacttcgagccgtggacgtcgtggcgcaagttcaaggtcgaccgggtggtacccgagacggacgacatcttctcgttctacttggtgccggaggacggcaagaagctgcccaagttcctgcccggccagtacgtctcgctgcgggtccagggcccggacggctacatgcaggcgcgccagtactcgctcagcgacgcctggaggccggactactaccgcatcagcgtcaggcgggacgagggcgccccctacgccaactcggtctcccgctccttcttccacccgggcctcgtctccaacctgctcatcgacaagatggggcccgggtccctggtcgagctgtcgcacccggccggcgacttcttcctcgacgtccacaacaccagcaccatgccgctcgtcctcatctcggccggcgtcggcgtcaccccgatggtggccatcgccaacaccgtcgtccacctgcagccgggccgccccatctcgtggatccacggctcgcgccggtccgtccccttcgaggaccacgtcgcccagctgcggcgcgagcacggtcccagcttccgcacaaagatcttcaagtcccgcccggcctcgggcgacacccccggcgtcacctacgactacgcctcccgcgtcgacctcgcccgcctcgacccggagcaggacctgcacctgcaccgcggcggcgccgagtactacatctgcgggcccgagcagttcatgcttgacgtggtcgactatctcacggctaagggggtcgggcccgaacgcatcaagattgagcagttctcgaccggcgatctggcgatgaagcgtccgtga

SEQ ID NO: 2357 - protein, 417 aa, Myceliophthora thermophilia
MALTYQQSKLVKDTIPVLRERGEQITTTFYRNMLRDHPELRNYFNSVNQKNGRQPRALTAVILSFASNINHISELIPKFERMCNKHCSLGIQPEHYDIVGKYLLQAFGEVLGPDMTPAVFAAWEKAYWLLAKMLIGREAHLYRDFEPWTSWRKFKVDRVVPETDDIFSFYLVPEDGKKLPKFLPGQYVSLRVQGPDGYMQARQYSLSDAWRPDYYRISVRRDEGAPYANSVSRSFFHPGLVSNLLIDKMGPGSLVELSHPAGDFFLDVHNTSTMPLVLISAGVGVTPMVAIANTVVHLQPGRPISWIHGSRRSVPFEDHVAQLRREHGPSFRTKIFKSRPASGDTPGVTYDYASRVDLARLDPEQDLHLHRGGAEYYICGPEQFMLDVVDYLTAKGVGPERIKIEQFSTGDLAMKRP

SEQ ID NO: 2358 - DNA, 819 bp, Myceliophthora thermophilia
atgaactgtactaacactggcatgcgtaacagcaagagggaccaagcgcatgcttttaccatcattttgtgcgcgagctggagcccagcgcgatcgaggatcccaatcagcaagcttccccgggcgccatcaacatttggcggcgccggatttgtggggtgcatgtacactacgcagtacctatgtgaggcatgtgctgtattgtatatgcatactcagtactcagtacttgacatctttatgtacataccgcggacggataacgctacagcagcactccgtacagactacgctaagtcactgtcaacgggtgggttgagacccgagtgggagatgggggtggatctgccgttgtattctggacgtaaagaaaagctttggcgcagtggagttggcgggccagctcaggactatagtatgctgttacatgcatacaaagtagtctatggttttaacttttgcgcctttatcctgccaggcaaggagctcccgggtaggatgatgccgtccgagttgcgtggagacaacccgatacggacgaggatcagcggtggatatctcttgcaaacttgtagcgtagcagaagcgccgtgcgttactgcgtactgtaactgcagtcgcacataccaggcatgctatgctatcggactaacggctcagctcacaagagaacctcgcggccgccgcatatcatcatcggcagagagagacgacgcgtgttttagatcggtcgctgcgaggctacagcgtaagaattcgtggaatgactggggttccatacggatgctctgtggttgctcatctttgatgcaggtctaa

SEQ ID NO: 2359 - protein, 272 aa, Myceliophthora thermophilia
MNCTNTGMRNSKRDQAHAFTIILCASWSPARSRIPISKLPRAPSTFGGAGFVGCMYTTQYLCEACAVLYMHTQYSVLDIFMYIPRTDNATAALRTDYAKSLSTGGLRPEWEMGVDLPLYSGRKEKLWRSGVGGPAQDYSMLLHAYKVVYGFNFCAFILPGKELPGRMMPSELRGDNPIRTRISGGYLLQTCSVAEAPCVTAYCNCSRTYQACYAIGLTAQLTREPRGRRISSSAERDDACFRSVAARLQRKNSWNDWGSIRMLCGCSSLMQV

SEQ ID NO: 2360 - DNA, 1062 bp, Myceliophthora thermophilia
atggcgacagcagcaaagattcccgtcattgacctctcgggtgacgaccagactcaggtcgccaaggacctggttgaggccgccatcgaacatggcttcgtttacatcagaaatactggcaaggacataccggtcgaggcgatagatggagcatttgcggtgtccaagaagctcttcgacgcgcccctgagcgagaagcaagcatgcacgatccagaagaacaaccgcggttggtcggccatgaactacgaaacgcttgatccggcgaaccagcgtataggcgacttcaaggacaacgtcagggcgttcaactttggcgagttcgtcgacgggaaagcgcagcagcctatcccgcccaccatcgcgcccgacgaggcccagatcagcgccttccgcgacctctgcaacgccctctcgctcaagctcaataccctcctcggtatcggcctgggcgtctcgcccccggacttcttcacctcggcccaccttcgctcccgcgggccctcgggtagcatcctgcgcttcctgcgctaccccccgcgcagcgccatcaccgagctcgcccccggggccgacgacgtccgcgccggagcccactccgactacggctcgctgaccctgctcttccgcctgcgcggccagcccggactcgagatcctgctgcgcgacggcaaggcctggtctcccgtccccgtcgtcccgcccggcaccgaggacgacccggccccgcccatcctgatgaacatcggcgacctgctatcgtactggacgaacggcctgctgcggagcaccgtccaccgcgtcgtcttcccctccggggactccccggccgggctggaaggggaggcggaccacgggccgcggtactcgatcgcgtacttctgccatccctttggcgggaccgagttgggtcccgtgccgagcgagcgggtgaaggagtacaagggaggcctggcggaggggaatccatatgccgagcgtaaggtgatgacggcggatgagcatctgaggatgagactggaggcaagctatacgcagttgtacaaagaggggaaggcgtga

SEQ ID NO: 2361 - protein, 353 aa, Myceliophthora thermophilia
MATAAKIPVIDLSGDDQTQVAKDLVEAAIEHGFVYIRNTGKDIPVEAIDGAFAVSKKLFDAPLSEKQACTIQKNNRGWSAMNYETLDPANQRIGDFKDNVRAFNFGEFVDGKAQQPIPPTIAPDEAQISAFRDLCNALSLKLNTLLGIGLGVSPPDFFTSAHLRSRGPSGSILRFLRYPPRSAITELAPGADDVRAGAHSDYGSLTLLFRLRGQPGLEILLRDGKAWSPVPVVPPGTEDDPAPPILMNIGDLLSYWTNGLLRSTVHRVVFPSGDSPAGLEGEADHGPRYSIAYFCHPFGGTELGPVPSERVKEYKGGLAEGNPYAERKVMTADEHLRMRLEASYTQLYKEGKA

SEQ ID NO: 2362 - DNA, 1122 bp, Myceliophthora thermophilia
atggccacacccacgaagacgacaacgaggacgacgacgacgaccaccaccaccaccaccaccgcggccacgggtcccatcaccacccctctgacgaccctcctggggatccgtcacccgatcctgctggccggcatggcgcgcgtgtctaacgggcggctggccgcggccgtgtccaacgcgggcgggctgggggtcatcgggggcttcatgtacacgccggagcagctgcgcgagattgtggcggagctcaaggcgcacctgcggtcgccggacctgccgttcggcatcgacctggcgctgccccaggtgggcgggtcggcgcgcaagacgaaccacgactacacgggggggcggctggacgagctggtcgacgtcacgatcgagtcgggcgcccgcctgtttgtgagcgccgtcggcgtgcccccgcgccgcgtcgtcgaccgcctgcacgccgccggggtcctcgtcatgaacatggtcgggcaccccaagcacgccgtcaaggcgctcgacctcggcgtcgacatggtctgcgcccagggcggcgagggcggcgggcacacgggcgacgtggccaacagcgtgctgatccccgccgtcgtggacgtggccaagcggtaccggccccagctgctgggcggggaccggccggcgctcgtcctggccgcggggggcatctgcgacggccgcgggctggcgagctcgctgatgcagggcgcggtcggcgtctgggtcggcacgcgcttcgtcgccagcgtcgaggccggctgcagcgaccagcacaaggaggccgtcgtgagctgcggcttcgaggacacggagcggaccctcgtcatcagcggccgccccctgcggatgaagaccaacgactacatccgcaagtggcacgcccagcccgacaagatccgggagctgtgcagcaagggcatagtgcccctcgagcacgacctcgaccagggcaacgaggtcgacatgccgcacctcatgggccaggtcgccggcgccatcacaaagatccagccggcgggcgagattgtcgacgagatggtggccgaggcggtcgagatgctcaagctggccaatgtatatctgaacggggggaaggcgagcaagttgtaa

SEQ ID NO: 2363 - protein, 373 aa, Myceliophthora thermophilia
MATPTKTTTRTTTTTTTTTTTAATGPITTPLTTLLGIRHPILLAGMARVSNGRLAAAVSNAGGLGVIGGFMYTPEQLREIVAELKAHLRSPDLPFGIDLALPQVGGSARKTNHDYTGGRLDELVDVTIESGARLFVSAVGVPPRRVVDRLHAAGVLVMNMVGHPKHAVKALDLGVDMVCAQGGEGGGHTGDVANSVLIPAVVDVAKRYRPQLLGGDRPALVLAAGGICDGRGLASSLMQGAVGVWVGTRFVASVEAGCSDQHKEAVVSCGFEDTERTLVISGRPLRMKTNDYIRKWHAQPDKIRELCSKGIVPLEHDLDQGNEVDMPHLMGQVAGAITKIQPAGEIVDEMVAEAVEMLKLANVYLNGGKASKL

SEQ ID NO: 2364 - DNA, 1212 bp, Myceliophthora thermophilia
atgttctgggcttctcccggttcctctgttctccaactcccttctcggcgcgggggtttcctgctaactcgaacccaccacacccggggacagttccgcaatccattacccgacgacaagcgcttcccggcgggttgcccctcccccacattgagcgcggattgccgggccacttgccccaatatttacatctctcggccccaaacaaggaaactctcgagcatcaacgccagcaactcgaggaatcgaatcgaccaccaagctcaagtagtcaacaagatggcggccgaaaaaacggctgcgtgggagaagtcaattcagcggaacccccatccagacttcaagaaagtggaagcctcccgcccgccattcgactcttctaagaccttcaccttcactcagaccccggatcccaactggcagttcggatccggcgccaactccacgcactgtgcggccaactcgtgctcagccgcggggaaagaccaccaagaagaagaaaagaaacacgtcgtcatcgacccgtacgcgccagaccggccggcggggttcaactacaagctcctcatctcggccgtcgtgccgcggccggtcgcctttctctcgacccgctcggccgacggcgccaccaccaacctggccgtcttcagctacttccagatgatcgggcacgacccgccgctcttcgtcatcggcttcgcctcgcccctcgacgccgcccgcgccaaggactcgctgcgcaacctgcacgagcgccgcgagtgcgtcatcaacatgatcagcgagggcttcgtcgaggccgccaacagcaccagcgtcaacgccccctacggcgtcagcgagtgggacgtcagcggcctgacccccgcctacgactgcgagacggtcggctgcgcccgcgtcaaggaggccgtcttctccatcgagggcaagctcgagagcctgagggagtttgagagccgggccaccccgggcaaggtgacggccaccatggccgtcatcgagggcacgcgcttctgggcgagggaagacgctatcaatgaggagaggaacctgatcgatcccaaggtactgcgtcccatatcgaggttgggaggcatcacgtatggccgaacgaccgaagcgttcgagctgccgcgaccggactttgagaaggacgtgggcggaatggagggcatgaagaagttggagagcaggcatcctcccaactga

SEQ ID NO: 2365 - protein, 403 aa, Myceliophthora thermophilia
MFWASPGSSVLQLPSRRGGFLLTRTHHTRGQFRNPLPDDKRFPAGCPSPTLSADCRATCPNIYISRPQTRKLSSINASNSRNRIDHQAQVVNKMAAEKTAAWEKSIQRNPHPDFKKVEASRPPFDSSKTFTFTQTPDPNWQFGSGANSTHCAANSCSAAGKDHQEEEKKHVVIDPYAPDRPAGFNYKLLISAVVPRPVAFLSTRSADGATTNLAVFSYFQMIGHDPPLFVIGFASPLDAARAKDSLRNLHERRECVINMISEGFVEAANSTSVNAPYGVSEWDVSGLTPAYDCETVGCARVKEAVFSIEGKLESLREFESRATPGKVTATMAVIEGTRFWAREDAINEERNLIDPKVLRPISRLGGITYGRTTEAFELPRPDFEKDVGGMEGMKKLESRHPPN

SEQ ID NO: 2366 - DNA, 3129 bp, Myceliophthora thermophilia
atggttgactcaggagagatataccgcctgacccttcccaccgggaccactctggttgtgagctcccaggcgctcgtccatgagctatgtgatgacaagagattcaaaaagcccgtcgcggctgccctcgccgaggttcgaaacggcgtcaacgatggcctcttcaccgctcgggaagaagagcccaactggggcatcgctcaccggatcctgatgcctgcgtttggaccggcctcgatccagggcatgttcaccgagatgcacgagattgcgtcgcagctggcgctcaagtgggcgcgccacggtccggacacgcccatctttgtaacagatgacttcacacgcctgacgctcgacactctcgccctctgcaccatgaatttccgcttcaactcgtactaccacgacgagctgcatccgttcatcaacgctatgggcaacttcctcacagagtcgggtgcaagggccatgcggccggccatcacctccatcttccaccaggcggcgaaccgaaagtactgggaggatatcgaggttctgcggaagacggcccagggagtcctggatacgcgaaggaagcaccccaccaaccggaaggacctcctatccgccatgttggacggcgtagacgcaaaaaccggccagaaactgagcgactcgtccatcatcgacaacctcatcaccttcctcattgccggtcacgagacgacctcgggcttgctgagcttcgccttctacctcctgatcaagcaccaggatgcgtaccgcaaggcgcaagaagaggtggacagggtcataggcaagggaccgatcaaggtcgagcacatcaagaagcttccttacattgccgccgtcctccgcgagacgctgcgcctctgtcccacgatcccaataatcaatcgagcggccaagcaggacgaggtgattgggggcaagtatgccgtcgcaaaggatcagaggctcgctcttctcctggctcagtctcacctggaccccgctgtctatggagagactgcgaaacagttcatcccggagcggatgctggacgagaactttgagcgcctgaacagggagtatccagactgttggaagccgttcggaaccggcatgcgggcatgcatcggccgcccgtttgcctggcaggaggcggtcctcgtcatggccatgctgttgcagaattttgattttgtcctccacgacccctactacgagctgcattacaagcagaccctcacaaccaagcccaaggacttctacatgcgggccattcttcgagacggcctgacggcaaccgagctggagcaccggctcgccgggaacgcggcctcggtcgcgcggtcgggcggcggcggcggcggcccctccaagccgaccgcacagaagacctctcccgccgaggccaagccgatgagcatcttttacggctccaacacgggcacgtgcgagagcctggcccagcgcctcgcgaccgacgcggcgtcccacgggtacgcagccgccgccgtcgagcccctggacacggcaacggagaagctgccgaccgaccggcccgtggtgatcatcacggcctcctttgaaggtcagccgccggacaacgcggccaagttctgtggctggctcaagaacctcgagggcgacgagctgaagaacgtctcttacgccgtcttcggctgcgggcaccatgactggtcccagaccttccaccgcattcccaagctcgttcaccagacgatgaaggctcacggcgcctcgcccatctgtgacgaggggttgacggacgtggccgaggggaacatgtttaccgactttgagcagtgggaagacgacgtgttctggccggccgtcagggcgcggtacggagccgccggggctgtggccgagaccgaggatgcgccgggctccgacggcctcaacatccacttctccagcccccggtcgtccaccctccgccaggacgtcagggaggcgacggtcgtcggggaggcgctactcaccgctcccgacgccccgccaaagaagcatatcgaggtccagcttcccgacggcgcgacgtacaaggtcggggactatctcgccgtgctccccgtcaactccaaggagagcatcggccgcgtcatgcggaaattccagctttcctgggactcgcacgtcaccattgcctccgaccgctggaccgccctgccgacgggcacgccggttccggcgtacgatgtgctcgggtcctatgtcgagctgtcacagccggcgacgaagagggggatcttgcggctcgccgatgccgctgaagacgaagccactaaggcggagctccagaagcttgcgggtgacttgtacaccagcgagatcagcctcaagcgcgcctccgtcctcgacctcctggaccgctttccttccatctcgcttccgttcggcactttcctctccttgctcccgcccatccgcccgaggcagtactcgatatcctcctcgccgctcaacgacccctcgcgggcaacgctcacgtactcgctgctcgactcgccgtcgctggccaacccgtcccgacggttcgtgggcgttgcgacctcgtatctctcctccctcgtcaggggcgacaagctcctggtctcggtacggcccacccacacggcgttccggctgccggacgaagacaagatgggcgagacggccatcatctgcgtcggtgccgggtccgggctcgcgccgttccggggcttcatccaagagcgcgccgcgctcctcgccaaggggacgcagctcgccgccgcgctgctcttctacggctgccgcagcccggagaaggacgatctctaccgcgacgagttcgacaagtggcaggagtcgggcgcggtcgacgtccggcgggcgttcagccgcgtcgactcggacgacacggaggcgcgcgggtgcaggcacgtgcaggacaggctgtggcacgaccgggaggaggtgaaggcgttgtgggaccgcggcgccagggtgtacgtctgcggctcgcggcaggtcggagaaggggtcaagacggccatgggcagaatcgtgcttggtgaggaggacgccgaggacgcgatctcaaagtggtatgagaccgttcggaacgaccggtatgccacagatgtctttgactaa

SEQ ID NO: 2367 - protein, 1042 aa, Myceliophthora thermophilia
MVDSGEIYRLTLPTGTTLVVSSQALVHELCDDKRFKKPVAAALAEVRNGVNDGLFTAREEEPNWGIAHRILMPAFGPASIQGMFTEMHEIASQLALKWARHGPDTPIFVTDDFTRLTLDTLALCTMNFRFNSYYHDELHPFINAMGNFLTESGARAMRPAITSIFHQAANRKYWEDIEVLRKTAQGVLDTRRKHPTNRKDLLSAMLDGVDAKTGQKLSDSSIIDNLITFLIAGHETTSGLLSFAFYLLIKHQDAYRKAQEEVDRVIGKGPIKVEHIKKLPYIAAVLRETLRLCPTIPIINRAAKQDEVIGGKYAVAKDQRLALLLAQSHLDPAVYGETAKQFIPERMLDENFERLNREYPDCWKPFGTGMRACIGRPFAWQEAVLVMAMLLQNFDFVLHDPYYELHYKQTLTTKPKDFYMRAILRDGLTATELEHRLAGNAASVARSGGGGGGPSKPTAQKTSPAEAKPMSIFYGSNTGTCESLAQRLATDAASHGYAAAAVEPLDTATEKLPTDRPVVIITASFEGQPPDNAAKFCGWLKNLEGDELKNVSYAVFGCGHHDWSQTFHRIPKLVHQTMKAHGASPICDEGLTDVAEGNMFTDFEQWEDDVFWPAVRARYGAAGAVAETEDAPGSDGLNIHFSSPRSSTLRQDVREATVVGEALLTAPDAPPKKHIEVQLPDGATYKVGDYLAVLPVNSKESIGRVMRKFQLSWDSHVTIASDRWTALPTGTPVPAYDVLGSYVELSQPATKRGILRLADAAEDEATKAELQKLAGDLYTSEISLKRASVLDLLDRFPSISLPFGTFLSLLPPIRPRQYSISSSPLNDPSRATLTYSLLDSPSLANPSRRFVGVATSYLSSLVRGDKLLVSVRPTHTAFRLPDEDKMGETAIICVGAGSGLAPFRGFIQERAALLAKGTQLAAALLFYGCRSPEKDDLYRDEFDKWQESGAVDVRRAFSRVDSDDTEARGCRHVQDRLWHDREEVKALWDRGARVYVCGSRQVGEGVKTAMGRIVLGEEDAEDAISKWYETVRNDRYATDVFD

SEQ ID NO: 2368 - DNA, 1152 bp, Myceliophthora thermophilia
atgacggtcgacattaaacatcttgacgctcatgagcagccgtcagaggagcttagggcaaagtggaaggccgtctctaggacggagccaaaggacgtacggagcgaagatgtcgacgacctgcaagacccaagcagcgccgccgaattccgtgtcgcgggcagcatttcctccgaggtcttgaatcgctcgttccggcacctctgccccggcgataccctcgaattccaagccaccaaggacgtcccgatatactatcacccccttctaccaggcctcttgatcattccttctctcgtcccaccagaggtacaaaagatccttctcagacgcctcatccaccgcgatctcagcaatcccgtccaccagaccaatctccacctccacttccatcttccctacccagaacccgtcacgggcggcggcgacgctgacgacgtcgacggtaacaacaacaacaacgacaacgacaaggacaacgacaaggacatctcgttcttctcgtaccccccatcttccgcaacctcctttagccccaaagaccccagcgtgcacaagccgctgaccatccgccaagcgctcgagcgcaagctgcactgggtgacgctgggcgggcagtacgactggaccaggcgtgtgtacccggagagcagcgaggcgggcgggcggtcgccgccggccttcccggcggacgtggccggcttcctcgagacgctgttccccgagacgcgcgccgaggcggccatcgtcaacttctactcccccggcgacaccatgatgatgcaccgggacgtgtcggaggagacggacaagggcctggtcagcctgagcttcgggtgcgacggcctcttcatgatcgcgcccaacgaggagggcgaggccgtcgtcgtcccggggaggaacgacggcagggaggaggaggaggagaagaagaagaagaaggagttcctcctgctgaggctgaggtcgggcgacgccgtctacatgaccaaggagtcgcgctttgcctggcacggcgtgcccaaggtgctcaagggcacctgtccggactatctggaggactggccggccgagggggggaggtacgaagagtggagggggtggatgcggaacaagaggatcaacttgaatgtgaggcagatgagggattga

SEQ ID NO: 2369 - protein, 383 aa, Myceliophthora thermophilia
MTVDIKHLDAHEQPSEELRAKWKAVSRTEPKDVRSEDVDDLQDPSSAAEFRVAGSISSEVLNRSFRHLCPGDTLEFQATKDVPIYYHPLLPGLLIIPSLVPPEVQKILLRRLIHRDLSNPVHQTNLHLHFHLPYPEPVTGGGDADDVDGNNNNNDNDKDNDKDISFFSYPPSSATSFSPKDPSVHKPLTIRQALERKLHWVTLGGQYDWTRRVYPESSEAGGRSPPAFPADVAGFLETLFPETRAEAAIVNFYSPGDTMMMHRDVSEETDKGLVSLSFGCDGLFMIAPNEEGEAVVVPGRNDGREEEEEKKKKKEFLLLRLRSGDAVYMTKESRFAWHGVPKVLKGTCPDYLEDWPAEGGRYEEWRGWMRNKRINLNVRQMRD

SEQ ID NO: 2370 - DNA, 1638 bp, Myceliophthora thermophilia
atggcgtcaataattagttcccaagtgatcgaatcactgaccccgggccgattcatcgcggcccttattctcctcaccatcagctccttcgtcgtcgacttcgcacggaagcccctctattcgaaggcgcttcctcgagttgggccaggcggtagctttctagggacactcaagagctgggcctacttcctaacccgttatcacacctgggtcgcagagggctacgagaagtactccaaacaaggacgcgccttcgtggttccctctgccccttaccgcccacaggagattgtcataccccgcgcacaggcagcatggatgctcgagcaacccgaccgcgtgctatcgaccaaggaagcgcatcgggacaccctgcacaacgactaccagttcttcggggtggatgacgagttccctatccggactatccacaagcaccttgcacgcaacatcgcctctcttatacccgccgtacaggaggaagtccacgccgcgattgacgatacttttgggaaggatgttgagaactggacatctctcaatctatgggaagcttggttaggaatcatcccgcgggtgaccaaccgaatccttgtcggcgccccgttgtgcaggaatcaggagttcctcgactgtcaagtcggtttcgccaatgatgtggtgcgcaacggtttcctgctggacatggtcccgcacatcttccagccgcttgtcgccccgttcattgttcttcccaattggtggcactggcgcaaatcctactcccatgctaggcccgtgatcgaacaacggctgtacgacttggagcgtcaggagtcgggcgacgacccggccggcgacgattggaaggcgccggaggacatgctaacttggctgatccggcaagccaaagcggagggtctcaccagcgaacttaacccggagatgctttccaagagaatcctccccgtggagttcgcggcgatacatacgacagtcacgacgggcttcaacctgatcctcgatctgctgtcgtcggacccttcgctgggatacatcgacaccatccgagaggaaacgtcccgcgtcttcgccgaagagaacggcgcctggaccaagcagggtctcgcccgcctccaccgcaccgacagcgccatcaaggagagcatgcgcttcagccactttgccagagcgctcacacaccgcaaggtggtcgctcccgagggcgtgacgaacccggtcgaggggtggcatgcgccgtacggagcgttcctgatgctggatctggcggggacgcaccgcgacccggagctgtacccggagccggacaagtacgatgcctggcggttctcgcgccagagagaggcctacgaggcgaagtcggccgaggagaagggcgatgccgaagaggcgatgcgggtcaagaagttgggcatggttaccacgagcgcggagtttttggccttcagccacggcaggcacgcctgccccgggaggttcttcgttgcacacgaactcaagatgatcttggcctatttggtgcagaactatgagttcaaaccgttggccgagaggccgaagtcgatatggattgggtcgagtttcattcctgaagtacaggcgaggatcgaagtgcggaggcggaagaggcgtgtatga

SEQ ID NO: 2371 - protein, 545 aa, Myceliophthora thermophilia
MASIISSQVIESLTPGRFIAALILLTISSFVVDFARKPLYSKALPRVGPGGSFLGTLKSWAYFLTRYHTWVAEGYEKYSKQGRAFVVPSAPYRPQEIVIPRAQAAWMLEQPDRVLSTKEAHRDTLHNDYQFFGVDDEFPIRTIHKHLARNIASLIPAVQEEVHAAIDDTFGKDVENWTSLNLWEAWLGIIPRVTNRILVGAPLCRNQEFLDCQVGFANDVVRNGFLLDMVPHIFQPLVAPFIVLPNWWHWRKSYSHARPVIEQRLYDLERQESGDDPAGDDWKAPEDMLTWLIRQAKAEGLTSELNPEMLSKRILPVEFAAIHTTVTTGFNLILDLLSSDPSLGYIDTIREETSRVFAEENGAWTKQGLARLHRTDSAIKESMRFSHFARALTHRKVVAPEGVTNPVEGWHAPYGAFLMLDLAGTHRDPELYPEPDKYDAWRFSRQREAYEAKSAEEKGDAEEAMRVKKLGMVTTSAEFLAFSHGRHACPGRFFVAHELKMILAYLVQNYEFKPLAERPKSIWIGSSFIPEVQARIEVRRRKRRV

SEQ ID NO: 2372 - DNA, 1083 bp, Myceliophthora thermophilia
atgactgacgctccggagaccgttgagtggcagggtaggcaggtccctgtctggcccatgaggaccattgactatagccggctgctctcccaggacccttctgaggtggacaaggtggtcaaggcctgtctcgaggaagggtacttccagctggacctcgacaacatcgatggtcgccgggtgctcgaggaccgcgaggaggtcctcaagctcatgtaccgcttcttcgaagcgcctctcgaggccaagaacgagtacggcctgattgactcccacctcggctacgagccggtgggcaaccgcaccggtgccttcggcgccggcaccaaggacggatacgagatgctcaaggtctcgcgcgacgagatccagcagggtagcccccgggtgccgtcgcccatcaagaacagcggcgacctccgcatcctggagcgggccatcggcggctgcaacaccgtcaccaaggtcatcctgtcggctctctcgaccggcatgggcctgaccggtaaggaccggttcgagaactcgcatcgcaacgaccgtccgtcgaccacgacgctctccatgatgcactacctccccgccgtggagacgggccaggacaagattgggcaccagaagcacaccgacatcagctccctgaccctgctcttcagcgaccagtggggcctccagatccgccctcccggagagtgcggcgcccgcgagatgggctttgtccgccccaagcccgggtgcgccttcgtgcacgtcggcgactcgctgcggttcgctagcggcatgaagttccagtcgtgcatccaccgcgtcgtcccattcaacccgaccgagcaccgctactcgatcgcctacttcctccgggccgaggacgacaccatgttccaggacagcgaggggcggtgggtgactgccaaggagtggcacgaccagaagttcaaggccttcacggacccgccggtctggcaggccctggctcccaagtccatgatcctgggaggcatgaaggaggatggtgcggacgacccggagccggtggcgcctttcgtcccggcagttgccaaggaaacacttgttcaggggtga

SEQ ID NO: 2373 - protein, 360 aa, Myceliophthora thermophilia
MTDAPETVEWQGRQVPVWPMRTIDYSRLLSQDPSEVDKVVKACLEEGYFQLDLDNIDGRRVLEDREEVLKLMYRFFEAPLEAKNEYGLIDSHLGYEPVGNRTGAFGAGTKDGYEMLKVSRDEIQQGSPRVPSPIKNSGDLRILERAIGGCNTVTKVILSALSTGMGLTGKDRFENSHRNDRPSTTTLSMMHYLPAVETGQDKIGHQKHTDISSLTLLFSDQWGLQIRPPGECGAREMGFVRPKPGCAFVHVGDSLRFASGMKFQSCIHRVVPFNPTEHRYSIAYFLRAEDDTMFQDSEGRWVTAKEWHDQKFKAFTDPPVWQALAPKSMILGGMKEDGADDPEPVAPFVPAVAKETLVQG

SEQ ID NO: 2374 - DNA, 3363 bp, Myceliophthora thermophilia
atgtcgcaggaatacaagttgaagggggttacctccctcgcgctgaagcccggcgaaaaacaagaggtggaagtagagggccttgatgcaaaggtcctgctcgtcaatgccggcggaacggtccaggcggtcggacccaagtgcacccactacggggcacccctcgtcaagggcgtcttggggaccaacgggatcatcacttgcccgtggcacggagcttgcttcaacaccaagacgggcgacgtcgaggacgcgcctgcgctgaacgcgcttcctgtcttcaaagccaccgagcgcgatggtgctgtttacatcaccggcgatgcggacacgattaagcggggccaccgcacacccaagttcaagtgcaccgccaccggcggcgataaagttgttgttgtgggaggcgggtcaggagcgctgggcaccatcgaggctctgcgaggcggtggttaccagggagccatcactctcatctccaacgaggggtacctgcccattgaccggccgaagctcagcaaggcattgttgaccgatctcgcgaagttgcagtggcgggatgagggctggtataaggacggcagcgtggatatcgtgaacgacgaggtcacggcggtggatttcgcgacaaagacggtcacgaccaagtccggaggcaagttcgcctacaccaaactcgtcctatccactggcggcacgcctcggcggctgcccctgccaggattcaaagatctcggcaacatcttcacattgcgcactgtccatgacgcgaaacggattgttgatgccattggcgacaagggcaagaagattgtcattatcggatcgtccttcatcggcatggagatcgccgtggccacagcaaacggcaatgacgtgacggtcgtaggaatggaaaaggcaccgctggagcgcgtccttggggagaaagttggcaacatcatcaagaagggcgtggaagcgaagggcgtcaaattttacctgccggtgggtgttgacagggccgagccatctgcgtccgctccgtcgaacgtcgggtcggtccacctcaaggacggcacgaagctcgaagcggacctcgtcatcctcggagtcggcgttgcgcccgcgaccgagtatctcaagaacaacagcgcggttcagctcgagcaggatgggagcctaagggtcgacgaggcgtttgcggtagtgggtctgcaggacgtgtatgccattggcgacattgccacgcacccctaccgtggaccgggtggagatggcaaactcgtgcgcatcgagcattggaatgttgctcagaacgcaggccggactgttgcgagccacattctcaacccggaccgcacgccagagttttacactcccgtgttctggagcgcccttggctcgcagctgcgctactgtggcaacacgatggccagtggatgggacgacgtggtgttgcagggagacccggagcagggcaagtgggtagcgtactatgcgaaggggcagaccgttgtcgccatggcgagcatggggatggatccggcaatggctcagtgttcccagctcatggcgctcaacaggatgcccagcaaggccaagttggaaggtggactggatatcctgagtctcggacctccccatctagatgtcaccgaccctgcttctatgatgcatctctgggaactggtgcgtctggcagccaggttgctaggcctttctgtcgccctcgcttcattggtattggtcaatatcgccatctatcgactcttctttcatcctctggcacagatcccgggaccgagactcgccgccatctccaatgtttggcaggcgcgccatgtgcgagacggccgcgcccgagagttgggcaagacgttgcacaggcaatacgggcccatggtccgcgtagggcccaacgaggtttggttcgattccgaggaagcatttagggaaatctacagcgccggtcatggctatgagaagtcagacttctacctggcaacggccctgaacaaaccacgcctcgactggaaactccgtcctcattttcctgacacactcgactttctctccgagttcgatgttaagcggtacagaatgcaaaggcgacttattgggccgctatatcaggcacctagtctccggagatttgagtcggccgtcgatcgcgtcgttgctgctgccattaccgagctgaaggccttggatggtgcggaagttgacttgaaggaatggatgcacatcattgccgtcgaatgtcttggggccgtcgttctctcatggtcgcctcgatacatccaggcacgctccgatggtggtaccagcacccagagttacctcggctggaaacgaaagagcgtgttcggcctgtttcctaccgtcactaggctgtcgttcatctctaagacgttgagtcgagtgtttgccaatatctggggggtgactttcaagacgcccaagggtttcaagcccttctttacgcctgtgtatcaaaagacgtccaaaagaatcgccaatgcccttcggtcaccgtctcacccgggtggtaaacgaagagccatcaacgacctgctcgagaatctaatctccttacacaaagagaggcccgagttcaatgagacctatctgcgccgactcgccgtgaccaatttcggtgccggtcacgagactatgtgctcagcactaaccgcggccatggccatgattgggtctcatcacggggtccgacgcagggtcgcggaagaggtccgcagcgaccccgacgcctctgaagccgacaacggactccgtttacgctacactcgagccagcatcaaggaagcccagcgggtcgcggaagaggtccgcagcgaccccgacgcctctgaagccgacaacggactccgtttacgctacactcgagccagcatcaaggaagcccagcggttacaccccgtcattgggatgtcactttcgcgcaaggtgccccaaggcggtactttgcttcacggtctctatttccccgccggtaccacggtcgggtgcaatcccgtggcgttacaccggaatcctaacatctttggagaagatgcaggaagatacaacccagacagatggttgcaggacgacggtgtggttcggcgaatggagaggttcaatctcacatggggaggaggagcccgatcttgtcccggcagacatctcgccgagctggtcgtgcacaaagtagttcccgcgctcttcaaggaatttgacattgagatcacggcgatgcctgaggaaaccgagatgccatcctattttatggccatgatgacaggggtcaaagcaaagtttcatcgggtgccacacaagacagggaacaagacagggaacagtagtgtcgaagtgcacgactaa

SEQ ID NO: 2375 - protein, 1120 aa, Myceliophthora thermophilia
MSQEYKLKGVTSLALKPGEKQEVEVEGLDAKVLLVNAGGTVQAVGPKCTHYGAPLVKGVLGTNGIITCPWHGACFNTKTGDVEDAPALNALPVFKATERDGAVYITGDADTIKRGHRTPKFKCTATGGDKVVVVGGGSGALGTIEALRGGGYQGAITLISNEGYLPIDRPKLSKALLTDLAKLQWRDEGWYKDGSVDIVNDEVTAVDFATKTVTTKSGGKFAYTKLVLSTGGTPRRLPLPGFKDLGNIFTLRTVHDAKRIVDAIGDKGKKIVIIGSSFIGMEIAVATANGNDVTVVGMEKAPLERVLGEKVGNIIKKGVEAKGVKFYLPVGVDRAEPSASAPSNVGSVHLKDGTKLEADLVILGVGVAPATEYLKNNSAVQLEQDGSLRVDEAFAVVGLQDVYAIGDIATHPYRGPGGDGKLVRIEHWNVAQNAGRTVASHILNPDRTPEFYTPVFWSALGSQLRYCGNTMASGWDDVVLQGDPEQGKWVAYYAKGQTVVAMASMGMDPAMAQCSQLMALNRMPSKAKLEGGLDILSLGPPHLDVTDPASMMHLWELVRLAARLLGLSVALASLVLVNIAIYRLFFHPLAQIPGPRLAAISNVWQARHVRDGRARELGKTLHRQYGPMVRVGPNEVWFDSEEAFREIYSAGHGYEKSDFYLATALNKPRLDWKLRPHFPDTLDFLSEFDVKRYRMQRRLIGPLYQAPSLRRFESAVDRVVAAAITELKALDGAEVDLKEWMHIIAVECLGAVVLSWSPRYIQARSDGGTSTQSYLGWKRKSVFGLFPTVTRLSFISKTLSRVFANIWGVTFKTPKGFKPFFTPVYQKTSKRIANALRSPSHPGGKRRAINDLLENLISLHKERPEFNETYLRRLAVTNFGAGHETMCSALTAAMAMIGSHHGVRRRVAEEVRSDPDASEADNGLRLRYTRASIKEAQRVAEEVRSDPDASEADNGLRLRYTRASIKEAQRLHPVIGMSLSRKVPQGGTLLHGLYFPAGTTVGCNPVALHRNPNIFGEDAGRYNPDRWLQDDGVVRRMERFNLTWGGGARSCPGRHLAELVVHKVVPALFKEFDIEITAMPEETEMPSYFMAMMTGVKAKFHRVPHKTGNKTGNSSVEVHD

SEQ ID NO: 2376 - DNA, 1443 bp, Myceliophthora thermophilia
atggccaacggcacccccgcgggtccgggacggccggatgacgacggcttgtccttcgacgtcctcatcgtcggagccggcatctcgggcatcaacgcggcgtaccgcatccagaccgagggcccggccgataccacctacgccatcctcgaggggcgggactcgctcgggggtacctgggacctgttccgctaccccggcatccggtccgactcggacatctacaccttcggcttcccctggagcccctggaggcacgacacggcgctggcctcgggcgaccagatcaaggcctacttggcccagtcggcccgctcgcagggcatcgaccagcacatcctctaccgccaccgggtcgtgtcggccgactggagctcggccgggaaggagtgggacctccgcgttgtcgtggacgggcgggaagaccagccgccggccgtcttccgggcccgcttcctgctgctgggcacgggctactacgactacgagaagccgctcgaggccgccatcccgggcatcgagaccttcgccggcaaggtgatccacccgcagttctggcccgaggactacgactacaccgacaaggaggtcgtcatcatcggcagcggcgccaccgccgtcaccgtcctgcccgccatggccgagcgcgcccgccgcgtcaccatgctgcagcgcagcccgggctacgtcttctccctgccctcccgcggcctcctgaccgccctgctcttcgccgtcctgcccgccgccgccgcccactacctctgccgcctcctctggctccgcgtcatcaagcgcgccaccctccgccagctgcccccgacgatcccgtgggacccgcacttccggccccggtacaacccgtgggagcagcggttctgcgcctgcgtcgacggcgacttcttcgccgccctgcgctcgggcaaggccgacgtggtcaccgacacgatccggacggtgacgcccgactcgatcgagctcggctcgggccgggcgctgcacccggacgtgatcgtgacggcgacggggctcaagctgcgcttcggcggcgggatcgacttccgcgtcgacggcgagcccttccgctggcgcgacaagttcgcctggcgctccgccatgctgcaggacgtgcccaacctgctcttcctgaccggctacgagaccgcctcgtggaccctcggcgccgacgtcagcgcccgcctcttcgtccgcatcctccgccgcctccgccaccgccgcgccgccgccgtcgtcccccgccccgcccgcccggacatgcccgagcgccccatgatgagcctcacctcgacctacctccgcaccgcccgcgacgtcctccccaagggcggcaccggcgtctgggcccccaagaccaactactttgccgacatggccagggccaggtggggggacctgtccaaggacttggagtttatcatgtag

SEQ ID NO: 2377 - protein, 480 aa, Myceliophthora thermophilia
MANGTPAGPGRPDDDGLSFDVLIVGAGISGINAAYRIQTEGPADTTYAILEGRDSLGGTWDLFRYPGIRSDSDIYTFGFPWSPWRHDTALASGDQIKAYLAQSARSQGIDQHILYRHRVVSADWSSAGKEWDLRVVVDGREDQPPAVFRARFLLLGTGYYDYEKPLEAAIPGIETFAGKVIHPQFWPEDYDYTDKEVVIIGSGATAVTVLPAMAERARRVTMLQRSPGYVFSLPSRGLLTALLFAVLPAAAAHYLCRLLWLRVIKRATLRQLPPTIPWDPHFRPRYNPWEQRFCACVDGDFFAALRSGKADVVTDTIRTVTPDSIELGSGRALHPDVIVTATGLKLRFGGGIDFRVDGEPFRWRDKFAWRSAMLQDVPNLLFLTGYETASWTLGADVSARLFVRILRRLRHRRAAAVVPRPARPDMPERPMMSLTSTYLRTARDVLPKGGTGVWAPKTNYFADMARARWGDLSKDLEFIM

SEQ ID NO: 2378 - DNA, 1038 bp, Myceliophthora thermophilia
atgtcgacccaagaactgtcgatggacctcccggtcatcgacttggacgtcttcctccatcaacctcgcgactcgcccgcggtgcaggccgagtgcgccaaggcggcagatgccctcatcacctacggcgcgctggtgcttcacgactcgcgcgtgtcggagcaggacaacgacaccttcctggatctcctggaggactacttcgcgcagcccgaggccgacctgaagaaggacgagcggcccgagctggcttaccagatcggcgtgacgctggagaacacggagaagccaaagtgcgccgtcgacgagccgtgcctgcgcgtcatcgagcgcctggccccgtcggagcgcccgctcgacatctcggctcactcgcccgaccccaagtgcaggttcttctggcgcatggttgagcagcccccctacaagacgcagtttcccgtgcttaatgccgagaacgtcacgcccgaggctccccacatcaaggagcgctggggcccggtgatgaaccaatgggggacggccatgaagaatgcgccccaccttctcgcgccgacggcatccgaccttcaaaagtacggccaaaaggacacgatcctggccggcttccatacagacctcaacttcctcaccatccacggccggtcgcgctacccgggcctgcacatctgggcgcgcaacacgggcaggcgcatccccgtcaagatcccgccgggcaactacctgctcgtgcaggccggcaagcagctcgagcacctcacgggcgggctgatcaaggccggctaccacgaggtcgtcgtcaacgagcgcaccctgcaggtcatcgaggagcgccgcgcccgcctgccggaccggcccctcattcgcatctcgtccaccttcttctggcacctgtcgtccgactacgacctggtgcccatcccggagctggccgagcgcgccaagctcgtccgggcgcagcagttcgacctgggcaaggacgagggtgaggaggtcgagtacccgcccatgaaggtgggcgaacaggttcagaagtaa

SEQ ID NO: 2379 - protein, 345 aa, Myceliophthora thermophilia
MSTQELSMDLPVIDLDVFLHQPRDSPAVQAECAKAADALITYGALVLHDSRVSEQDNDTFLDLLEDYFAQPEADLKKDERPELAYQIGVTLENTEKPKCAVDEPCLRVIERLAPSERPLDISAHSPDPKCRFFWRMVEQPPYKTQFPVLNAENVTPEAPHIKERWGPVMNQWGTAMKNAPHLLAPTASDLQKYGQKDTILAGFHTDLNFLTIHGRSRYPGLHIWARNTGRRIPVKIPPGNYLLVQAGKQLEHLTGGLIKAGYHEVVVNERTLQVIEERRARLPDRPLIRISSTFFWHLSSDYDLVPIPELAERAKLVRAQQFDLGKDEGEEVEYPPMKVGEQVQK

SEQ ID NO: 2380 - DNA, 672 bp, Myceliophthora thermophilia
atggccactgagcgtgctgcacccctccgcctgggctcgatcgccccgaacttccaggccgataccaccaagggccccattgacttccatgagttcattggcgacaactgggtcatcctgttctcccaccccgaggacttcacccccgtgtgcaccacggagctcggcgagatggcccgccttgagcccgagttcgccaagcgcggcgtcaagctcatcggcctctcggccaacacgttgggcagccacgagggctggatcaaggacattaacgaggtcacgggctcgctcgtcaacttccccatcattgccgacaaggagcgcaaggtggcctacctttacgacatgattgactaccaggacaccaccaacgtggacgagaagggcatcgctttcacgatccgctctgtcttcttcattgaccccaagaagacgatccgcactatcctgtcgtacccggcgtcgaccggccgcaacagcgccgagattcttcgcattatcgactctctgcagacgggcgacaagcacaaggttaccaccccgatcaactgggtgccgggtgacgacgtcatcgtccaccccaccatcaagggcgacgaggccaccaagctcttccctgagatgcgtgtcgtgaagccgtacctgcgcttcaccccgctgcccaagaattaa

SEQ ID NO: 2381 - protein, 223 aa, Myceliophthora thermophilia
MATERAAPLRLGSIAPNFQADTTKGPIDFHEFIGDNWVILFSHPEDFTPVCTTELGEMARLEPEFAKRGVKLIGLSANTLGSHEGWIKDINEVTGSLVNFPIIADKERKVAYLYDMIDYQDTTNVDEKGIAFTIRSVFFIDPKKTIRTILSYPASTGRNSAEILRIIDSLQTGDKHKVTTPINWVPGDDVIVHPTIKGDEATKLFPEMRVVKPYLRFTPLPKN

SEQ ID NO: 2382 - DNA, 1377 bp, Myceliophthora thermophilia
atgtcgacgccaattccccaaccgcctggcatccccttgctgggaaacctgttcgatgtcgacccaaacaatacatggtggtctctcaagacgctcgccgagaagtatggcgagattttccagatcaaggtgctgggcaagcgtatcgtgttcgtggccagcggtgcgctggccgaggaaatttgcgacgagaagcggttccggaaatacgtcggcggcccgatcgtcgagatccgctacgccgtccacgattcgctcttcaccgcgttcgaccatgagcctagctggggtatcgctcatcgcatcatagctccccatctcgctccagaggcgctcgccggccacttcgacgagtttgttcaatgcgccgacgagctgattgcgaagtggcaaggcctcggcgccggagcccagatccgcccgctcgacgagcttaaccggctcaacctcgaggccaccgcgctcaccttgtacggcaagaagctgaactgtctcgagggccccgcgcacccgatgttgcaagcaatggaggacgcgacgtcggaagccatgaagaggccaaacagacccaagatccttaactggttggtgtacggtggcaagttcaagagggcgaccagagcgctgcggtcctttgctgccgacatggtcaaggagcggaaagaacaccccacggaccggcgggatctcctctgggccctgctgaacgccaaggacccagagacgggcaaaggtttcaccgagtcggagatcatcgatgagatcgtcaccatgcccatcggcagcagcaccgccccgtgcgccatagccgccggaattctcttcctcatccggaacccggacgccctcgccaaggcccgagaagagatcgacagggtgcttggcgacgggccgttcaagcgagagcacgtcccgcagctgcagtacgtcgccggcctcgtccgcgagacgctgcggctctcgagcgccgccccgggcttcaacatcgagccgatcccgaggcccggcgacaagtctcccgtgttgctcgccggcggcaagtaccaggtgccccataaccaggccctgatcatcgtcctggccggcgtcaaccgggacccggccgtcttcgacgacccgctcgccttccggcccgagcgcatgatgggcgaggcgttcgagcgcctccccgccggcgtcaagaagtggttcggcaacggcaagcgcgagtgcatcggaaagcactgggcatgggacttcctcgtcatcaccatgaccaagctgatccgcgacgtcgacttcgaggccgtggacccctcctaccagctgaagcaggacggctggttcaatatccgccctatcgacttctccgtcaaggcaacggtgagggctcgctga

SEQ ID NO: 2383 - protein, 458 aa, Myceliophthora thermophilia
MSTPIPQPPGIPLLGNLFDVDPNNTWWSLKTLAEKYGEIFQIKVLGKRIVFVASGALAEEICDEKRFRKYVGGPIVEIRYAVHDSLFTAFDHEPSWGIAHRIIAPHLAPEALAGHFDEFVQCADELIAKWQGLGAGAQIRPLDELNRLNLEATALTLYGKKLNCLEGPAHPMLQAMEDATSEAMKRPNRPKILNWLVYGGKFKRATRALRSFAADMVKERKEHPTDRRDLLWALLNAKDPETGKGFTESEIIDEIVTMPIGSSTAPCAIAAGILFLIRNPDALAKAREEIDRVLGDGPFKREHVPQLQYVAGLVRETLRLSSAAPGFNIEPIPRPGDKSPVLLAGGKYQVPHNQALIIVLAGVNRDPAVFDDPLAFRPERMMGEAFERLPAGVKKWFGNGKRECIGKHWAWDFLVITMTKLIRDVDFEAVDPSYQLKQDGWFNIRPIDFSVKATVRAR

SEQ ID NO: 2384 - DNA, 582 bp, Myceliophthora thermophilia
tcgagattcgggaaagtctacaacgagatcgccgccacccggccggacctgatctggaccctttcggagccttgggctgctgacacgttcggaaagcaagccaagccgtacaacttggcgcccgtgatccacttacagccggccaccgagaaggacccggtccgggtgatcatccaatacgcccgccggaccttcacgggctactggggcctcccgcggtcggccgacatcccgcccatcacggaggcacaggcggaggcgctcgacgcgctgcacttcacggccgagaagtacgccgtctcgctcgacttccaccagggcgacatccagtacgccaacaacctgaccatcctgcacgcccgggccgagttccgcgactcggccgagaagcagcgccacctcgtccgcctctggctccgcgatccggagtacgcgtggaagacgcccgaggtgctgcagccgcgctgggaccgcatctataagggcgtcacgcccgagaacagcgtgttcccgctcgagcagtacctccggactgccagcagtagcaccaacgccagtgcgccaccgcctgtcaaggcttaa

SEQ ID NO: 2385 - protein, 193 aa, Myceliophthora thermophilia
SRFGKVYNEIAATRPDLIWTLSEPWAADTFGKQAKPYNLAPVIHLQPATEKDPVRVIIQYARRTFTGYWGLPRSADIPPITEAQAEALDALHFTAEKYAVSLDFHQGDIQYANNLTILHARAEFRDSAEKQRHLVRLWLRDPEYAWKTPEVLQPRWDRIYKGVTPENSVFPLEQYLRTASSSTNASAPPPVKA

SEQ ID NO: 2386 - DNA, 1548 bp, Myceliophthora thermophilia
atggccactttacgagccgaactcttaacaccgctacagctccaccggggtctcgaaggatgggctctggtatcccttgaatttggtgtcatcttgtcggcatcctgcatcatttataatgtcttctttcacccgctacggcctgtacccggtcccaaatcatgggcagctacgccgttcccttatatccttgcctggctgaccggccgtctccccattgtcatccacgagctccacgaaaagtatggcgatgtcgtccgtgtggcgcctaaccgtctctccttcacccaccccgatgcctggaacgccattcgcggccatcgcaagaacggacagggagaacatggcaaggatccgactttttacgccatggctgttcgcaacattctcggagcaccccgggcggaccattcccgctttcggaggatcttgtcccatggcttctcggccaagagcatgcaagaccagcagcccctgatcacgcgctacgttgatctgctgatgcaacggctcaaggagaagacgcacggcggagacggagagcctcagcctgccgtagcagacctcgccgcctggttcaacttcaccacgttcgacgtgatcggcgacctggcgtttggagagcctttcggctgcctggagcaatcgaggtaccacgtatgggtcaggaccatctttgagtcgatcggacaagttggggccatgttagcgcttcagtgggcaatccctcctctgttcacgatgttaaggcacattaaccctcatggacaccacgttggcgctgcctttgaaacgcagactcagtacgcccgtgataagatcaccaagcgactggccctcgagacgtcacggccagactttgttgaggcaatggcaacagcaaagtctgacgacggcagtctgctggccatggatgaaatagtagccaacgcgaggctcttggttaccgcgggttacgaaaccaccgccacggcactttccggcgcggcatatttcctggcacggcaccctgaagttcaggcacggttggccgaggaggtccggaatagctttacttccgaaggcgaaatcgacctcttctcggtcaacaagctaaagtacatgctcgcggtcctggatgaggccatgagaatgtttcctcctacctcacttgatatatggccgtcggctatgaattacagctccaggaacttcactgcacccgacaagtttatccctgagcggtggttggacgaggccgatcctacggggctgcagttggacaaacgcaggcaagcagcactgcagccattttcagtcgggccgcgcaattgcattggaaagaagtatcctcttttcaccgtggactttgtcaatcaaaactccaagctaacgccctgttctagcctggcctatgtcgagatgagattgattcttgcgagattgacctggaactatgatctcgctttcgcggaccaagaaacctcggacaacttcctgcgctgcaaagcctacatcctgtggatgaagggaccacttaacattcgactgattccagtcaggaaatga

SEQ ID NO: 2387 - protein, 515 aa, Myceliophthora thermophilia
MATLRAELLTPLQLHRGLEGWALVSLEFGVILSASCIIYNVFFHPLRPVPGPKSWAATPFPYILAWLTGRLPIVIHELHEKYGDVVRVAPNRLSFTHPDAWNAIRGHRKNGQGEHGKDPTFYAMAVRNILGAPRADHSRFRRILSHGFSAKSMQDQQPLITRYVDLLMQRLKEKTHGGDGEPQPAVADLAAWFNFTTFDVIGDLAFGEPFGCLEQSRYHVWVRTIFESIGQVGAMLALQWAIPPLFTMLRHINPHGHHVGAAFETQTQYARDKITKRLALETSRPDFVEAMATAKSDDGSLLAMDEIVANARLLVTAGYETTATALSGAAYFLARHPEVQARLAEEVRNSFTSEGEIDLFSVNKLKYMLAVLDEAMRMFPPTSLDIWPSAMNYSSRNFTAPDKFIPERWLDEADPTGLQLDKRRQAALQPFSVGPRNCIGKKYPLFTVDFVNQNSKLTPCSSLAYVEMRLILARLTWNYDLAFADQETSDNFLRCKAYILWMKGPLNIRLIPVRK

SEQ ID NO: 2388 - DNA, 1662 bp, Myceliophthora thermophilia
atgttttcgtaccgcctcatatcaggcatttctctgggaggtgcctacctcgtctcttccggccggatcccgcaatggccgtcacccggctttctgaccgctttcacggtcctatgggggattcaagggctcgcgtgggctctttggttcgtcatactctacccaaaactcttctccccgctccgcggccttcctgagccgagcggtaattcatggtttatgggccagttccccaagatcctggcaatgcctaccgggaatcccatgatcgagtggatcaactcgataccaaacaatggcctcatccggtatctcggccccctcaatcgggaaaggctcctagtcacgtcccccaaggctctcgccgaggtgctcgttaccaagaactacgactttgtgaagccggatagattccggcacaccctcggccccattttgggcaccggcttgctcctcgcggaaggcgacgaacacaagatgcagagaaaaaacctctcgcctgcctttgcattccgtcacatcaaggatctgtacccggttttctgggccaaggcacgcgagggtgtgaacgccatgacgggcgagatcctgcgggccgcggcgggccaaagcggccccgaggagaagacggccgtcattgaggcgggtaactgggcctcacgcatcaccctcgacatcatcggcgtggccggcatgggccgtgacttcgacgccatcaggaacccggacaaccggctgaaccaagcatacacccaaatcttcaacccgagccgccaggcacgcatctttcaagtgctcgagatgataatctctcctcggttggttcgcttgctgccggttaaacgcaacgaggacatccaagcctcggccgggctgatccgagccgagtgcgccgacctgatcagggacaagaggcagaagatagcgcggaaggagtcgaccgacgtagatatactatccgtggccatcgagtcgggcggtttcagcgacgaggacctcgtcgaccagctcatgacgttcctcgccgccggccacgagaccacggccacggccatgacctgggccgcgtacctcctcgctaagcacccggacgtccagtctcggctccgcgccgaggtccgcgaacacctgccgccgcccgcggacggagccccggccccgtcgagcgccgacatagaccggatgccctacctcaacgccgtctgcagcgaggtgctgcgctacttcagccccgcgcccttcacgctccgcacggccgccaaggacaccagcatcctcggccagttcgtccccaggggcacccaggtcacgatcgtgccctgggccatcaacaagtccgaggcgctgtggggcgacgacgcgctcgtcttcaacccggaccgctggatgcccaagtcggacgccgacaagcgcgccgccagcggcggggccacgagcaattacgccttcctcaccttcctacacgggccccgcagctgcatcggcatggcgttcgccaaggccgagtttgcctgcctgctggccacctgggtcgggcgcttccagtgggagctgcacgacaaggagttgatggatgagagcaagctggtgatcaagaccaacatcacggcgaggcctgccaagggcatgtacatcaagacgaccgttttggatgggtggtga

SEQ ID NO: 2389 - protein, 553 aa, Myceliophthora thermophilia
MFSYRLISGISLGGAYLVSSGRIPQWPSPGFLTAFTVLWGIQGLAWALWFVILYPKLFSPLRGLPEPSGNSWFMGQFPKILAMPTGNPMIEWINSIPNNGLIRYLGPLNRERLLVTSPKALAEVLVTKNYDFVKPDRFRHTLGPILGTGLLLAEGDEHKMQRKNLSPAFAFRHIKDLYPVFWAKAREGVNAMTGEILRAAAGQSGPEEKTAVIEAGNWASRITLDIIGVAGMGRDFDAIRNPDNRLNQAYTQIFNPSRQARIFQVLEMIISPRLVRLLPVKRNEDIQASAGLIRAECADLIRDKRQKIARKESTDVDILSVAIESGGFSDEDLVDQLMTFLAAGHETTATAMTWAAYLLAKHPDVQSRLRAEVREHLPPPADGAPAPSSADIDRMPYLNAVCSEVLRYFSPAPFTLRTAAKDTSILGQFVPRGTQVTIVPWAINKSEALWGDDALVFNPDRWMPKSDADKRAASGGATSNYAFLTFLHGPRSCIGMAFAKAEFACLLATWVGRFQWELHDKELMDESKLVIKTNITARPAKGMYIKTTVLDGW

SEQ ID NO: 2390 - DNA, 1605 bp, Myceliophthora thermophilia
atgtcgctgagcagtgactggattggcgcactcgccactgcagtgtttgccatccttggttatcgatacctggtgtaccccgctgtgttctcgcctctcgcgcgcatccccaacgctcactggtccgcgcctttctcccgcgcatggattctctggatccggtgggcgcgtcgagaaaacaggacgctttatcgcgctcatcgccggctcggccccgtcatccgcgtaggcccgaacgagcttagcatcaatgatctggacagcgtccgcaccgtctaccagggcggcttcgagaagccggcttggtattcggtctttgacaactacggcgttccgtgcatgttctcggcccgtcccgctccggagcattcggcccgcaagcggctcatctcgcatgtgtactccaagtcttacatccagtcgagcacggctgcagcggcccagtcgcagacaatcattttcgatagattcctaccaattatcgaggcctcggtcgccgagtcccagaagccccatggtgtcgacatctactcaatcttcatggcagcaactatggacttcatcgcggcgtacatcttcggccttggcaagggtactaattttctcggcaacaaggcctatcgtgaacattttctcgagctgtacagggctcgcaacgactacgggtactatgatcaagagatgccccggctcaccaagttttgccggagggttggtatcccattgtgccccaagtgggtagatggtgccaacaaggagctgggcgagtggtgcctgggcttatgtgccaaaatgggtcatgtttttgactcggattgcccttctcaagctgagcctccggatcagcctaccgtgtgggatgctctggtcggtggcctgcgcaaagaagcggcgagaaatggacaggcttccgtgttgtaccctacggcgctgtcgaaccgtgagctctcggtcgcctccgagctcttcgaccatgtcctagccggccaggagacagccggcttgacgctgtcgtacctgtgctggcggctgtcccaatcgttggaactccaggcacagctcagagccgaacttttgagcctctcgcccaacatgcaactggacgggaatggcacgccctccgtgccagaccccaagcagctggacagcctaccgctgctgcacgccgtcctcatggagaccctacgccgccacccaccaatacccggcgcacaaccgcgccagacgccagattcgggctgtcggattggaccgtatgctgttcccgggggtgtcagagtggccgcgtcggcatacgcgctgcaccgcgacgaagcaatcttccccgaaccggagaaatgggatcacacccggtggctcccctgggcagccgatgagagtcagctgaaggagcgtaaccgacagttctgggcgttcagttcggggggtcggatgtgcatcggatcgaactttgctatgcatcagatgaaactcatgattgccgccatctactcaaactacacgactcatatcgtggatgacgaaggtatggaacgtcagtcggacgggtacactgggcgaccagaacacgaacagttgttcttgcggtttgaaaaggttggttaa

SEQ ID NO: 2391 - protein, 534 aa, Myceliophthora thermophilia
MSLSSDWIGALATAVFAILGYRYLVYPAVFSPLARIPNAHWSAPFSRAWILWIRWARRENRTLYRAHRRLGPVIRVGPNELSINDLDSVRTVYQGGFEKPAWYSVFDNYGVPCMFSARPAPEHSARKRLISHVYSKSYIQSSTAAAAQSQTIIFDRFLPIIEASVAESQKPHGVDIYSIFMAATMDFIAAYIFGLGKGTNFLGNKAYREHFLELYRARNDYGYYDQEMPRLTKFCRRVGIPLCPKWVDGANKELGEWCLGLCAKMGHVFDSDCPSQAEPPDQPTVWDALVGGLRKEAARNGQASVLYPTALSNRELSVASELFDHVLAGQETAGLTLSYLCWRLSQSLELQAQLRAELLSLSPNMQLDGNGTPSVPDPKQLDSLPLLHAVLMETLRRHPPIPGAQPRQTPDSGCRIGPYAVPGGVRVAASAYALHRDEAIFPEPEKWDHTRWLPWAADESQLKERNRQFWAFSSGGRMCIGSNFAMHQMKLMIAAIYSNYTTHIVDDEGMERQSDGYTGRPEHEQLFLRFEKVG

SEQ ID NO: 2392 - DNA, 1473 bp, Myceliophthora thermophilia
atgccgcacaaggtggatgcagagcacctccaagaggtagatctctatgcccccttcacaagtgacaccatcctcgaggtacgcacaggcaaaatgaagcccctaccggggcttgccgtgcagtcaggcatcgacaagacgccgcgtgagggaccggtgcgcgtgacggagctgggactggagggcgacgagcacgacccgaccttccacggcggcgtagacaaggccatccacgggtactgctcgtcgcactacgcaacctggcgcgccgagtacccttcggccgccgacgccttccgacccggaggcttcggcgagaacctggtgacgcgccacctcaacgagcgcaacctctgcatcggcgacaccgtgtccatatcgccgcccgacccgggcccggacgcggagccgccggtgctactgcaggtctcgctgccgcgccagccgtgcttcaagctcaaccaccggttccggctcaagaactttgccccggccacctggaggacgagccggaccggctggtacttccgcgtactccgcccgggcgccgtccgggccggtgacgtcatccgcctggtcgcgcgcccccacccggagtggaccatcgatcgcgtccaggagtacttgcatcgcaacacgggcgaccccgccatgaacgaggccctggcggccatcgaggagctgggcgccgaggccagggacgcgttccgcgcccgggtggtccggcaccgggcgagggagcgcaggaaggcccgtgagcaagcgggagaggggggagagaacggaaacggggacaaggaacgacagcgctggagggagtaccgtgtggtggagaggaccaggcagacagagcgcatcgtgtcgtttgtgctccaagcggtcgagccgctgcgcgaggatggggaggaggaagtgcagctgaggcacggggcgcatgcccggatcaggctgggcaacggcctggtccgggcctactccattgtcgatggcgaccggaaccggttccagcttggcgtggcgctggatgagaagagccgcggcgggtcaaggtacctgcacgagatcgttcaggtcgggcacacggtccaggtgggcgccatcacgaactcggtgcaggttgccaccgccgcgagcaatcacatcttcgtggccggcggggtcggcatcacagcattcctggcgctgtttgaacactacaagcggatccactacagcgcgacgctgcactacgccgtgcgctcggtcgaggacgtgccgttccgggagcgcctggccaagctgggcgacgacgtcgtcatctatgacaaagcggccggccagcggctcagcatccgccgcatcatcgagggcatgccgtggaactcgaagctgtacttctgcgggccaaagcggctcatggacgaggccgccagggagacgaaggcgcacggcatcgccgagaaggaagtgcactttggaggccttcgaggctga

SEQ ID NO: 2393 - protein, 490 aa, Myceliophthora thermophilia
MPHKVDAEHLQEVDLYAPFTSDTILEVRTGKMKPLPGLAVQSGIDKTPREGPVRVTELGLEGDEHDPTFHGGVDKAIHGYCSSHYATWRAEYPSAADAFRPGGFGENLVTRHLNERNLCIGDTVSISPPDPGPDAEPPVLLQVSLPRQPCFKLNHRFRLKNFAPATWRTSRTGWYFRVLRPGAVRAGDVIRLVARPHPEWTIDRVQEYLHRNTGDPAMNEALAAIEELGAEARDAFRARVVRHRARERRKAREQAGEGGENGNGDKERQRWREYRVVERTRQTERIVSFVLQAVEPLREDGEEEVQLRHGAHARIRLGNGLVRAYSIVDGDRNRFQLGVALDEKSRGGSRYLHEIVQVGHTVQVGAITNSVQVATAASNHIFVAGGVGITAFLALFEHYKRIHYSATLHYAVRSVEDVPFRERLAKLGDDVVIYDKAAGQRLSIRRIIEGMPWNSKLYFCGPKRLMDEAARETKAHGIAEKEVHFGGLRG

SEQ ID NO: 2394 - DNA, 984 bp, Myceliophthora thermophilia
atgcctttcgacaccgagttgacccgccgactcggcattgcaggtacgtgcagggtgaggcatgtcggaaccgccgagatggcgagcgccgtgtccaacgcgggtggcctgggtatcatcacggccctgatctggcccgacccggaaggtttccgccaggagatccgcaagtgcaggaagctgacgagcaagccgtttggtgtcaacatcaccctgctcccggcgcttgttccgccagactacgaggcgtacgcccaggttgccattgacgaggggatcaagatcgtcgagacggccggtaactcgccggggcccgtcatctccaagctcaagaaagccggctgcatcgttctgcacaaatgcaccaccatcaggcatgcccagtcagccgtcaagcttggtgtcgactttttgagcatcgacggcttcgagtgcgcaggccacgtcggcgagtcggacatcacaaacttcatcctcctcggccgggcgcggcagacgctcaaagtcccctttatcgcctcgggtggcttcgccgacgggcagggtctcgcggccgcgctctgcctcggcgcctgcggcatcaacatgggcacccggttcttgtgcaccgtcgagagccccgtccaccacagcatcaaggagcagatcgtcaaggcgcaagagacggacacggcactggtcatgcggcgctggcgcaacacgacccgcctgtaccgcaacaaggtcacggagcaggcgctcaaggtcgagcgcgagagcaagacgggcgagttctccgagattgccccctacgtcagcggcaagcgcggtcgggaggtgttcatcaacggcgatcccgaacacggcgtgtggaccgccggacaggtcatgggcctgatccacgacattcctacctgcaaggaactcatcgcgaggatcgagaaggaggcggaagaaacgttgaaggagaggttagcactggtcaagcctgcgccgaagctgtaa

SEQ ID NO: 2395 - protein, 327 aa, Myceliophthora thermophilia
MPFDTELTRRLGIAGTCRVRHVGTAEMASAVSNAGGLGIITALIWPDPEGFRQEIRKCRKLTSKPFGVNITLLPALVPPDYEAYAQVAIDEGIKIVETAGNSPGPVISKLKKAGCIVLHKCTTIRHAQSAVKLGVDFLSIDGFECAGHVGESDITNFILLGRARQTLKVPFIASGGFADGQGLAAALCLGACGINMGTRFLCTVESPVHHSIKEQIVKAQETDTALVMRRWRNTTRLYRNKVTEQALKVERESKTGEFSEIAPYVSGKRGREVFINGDPEHGVWTAGQVMGLIHDIPTCKELIARIEKEAEETLKERLALVKPAPKL

SEQ ID NO: 2396 - DNA, 1266 bp, Myceliophthora thermophilia
atggctgctctcaccgagaaccagatcgccatcgtcaagtcgacggtgccggtcctcaaggagcacggcgccaccatcacgaccgtcttctacaagaacatgctcggggaaaatcccgaactcaacagcatcttcaatatcagcagccaagccaccgggcggcagcagcgggccctcgccggcgccgtgctggggtatgccacgtacatcgacgacctccccaagctgaaggatgccgtcgagcgcatcgcccacaagcacgtctctctgcaggtgacgcccgagcagtatgacattgtcggcaagtacctgatccaggccatcggccaggtcctcggggacgccgccaccccggagatcgtcgacgcgtggatcgccgcctacggtgccctcgccaaggtcttcatcaaccgcgagggcgagatgtacaaggccaacgaggcccacggctgggtcgggtggcgcaagttccgcatcgcccgcaaggtggccgagagcaacgtcatcaccagcttctaccttacccccgtcgacggccgcgttccgctgcccaagtacttgccgggccagtacgtgagcctgaaggtgcccgtcccgcagctgggcgagggccgccaccagtgccggcagtactcgctgagcgagggcccgtcgccggcgggcgagtactaccgcatcagcgtcaagagggaggacggcacgcccgagaccaacgtgccgggcctcatctcgaacctgctgcacgccaagtacgccgtcggcgacgaggtcgagctgtcgcacccgcagggcgagttctacgtcgacccctccgacgcctccaaggagggcgtccccgccgtgctcatctcggccggcgtcggcgccaccccggtcaaggcgatgctcgacagcctgaccgcccccggcgccgtgcgccgccccgtctcgtggatccagtcggcccgctcgagcgccgccctgcccttcggcgagtccgtccgccagatctgccgcgaacacgacaacgtgacggccaacgtcttcctgcgcaacctcagcccggacgacgcggtcggcgtccactacgagttcggcgacatgcgcctcgacctggccaagctggaccgggagagccacctgttcgtgaacgaccacagggccgagtactttgtctgcggcccggagcccttcatgctcgacgtccgctccgccctggtctccctcggggttgaccggagcaggatcttcctcgagctgttcgggaccggcggggtctccgattaa

SEQ ID NO: 2397 - protein, 421 aa, Myceliophthora thermophilia
MAALTENQIAIVKSTVPVLKEHGATITTVFYKNMLGENPELNSIFNISSQATGRQQRALAGAVLGYATYIDDLPKLKDAVERIAHKHVSLQVTPEQYDIVGKYLIQAIGQVLGDAATPEIVDAWIAAYGALAKVFINREGEMYKANEAHGWVGWRKFRIARKVAESNVITSFYLTPVDGRVPLPKYLPGQYVSLKVPVPQLGEGRHQCRQYSLSEGPSPAGEYYRISVKREDGTPETNVPGLISNLLHAKYAVGDEVELSHPQGEFYVDPSDASKEGVPAVLISAGVGATPVKAMLDSLTAPGAVRRPVSWIQSARSSAALPFGESVRQICREHDNVTANVFLRNLSPDDAVGVHYEFGDMRLDLAKLDRESHLFVNDHRAEYFVCGPEPFMLDVRSALVSLGVDRSRIFLELFGTGGVSD

SEQ ID NO: 2398 - DNA, 234 bp, Myceliophthora thermophilia
atgcggctgagcttggctcctgttgaagatggtgtgccggcagccgctacgacaggtctagagggccagccaccctccataacccccgctccctcctcctctcctcgtgctcacaacgggcaaaattacaattcccccaagagggaagcggctccgctgacggggatcgagacaacccgtggtctcgttgaggagccacatggagaaggaaatcatctcatccatgagttgtga

SEQ ID NO: 2399 - protein, 77 aa, Myceliophthora thermophilia
MRLSLAPVEDGVPAAATTGLEGQPPSITPAPSSSPRAHNGQNYNSPKREAAPLTGIETTRGLVEEPHGEGNHLIHEL

SEQ ID NO: 2400 - DNA, 1074 bp, Myceliophthora thermophilia
atggctccgaagattgctattgtctatttggccgaggctgagaaggctggtattgagaaggctggcggcacggcggatgtgtaccaagtccccgaaacgctctctcaggatgtgctggaaaagatgcacgccccgcccaaggcagccgacatccccgtcctcgaggatcccagcgtcctggagcagtacgacggcttcctcttcggcatccccacgcggtacggcaacttccccgcgcagtggaagacgttctgggataagacaggcaagctgtggacctctggtgccttccatggcaagtatgccggtctcttcatctcgacgggcagcctgggtggtggtcaggagtcgacggccatagccgtccagagcacgttggcccatcacggcatcatctacgtccctctcggctacgccaaggccttcggcatcctgaccgatttgtcggcggtccgcggtggatcggcctggggtgccggtaccttcgcgggcgtcgacggcagccgccagccgagcgaggccgagaaggagctggccatcatccagggcgagtggttctacaagacggtcgccagggctgttggcatggccggcggtgctaataagcggtcggaaggaggcctggcggagagcacgggtaacaccgtgccaacgcaggctgctgcgacgccggacacgaagaagagggaggagccgaaggaggatcgtggtcctgccaagaaggagtcggctaaggaaggcccctgtggactacccgtcaagtgcacgataattgcctttcgtcatgctctaagcaaggcgctgctgggcaaggccggcctgctgccggtgggcgtggtggacgtggagggcaactttgcgcagcacgaggccgtgaggctctgcgtggtggagaggaggaagaagaagaagaagaagaagaaggggcagaggaaagacggaaaagggacggccaagggaggggttctcaagggccgtagctgctgggttggagctatgcaagattgcctagtctctgtgccccaacggcaggaggacaagaacacagctacggaaaagagagacgggtactga

SEQ ID NO: 2401 - protein, 357 aa, Myceliophthora thermophilia
MAPKIAIVYLAEAEKAGIEKAGGTADVYQVPETLSQDVLEKMHAPPKAADIPVLEDPSVLEQYDGFLFGIPTRYGNFPAQWKTFWDKTGKLWTSGAFHGKYAGLFISTGSLGGGQESTAIAVQSTLAHHGIIYVPLGYAKAFGILTDLSAVRGGSAWGAGTFAGVDGSRQPSEAEKELAIIQGEWFYKTVARAVGMAGGANKRSEGGLAESTGNTVPTQAAATPDTKKREEPKEDRGPAKKESAKEGPCGLPVKCTIIAFRHALSKALLGKAGLLPVGVVDVEGNFAQHEAVRLCVVERRKKKKKKKKGQRKDGKGTAKGGVLKGRSCWVGAMQDCLVSVPQRQEDKNTATEKRDGY

SEQ ID NO: 2402 - DNA, 279 bp, Myceliophthora thermophilia
atgtctttccctactccttcgctccgggcgcccgcacatccccagtacaagagcccctacggccccaagtacttctaccagtctcacgtcgctggcatcaccacgaagaccctcgttaggacgggcgtcaagtccggtctgtacggcggagttgccctctttgccgtcatcttcttcgcttccggcatcccaaggattcagcaggatattctccagaaggttcctatcatcggcaagcgcttcgtccgcgagattcaccctgcggacaacccgttctaa

SEQ ID NO: 2403 - protein, 92 aa, Myceliophthora thermophilia
MSFPTPSLRAPAHPQYKSPYGPKYFYQSHVAGITTKTLVRTGVKSGLYGGVALFAVIFFASGIPRIQQDILQKVPIIGKRFVREIHPADNPF

SEQ ID NO: 2404 - DNA, 897 bp, Myceliophthora thermophilia
atggcccaaaccaagatcacctccaagacttttaagctcaacaccggcgccgagatcccggccattggtctcgggacatggcaatcgaagcccggtgaggtcggcagggccgtcgaggctgccctgcgggccggttaccgtcatatcgacacggccttcgcctacggcaacgagaaggaggtcggcgagggcatccgcgcgtcgggtgttccgcgcgaggagatcttcctcaccaccaagctggacaacccgtggcacaagcgcgcgcccgaggcactgaagcgctccctcgagaacctcggcgtggactacctggacctctacctgatgcactggccatccagcacggatcccgatgatcccaagaagcattaccctgactgggactttgtcgatacgtggcgcgagatgcagaagctgatggagacgggcaagatccggaacctgggcgtcagcaacttcgggatcaagaaccttgagcggttgctgaacgacccgagctgcaagatcgtcccggccgttaaccagatcgagcttcaccctggcaacccgtcccccaaactggtcgcctactgcgccgagaagggcatccactgcaccggctactcgccgctcggcagcagcgactccccgctatacaagaacgagacgatcgcggccatcgcccaggccaagaaccgcaccgtccagcaggttctcctgctttggggcttgaagaagggctggagtgtgctgcccaagagcgtgaacccggacaggatcaaggccaactttgatttggacggctgggatctaacggatgaggagatggcaaagattgacgcgatccccgatcggttcaaggtgtgcggcgacgcctggctgccgatcaaggtgttctttggcgatgacgagtag

SEQ ID NO: 2405 - protein, 298 aa, Myceliophthora thermophilia
MAQTKITSKTFKLNTGAEIPAIGLGTWQSKPGEVGRAVEAALRAGYRHIDTAFAYGNEKEVGEGIRASGVPREEIFLTTKLDNPWHKRAPEALKRSLENLGVDYLDLYLMHWPSSTDPDDPKKHYPDWDFVDTWREMQKLMETGKIRNLGVSNFGIKNLERLLNDPSCKIVPAVNQIELHPGNPSPKLVAYCAEKGIHCTGYSPLGSSDSPLYKNETIAAIAQAKNRTVQQVLLLWGLKKGWSVLPKSVNPDRIKANFDLDGWDLTDEEMAKIDAIPDRFKVCGDAWLPIKVFFGDDE

SEQ ID NO: 2406 - DNA, 2247 bp, Myceliophthora thermophilia
atggatggctttggcgaatccgaacgggcggtgcagcccgcggtgattgagggcaggagcatggccgtgttgtatggaagcgagactgggaacgcggaggatattgcgggagagctggctaagacagccgagaggctgcactttcagacgacggtggacgagatggatggcttcaagctggcagatctcctccgcacatcgctcgtcgtctttgtcacgtcaacaacagggcagggcgacatgcccaagaacacgctcaagttctggaaaaacctcaggcgcgaaaagctcaacaacacaaactgcctccgctcgctgcggtttacaatattcggcctaggagacagttcctatcaaaagttcaactgggctgcgaggaagttacgagcgagactcctccaactcggcgcgaccgagtttttcagacccggggaaggagacgagcggcacgataacggtgtcgacagcatttacctgccgtggtacgaggagctcaagaaaactctgctcgtcgactaccccctcccaccctcgatctctcctatacccgacgacgccatactcccgcccaagtatcctattgagctgctgtcgaccatggacaccggcattgccggcgcaacgcacgatggcaccgtaagtgcaccgtcactgatcgacgacgagcgcaggttttcggccacccgtaccatgagcgctgctcgctcccacgtggaccagccccaatctgccgcggaacggacgcaggaggactggatacggttgcaaactacgtttcctggcgacctcgcccgtcgagacgcggcatatgagcgagatgacccccgagctttcgacctgttggacaagaacaaccagctcaaggaccacccggagaagtaccactttgagaaacaaagtcctcagatcctcgattctccgccacaaggcttgctgccgattcccgatacctaccgcgccacgctgatacgaaatgaccgagtgacacccccggaccactggcaagatgtccgtcatctcgctttggatttggaactggatgaaagagcctataggaggctcgccgagtttactggcagtttaacccttgtcatctggcccaagaactacccagaagatgtgaacgagctgatccgcctgatgggttgggaatcgcaagcggaccgactcgtccggcttttcgcggttcctcgaggcgtctatattgacgacgatcgcgtcaccactctgcgattcctcttggctcacaacttggacattaccgcggttcccaagcgaagcttcatcagggaattggtccatttcaccaaagacccaagggagcgggaacggctcttggaacttgtggagccggggaatgagcaggagtattatgactatacatgccgccctaggcggaccatcctcgagctgctgagagatttcgccggcgttcggatcccgttcagccgggttcttgatctctttccagtcattcgcggacgcgaattcagcgtctgtaatgggggtggaagtctaaccgaggtcaaccacaagttccacttcaagattgagatccttgttgccttggttgagtacaagaccatcatccgcaagccgcgccagggcctctgctcccgctacctcaaacaccttgctctcggcactaagctaggagtccgcctgaagccatcgagcgcgaacctggtcccgaacctcgcggcggcgaaacggcccctgatcgctatcggaactggcaccggcgttgccccgatccgcgccgtcatccaggagcgcggctgcttcgatggcgcgggtgacactctcctgtttttcggctgccgcaaccgcgacgccgattaccactttgcgcgcgaatggtcttcttaccccaacgtaaaggtttatccggccttctcgcgcgataaaatcgaaccggaccccaagacgactgctaccatcatgcccagctccaagacagacggcaccctcctcgcggctgccgttgagacactctaccctgtccagtacgacgcccacaagaactacgtgcagcacttgatccgcaagtacgccgccgaggtcggcgtcttgctgcgccagcagcctatcgtcatgatctgcggcaacgccggacgcatgcctacctcggtgcgcaacgctctgttagatgtgctggtcctcaccaagatgtgcgtcgacaaggaggctgccgagaagtggctcggcaatccgacgaatgttactctctggcaggagacgtggtaa

SEQ ID NO: 2407 - protein, 748 aa, Myceliophthora thermophilia
MDGFGESERAVQPAVIEGRSMAVLYGSETGNAEDIAGELAKTAERLHFQTTVDEMDGFKLADLLRTSLVVFVTSTTGQGDMPKNTLKFWKNLRREKLNNTNCLRSLRFTIFGLGDSSYQKFNWAARKLRARLLQLGATEFFRPGEGDERHDNGVDSIYLPWYEELKKTLLVDYPLPPSISPIPDDAILPPKYPIELLSTMDTGIAGATHDGTVSAPSLIDDERRFSATRTMSAARSHVDQPQSAAERTQEDWIRLQTTFPGDLARRDAAYERDDPRAFDLLDKNNQLKDHPEKYHFEKQSPQILDSPPQGLLPIPDTYRATLIRNDRVTPPDHWQDVRHLALDLELDERAYRRLAEFTGSLTLVIWPKNYPEDVNELIRLMGWESQADRLVRLFAVPRGVYIDDDRVTTLRFLLAHNLDITAVPKRSFIRELVHFTKDPRERERLLELVEPGNEQEYYDYTCRPRRTILELLRDFAGVRIPFSRVLDLFPVIRGREFSVCNGGGSLTEVNHKFHFKIEILVALVEYKTIIRKPRQGLCSRYLKHLALGTKLGVRLKPSSANLVPNLAAAKRPLIAIGTGTGVAPIRAVIQERGCFDGAGDTLLFFGCRNRDADYHFAREWSSYPNVKVYPAFSRDKIEPDPKTTATIMPSSKTDGTLLAAAVETLYPVQYDAHKNYVQHLIRKYAAEVGVLLRQQPIVMICGNAGRMPTSVRNALLDVLVLTKMCVDKEAAEKWLGNPTNVTLWQETW

SEQ ID NO: 2408 - DNA, 846 bp, Myceliophthora thermophilia
atggcaggggagtccaacgtaatcaaggttctcggcctccacggcatgggcacaagtggccgaattttccaatctcagacagccgcatttcgctccaagcttcctgatgccttcgtctttgaattcctcgacgcgccacaccgtaccaacccggcccccgcaacagatatctttttcaagtccgatcacctcggttggtggcaaaccccgacagtagacaacatacgcaatgctctcgaggttctcgacgagcatctcgagaagcatggcccctacgacatactcatgggtttctctcaaggctgctcgctcattgccagctatatcctcttccacacccgcaagacacccaatacccccctccccttcaagtcagccgtcttcatctgcggcggcatccccctctcggtcctggagtacttgggtattgaggtgtcggaggaggccaaggaaattaatcagaagacgggcgacctgctaaagaacaggacccaggctctcgcgcgtatggcggagcgccatgatgatatcaagcccggccatgcgaccacctgggacaatttgacgggaatggtgcatgacccagcaaacgccgaaatgcccaaggagagcaacgtgtttgggttggacctatcgaacttgcccgaggacctgcttatcagaatgcccactgtgcatatctggggtgccaaggacccgcgattcccagccgcgtgtcagttggcgggcttctgctcaaaccggagggagtatgaccacggcggtggtcatgagatccccagatcgacggtggtgtcgcaaaccattgcgaatctgatcatcgaattagtcaagcagatacagtag

SEQ ID NO: 2409 - protein, 281 aa, Myceliophthora thermophilia
MAGESNVIKVLGLHGMGTSGRIFQSQTAAFRSKLPDAFVFEFLDAPHRTNPAPATDIFFKSDHLGWWQTPTVDNIRNALEVLDEHLEKHGPYDILMGFSQGCSLIASYILFHTRKTPNTPLPFKSAVFICGGIPLSVLEYLGIEVSEEAKEINQKTGDLLKNRTQALARMAERHDDIKPGHATTWDNLTGMVHDPANAEMPKESNVFGLDLSNLPEDLLIRMPTVHIWGAKDPRFPAACQLAGFCSNRREYDHGGGHEIPRSTVVSQTIANLIIELVKQIQ

SEQ ID NO: 2410 - DNA, 270 bp, Myceliophthora thermophilia
atgtacatactatataaaaagcttaaaaaggaactcgagtttatcaagactagaataaagaactactacgacaaacacaggctcaagggaccttgcctagagaggggagacaaagtctacttgattatacggaacttacaaaccaaacgactaagcacaaagctagactttaagaagacggatgtttttcatatttcacttctcgaaccagtaccaaagaacgccaaggttgccacgcacatcgaagcagaggacaaagaggaagaatag

SEQ ID NO: 2411 - protein, 89 aa, Myceliophthora thermophilia
MYILYKKLKKELEFIKTRIKNYYDKHRLKGPCLERGDKVYLIIRNLQTKRLSTKLDFKKTDVFHISLLEPVPKNAKVATHIEAEDKEEE

SEQ ID NO: 2412 - DNA, 435 bp, Myceliophthora thermophilia
atgtcgagtctgcgtcatgtgcctaacccctggaagcgactcttggtgcaacctctgaggtgggagaagagcgatctcaaggcgctacaagtgcccattcgacaagccctgcctaacacgtcggaagtatttgcgggaagagtttcaggttcccttgcgacggttcgcggctcaatcatcgaggtgttttccatcctcagctcggggactgatcctcttaaaggatattggaatagacggtggaatcccgacagcatcgtaatcagcgacccccaagttcgagttaagttaagcctagaggtaattagaccgtctgccgcgatacccggactgtttatgccgtcattctccgataaggtgggccaatccgtaaagagcgagcgggtatcgaccttgctgccgtctgctcgcagaaagccgacggctttgaactga

SEQ ID NO: 2413 - protein, 144 aa, Myceliophthora thermophilia
MSSLRHVPNPWKRLLVQPLRWEKSDLKALQVPIRQALPNTSEVFAGRVSGSLATVRGSIIEVFSILSSGTDPLKGYWNRRWNPDSIVISDPQVRVKLSLEVIRPSAAIPGLFMPSFSDKVGQSVKSERVSTLLPSARRKPTALN

SEQ ID NO: 2414 - DNA, 12501 bp, Myceliophthora thermophilia
atggtgcaaacacctagacaaaaaaagtttggcaacgagccgattgccattattggaagtgcgtgccggtttccgggcgccgctagcacaccttccaagctctgggaactgctccgcaaacccaaggatctgctgaccaagatccctccgaaccgcttcaacgcggactcgttttaccaccccgacggggctcaccatggcgccagcaacgtgaccgagagctacttcctcgaagaagacccgcggctctttgacgccgccttcttcaacgtgaagccggtcgaggcgcactcgatcgacccgcagcaccggatgctgctcgaggtcgtgtacgagtccctcgaggcggccggccagtctatcgaagggctggccaagtcccagaccggcgttttcgtcggcctcatgtgcgccgacttcagcgaccacatcctccgcgacctggacgcgatcccgacttacatggccacgggaacggccaggagcctcatctcgaaccgcatctcgtacttctttgactggcacggcccctccatgacgatcgatacggcctgctcgtccagcctgtttgccgtccaccaggcggtccagcttctgcgcagcggcgattcggacctggcagtcgcggccggctcgaacctgatcctcggacccgagctctacatcggagagtccaagctgaagatgctctcgccgaccggccgatcccggatgtgggacgccgatgcggacggctacgcgcgcggggagggcattgccgccgtcatcttgaagcgcctgagcgatgcgatcagggacggggaccacatcgagtccatcatccgcgagtccggcatcaactcggacggccgaaccaagggactcaccatgcctaacgagctggcacaagccgacctgatcgtcaggacgtatcaaaaggctgggctggaccctaccaaggaagaagagcggtgccagtactttgaggcccacggcaccggcaccgaagctggcgattgtcgcgaggccgaaggcatcagccgtgctttctttggataccagggagggaatgagggcccagctccgccgagccagtcggagaagctctacgtcgggtcgatcaagacggtggtcggccacacagaaggcaccgccggcctggccgggctgctcaaggcgtccctggcgatccagcactcgacgatcccgcccaacatgctttttgaacggctgagtcccaaagtggcgccgttctacaagggcgtcgagattgctaccgaggccaagccgtggccgaaggcgagcgatgttcgccgagcaagtgtcaacagcttcggtttcggaggcgccaatgcccatgtcatccttgagaactacgagccacctgccgttgcggcggctgggaccggggccggggccggggacgccgcgtcccagacttcgtttaccccgtttgtgttctcggcggcgtccgagacggccctggagggtgtattggaggcgtacgccgctcatctccgagagaatccggatctgccgctccgggacctctcatatacgcttcactcgagacggtcggccctcggcgtcagggcggcactcccggccgtggcgtcgacccagcagcttgccaacagcatcagcgaccatctcgagctcgcccgggccggtcgcaacgacaagagcgctgggcaaggcgccagcataggcagccggcccatcgcggcaacccctcgtctgctcggcgtcttcaccggccaaggcgcgcaatgggccgcgatgggaaaggagctgatccagggctccgcctttgtgcgcgaccggatcaagtctctggagagcgcactgtccgaccttccggcctccgcccgagcgtcgtggtcgctgaccgacgagctgttggcggacgcggcctcgtcccgcctcggggaagcactcctcgcccagcccctgtgcacggccgtccagatcgtgctggtcgacctcctccgggaggcgggcatcgagtttgccgccgtcgtaggccattcgtccggcgagatcgccgcggcttatgcggctcggatcatcagcgccgaggaggccatcaagattgcctactaccgcggcctgtgcgtcgaggaacacgtcaagaccgagggtgccatgatggcagtcggtacctcgtacgaggacgccaccgagctgtgcaacctcgacgcattttccggccggctcggcatcgccgcgtgtaactccccgtccagcgtcacgctgtcgggcgacgccgccgccatccgggaggccaaggacattctagacgacgagaagaagttcgcccggcccctcaaggtgaacaaggcgtaccattcgcaccacatggcggcctgctccgcgccgtacaagcaggcactggaagcgtgcaacatcgagccccgacagttggccgaggaagaaggaggatgcgtctggtactcgagcgtgtatccgggcaccgccatgggaacgacggcggcacatatcgaggatctcaagggcgagtactggaaggacaacatgctgcggccggtgctctttgcccaggcgctcgagacggcgatcgagcgaaacgaggattccccttttaacctggtcatcgaggtcggaccccatccggcgctgaaaggcccggcctccgagaccctgacggccttgtacggcaagaagcagcttccgctgccgccctacaccggaactctctcccgcgggtcgggcgacattgccgccctgtccgtcaccctcgggaccgcgtggagccgcttcggcagtccatttgtcaactttgctcagtacgaggccctgctcacgggcgagccccggtcggcgaggaaggtagtccccaacctcccgacgtataagtgggaccacgacaaggtgttctggcacgacacgcgtctctcgcgggccatgcgcaaccgcaaggagctgccgaacccgcttctggggcgcaggatccccgacggcgtcacggacgagatgcgctggcgcaacatcatccgcccgagcgagctcccctggatcagcggccaccagctgcagggccagatggtgtacccggccgccgcctatctctcgacggcgatcgaggcgtgcgcgttcctcgccgagggcagcgtcgtcgagttggtcgagatccgcgactttgacctgggcaaggcgctggtgttcgacggcaacacggagcagacgggtgtcgagaccctcttttccctctccaacattgtcaagaaggggccgaagcagatcaccgccaactttgccttccacgccgccctgggcgccgacgccgacgtgctctcgcgcctgggcagcggccgcgtcatcgtcaccctggccgggaccgggaccggggccgggaccggtcgtctgcttcttcctccccagcgggcgccggagccggcggacacggccgaggtgcgcgaggacgagttctacgcctcgctggagaagcttggctacgaatatactaacgatttccgcgccctgtcgggcatgaggcggaagctagaccacggctcggcgtacgtgcgcgtccccggccacgagctcgccgcggatgccgtcctggtccacccggccctgctagactgcgccctgcaggccatcttcctggcgtactggtatcccaacgacgggagcctcgaccagctgcaggtaccgacggggatcgccagcctgaccgtcaacacgtcgctgtgcagacaagacctggccgaaggggtccggcttccgctcgagtccttcctgaccgaggacccgctcagcacggccaccatcggcggagacgtcgaggtgtacggccgggacgggcggacgcccctgatccaggtgcagggggtccggatcaccccgctggccacgcgcaccggccaggcggatcggcagctcttcatggagaacgtatgggggccgggcgcgccggacggcaccctggcggccgacaaccgggccggcgcggccgacttcgagctggcctcggatctcgagaggctcaccatctacttcatgaggaagctggtgcgcgacatcccgccgagccggcgccagggcctggaatggcaccacgaggcgctgtttgactttgtcgagctcgtcctcgagcagacggccaacgggcggcagcggttctgcaagccggaatggctcgacgacacgtgggagagcatctcgcacatccgggcaaagcaccccgacagcatcgaggtcgagctgacccacgcggtcggcgagaacctggcggccgcggtccggggcgagacccagatcctgcagcacatgttcaaagacaacctcctgaaccgctactacgtcgaggcgctgggcatccgcgagacgacggcgttcctggcccggaccgtggcccagatcgtccatcgctacccgcacatggacatactcgagatcggcgccggcacgggcggtgccacgaaggccatcttccgcgagatcggccggaccttctcgtcctacacgtacaccgacatctcgaccggcttcttcgagaaggcgcaggaggtcttcgccgccacggccgacaagatgatcttccgcgccctcgacatcgagaaggacgtggtcgagcagggataccgggagggcgcgtacgacctcatcatcggctccctggtcctgcacgccaccaagagcctggacaagacgatgcgggcgacccggcggctgctcaagccgggcggctacctcgtcctcctcgagctcaccaaccttgacgtcctccggaccggcttcgccatgagcggcctgcccggctggtggctcggacgcgacgacgggcggcggtactcgccgtgcgccacctcggcgaggtggcaccaggtcctgctgggcgccggcttctccggcatcgacaccatcacgcccgaggtcgacgtgctcccgaggcccttctccgtcatcgtctcccaggcggtcgagccgcgcgtgaacctgctccgggagccgctctcgcacccggccgagtccaacgcgtccgcggccgacggcggagagctcgtcatcgtcggcgggcagagcctggcgaccgtcatcctgatcgacagcgtgctcgacctcacgaggcacttcggcttcgccgtcacgcggctgtcgtcgctcgacgagttcgacgccgccgccgtctcgcccaccgcgctcgtcctcaacctcgccgagctcgaccagcccgtcttctccaacctcaccggcgagaccatgcggggcctgcagagcatgctggactaccagcgcaccatcctgtgggtcacgcagggttgccgcgccgagcagccctacatgagcatgagcgtgggcctgggtcgcacggtcgccctcgaggcccccggcgtcaagctccagttcctcgacctcgacatctcgcggaagcctaactcgaagctggtggccgaggcgctcatccgcctgcgcttcacccgcgacgagggatcgacgagggggatattgtactcgaccgaacaggagctcgtcgaggatgacggccggatcctcgtgccgcgcctgctccccatccgaccggccaacgagcggtacaactcgtccaagcggaagatcaccaagcttaccgaggtcggcgccgaaagccccgcgctcgtcctggcgtcgaccgatgccggatacgcggtctacgagggcgcgtccgacgacgccagagccggagcctctgacgacacggccatcatccgcgtcacggcgtcgaccttgctccccgtgatcgggaacctgtatggcgtgctcggacaggagaaggactcggggtcctgggtcttggggctgtcgagtactaacggctcccacgtcgccgtcccacggggccaagtcaggctcgtgggggatgctatattaaaggaagaagcgcagcagcagcagaggctcctcctcctcgccttgctcgccgtcgaagcgcagtccagccagatcctctctgccgtgccacgagacagcaagctccttgtcaacgagcctccggcgggcttagcgggctccctcgtgcggcgagctgccgaacgcggcacgacggtggtcttcacggcctcgacgaccgacgctgccgacctgggccttccccatggccatcccgtcgtgagcctatcgccgctgagctccaagagagccgttcgcgccgcccttcctgccgacgtcgccctgttcctcgactgttccgccgagcccgagggcgtcggactcgggtccctaatcgcggcctgcgtgcctccgtctggccagtctatcaaactggcagagcttggggagaagctacggcagcagccgtcgccatccgtcctgtccgagatactggagcagaccacttcccgtcacgcggaccgggaccgagctgctgagggcggagagatccgcttccgcgcggtgacccctagcacactggtcgacgctccgccctccgacaccgagctcgcctcgttgccgacgttggtggactggagctccggcgacaaggtccccgtcagcctgcagtcggtggacagcttgatccgcttcgatggcgccaagacctatgtcctgttcggcctgaccagcgacctgggccgctcgctggtcgactggatggcgtcccacggcgcaaggaacgtcgtcatgacgagtcgccgtcctaatatcgaccccaagtggctagaggaacgccgggcacggggcatcaggatccaggcgtttgcaaatgacatcaccgacccggccgccgtcgaagatctggtcaacagcatccgccggtccttcccccccatcgcgggtataatgcacggcgcaatggtgctcgaggatgtcccgttctccgagatgtcgctcgagatcatgaacaaggtggtacgacccaaagtcatgggcaccattcacctagaccgcctcttccaggacgagcagctcgacttcttcgtcttcttctcctcgctcgcctcggcttccggaaaccgcggccagtccaactacagcgcggccaacatgtacatgacggccaagacgtttgagcgccggcgcaagggcctggcagcttccgtcctgcacctcggagccgtcatgggcataggatacgtcatgcgcgaggccagcgagatcgtcttcccggccatccgccgggcgggattccagtggatggacgagcgggcgttccgccagtgcgtcgccgaggccatcctcgccggccgcccggactcgggccgcagccccgagatcgtgaccggcctgcgggtcatcaacgtggacgaggaagagccggcgccgtggatggacaacccgcgcttccagcactgcatcgtccgcggcggcaccgactcgggcgccaagaagaaccagggaggggcggcggccggcgtcaagacgaggctgctcgaggccgcgacgcccgaggaggtgctcgacatcatccgcgattccttcctgcagaagctccagatcatgctgcagaccgagctgcagacggacgacgagcgggccaacatcctggccgccaacgccgaggacacgggcatcgactcgctggtcgccgtcgagatccgctcctggttccagaaggagatggacgtcgacgtgcccgtcctcaagatcctgggcggcgccaccatggccgacctcgtcgcgtttgcccacgagaagctgcccgaggggctgacgcccaacctcgggaacgagtccgccgccgccgccgcagcagcagcagcagagcggagccagtcgagagtcgagatcacccctgcgcccgacgcggtggacacgtcccgtacctccaccaccgtcttctcggcgccgccgacgctggacccggcgagcagcagcaccggctccgatcacccgacgtccgtcaccagcagcggccacaccactccggctcacgagctcgagaccggagtgccaccgtttaccaaggacgaggccggcgtcagcccgacaccggcgcagctctctccccccagtgctcccccctgtgctccgcgggaacaggacgtggagagaacggcgccgatgtcgctgggccagtctcggttctggtttctgaggagctacatcgaggaccagacgacgttcaacatctccttctcggtgaggttgaaggggccgctacaggtggacaagctggagtcggccatccagacgctcggccaccggcaccaggccctccggacggcctttgttgctcggccgggccagctgcttccggaccaggccgtcctcaagaggtctctcctccggctcgaaaagaggcagatcaaggaggcggccgaggcgtcggaggcattcgaggccatgaagaactacgtcttcgccatcgaacgcggcgagtcgatgcgcctggtgctcctctccctgagcccgtcggaccacttcctcgtggtcggctaccaccacatcaacatggacggcgccagcctcgaggtcttcatggccgacctgatgaagctgtacacgggcaggccgctggcgccccggcctttccaataccccgacttcgccgcgcagcagcagctcgaggtgcagcagggcaagatggaccgcgacatcgcctggtggcaggaccagctggccggcgttcctgccgcgatccccctgctcccgtacgcctccgtccgggagcgcaccgtcatccgcaggtacgaccacaaccgggtggaccgccacgtcgacgccgccctggccgccaagatccgagacacgtgccggcgcgagaaggcgtcgcccttccacttctacctcgccgtcttccaggccgccctcttccgcctgctcggcacgggcgacctgtgcatcggcatggccgacgccaaccgcttcgagggcgacctcgcgtccagcgtcggcatgtacctcaacctcctccccctgcgcttccgcccgtccggagaccggaccttccgggacacgctcaaggacgtgcgccggaccgcctacgccgccatggcgcactcgcacgtccccttcgacctcgtgctcaacaacctcaagatccagcggtccaccctgcacagccccttgttccaggccttcatcaactaccgcgccggcgtggccgagaagcggtcgctcggcgccgtcgagggcgagggcgagcagtaccacttcggccggtccgcctacgacatcagcctcgacatcatggagaacccgaacagcgacccccgcctcatgttcctcgtccaggagcagctctactcggaacacgaggccaacatcttggccgatacctacatgcatctcctcgacctctttgcgcgcaaaccggactccacgctcggttccgcgcccgcattcgcgcccgagaccgccgaggaggccattaggctcggtcgaggcaaccccgtcgtctccgactggccgcaaaccatcgtccatcgggtggatgatatcatccagcgcaatcccgacaccatcgccgtgagggaggcgctcggcggacgggtgtggaactacaggcaacttcgcgaccgcgtcggtgccatcgcgagggcgctgctcgcggccggcgtcaccgggggatcccgcgtcgccctgttccaggagccgggcttcgactgggtcagctccctgctggccgtcatgcgcgtcggcgccgtcttcgtccccatcgaccccggcacccccgtcgagcggctagcggtcatcgccgcggctgcgcgcccggccgtcgccctctcgcacgacgccaccgaatccgcccaggaggccgctctcgccgtcatccgggactcgggcggtgctcgggttgtcaatgtctctcggggagaaggcgaaggcgaaggcgacgtggcgggggcgggcgcgccggccaaccttgcgcagccggacaaggccgccgtcatcttcttcacgagcggcacgacgggcgttccaaagggcgccatcgttccgcaccggggcatcaccaacttcatggagcatacctgcgacattcgggggcccgaggtcgtgctcttccacagcgccctgggcttcgacctcgccatgtggcagtgcttcagcggcctggcccacggcggcactctggtggtcgcgccccggtccatgcgcggagaccccgtcgccatcacggggctcatggccaaggagaagatcacctgcacgggcgccacgccgtccgagtatcacagctggatccagtacggcttctccaagctcgcccagtccacctcctggagggtcgccatgacgggcggcgagcagtgcacgccgaagctcgtcgacgacttccggtcgctccgcctccccggcctgcgcctgtggaactgctacgggccgtccgaggtcaccgtgggcagcaaccaggccgagatccccctgtcggagccgccgcggggcgccgtgacggtcggcaaggcgatgcctaaccgctccgtctacatcctggacgacaggctggagcccgtgtgcgccggcgcgccgggcgaggtcgtcatcggcggcgtcggagtcggcctgggctacctcggcaacgaccatctcacggccgaaaagttcgtgccggacccgttcgcgcccgccggcggatccgccaagatgtaccgcaccggcgaccgtggccggctgactcgggacggagaactggaaatcctgggccgcatcgacggcgactcgcagatcaagctgcgcgggatccggatcgagatgcaggacatcgagcaggccatcctccgctccgccgacggcgccctggcgaccgtgtgcgtcaccgcccgcggcgaaccgcccaccctcgtggcccacgccgtgttccgccccgacgcctcggtgccccgacgggaccgaaacgccttcctccgccgcctggcgagctcgctgcccctgccgcagtacatgcatccggcagtcatcgtggagatcccgtccatgcccctgaacctgcacggcaagctggacaggcgcgcggtgcaggagctgccgacgcgcgtcgtcgctggggagggggaggagaaggaggatgaggaggaggagcgcccgaacggctccacctcccccgccccgttgacccaacaggagctccagctacgcagccgagtctgggaacgcgtcatacccgaggacgtcttgtcgctctacaccgtcgaccgggataccgacttcttccacgtcgggggcaactcgatgcttctcgtcgaggtgcagcgccgcgtcaaggacgagttcgaggacgtcttgtcgctctacaccgtcgaccgggataccgacttcttccacgtcgggggcaactcgatgcttctcgtcgaggtgcagcgccgcgtcaaggacgagttcggtgcgaacctgaccatcatgcgcctcttcgaaaacagcacgctgggggccatggcggccgcggttcacgacgccgccctcgagagcgccggcgtcgatgccgccatcgactgggaggacgagacggccctgaccaaggacctcgccgacgccgttccctccccggaggaccgggcggcggccgggcgtcgccggcttgatgataataacggccccggcggcaaggtggtcgtcatcctgacgggcgcgaccggcttcatcggccgcgagctgctggcccggctcctctcgtctcccgacgtcgccgaggtccgctgcatcgccgtccgcgacccgtccaggctggccgacgtggtcgagtcgaaccccggcagggtgtcggtgcacgccggcgacctcacgtccgtcgaggaggcggtcggggaggaggacgagcagcggctgttcgccgacgcgcacgccgtcatccactgcggcgccgacgtgtccttcctcaagacgtacgcgacgctgcgccgggccaacgtcggctccaccaaggcgctggcccgcctcgccctccgccacgggctcgacttccactacgtctcgaccgccgcgaccggccgcctgctcctcgtcgccgacccttcttcctccccgacggcgcgcggcgacgtctttggcgaggagtccgtggccgcgtacccgccgccccccggctggctcgaccactacgtcgcgagcaagtgggcgagcgaagccttcctcgagcgcgccgccgcccgcctcggcctccgcgtctgggttcaccggcccaccagcgtcacgggccccggcgccggcgagacggacgtcatgtcgaccgtcatgcgcttcgccaagaagctgcgcgccgtgcccgtctcgtcccgctggcgcggctccctcgacttcgtgcccgtcgagaccgtcgccgacggcatcgtcggcgccgtcatccggggggggcgcgagcagcagcagcagcagcagcagcagcaggagaccactcccgaggaggcgggctcggtcgtgcccgtcaagttcctgcatcacagcggcgggctcgtcatccccatcgaacgcctgcagagccacctcgaggaggaggacggggtcgagtaccggacggtcccgttgggccagtggatcgagatggccgtggccgaaggcttgaacgtgctcgtggccgcatacctggcctcggttgatgagatggatacggacattgtcttccaggcctatgtcaagggataa

SEQ ID NO: 2415 - protein, 4166 aa, Myceliophthora thermophilia
MVQTPRQKKFGNEPIAIIGSACRFPGAASTPSKLWELLRKPKDLLTKIPPNRFNADSFYHPDGAHHGASNVTESYFLEEDPRLFDAAFFNVKPVEAHSIDPQHRMLLEVVYESLEAAGQSIEGLAKSQTGVFVGLMCADFSDHILRDLDAIPTYMATGTARSLISNRISYFFDWHGPSMTIDTACSSSLFAVHQAVQLLRSGDSDLAVAAGSNLILGPELYIGESKLKMLSPTGRSRMWDADADGYARGEGIAAVILKRLSDAIRDGDHIESIIRESGINSDGRTKGLTMPNELAQADLIVRTYQKAGLDPTKEEERCQYFEAHGTGTEAGDCREAEGISRAFFGYQGGNEGPAPPSQSEKLYVGSIKTVVGHTEGTAGLAGLLKASLAIQHSTIPPNMLFERLSPKVAPFYKGVEIATEAKPWPKASDVRRASVNSFGFGGANAHVILENYEPPAVAAAGTGAGAGDAASQTSFTPFVFSAASETALEGVLEAYAAHLRENPDLPLRDLSYTLHSRRSALGVRAALPAVASTQQLANSISDHLELARAGRNDKSAGQGASIGSRPIAATPRLLGVFTGQGAQWAAMGKELIQGSAFVRDRIKSLESALSDLPASARASWSLTDELLADAASSRLGEALLAQPLCTAVQIVLVDLLREAGIEFAAVVGHSSGEIAAAYAARIISAEEAIKIAYYRGLCVEEHVKTEGAMMAVGTSYEDATELCNLDAFSGRLGIAACNSPSSVTLSGDAAAIREAKDILDDEKKFARPLKVNKAYHSHHMAACSAPYKQALEACNIEPRQLAEEEGGCVWYSSVYPGTAMGTTAAHIEDLKGEYWKDNMLRPVLFAQALETAIERNEDSPFNLVIEVGPHPALKGPASETLTALYGKKQLPLPPYTGTLSRGSGDIAALSVTLGTAWSRFGSPFVNFAQYEALLTGEPRSARKVVPNLPTYKWDHDKVFWHDTRLSRAMRNRKELPNPLLGRRIPDGVTDEMRWRNIIRPSELPWISGHQLQGQMVYPAAAYLSTAIEACAFLAEGSVVELVEIRDFDLGKALVFDGNTEQTGVETLFSLSNIVKKGPKQITANFAFHAALGADADVLSRLGSGRVIVTLAGTGTGAGTGRLLLPPQRAPEPADTAEVREDEFYASLEKLGYEYTNDFRALSGMRRKLDHGSAYVRVPGHELAADAVLVHPALLDCALQAIFLAYWYPNDGSLDQLQVPTGIASLTVNTSLCRQDLAEGVRLPLESFLTEDPLSTATIGGDVEVYGRDGRTPLIQVQGVRITPLATRTGQADRQLFMENVWGPGAPDGTLAADNRAGAADFELASDLERLTIYFMRKLVRDIPPSRRQGLEWHHEALFDFVELVLEQTANGRQRFCKPEWLDDTWESISHIRAKHPDSIEVELTHAVGENLAAAVRGETQILQHMFKDNLLNRYYVEALGIRETTAFLARTVAQIVHRYPHMDILEIGAGTGGATKAIFREIGRTFSSYTYTDISTGFFEKAQEVFAATADKMIFRALDIEKDVVEQGYREGAYDLIIGSLVLHATKSLDKTMRATRRLLKPGGYLVLLELTNLDVLRTGFAMSGLPGWWLGRDDGRRYSPCATSARWHQVLLGAGFSGIDTITPEVDVLPRPFSVIVSQAVEPRVNLLREPLSHPAESNASAADGGELVIVGGQSLATVILIDSVLDLTRHFGFAVTRLSSLDEFDAAAVSPTALVLNLAELDQPVFSNLTGETMRGLQSMLDYQRTILWVTQGCRAEQPYMSMSVGLGRTVALEAPGVKLQFLDLDISRKPNSKLVAEALIRLRFTRDEGSTRGILYSTEQELVEDDGRILVPRLLPIRPANERYNSSKRKITKLTEVGAESPALVLASTDAGYAVYEGASDDARAGASDDTAIIRVTASTLLPVIGNLYGVLGQEKDSGSWVLGLSSTNGSHVAVPRGQVRLVGDAILKEEAQQQQRLLLLALLAVEAQSSQILSAVPRDSKLLVNEPPAGLAGSLVRRAAERGTTVVFTASTTDAADLGLPHGHPVVSLSPLSSKRAVRAALPADVALFLDCSAEPEGVGLGSLIAACVPPSGQSIKLAELGEKLRQQPSPSVLSEILEQTTSRHADRDRAAEGGEIRFRAVTPSTLVDAPPSDTELASLPTLVDWSSGDKVPVSLQSVDSLIRFDGAKTYVLFGLTSDLGRSLVDWMASHGARNVVMTSRRPNIDPKWLEERRARGIRIQAFANDITDPAAVEDLVNSIRRSFPPIAGIMHGAMVLEDVPFSEMSLEIMNKVVRPKVMGTIHLDRLFQDEQLDFFVFFSSLASASGNRGQSNYSAANMYMTAKTFERRRKGLAASVLHLGAVMGIGYVMREASEIVFPAIRRAGFQWMDERAFRQCVAEAILAGRPDSGRSPEIVTGLRVINVDEEEPAPWMDNPRFQHCIVRGGTDSGAKKNQGGAAAGVKTRLLEAATPEEVLDIIRDSFLQKLQIMLQTELQTDDERANILAANAEDTGIDSLVAVEIRSWFQKEMDVDVPVLKILGGATMADLVAFAHEKLPEGLTPNLGNESAAAAAAAAAERSQSRVEITPAPDAVDTSRTSTTVFSAPPTLDPASSSTGSDHPTSVTSSGHTTPAHELETGVPPFTKDEAGVSPTPAQLSPPSAPPCAPREQDVERTAPMSLGQSRFWFLRSYIEDQTTFNISFSVRLKGPLQVDKLESAIQTLGHRHQALRTAFVARPGQLLPDQAVLKRSLLRLEKRQIKEAAEASEAFEAMKNYVFAIERGESMRLVLLSLSPSDHFLVVGYHHINMDGASLEVFMADLMKLYTGRPLAPRPFQYPDFAAQQQLEVQQGKMDRDIAWWQDQLAGVPAAIPLLPYASVRERTVIRRYDHNRVDRHVDAALAAKIRDTCRREKASPFHFYLAVFQAALFRLLGTGDLCIGMADANRFEGDLASSVGMYLNLLPLRFRPSGDRTFRDTLKDVRRTAYAAMAHSHVPFDLVLNNLKIQRSTLHSPLFQAFINYRAGVAEKRSLGAVEGEGEQYHFGRSAYDISLDIMENPNSDPRLMFLVQEQLYSEHEANILADTYMHLLDLFARKPDSTLGSAPAFAPETAEEAIRLGRGNPVVSDWPQTIVHRVDDIIQRNPDTIAVREALGGRVWNYRQLRDRVGAIARALLAAGVTGGSRVALFQEPGFDWVSSLLAVMRVGAVFVPIDPGTPVERLAVIAAAARPAVALSHDATESAQEAALAVIRDSGGARVVNVSRGEGEGEGDVAGAGAPANLAQPDKAAVIFFTSGTTGVPKGAIVPHRGITNFMEHTCDIRGPEVVLFHSALGFDLAMWQCFSGLAHGGTLVVAPRSMRGDPVAITGLMAKEKITCTGATPSEYHSWIQYGFSKLAQSTSWRVAMTGGEQCTPKLVDDFRSLRLPGLRLWNCYGPSEVTVGSNQAEIPLSEPPRGAVTVGKAMPNRSVYILDDRLEPVCAGAPGEVVIGGVGVGLGYLGNDHLTAEKFVPDPFAPAGGSAKMYRTGDRGRLTRDGELEILGRIDGDSQIKLRGIRIEMQDIEQAILRSADGALATVCVTARGEPPTLVAHAVFRPDASVPRRDRNAFLRRLASSLPLPQYMHPAVIVEIPSMPLNLHGKLDRRAVQELPTRVVAGEGEEKEDEEEERPNGSTSPAPLTQQELQLRSRVWERVIPEDVLSLYTVDRDTDFFHVGGNSMLLVEVQRRVKDEFEDVLSLYTVDRDTDFFHVGGNSMLLVEVQRRVKDEFGANLTIMRLFENSTLGAMAAAVHDAALESAGVDAAIDWEDETALTKDLADAVPSPEDRAAAGRRRLDDNNGPGGKVVVILTGATGFIGRELLARLLSSPDVAEVRCIAVRDPSRLADVVESNPGRVSVHAGDLTSVEEAVGEEDEQRLFADAHAVIHCGADVSFLKTYATLRRANVGSTKALARLALRHGLDFHYVSTAATGRLLLVADPSSSPTARGDVFGEESVAAYPPPPGWLDHYVASKWASEAFLERAAARLGLRVWVHRPTSVTGPGAGETDVMSTVMRFAKKLRAVPVSSRWRGSLDFVPVETVADGIVGAVIRGGREQQQQQQQQQETTPEEAGSVVPVKFLHHSGGLVIPIERLQSHLEEEDGVEYRTVPLGQWIEMAVAEGLNVLVAAYLASVDEMDTDIVFQAYVKG

SEQ ID NO: 2416 - DNA, 891 bp, Myceliophthora thermophilia
atggccgacatgaaagacggaaagttcgttcacgacgcgacgacgcctcccacctcgaacagcgtcttcgacctcttctctctcaagggcaagaccgccatcgtcacgggcgccagcgcgggcaacattgggctgggcgtggcccaggccctcgccgaggccggcgccaacgtcgccatatggtacaacaagaggaaggaaccggccgagcaggccgcggcagagattgagaaggagtacggtgtcaagtgcagagcgtaccaagtagacgtcacctcgtacgacacggtagccgcggccgtcgacgctaatgtgcgcgagttcaacggccggctggacatcttcgtcgccaactcgggcatcgcatggaccgggggcccgatgctggacggcccggtcgacatgtactcggccgtggtcaagacgaacgtggacggcacctacttttgcgcgcgggcggcggggcagcacttccggcggcagaagcgggagagcaccaccttcggggacgacgcccggccgctggacccgcccttcacgtcaggcagcttcatcgcgacggccagcatgagcggccacatcgtcaacgtgccgcagctgcaggcctcgtacaacgccagcaaggccgccatcatccacctctgccggagcctcgcggtcgagtgggccggcttcgcgcgcgccaactccgtcagccccggttacattgtcaccagcatctccgagttttgcagtgaggacaccaagagggcctggaaggacaagattcccatgggtcgcgagggtcatgtgaacgagctcaagggggcatacctgtacctggcgtcagacgcgtcttcgtacacgacggggacggacatcaaggtcgacggtggatactgcgccccataa

SEQ ID NO: 2417 - protein, 296 aa, Myceliophthora thermophilia
MADMKDGKFVHDATTPPTSNSVFDLFSLKGKTAIVTGASAGNIGLGVAQALAEAGANVAIWYNKRKEPAEQAAAEIEKEYGVKCRAYQVDVTSYDTVAAAVDANVREFNGRLDIFVANSGIAWTGGPMLDGPVDMYSAVVKTNVDGTYFCARAAGQHFRRQKRESTTFGDDARPLDPPFTSGSFIATASMSGHIVNVPQLQASYNASKAAIIHLCRSLAVEWAGFARANSVSPGYIVTSISEFCSEDTKRAWKDKIPMGREGHVNELKGAYLYLASDASSYTTGTDIKVDGGYCAP

SEQ ID NO: 2418 - DNA, 486 bp, Myceliophthora thermophilia
atggcaaccgcagactcgaccacggcgcccgcaccggcaccctggtacgcggcataccccgcgcccaagtccgaggtggttaccatctcgcgcgaggaggtgctcgagatgctcaagacaactccgctcgagaagagagacttcgttctggtggatctgaggcggaacgatttcgagggcggcaccatccgcggctccatcaacctcccagcgcagagcctccccctgaccctgccttcggtatatgccacattcaaggcggctgggatgcgcaaggtcatcttctactgcggttcgtccaccggccgcggaagcagggcgatgggttggctggcggaccacatcgccgaggtgggcgacaaggacatgaagagcctcgcgctggccgggggcatcaagggctgggcggctgccgggcccgagtacgtcgcgtggatggacgggtacgacgcggcggtgtgggagaaggctggcacgggatgttag

SEQ ID NO: 2419 - protein, 161 aa, Myceliophthora thermophilia
MATADSTTAPAPAPWYAAYPAPKSEVVTISREEVLEMLKTTPLEKRDFVLVDLRRNDFEGGTIRGSINLPAQSLPLTLPSVYATFKAAGMRKVIFYCGSSTGRGSRAMGWLADHIAEVGDKDMKSLALAGGIKGWAAAGPEYVAWMDGYDAAVWEKAGTGC

SEQ ID NO: 2420 - DNA, 1404 bp, Myceliophthora thermophilia
atgacgaatagtcgcatgacggagaaatgcatctcactgtgtcctagccagagctcggtgtgccccagtgcaaagtccgccagtgctaagtccgagcctcacgatgacggaaggcgcaatgcccccgcaacacccaacaccatcgccgccatcaccaccatcatcaccaccaccatcatcaccaccaccatcatcaccaccaccatcatcaccaccaccatcatcaccaccaccatcatcaccaccaccatcatcaccaccaccatcatcaccaccacagcgatagtgaaaaacgaccgtaccccgataaaaccgaccaaaatgacaacgacgacgactcctttcaatcccacacccatctctaaccccttcatcccgcccggcgctctggtcctcgtcacgggcgccaatgggctcatcgcctcccacgtagccgaccagctcctcgcgcacgggtaccgcgtgcgcggcacggtgcgctcggccacgcggtgcgcctacctcacggatctctttagcgcgcggcacgggcccggactgttcgagctgctcgaggtgccggacgtggcggctcccggggcgtggatggcggcggtgcgcggggtgtcgggggtcgcgcacgtgctagggtcctcggacctggcggtcgcggacgccgaccggggggcggcggaggagttgacgtggcagaccggcctgctcgaggcggcggcggcggagcccgggatccggtccgtcgtgttcacgtcgtccgcctgggcggcctggacgcccaacgcgagcagaaaggtccgcctgaccggggagagctggaacgaggaggccgtcgcgctggcgagggacaagtccgtcaacgctcggagcaagggcctcgcggtgttcatggccctcaagacgctggtcgagcagggcgtgtgggagtgggtggagaagaacaaaccggggtacgcgttcaataccgtgctgccggacacggtcctgggcgagtgcctcgacccggcgaatcaggggattccgagcacggcggggatggcgtactgggtgtggaagaacaccaacgtcgacgtgttgaacatgctacagccgcagtggtttgtcgactgtcgggacaccggccgtctgtatgttgccctgctagcgaccacgccggttgtcaccggggagcgcatcttcggtttcggcgagcgatacagctttttccgtgtcgccgagatcctgaaggagctgtaccccgaccacgctgacaagatggctaaggtgaaggacttcgggtgggatcagacagaagtgccgaaccagaggggcgccgaattattggcgcgtttggggcagcataccggctggcggagtctggaggaaagcgtcaaggacaatgccgagagctggctcaagctggaacggtag

SEQ ID NO: 2421 - protein, 467 aa, Myceliophthora thermophilia
MTNSRMTEKCISLCPSQSSVCPSAKSASAKSEPHDDGRRNAPATPNTIAAITTIITTTIITTTIITTTIITTTIITTTIITTTIITTTIITTTAIVKNDRTPIKPTKMTTTTTPFNPTPISNPFIPPGALVLVTGANGLIASHVADQLLAHGYRVRGTVRSATRCAYLTDLFSARHGPGLFELLEVPDVAAPGAWMAAVRGVSGVAHVLGSSDLAVADADRGAAEELTWQTGLLEAAAAEPGIRSVVFTSSAWAAWTPNASRKVRLTGESWNEEAVALARDKSVNARSKGLAVFMALKTLVEQGVWEWVEKNKPGYAFNTVLPDTVLGECLDPANQGIPSTAGMAYWVWKNTNVDVLNMLQPQWFVDCRDTGRLYVALLATTPVVTGERIFGFGERYSFFRVAEILKELYPDHADKMAKVKDFGWDQTEVPNQRGAELLARLGQHTGWRSLEESVKDNAESWLKLER

SEQ ID NO: 2422 - DNA, 1338 bp, Myceliophthora thermophilia
atggatgcgcaacacgaaaagaagaacatcgtcattgtcggcggcggcatcatcggatgcaccacggcctattacctgacacgccatcccaaattcaatcctgccctccacaccataacccttcttgaagccagctcgattgccgcgggcgcctctggcaaggccggagggctgcttgcattatgggcttatccgacctgcctcgtgcctctatcataccgtctacacaaggaactggctgccgagcacaatggcgcacaacgatggggctaccgccgcctgggatgtgggagtttagcggctgtcgtccgaacgagtgacctagaggcaagggcgcccaagccgccatcgcctccggcagaaaatggcgtcgacggtgggcttcccatacagagcacagcatccgatgagaagtccaaggactgggagaagctcccaaaacaggacggcgcggcgaccggtttgctacgggactcgcctttgccgccagatctgaactggatcgatgggaagctggtccagtactacgaggaaatgggctccccgggggctaccgaaacggcccaggtccaccctttccacttcaccaacgccatggccgacctagcaaaggagaaaggagttgatatccgcctgcgagcgaaggtgacccgcatcagcgaaaccaagacggccggcgtgctgcacagcgtcgcctacgaggaccgcgatacgggggagatacgcaacattgacgacgtgacggatgtcatcgtggccgcggggccatggacggggaagctagtcccgcgaacgagggtggaagggctgcgtgcccatagcgtcgtcttcgaagccgacgtcagcccctatgccgtcttcaccgacattcagctgcccgcggactacgtccccgaacaccgcgcgagccagggccagcggaggcgccacagggggaatgtcgacccggagatctacgcccgccctttcggcgaggtgtacgcatgcggcgaacccgacaagacgatcccgctccccgccaccgcggacgaggtttccgtggaccagtcgcaatgcgacgacctcgtcgcctacatcggcaccatctcgcccaccctcgcggccgccccggtcaaggcccgccaggcctgctacctgccgcagcacatccgcttcggcgagcagcgcgggcctctgatcggcccgacgtcggtgcccggcttgtgggtcgcggcggggcacacctgttgggggatacagaacggccccgggacgggctatctgatggccggcatgatctttggcgacgaggtagacgaggaggtggagaagctagatccgaggaaattcaaagtgtag

SEQ ID NO: 2423 - protein, 445 aa, Myceliophthora thermophilia
MDAQHEKKNIVIVGGGIIGCTTAYYLTRHPKFNPALHTITLLEASSIAAGASGKAGGLLALWAYPTCLVPLSYRLHKELAAEHNGAQRWGYRRLGCGSLAAVVRTSDLEARAPKPPSPPAENGVDGGLPIQSTASDEKSKDWEKLPKQDGAATGLLRDSPLPPDLNWIDGKLVQYYEEMGSPGATETAQVHPFHFTNAMADLAKEKGVDIRLRAKVTRISETKTAGVLHSVAYEDRDTGEIRNIDDVTDVIVAAGPWTGKLVPRTRVEGLRAHSVVFEADVSPYAVFTDIQLPADYVPEHRASQGQRRRHRGNVDPEIYARPFGEVYACGEPDKTIPLPATADEVSVDQSQCDDLVAYIGTISPTLAAAPVKARQACYLPQHIRFGEQRGPLIGPTSVPGLWVAAGHTCWGIQNGPGTGYLMAGMIFGDEVDEEVEKLDPRKFKV

SEQ ID NO: 2424 - DNA, 687 bp, Myceliophthora thermophilia
atggtccacgctgacgcttcaaatttcgccgagggcgtcaccaaggaagaggcgtacaaacaggtgctggatcaagccgagggtctgttcttcgagcagcgaaactgggtctggtgggtgactctccacacgtttactggttcatttcacacaagcacaacaccaaaaccgccaccttgtgccatgaccttacttacccctgacattgacttggcccccaacactaaacaaaacacttacgtcaacagcaacctctccaatgctgccgcactcctctggcacgcatacaaatccctcccgtctccaagcaaccaagtcaattgggcaggcttctacaccttggacccggcctctccgccctcgcggccccagctgatcctcgggcccttccagggcaaggtggcctgtcagacgatcgcctttggccggggcgtgtgcggaaccgcggcggcgacggcgcagacccagctggtccccgacgtcgacgccttcccgggccacatcgcgtgcgactccgacagccggagcgaggtcgtcgtccccatcaccgtcggcgagggcgaggccaagaaggtcgtggccatcatcgacgttgactgcgcggtgcccgcggggttcgacgaggtcgaccgcgtgtggctcgagaagctggcgaagttggttgcgcgggcttgtgattggccttga

SEQ ID NO: 2425 - protein, 228 aa, Myceliophthora thermophilia
MVHADASNFAEGVTKEEAYKQVLDQAEGLFFEQRNWVWWVTLHTFTGSFHTSTTPKPPPCAMTLLTPDIDLAPNTKQNTYVNSNLSNAAALLWHAYKSLPSPSNQVNWAGFYTLDPASPPSRPQLILGPFQGKVACQTIAFGRGVCGTAAATAQTQLVPDVDAFPGHIACDSDSRSEVVVPITVGEGEAKKVVAIIDVDCAVPAGFDEVDRVWLEKLAKLVARACDWP

SEQ ID NO: 2426 - DNA, 1053 bp, Myceliophthora thermophilia
atggctggctcagtcatgaaggcagtcgacgtcaaaaacggcaccggcccggcctcggccctcttcatcaatccctccactccgacgccgcagcccggtcccggccaagctctcgtcagggtccgcgccttcggcctcaaccgtatggacctgctccagcgcgaagggcgctacccccttcccccgcatgcccccaagacgctgggggtcgaattcagcggcaccatcgagtctctcggcccgggcgcagacgcctcctcctcctcctcctcctcctcctcctcgtcgtcgtcgtcgagattcaaaccaggcgatgccgtcttcggcctggcttacgggggcgcctatgccgagtacatcgccgtgtcgaccaagatgctcctgcgcaagcccgactacttgaccttcgagcaggctgcaggcatccccgagacgtggatcacggccatccaggcgctgcactttgtcctgcaggcgcagccaggccagagcgtgctttggcacgccggtgcctccggtgtctccatcgccggcatccagctgtcccggctcgccggcgcgagcgagatctacgccacggccggctcggccgagaagtgcgccttcgtggagaaggagctgggtgccgcgctggccgtcaactacaaggaggcgaactgggttgaggagattctgaagcggaccggggggagaggggtggatctggtggtggactttgtcggcggcgactactttgagaagaatctcgacgtcatcgcgagggatgggcggatctgcatgctggggctaatgggaggggcgattgcggagaaggtcaacattggaaagttgctgtacaagcgggcacgggtcgaggggagtaccctgcggagcagagatgagcagtaccaggggaggctgagggacaagctggaggagtacctgcccaagttcgagagcggggagctcaaggtgttgatcgataccgtcttgccgtgggaggagatcgtcaaggcccacgagctgctggaggcgaacaaaaccatgggcaagatcatctgcaccatcccctga

SEQ ID NO: 2427 - protein, 350 aa, Myceliophthora thermophilia
MAGSVMKAVDVKNGTGPASALFINPSTPTPQPGPGQALVRVRAFGLNRMDLLQREGRYPLPPHAPKTLGVEFSGTIESLGPGADASSSSSSSSSSSSSSRFKPGDAVFGLAYGGAYAEYIAVSTKMLLRKPDYLTFEQAAGIPETWITAIQALHFVLQAQPGQSVLWHAGASGVSIAGIQLSRLAGASEIYATAGSAEKCAFVEKELGAALAVNYKEANWVEEILKRTGGRGVDLVVDFVGGDYFEKNLDVIARDGRICMLGLMGGAIAEKVNIGKLLYKRARVEGSTLRSRDEQYQGRLRDKLEEYLPKFESGELKVLIDTVLPWEEIVKAHELLEANKTMGKIICTIP

SEQ ID NO: 2428 - DNA, 1170 bp, Myceliophthora thermophilia
atgacatcaacatcgccgccggcatcatcgtcaacaacctctgcgaaaaaaacaatgagatgctggaccgccacctcccgcggcagtccccgccaggccctcactcttaaccctgcagccccgactccttccctccctgcagacggccccccgtcttcttcctcttcctcttcttcttcttctctcgtcctcgttaggatcacccacgtgaccctcaacccggccgacctcaacacgctgcggctcctcccgccgtggctgcccttccgccgcgcacccgtccccggcatggactttgccggcgaggtcgtcgcgcttggcggcagcagggccagcaccgacgccgacgccgcgccaccgccgccgctgcgggtgggcgaccgcgtgtgcggcgccgcggggctgcgcgaggtcttcacggggcggggcacgctcgccgagtttgtgctgctcgaccgcgccctcgtcacccccgtgccggccggctggggcggccgggaggcggccgggaccatgggcatcgccgggcagacggcaaccgccatggtcaagagggtcgtgcccggcggggacctgcgaagcgaccgccgcgggctcgagggcaggcgggtgctggtgaacggggcgagcggcggggtggggacggtgctggtgcagatctgcaaggggttgggagcggccgaggtggtgggcgtctgttcgggggcgaatgaagggctggtgaaggggctgggtgctgatgaggttgtcgattatcgccttcacgaccctctcgagacccatctcgtcgagcggtttggagagcaccagttcgacgtcatcttcgattgtgccggcagccaggggctctacagctgctcgccgggctatctgaagcccgagggcaggttcgtcagcatcgtgggcggctggtctcagggggttgttccgtacatcaggaacaaactgcgccctgtcttcctcggagggacgccgcgaagctacgacctcttcctcctcagtgcgtcgggtgagattgcgagggaggttgccacgttggtggagcagggcgtgatcaagcaggccgtcattgactcggagtttcccatggagcaggcggtcgaggcctttgagaaactcgcaacgggaagagcgagggggaagattgtcgtgaacatcagcaacagctga

SEQ ID NO: 2429 - protein, 389 aa, Myceliophthora thermophilia
MTSTSPPASSSTTSAKKTMRCWTATSRGSPRQALTLNPAAPTPSLPADGPPSSSSSSSSSSLVLVRITHVTLNPADLNTLRLLPPWLPFRRAPVPGMDFAGEVVALGGSRASTDADAAPPPPLRVGDRVCGAAGLREVFTGRGTLAEFVLLDRALVTPVPAGWGGREAAGTMGIAGQTATAMVKRVVPGGDLRSDRRGLEGRRVLVNGASGGVGTVLVQICKGLGAAEVVGVCSGANEGLVKGLGADEVVDYRLHDPLETHLVERFGEHQFDVIFDCAGSQGLYSCSPGYLKPEGRFVSIVGGWSQGVVPYIRNKLRPVFLGGTPRSYDLFLLSASGEIAREVATLVEQGVIKQAVIDSEFPMEQAVEAFEKLATGRARGKIVVNISNS

SEQ ID NO: 2430 - DNA, 1899 bp, Myceliophthora thermophilia
atgtcctggtcgtccggtaagccttcgagggaaggtggccacgatggaggcacaattcaggctcacacggggggccacgggcccgagaatcccgccttgatggcctactttgcccagagacaagtgctttctgagaggctaatgaggtactatgccgctgccatctgtggtctggtcgccatcttcgttgtcttccactgggcgcattgggcctgcgtcaagatcgaacgtgcaaagcgacctaccggactgctgggccgcccgttcgtcacgagtacgaggctagcaaggaacttgctggtacggaaagttcccgggttcaagtccgccggacatgccatggtcaccgtggcctatgtcgccatcaacgcttctatcgcattcaccaatgtggactttggctcgatgggaggcttggcccacagatttgggtggctgacgctcgtgaacctcgccgtggtcatattcttggcgctcaagaacacccccctagcgttcttaacagcctactcgtacgagcggctcaactgcctccatcagattgccggttgcacgatgttcatcttgatggtcctccacgcgtccctgtacacggccttctttgccagcgagaagcggttagtcgccatttactcccaaagctcagggatcggggggatcgtggccggctttggctttttgagcgtcgtttcgtccgctttggttctcaggcgaatctggtacgagctgttttacgtcacgcacataacatcttgggtcctggccattgtcgctctcggtgtccaccggcccgaaattgccaacaagacgcttgtcgtcgtcctcatcgccgcctccatgtggttcgtcgaccgcgtcatcagggcatgcagagtcctgtattacagcaccaacaacgaggcgagattgtaccccctccccgatggaagtaccaaggttgttttcaagaaggtgccctcgagaacacgaccgggaaagcactgcttcatctggatccccgccatccgcaagttcgagacccacccattcacgatccatgggagctcgcccgtcgagtttaccgtcaaggcccgctacggattcacgagcgacctccacaagtatgcggcggctcacccgggcgaggccgtgacggcttcgatcgacggaccatatggcacgttccccgacccaatggagtttgacaagattgtgctcattgctgggggcggaggtgctacctttaccttcggcattgccgtcaacgtcctcgagagaatgcatgaagactcgcccaaggacattgtcttcatctggtcggtcaggaaacacgaaaacctctcctggttcagggagcagctcgaattgctgcgaacccatgtgcactcgcccaaagtcagcgtctctctttacgtcacgcgagcgccatcatccacgtccgacctccccagcggaagcgaaagcgagagcaccgaacagagcggccggtccaacacttcttccaaggataccgagtcgccgcccttgtcaccggctggttcagaccccgagaaggacgctcatcggaccgctgcaccagccgctcgccggccgtcctccggggcacacggcgactccgagagggaaaaggagggtgccatagagactccggccgagcacaccggcctggcggagaaagggtctctcaaggccgcggccgccgtagctcacacgttcttcgaacatccagtcaagctagggcggccagatgcggcctcggtcatccgggacgcagtcaagaccacaccgcgggaccagcgtgtcctggttgcggcatgtggtccggacggtttgatgcgtgtggttcgggatacaacggcaagattgatcgttggcgatggtccggccgtggagctgcactgcgaagagttcggctggtaa

SEQ ID NO: 2431 - protein, 632 aa, Myceliophthora thermophilia
MSWSSGKPSREGGHDGGTIQAHTGGHGPENPALMAYFAQRQVLSERLMRYYAAAICGLVAIFVVFHWAHWACVKIERAKRPTGLLGRPFVTSTRLARNLLVRKVPGFKSAGHAMVTVAYVAINASIAFTNVDFGSMGGLAHRFGWLTLVNLAVVIFLALKNTPLAFLTAYSYERLNCLHQIAGCTMFILMVLHASLYTAFFASEKRLVAIYSQSSGIGGIVAGFGFLSVVSSALVLRRIWYELFYVTHITSWVLAIVALGVHRPEIANKTLVVVLIAASMWFVDRVIRACRVLYYSTNNEARLYPLPDGSTKVVFKKVPSRTRPGKHCFIWIPAIRKFETHPFTIHGSSPVEFTVKARYGFTSDLHKYAAAHPGEAVTASIDGPYGTFPDPMEFDKIVLIAGGGGATFTFGIAVNVLERMHEDSPKDIVFIWSVRKHENLSWFREQLELLRTHVHSPKVSVSLYVTRAPSSTSDLPSGSESESTEQSGRSNTSSKDTESPPLSPAGSDPEKDAHRTAAPAARRPSSGAHGDSEREKEGAIETPAEHTGLAEKGSLKAAAAVAHTFFEHPVKLGRPDAASVIRDAVKTTPRDQRVLVAACGPDGLMRVVRDTTARLIVGDGPAVELHCEEFGW

SEQ ID NO: 2432 - DNA, 843 bp, Myceliophthora thermophilia
atggaagtgaacatcgcaaaacccaaagaactggtgacggccgccgcctcgatacgagaatccttcggttacgacaggcagcctggctcgcacactgatatcgactacaccgagtgccttttcatgtgcaagttggacctggacatattcctggaatgcgccaggaggatgggttttaagaacagggacggaaacgacttgctgccgtggaagacgcccgaagaggtgttcgaggcttggaagaatgcctctgctgggcgaccgtgtgactacatcggcctgacctacgagctcctgacgggcgggtcggggatccggtggccttgcgacgagaggatcccgcgtggcaccgagaggctgtactcagacggcccgttccccacgagcatagagagctgtgaacgcttcgggcatgacccgaaaccggtgcaccctacagcagggccgactttcgacaggacgcaaggtccaccatttccacacgagaccgaaggacgacgctgcaaaacgccctgtcccgagccggaggtcagagtgtcggagaaggatgccgcagaggccggagtgtcggacggcgacatggtggttgtccggtccagacgtggcaccgtagagctgcgatgccgcgttgaccgctgggacccgatttccaagcagcccatgttcaaatccgacgcggcccgtctctcgagacttcctccgtccgccgccgccactcccgaggtcccctacatccgcgagcagcactcgtccgccctggagcgggtcgggacctgtggtagatggatggatgcggaaatcaacgatcttcgtatcttctgccacggagttgatggtggttga

SEQ ID NO: 2433 - protein, 280 aa, Myceliophthora thermophilia
MEVNIAKPKELVTAAASIRESFGYDRQPGSHTDIDYTECLFMCKLDLDIFLECARRMGFKNRDGNDLLPWKTPEEVFEAWKNASAGRPCDYIGLTYELLTGGSGIRWPCDERIPRGTERLYSDGPFPTSIESCERFGHDPKPVHPTAGPTFDRTQGPPFPHETEGRRCKTPCPEPEVRVSEKDAAEAGVSDGDMVVVRSRRGTVELRCRVDRWDPISKQPMFKSDAARLSRLPPSAAATPEVPYIREQHSSALERVGTCGRWMDAEINDLRIFCHGVDGG

SEQ ID NO: 2434 - DNA, 756 bp, Myceliophthora thermophilia
atgcgaggcaagacggtatcgatccaacctgaacatacctcgtgccaacctggaaatcaaatagaagagtattgttggaagaaccaactcgaagagacgggatttgtggggacagacatcggccgagaggcctggaggaatctcgaggcggggccgcagatttgcaagcaaaatccacggtttaagatattcgagccggttgactatacggcgttcattggcaagcaccaaggcaacgacaaggtcttcatcgtaaccggcgattctggtgatggcctgacacacggcgtgctcgccgggcggctgatcgcggacgagattgagggcaaagcaaactcgtgggcgtcgctctacagtccgaagcggctcggaagcattatcaagtcgctgcccagcatggtgaagcacgacatccagattaacacgcagtacaggcgcttcttgcagacagacatcaccgagatcgaggagttgggcaggggttctggaggcgtcctgaactcggccactagcaaaccactggcagtttacaaggacgaagagggcaagatgcacaagtacagcgctctgtgcccccatatgaagggagttgtatgctggaacgacgtggaaaagagtttcgactgccctgtgcatgggagccgcttctccaaggatggcattcgtgtcgtcggtccggccaaggcgaacttggcgccggcggataataaggcgggggctgaggatcaggaatatgctggtggatcaagcatgtga

SEQ ID NO: 2435 - protein, 251 aa, Myceliophthora thermophilia
MRGKTVSIQPEHTSCQPGNQIEEYCWKNQLEETGFVGTDIGREAWRNLEAGPQICKQNPRFKIFEPVDYTAFIGKHQGNDKVFIVTGDSGDGLTHGVLAGRLIADEIEGKANSWASLYSPKRLGSIIKSLPSMVKHDIQINTQYRRFLQTDITEIEELGRGSGGVLNSATSKPLAVYKDEEGKMHKYSALCPHMKGVVCWNDVEKSFDCPVHGSRFSKDGIRVVGPAKANLAPADNKAGAEDQEYAGGSSM

SEQ ID NO: 2436 - DNA, 972 bp, Myceliophthora thermophilia
atgctatcccggcaggctcaagtatacggggttggaagcgttcacgtcttcagctctgccgcggccatgttctccaggtcaacccaccagggcgttgagagggagattgcagtctttcgtaccgagagctcgatgaagtttctctgcctccccggggcttatggtagtgccaagaacttccgtgttcagctgggacccctggcggacgagctagagcggcgaggactagcgactttcgcctacagccaaggggctcacgaagtagagcccccggccgggtgggaagactactttggagcccggccgttgtaccgttttctcgacacccgccacggggacaatttcgagaatctccgtcgtctccgccacatgccgtacagcatcaatgccgaagacgccatccgcatgtttcaagatactggcaagggtgatgactggcaccagccggtctggcgtgaggccatggacgatgttatcaagaaggtcgacgaacatcccgacgtcgacgccgtcattggctactcggagggcgccatggtcggtgcgagtctgattgtggaagagggcgagcaggagcggcggaccggccgtaaacgacgtatcaagtttgccgtcttcatttccggttcaccgcccctgaaattcgagggcgaagaccgcgttgtcgccctgctcgcggatcagtcgggcgtcgtcatcgacatccctaccttccacatctttggttgcaacgacgctttcatgggcggcgccgtcgccttgtacaacgtttgcgacccttcaaagtccgccatgtttgatcacggactcgggcacattgttccccgcgacgccgagaatgttcgcatgttggcggatattctcgagaagttgatccccgaggtcgaggggaggagcagtcggcaaggagaaaccgagtcggagactgataaaagcacggctgggtcagaaacgtcggaatcaagtgcttaa

SEQ ID NO: 2437 - protein, 323 aa, Myceliophthora thermophilia
MLSRQAQVYGVGSVHVFSSAAAMFSRSTHQGVEREIAVFRTESSMKFLCLPGAYGSAKNFRVQLGPLADELERRGLATFAYSQGAHEVEPPAGWEDYFGARPLYRFLDTRHGDNFENLRRLRHMPYSINAEDAIRMFQDTGKGDDWHQPVWREAMDDVIKKVDEHPDVDAVIGYSEGAMVGASLIVEEGEQERRTGRKRRIKFAVFISGSPPLKFEGEDRVVALLADQSGVVIDIPTFHIFGCNDAFMGGAVALYNVCDPSKSAMFDHGLGHIVPRDAENVRMLADILEKLIPEVEGRSSRQGETESETDKSTAGSETSESSA

SEQ ID NO: 2438 - DNA, 2763 bp, Myceliophthora thermophilia
atggcgacaaagccacagcccgaagcagggtcactgtcggcaatcaactacctcgcagcgaacccgcctcaatatccctaccatcccgaggtgcgcgagcccctaactctgtatatctctagggtgcccggtgcacaagacatcatcctctctacctttcggccccgggaaaagacggtgactggcgaggatattacttcctcgctctactatgtccatctcgattccccagaagacggtctgctggccgtcccacagcggcccgacaatgcggcctcgccccgatctagtagcgagagcgcgaggagcgcgattccaaggaaaccgctacccccacaagcgaaggtggcaggaccagatcacggtgctttgtccagcaacgagccgtgtcagcgaacaacacccacgtccgtccctcagtccctgggccccgggcatttggcgccgcccctggatccggacccccaacttcaggatggggccatcgaccttactggataccgggagaaccccgtgttcaggaaacggcgctcgggggtcgcgtcagagacgcctgaccacccaaccgggcccaccccctcggccacagcgtcgagcatagcccggaagccgctcaacccagcagcctcagccttggaaactccacctcatgtcgagatcggcgtcgctgatcacaatgctccccgcggacctgcgacaccggcatcgccggaaagaaaaggctccccgttacgaccgggaagaaccgcgcataccgagcagtcgcggggtcgcccatcctctgtggcattctcactgaccgtgatccggagagaccctacctcggggacgcaatgcaatgttgggaagatcacgtcatttgtgacgaacgtgcccaccccagaaactgcggacccgtctcttgacccggacaatatggggggattgccctcgcatgcccaaaagatcagcatccgactcgagacgtcaggatacgccaaataccgcgacatgcccaccaaggccgatgtggaagacgcctaccgtctgggtccggggcagtcgttttcccaacaactgaggcaaagtctcgaccttggagcggggcctgcgagaggcaagtttccaacgtcaaggaccgcatgggagaccgacgaagggggcttcgcgcgggaggtcgtcatgtcgtacaccgccagctggaagtcaaacctggtaaaggccttccagcgcaaagaccgtcccggtagcccggtccacggcgaggggccgtcgcccgaggtcccgtcagctcgaaaatctttccacgcacgacacggcagcgcgtccacgatcggatcggtcgactcggccgacggtatacattcaccaacgctgattacccgacctggcccggggctcaaaccgagaggctacgtcttcgtgagcccatggggtgggagatgcgagttccgtaccagcatcgacgggcggagcctcaggtgccgccacatcctggaccccgcgaccgcgaggatcgacccccgcgagctttcgcagagcatccgggacgcgcaggcaatgggccgctcgcgcaccgaggaactagcctcggccctggtgggcgccaagcaggtcagcgagctgcgattcagcttaccccaggggaattcgctccgctcccatgagggggacggaaagcctcctccaaagggccgtaatcgtctgtcggggcagtttagcaagcttctgcaccgaagggcgcaaagtagcgatgaagagccggaagcggtggacgagctagacagctatgatgaaggcacggcgttggacctgagccttgggaaggagcgtgccggaggaggggctaaagggaataaagcgaaactgggaaagctcatcatctatgacgaggggttgaagatgctggacttggtggttgcagcgaactcgtcgaccaagtcgtgtcgctccctccaattgggcaccgtgaagaccgtcacgccacacttcccgaaactagtccgtgccaatttgccctgcgcgaaaagtgtcgccaacaacaaacggccgcatcaactcgtttccctcgccgcgcctcgaacaagagctctatcaacaccgagcacgatgattgcgccttcggccgtctcactcgcggcccgccaggcctccctcgttcgggggccttcagctctcctccgcgtttccgctccttcgcgagtcttggttgtgaggaggggttatgcgacgcccgctggcccgccgcccaagaactttcgcctcaagccgcccgtcgcatgggaccaagagaaagagagtaccttggacaaggttgggaagtacttcctcctgaccgagatgttccggggcatgtatgtcctgttggagcagtttttcaggccgccatacacgatctactatcctttcgagaagggtcccatttcgccccgtttccgtggcgaacacgcccttcgccggtacccgtcgggcgaggagaggtgcattgcttgcaagctgtgcgaagctatctgccctgcacaggccatcacgatcgaggctgaggagcgcgccgatggctcaaggaggacaacccgctacgatatcgacatgacaaagtgcatctactgcgggttctgccaggagtcgtgccccgtcgacgccatcgttgaatcccccaacgccgagtatgccactgagacccgcgaagaactgctctacaacaaagaaaaactattgtccaacggagacaagtgggagcccgagctggcagcggcgatccgggcagatgctccctacagataa

SEQ ID NO: 2439 - protein, 920 aa, Myceliophthora thermophilia
MATKPQPEAGSLSAINYLAANPPQYPYHPEVREPLTLYISRVPGAQDIILSTFRPREKTVTGEDITSSLYYVHLDSPEDGLLAVPQRPDNAASPRSSSESARSAIPRKPLPPQAKVAGPDHGALSSNEPCQRTTPTSVPQSLGPGHLAPPLDPDPQLQDGAIDLTGYRENPVFRKRRSGVASETPDHPTGPTPSATASSIARKPLNPAASALETPPHVEIGVADHNAPRGPATPASPERKGSPLRPGRTAHTEQSRGRPSSVAFSLTVIRRDPTSGTQCNVGKITSFVTNVPTPETADPSLDPDNMGGLPSHAQKISIRLETSGYAKYRDMPTKADVEDAYRLGPGQSFSQQLRQSLDLGAGPARGKFPTSRTAWETDEGGFAREVVMSYTASWKSNLVKAFQRKDRPGSPVHGEGPSPEVPSARKSFHARHGSASTIGSVDSADGIHSPTLITRPGPGLKPRGYVFVSPWGGRCEFRTSIDGRSLRCRHILDPATARIDPRELSQSIRDAQAMGRSRTEELASALVGAKQVSELRFSLPQGNSLRSHEGDGKPPPKGRNRLSGQFSKLLHRRAQSSDEEPEAVDELDSYDEGTALDLSLGKERAGGGAKGNKAKLGKLIIYDEGLKMLDLVVAANSSTKSCRSLQLGTVKTVTPHFPKLVRANLPCAKSVANNKRPHQLVSLAAPRTRALSTPSTMIAPSAVSLAARQASLVRGPSALLRVSAPSRVLVVRRGYATPAGPPPKNFRLKPPVAWDQEKESTLDKVGKYFLLTEMFRGMYVLLEQFFRPPYTIYYPFEKGPISPRFRGEHALRRYPSGEERCIACKLCEAICPAQAITIEAEERADGSRRTTRYDIDMTKCIYCGFCQESCPVDAIVESPNAEYATETREELLYNKEKLLSNGDKWEPELAAAIRADAPYR

SEQ ID NO: 2440 - DNA, 942 bp, Myceliophthora thermophilia
atgacaatccctcagtcgacggcggagatgcccgccatgatgtacggtaccgcatggaagaaagaacgcaccgccgatctcgtctaccaggccatcaaggccggcttccggggtattgacacggctgccatgaagagacactatgacgaagtcgacaacacctccgcatactctccagcagacccgattcccgcccagatccacgcctcaatcacctcctccctggccaacctcttccccacggacccatcagaccataccaacggcagcggcggttgtgacggcggcaaaccctacctcgacgccctcatcctccactcgcccttccccaccacgcagcagaccctcgaggcctggaacgccctgcaagcctacctccccgccgccccgcgagacccctcctcctcctcctccggccacccccgaggccaggccccggacgacgacccccgccgccggcagatcctgcgcctcggcatctccaacatcaccctccccgtcttgcgcgcgctggcctccgcggcggggacggtgctgccgcagatcgtgcagaaccggttccgcgcggccgagcgggcgtgggacgccgacgtgcgcgcgtggtgcgccgagcgggcggtctcgtaccaggccttctggacgctgacggccaacggggcggtctggcggcagcagcgcgccggcttcgtcgccgacgtggcgcgcggcgcgggcgtgtcgcccgccggggcctggtacgcgctgctgatgctggccgccgggctggtggtgctcaacgggaccacggacccggcccacatgagggaggatctcgaggtgctcgagcgcgtccgcaggtggagggagacggccgaggggagagaggtctgggggaggtgcgcgacggagtttgggcggctcgtcggaggaggtgtggtcgaccaaggagggaacgagtcttga

SEQ ID NO: 2441 - protein, 313 aa, Myceliophthora thermophilia
MTIPQSTAEMPAMMYGTAWKKERTADLVYQAIKAGFRGIDTAAMKRHYDEVDNTSAYSPADPIPAQIHASITSSLANLFPTDPSDHTNGSGGCDGGKPYLDALILHSPFPTTQQTLEAWNALQAYLPAAPRDPSSSSSGHPRGQAPDDDPRRRQILRLGISNITLPVLRALASAAGTVLPQIVQNRFRAAERAWDADVRAWCAERAVSYQAFWTLTANGAVWRQQRAGFVADVARGAGVSPAGAWYALLMLAAGLVVLNGTTDPAHMREDLEVLERVRRWRETAEGREVWGRCATEFGRLVGGGVVDQGGNES

SEQ ID NO: 2442 - DNA, 948 bp, Myceliophthora thermophilia
atgagttctgcgactgccgaatttcaggtccatgcttcggggacggcccccaagcaggtcgattacatccctcatctcaaactgaatgacgggaacgagatccccatgctcggctatggcctcggaacagccagattcaagcgcggcaactcggacaagcttgacgagaacatcatcaatgccgccttgaccgccatcaagaacggctactaccacttggacggtgccgagggatacggcaatgaggccgagctcggcgaggcaatcgcccgctcgggcgtcgaccgctccaagctcttcgtgaccaccaagtcctcgtgccgccccggcgagtccatcgagaccgccttctcccgctcgctcgccaagctcggtctcgactacgtcgacctgtacctgatccacagccccttctgggccaagtcgcccgccgagctccaggagaggtgggcagagatggaggccctcaaggactcgggccgcgcccgctccatcggcgtgtccaactacctgcccgagcacctcgaggccaccctgcagaccgcccgctacccgcccgccgtcaaccagatcgaataccacccgtacctgcagcacgaggacggcgacctgctcggctacctgcgcgataagggtatcgccatcgtcgcctactcgcccctgaccgccatcacaagggcccccggcggccccgtcgacgccgtctacgaccggctcgcccgcaagtacggcgtcacccccggcgagatcggcctgcgctggtgcctcgaccagggcatcgtcaccctcaccacgagcgccaaggaggagcggctcaaggactggaagcagcgcttgcccctcttcaagctgacccccaaagaggttgaggagatcgcggatcgcggcaaggaagggcattacagagcgttttggaccaagcattttaaggaaggcgatagacggtga

SEQ ID NO: 2443 - protein, 315 aa, Myceliophthora thermophilia
MSSATAEFQVHASGTAPKQVDYIPHLKLNDGNEIPMLGYGLGTARFKRGNSDKLDENIINAALTAIKNGYYHLDGAEGYGNEAELGEAIARSGVDRSKLFVTTKSSCRPGESIETAFSRSLAKLGLDYVDLYLIHSPFWAKSPAELQERWAEMEALKDSGRARSIGVSNYLPEHLEATLQTARYPPAVNQIEYHPYLQHEDGDLLGYLRDKGIAIVAYSPLTAITRAPGGPVDAVYDRLARKYGVTPGEIGLRWCLDQGIVTLTTSAKEERLKDWKQRLPLFKLTPKEVEEIADRGKEGHYRAFWTKHFKEGDRR

SEQ ID NO: 2444 - DNA, 2232 bp, Myceliophthora thermophilia
atgttgaggcagacattggctcgctcggcttggcggactggcaagcacccggcccgcgcggcgagccggaccttttccgcgacaacacagcgaccggccgaggtcgagctcacaattgatgggaagaaggtctcgatcgaggccgggtccgccctcatccaagcttgcgaaaaggccggcgtgactatcccaagatactgctaccatgagaaactcatgattgccggcaactgccgtatgtgcctggtcgaagtcgagcggtcgcccaagcccgtcgcgtcgtgcgcatggcccgtacaacccggcatggtcgtcaagaccaactcgcctctgacacacaaggcacgcgagggcgtgatggaattcctcctggccaaccacccgctcgactgccccatctgcgaccagggcggtgagtgcgatcttcaggaccagtcgatgcggtacggcgccgaccgtggccggttccacgagattggcggcaagcgcgcggtggaggacaagaacatcgggcccctcatcaagacatccatgaaccggtgtatccactgcacgaggtgcatccggttcgccaacgacattgccggcgccccggagatgggctcgaccggccgcggcaacgacattcagatcggcacctacctcgagaagaatctggacacggagctctccggcaacgtcatcgacctctgccccgtcggcgccctgacctcgaagccgtacgccttccgtgcccgcccttgggagctgaagcggaccgagtccatcgatgtgttggacggtctcggctccaacatccgtgtcgactcgcgcggcctcgaggtcatgcgcatccttccccgcctcaacgacgacgtcaacgaggagtggatcaacgacaagacccgcttcgcctgcgacggcctcaagacccagaggctcacgatcccgttggtgcgccgggacggcaagttcgagccggccacgtgggagcaggccctcaccgagatcgcgcacgcgtaccagaccctggcccccaaggagaacgagttcaaggccatcgctggtgagctcatcgaggtggagtcgctcgtggcgatgaaggacctcgccaacaggctgggctccgacaaccttgccctcgacatgcgcaatggcagcaagccggttgcgcacggcatcgacgtgcggtccaactacctcttcaactccaagatctggggcatcgagtcggccgactgcatcctcctggtcggcacgaacccgagacacgaggctgccgtcctgaacgcccgcatccggaagcaatggctgcgctcggatctcgagatcggcgtcgtcggtcagacctgggattccacctttgagtttgagcacctcggcaccgacttgaacgcgctcaaggaggccctggccggtcccttcggcaagaagctccaggctgcgaagaggcccatgatcatcgtgggctccggcgtgaccgagcaccccgacgccaagtccttctacgaggccgtcggccagtttgtcgacaagaacgccgccaacttcctcaccgacgagtggaacggctacaacgtgctgcagcgcgccgcttcccgggccggcgccttcgaggtcggcttcgtgacgccctccgccgccgtggccgagaccaagcccaagttcgtctggctcctgggcgccgacgagttcgacgaggccgacgtgcccaaggacgccttcatcgtctaccagggccaccacggcgaccggggcgcgcagatcgccgacgtcgtcctccccggcgccgcctacaccgagaaggccggcacgtacatcaacaccgagggccgcgtccagatgacgcgcgccgcgaccggcctgccgggcgccgcccgcaccgactggaagatcatccgcgccgtcagcgagttcctgggcgtgcccctcccgtacgacgacgtcgcccagctgagggaccgcatggccgagatcagcccggcgctcgccgcctacgacgtcgtcgagcccgtcgcgctcaagcagctcagcaaggtgcagctggtggaccagaacaagggcgctaagcccacgggggagccgctgcgcaaggtcattgagaacttttactttaccgatgtcatctcgaggagctcccccacaatggcgcgctgctcggcggccaaggagacgggtgacccgcggacaaacttcatggcgcccggcatggaagaggacaggccgatgggccaggtggcgtacggggcatag

SEQ ID NO: 2445 - protein, 743 aa, Myceliophthora thermophilia
MLRQTLARSAWRTGKHPARAASRTFSATTQRPAEVELTIDGKKVSIEAGSALIQACEKAGVTIPRYCYHEKLMIAGNCRMCLVEVERSPKPVASCAWPVQPGMVVKTNSPLTHKAREGVMEFLLANHPLDCPICDQGGECDLQDQSMRYGADRGRFHEIGGKRAVEDKNIGPLIKTSMNRCIHCTRCIRFANDIAGAPEMGSTGRGNDIQIGTYLEKNLDTELSGNVIDLCPVGALTSKPYAFRARPWELKRTESIDVLDGLGSNIRVDSRGLEVMRILPRLNDDVNEEWINDKTRFACDGLKTQRLTIPLVRRDGKFEPATWEQALTEIAHAYQTLAPKENEFKAIAGELIEVESLVAMKDLANRLGSDNLALDMRNGSKPVAHGIDVRSNYLFNSKIWGIESADCILLVGTNPRHEAAVLNARIRKQWLRSDLEIGVVGQTWDSTFEFEHLGTDLNALKEALAGPFGKKLQAAKRPMIIVGSGVTEHPDAKSFYEAVGQFVDKNAANFLTDEWNGYNVLQRAASRAGAFEVGFVTPSAAVAETKPKFVWLLGADEFDEADVPKDAFIVYQGHHGDRGAQIADVVLPGAAYTEKAGTYINTEGRVQMTRAATGLPGAARTDWKIIRAVSEFLGVPLPYDDVAQLRDRMAEISPALAAYDVVEPVALKQLSKVQLVDQNKGAKPTGEPLRKVIENFYFTDVISRSSPTMARCSAAKETGDPRTNFMAPGMEEDRPMGQVAYGA

SEQ ID NO: 2446 - DNA, 552 bp, Myceliophthora thermophilia
atgtgggctggttcggaatgtggggtgtacggaatccaggggcgaccgtaccaatgtaactacaaggactgcctgaatgttgccggcgtgaaggatgacgggctggagaagaagctgcccgttgctttcaaacaggccgtggctgagcgcgggattgatcttcacctcctcgatgcatccgccatcgaaactgtgattgcagtgccatctgatacccctggaatcacaatcaagcgcatctcgccgcccacaagcctgagcggtccagccactacctcatcggcacgggcttccacatgtcgcttctgtttgtcctttagcatgactattactcaggcaaccgttttgcactgccagataaacatacccatctccgtctcccctcaactacctaccgatgagacgatatcctcggcaacgctgtcgcttgacctaacaccacattgtaaccgttcagcatgcggtggcggctgcctggtgcccggtcgactctaccagccagcgttgcaatcctcctcctccagccagaaggcttcaatcagcaagcagtaa

SEQ ID NO: 2447 - protein, 183 aa, Myceliophthora thermophilia
MWAGSECGVYGIQGRPYQCNYKDCLNVAGVKDDGLEKKLPVAFKQAVAERGIDLHLLDASAIETVIAVPSDTPGITIKRISPPTSLSGPATTSSARASTCRFCLSFSMTITQATVLHCQINIPISVSPQLPTDETISSATLSLDLTPHCNRSACGGGCLVPGRLYQPALQSSSSSQKASISKQ

SEQ ID NO: 2448 - DNA, 414 bp, Myceliophthora thermophilia
atgtgccttcgaccgcagtacggagtacagcgtactgcgaatcaagcaggtggtctcctgaaccaaatcgtcttgggcatcggcagaattgggaacaacgacatggtccctatgtcctcctgtgagcttacaggagaggatgtgattttattggtgatggtcgcagtggtggtgattgctttttatgagcattgccctggcggagctccgcccggcaaggaacgaacatttattagtgtaggagcaacaagtgtgctctctcgggcgaaatcagggctcggagagatccagccaaactctggtttggagagggccggtgggctggcgaccacgctagccccaaaaccgatgcgcaacactgcccaggagagcgaaggtctggaagagcggggctgccccactgccctgcgatga

SEQ ID NO: 2449 - protein, 137 aa, Myceliophthora thermophilia
MCLRPQYGVQRTANQAGGLLNQIVLGIGRIGNNDMVPMSSCELTGEDVILLVMVAVVVIAFYEHCPGGAPPGKERTFISVGATSVLSRAKSGLGEIQPNSGLERAGGLATTLAPKPMRNTAQESEGLEERGCPTALR

SEQ ID NO: 2450 - DNA, 1263 bp, Myceliophthora thermophilia
atgcagcccctcaatgtgttgatgctgacgagcaaggtcggtaccggcgagtacaccaccggctttgtcggcggtggtgcctctgggtcggacaagaaggtcggagtcgtgggcttgaccttgtttgacctccggcgacgaggcaaagtaggcaaactttcgatggcaggcgtcaatgggaagaagttcccagcaatccgggagcacctctacaagaacatctctctggtttacaacaatctggacacctcgtttgaatcttacccggccgacgatgtcgtggaccccgaggcatacaagaaggccattgacgccctctcccccggcgatgccatcaccatcttcactccggacacgacccattaccccatcgccctctacgccattgagaggggcatccacgtcttgatcaccaagccggccgtgaagctgctcgagcaccatcttgccctgctcgaggcggccgagaagcacggcgtttatgtgtacattgagcaccacaagcgatatgaccctgcctactgggacgcaagggcccgggcccggaaactcggcgacttcaactacttctacagctacatgtcgcagcccaagttccagctcgagacgttcaaggcgtgggccgggatcgactcggacatctcgtattatctcaacagccaccacgtcgacatctgcgactccatggtgtcccagctgggatacgtcccggtcaaggtctcggcttcggcgtccaagggcgtcgcggtcagcatggggtgccacgagtcgaccgaggacaccatctccctgctggtccaatgggagaagaaggacgatcggtccaagaaggccacgggcgtgtacacggcctcgtggacggctccgcagaaggccggcgtgcactcgaaccaatacttccactacctcgccagggacggcgagatcaccgtcaaccaggccaagcgcggctacgacgtggccgaggacgccgccggccagctggtgtggtacaacccgttctacatgcgctacgctccggacgaggacggcaacttcaacggccagagcggctacggctacgtctcgttcgagaagttcgtggacggctgccgggccatcaacgccggcaagctgaagcccgccgacctggacgccaaaggcctccccacgttgaggaacaccattgcgacgacagctattctcgaggccgggcggcggagtattgacgagaacagggaggtcaggatcgagtccaaggacggggtgtggaagctggtttga

SEQ ID NO: 2451 - protein, 420 aa, Myceliophthora thermophilia
MQPLNVLMLTSKVGTGEYTTGFVGGGASGSDKKVGVVGLTLFDLRRRGKVGKLSMAGVNGKKFPAIREHLYKNISLVYNNLDTSFESYPADDVVDPEAYKKAIDALSPGDAITIFTPDTTHYPIALYAIERGIHVLITKPAVKLLEHHLALLEAAEKHGVYVYIEHHKRYDPAYWDARARARKLGDFNYFYSYMSQPKFQLETFKAWAGIDSDISYYLNSHHVDICDSMVSQLGYVPVKVSASASKGVAVSMGCHESTEDTISLLVQWEKKDDRSKKATGVYTASWTAPQKAGVHSNQYFHYLARDGEITVNQAKRGYDVAEDAAGQLVWYNPFYMRYAPDEDGNFNGQSGYGYVSFEKFVDGCRAINAGKLKPADLDAKGLPTLRNTIATTAILEAGRRSIDENREVRIESKDGVWKLV

SEQ ID NO: 2452 - DNA, 1257 bp, Myceliophthora thermophilia
atggaacatggcgatgtagcatccacgctaggcacgccgaggaagaccctggcgcccgctgtacgagtagatacccgcgccgcctatgacgacggagcgggtctagatgggccctggaggggctggagatactgccgcaggcgggacggtatggccctgctcggcggaaccgtcctcgacgaagcgcgcgactcggcgagcgcggcgggatgctcctgggcgggccacctcttctcctccgagtcgcaccatcgcctcgaaaaggaaacaacagaatcgagcacaatgccgtcacctgtcatcaagctcaacagcggctatgacatgccccaggtgggcttcggcctctggaaggtcgacaattccgttgccgcggacgtcgtctacaacgccatcaaggccggctaccgcctcttcgatggcgcttgcgactacggcaacgaggtcgagtgcggcaagggtatcgcgcgcgccatctcggagggcattgtgaagcgtgaggacctcttcatcgtgtccaagctctggaacaccttccacgacgccgagcgcgtcgagcccatcgtcaagaagcagctcgccgactggggcattgactacttcgacctctacctcatccacttccctgtcgccctcgagtacgtcgacccctcggtccgctacccgcccggttggttctacgatggcaagagcgagatccgcaccagcaaggccaccatccaggagacctggactgccatggagtcccttgtcgccaagggcctcaccaagagcatcggtatttccaacttccaggcccagctgatctacgacctcctgcggtacgccaagatccgcccggccaccctccagatcgagcaccacccctacctcgtccagcaggagctgctcaacctcgccaagcaggagggcatcgccgtcaccgcctacagctccttcggccccgccagcttcctcgagttcaacatgcagcacgccgtcaagctcaccccccttatcgaggacgagaccatcaagaagatcgccgccaagtacaaccgcgagcccgcccaagtcctgctccgctgggccactcagcgtggcctggccgtcatccccaagaccacccgccccgccctcatggcctccaacttccagtgcaccgactttgatctctccgaggaggacatcgccaccatctcgtccttcgaccgcggcattcgcttcaaccagccctccaactacttccccaccgagtatctctggatctttggctaa

SEQ ID NO: 2453 - protein, 418 aa, Myceliophthora thermophilia
MEHGDVASTLGTPRKTLAPAVRVDTRAAYDDGAGLDGPWRGWRYCRRRDGMALLGGTVLDEARDSASAAGCSWAGHLFSSESHHRLEKETTESSTMPSPVIKLNSGYDMPQVGFGLWKVDNSVAADVVYNAIKAGYRLFDGACDYGNEVECGKGIARAISEGIVKREDLFIVSKLWNTFHDAERVEPIVKKQLADWGIDYFDLYLIHFPVALEYVDPSVRYPPGWFYDGKSEIRTSKATIQETWTAMESLVAKGLTKSIGISNFQAQLIYDLLRYAKIRPATLQIEHHPYLVQQELLNLAKQEGIAVTAYSSFGPASFLEFNMQHAVKLTPLIEDETIKKIAAKYNREPAQVLLRWATQRGLAVIPKTTRPALMASNFQCTDFDLSEEDIATISSFDRGIRFNQPSNYFPTEYLWIFG

SEQ ID NO: 2454 - DNA, 1509 bp, Myceliophthora thermophilia
atgtacagtacatacctagttagtccgaaatcgacccccggctccgacatgccagcccgctcaaagcaacaacatctccgagatcagcacaccaacatcatcatcatgatcacccctccgagagacgacgacccctggagcgtggtcaacgtggtaggccagtcacctcccgtggactgctccaagccgtatgacccgtccgctctagcgggcaggaccatcctcatcacggggggcgcgtccggcctcggcgcggccttcgcgcggcactgggccggccacggcgcccacatcgtcatcggcgacatcaacgaccgcctgggcgaggaactcgtcgccgagctgcgctcctcgccgtccgccgccccgggccaggtcatcgcctaccagcactgcgacgtgacctcgtggacggaccaggtcgccctcttccagaccgccgtctccctctccccgaccggctccttcgacgccgtcgtcgccggcgccggctccgccgagtccgccaacctcctcgacccctccccgcccccgaccctcttcgacgcgccccccgccaccatcgacgcctccaccccgcctcccccgctccgcgttcctcgccgtcaacctgaccggcgtcataagcacgacggccgccgggacaacggcgaccgcgacggcgaccgccacctcctgctgatcgcctccatcgccgggctgctgccgctgccggggcagaccgagtacacggcgtcgaagcacgcggtggtgggcatgttccgggcgctgcgcgggaccgcctgggcgacgcgcggggtccgcgtcaacgcgctggcgccctacttcgtcgacacgcccatcctgcccggctccgccgtcgccctgctcgccggcgcgggccagaccgacccggccgacgtcgtcgacgccgccacccgcctggtcgccgaccggcagatcagggggcgcgccctgtgcgtgggacccaaggaagcacgggatcccgtccgctctccccgagttaagctagcgagagctcgagtagtagttgggtcggtgacgaccagcgaatgccgagtgttgtatgtctttttgcgcttcttgttggtcttcgcatgccctctctcggttggttggtgttggcaatcttctgccatggatgacaccgttccgtgtcatgcacggcaaagcagtccgccaaacaccgctgagactagactgacccttgatcgtgaaaccaacggacgtcaaacaagtcacttggctgacgtgtttgggcacggcaaagactcgattaatctcaaaccactccgtaagctactatgcgaccaaaaagagaaaataacaagagaaacaaaagaggaaacgatgcgtgctttgtgtgatgcatcaagcgcgagcagagcgacaacagacggacccacccccaaccctgttccaggagcatgtcttgagccacttgagaacaagaacgtcgagcgatggttcggccatccatgcacgcatccagcaccggatacactctga

SEQ ID NO: 2455 - protein, 502 aa, Myceliophthora thermophilia
MYSTYLVSPKSTPGSDMPARSKQQHLRDQHTNIIIMITPPRDDDPWSVVNVVGQSPPVDCSKPYDPSALAGRTILITGGASGLGAAFARHWAGHGAHIVIGDINDRLGEELVAELRSSPSAAPGQVIAYQHCDVTSWTDQVALFQTAVSLSPTGSFDAVVAGAGSAESANLLDPSPPPTLFDAPPATIDASTPPPPLRVPRRQPDRRHKHDGRRDNGDRDGDRHLLLIASIAGLLPLPGQTEYTASKHAVVGMFRALRGTAWATRGVRVNALAPYFVDTPILPGSAVALLAGAGQTDPADVVDAATRLVADRQIRGRALCVGPKEARDPVRSPRVKLARARVVVGSVTTSECRVLYVFLRFLLVFACPLSVGWCWQSSAMDDTVPCHARQSSPPNTAETRLTLDRETNGRQTSHLADVFGHGKDSINLKPLRKLLCDQKEKITRETKEETMRALCDASSASRATTDGPTPNPVPGACLEPLENKNVERWFGHPCTHPAPDTL

SEQ ID NO: 2456 - DNA, 822 bp, Myceliophthora thermophilia
atggccccccaagccaagctcctcgcgggcaagacagccatcataacgggcggcaccacggggatcgggcgggccatcgcactgactttcgtcgcccaaggctgcaacgtggccgtcaaccacctcgacctcgagaaggacaagcgccacctcgactcgctgctgtccgaagccgccgcgatccgcgagaaggacccggccgcgggcaggctggcccacctgccgggcgacgtgcgcgacccggcgacggggccggcgctggtggccttcgcgctgtccgagtttggcacaaagcggctcgacgtgtgcgtctccaacgcgggcatctgcaccttcgcgccgctgctcgacctgtcggccgacctcttctccaacacggtgcggaccaacctggacggggccttctacgtcgtgcaggcggcggcccgccagatggcgctgcacaacgacccgcccggcggcggctccatcatcgccatctcgtccatctcggccctcgtcggcggcggcctgcaggcccactacaccccgaccaaggccggcgtcctctcgctcatgcagagcgccgccgtcgccctgggccggtacggcatccgctgcaacgccctgctgcccggcaccatcaagacccagctcaacgaggaggacctcaaggacgacgccaagaggacctacatggaagggcgcatcccgctcggcaggacgggcgtgccggacgacttggccgggccggccgtcttcttggcgtgcgacgagctgagcggctacgtgacgggggcgcagctgctggtcgacggggggctgtttgtgaatttgcagtaa

SEQ ID NO: 2457 - protein, 273 aa, Myceliophthora thermophilia
MAPQAKLLAGKTAIITGGTTGIGRAIALTFVAQGCNVAVNHLDLEKDKRHLDSLLSEAAAIREKDPAAGRLAHLPGDVRDPATGPALVAFALSEFGTKRLDVCVSNAGICTFAPLLDLSADLFSNTVRTNLDGAFYVVQAAARQMALHNDPPGGGSIIAISSISALVGGGLQAHYTPTKAGVLSLMQSAAVALGRYGIRCNALLPGTIKTQLNEEDLKDDAKRTYMEGRIPLGRTGVPDDLAGPAVFLACDELSGYVTGAQLLVDGGLFVNLQ

SEQ ID NO: 2458 - DNA, 1035 bp, Myceliophthora thermophilia
atgaccaaggttctcttgacaggtggctccggcttcattgccgcccacatcctggagcagctgctcgccaaaggccacagcgtcgtgacgaccgtccgctcagaggagaaggccgccaagattcgtgaagcctaccccgagaaagttgcctcgggcgatttggtcacggccatagtcccggacatcgcccagccaaatgccttcgacgaggtggtcaagaccccggacctcgaggtcgtcttgcatacggcttcccctttccatttcaagttcagtgatcccaaggagctcctggacccggccgtgatcggcacaacgtcgatcctgcgcgccgtggccgcgtcggccccgacggtgcggcgcgtcgtcgtgacgtcgtccttcgccgccatcgtcgacgaggcgcacgtccgggacccgtcgcacaccttcaccgagcgcagctggaaccccgtcacgctggacgaggtgcacaagcacccgtcgacggcgtaccgggccagcaagacgttcgccgagcgcgccgcctgggacttcgtcaaaaacccggccaacggggcccggttcgacctggtcaccgtcaacccgcccatggtcttcggccccgtcgtgcactacctggccagcctggacgccatcaacacgagcaacgagcggatggtggactgcctgcggggcaagtggagggaggaggtgccgagcgccgggccggtggtcatctgggtcgacgtgcgggacgtggccgaggcgcacatcaaggccggcctggagatccccgaggccgggggcaagaggctgttcgtgaccgccggcctgttcagcaacgccgagctggcgcggatcgcccggaagaacttccccgaggacgccgaccggttgccgaccgagcagaccaagggcggggagttgccggccgagaacgagaggttccggttcgacaactccgagacgaacaagttgttgggcatcaagtatcggtcgttggaggagtccgtggtggatacgatcaagagcctgaagaaatatggcgcgtaa

SEQ ID NO: 2459 - protein, 344 aa, Myceliophthora thermophilia
MTKVLLTGGSGFIAAHILEQLLAKGHSVVTTVRSEEKAAKIREAYPEKVASGDLVTAIVPDIAQPNAFDEVVKTPDLEVVLHTASPFHFKFSDPKELLDPAVIGTTSILRAVAASAPTVRRVVVTSSFAAIVDEAHVRDPSHTFTERSWNPVTLDEVHKHPSTAYRASKTFAERAAWDFVKNPANGARFDLVTVNPPMVFGPVVHYLASLDAINTSNERMVDCLRGKWREEVPSAGPVVIWVDVRDVAEAHIKAGLEIPEAGGKRLFVTAGLFSNAELARIARKNFPEDADRLPTEQTKGGELPAENERFRFDNSETNKLLGIKYRSLEESVVDTIKSLKKYGA

SEQ ID NO: 2460 - DNA, 423 bp, Myceliophthora thermophilia
atgcctaccatgtggttatcagattcgcaaaaaattggagtcgccttttgctccggcggcggcttcttcctcgtagcaggcgtcctccttttcttcgaccgcgccatgctcgcaatgggcaacatcctcttcctgatcgggctcaccatcatcatcggcccgcaaaagacggccctcttcttcgcgcgcaagcagaagctcaagggcaccgccgccttcttcggcgggctcgccctcatcctgctccgatggccgctgacgggcttcctggtcgagctgtacggcatcatggtgctgtttggcgacttcctgggcaccatcgccggcttcgcccgcaatctgcccgtcgtcgggccctacatcggcctggccgtcgaccggatcggactgggcgagcgcaggaacgccgatctgcctgtttaa

SEQ ID NO: 2461 - protein, 140 aa, Myceliophthora thermophilia
MPTMWLSDSQKIGVAFCSGGGFFLVAGVLLFFDRAMLAMGNILFLIGLTIIIGPQKTALFFARKQKLKGTAAFFGGLALILLRWPLTGFLVELYGIMVLFGDFLGTIAGFARNLPVVGPYIGLAVDRIGLGERRNADLPV

SEQ ID NO: 2462 - DNA, 261 bp, Myceliophthora thermophilia
atgtcagaggccggcagaatcggtctcggctggggtggtcatgacgaggggcagaacctcacggagagtgtgccgagggccgggcgggcagtcatgttgcccctgaatcagggtggcatttctgtttggaaatggaaggccctcctggaggctgaggcagatcagcgggcgtcgctcgcgaggatggacgacgcatggaagccatatcagtgccattggaccccggaacccatcatgcacattgctggagtgaagtcatga

SEQ ID NO: 2463 - protein, 86 aa, Myceliophthora thermophilia
MSEAGRIGLGWGGHDEGQNLTESVPRAGRAVMLPLNQGGISVWKWKALLEAEADQRASLARMDDAWKPYQCHWTPEPIMHIAGVKS

SEQ ID NO: 2464 - DNA, 1314 bp, Myceliophthora thermophilia
atgtattcaccgacgcgacaggagcccctccacgtggcaatcatcggcgcgggcatcgccggcgtcagtgtggccctaggcttgcaggctcgcggcgtctcgtacaccatctatgagcgcgccccgggttttcgagagataggggcaggcatcgggttcagtcccaacgcggagcatgcgatgaggtccctgaacccggacatgttcgccgcgtacaggcgggttgccaaccccaatggagaggactacttccaatgggtggacggatatgaaaccaacgagcttattttcaagctgcatgtcggcaaagacagcttcctgggcgggctccgcagcacctttctcgacgagtggtcgcagcttataccatcgagcgccgtgcagttcgacaaacacctcgacaccatcacgaagcccgcccccgactccccatcggacaagctgcttatccacttcacggacggcacaacggccgctgccgacgccatcgtcggctgcgacggcatccgctcccgcgtccgccagctgatcctgcccgagccgccagtccgtccgggatacacgcaaaagttttgcttccgggctctcgccccgatgccggccgcggtggccgcgctgggctacgcccgcacctcgacgcgcttcatgtacaacggcccgggggcgcacctcatcacgtacccggttgccaacagcagcctcctcaacatcctcgcggtgctttcggacccgagccccagctggccgcatccgcaccacacggcagcgggcagcaaatcggaggtgaccgccgcgtttgccgagtggtgcggcgctgcgcgggccattgtcggcttgctgcctgactcggacggcgggaagatggacaaatgggggatctttgacctggcggcggatccggtgccgcagtaccacggcggcagggtgtgcgtggccggtgacgcggcgcacgcgacagggccgcacctcggggcgggagcggggatggggattgaggacgcgctggtgctgggggcgttactggcggaggccaataaaagatggacgggagtggagaaagactcggatggcaaggggaggctggtggagaaggcattggaggtgtataacgacgtgaggtacctccggactcaggaggtgatccattcgacgaggaaagcgtgcgatttgtttcattggcgtgatcctgacgttgcaagggacccagaagggttcggcaaagagatcacagaactgttttatgagatatggaaatacgatgtcgacgggatggtggagagggcggtggccaagttcgttgagacggctctctaa

SEQ ID NO: 2465 - protein, 437 aa, Myceliophthora thermophilia
MYSPTRQEPLHVAIIGAGIAGVSVALGLQARGVSYTIYERAPGFREIGAGIGFSPNAEHAMRSLNPDMFAAYRRVANPNGEDYFQWVDGYETNELIFKLHVGKDSFLGGLRSTFLDEWSQLIPSSAVQFDKHLDTITKPAPDSPSDKLLIHFTDGTTAAADAIVGCDGIRSRVRQLILPEPPVRPGYTQKFCFRALAPMPAAVAALGYARTSTRFMYNGPGAHLITYPVANSSLLNILAVLSDPSPSWPHPHHTAAGSKSEVTAAFAEWCGAARAIVGLLPDSDGGKMDKWGIFDLAADPVPQYHGGRVCVAGDAAHATGPHLGAGAGMGIEDALVLGALLAEANKRWTGVEKDSDGKGRLVEKALEVYNDVRYLRTQEVIHSTRKACDLFHWRDPDVARDPEGFGKEITELFYEIWKYDVDGMVERAVAKFVETAL

SEQ ID NO: 2466 - DNA, 210 bp, Myceliophthora thermophilia
atgtatgtacggattacatgcatcccattgcaagttgccaacccttctcgcaacagttcgctatccatgcaagcagctgcagatacttctcgcatcatcataatcgaaagcacagcactggcaatcctcggtcccgaaatcattcccatcacgatcgaaggatcgcagccggttcctgctacattcctccaacactccagagatacctag

SEQ ID NO: 2467 - protein, 69 aa, Myceliophthora thermophilia
MYVRITCIPLQVANPSRNSSLSMQAAADTSRIIIIESTALAILGPEIIPITIEGSQPVPATFLQHSRDT

SEQ ID NO: 2468 - DNA, 1437 bp, Myceliophthora thermophilia
atgagcgacccagcccctaagcgccccttttcaaaggtgagtcagccgctgccgattgattccggaggttggagagaggagagactcgccctcgctgacccatttcgtctcttccgcccacgcctcacccaggtcatcatagtgggcgcgggcccggcggggctgctgctggccctgctgctctccaagaagggcatccccgtgcacattctcgaggcggcggcggagctggaccagcagccgcgggcggcgcactacggcgcgcccgcgatccccgagttcctgcgcgcgggcatcgccgagcgcatccgcgagcgcggcatggtcctcgacaccatgtgctggcgcgcccccgccgacagggaccacgcttacatcgccggcttcgacgctcgccgggtgctgagcgacgtcgacggccgcggcaccgacctgcggacgcactgcctcgcgctgcaggagctggacgcgctgatgctcgaggaggtgacgggccggtacggcggcctgatcgagtgggagcacagggttgtcagcgtcggccaggacgccgacggggcctggtgcgaggtcgaggtcgccggcggcaggggcgggaagaaggtggtcaggggcgattatgtggtcggttgcgacggcgcgaatagcacggtgcgcaagtcgctgtttggagacgagttccctgggttcacgtgggatgcgcagattattgctaccaacacgtactacccctttgcggagaagttcggctggcaggatgccaatttcatcatccacccggaacacttctttgtgagcagcccgacttttatcaccaccacccctcctccttcccatgcgtacttgccttccggcatggcggctaggataacccgcgatggcctctatcgcatcacgtatggcgagacaccgggtctctcccgcgaagaataccgagaacgcctgccctggaaattcgagaccatcctccccggccaccctaagcccgacgaatacaaagtcatcaacttctccccctacaagatgcaccagcggtgcgcccccaagttccgtgttggcagggtgctcttggcagccgacgcggcccacctatgcaatccctggggtggacttggcataaccggcggctttgtggacgtcggcgggctgtacgattgccttgcgggaatctgggacggcaaggcggacgagtcaatcctggatctgtactcggagaagcggatagagaagtggaagaccatcatcaacccggtctcgtccgagaacttcaggagggtgtcggacaaggaccccgccacgaggttcgagagggacgagtttatgcagatgttgaagaagggcgagacggacgaggcttttctgaaagaattgctgatgggcccgatggaggtgcggtacgacttcacccagaattataaggatgcggcgaagatatga

SEQ ID NO: 2469 - protein, 478 aa, Myceliophthora thermophilia
MSDPAPKRPFSKVSQPLPIDSGGWREERLALADPFRLFRPRLTQVIIVGAGPAGLLLALLLSKKGIPVHILEAAAELDQQPRAAHYGAPAIPEFLRAGIAERIRERGMVLDTMCWRAPADRDHAYIAGFDARRVLSDVDGRGTDLRTHCLALQELDALMLEEVTGRYGGLIEWEHRVVSVGQDADGAWCEVEVAGGRGGKKVVRGDYVVGCDGANSTVRKSLFGDEFPGFTWDAQIIATNTYYPFAEKFGWQDANFIIHPEHFFVSSPTFITTTPPPSHAYLPSGMAARITRDGLYRITYGETPGLSREEYRERLPWKFETILPGHPKPDEYKVINFSPYKMHQRCAPKFRVGRVLLAADAAHLCNPWGGLGITGGFVDVGGLYDCLAGIWDGKADESILDLYSEKRIEKWKTIINPVSSENFRRVSDKDPATRFERDEFMQMLKKGETDEAFLKELLMGPMEVRYDFTQNYKDAAKI

SEQ ID NO: 2470 - DNA, 339 bp, Myceliophthora thermophilia
atggggctcagcaatccaggctcggaccgggagaccttctccaggtacctcaagagaacgcaaacgtcggaaggcggatcccaggccgccaacgaggacgccgtttggaccaacgtcgccgaggaagagaccaagcggcccaacatcgtggacgcggtcccgagggtgtacgggacgccaaatctgagcgtcgtggctgcgaacgtgatgccttctatcacgagagtcgatacaatggggacaacggcggcagaggagggatctgaacaggtctttgaaggggaggtcgtggtatgcttgtcacttctggtttacgcaccaagtcttgaaccgaactga

SEQ ID NO: 2471 - protein, 112 aa, Myceliophthora thermophilia
MGLSNPGSDRETFSRYLKRTQTSEGGSQAANEDAVWTNVAEEETKRPNIVDAVPRVYGTPNLSVVAANVMPSITRVDTMGTTAAEEGSEQVFEGEVVVCLSLLVYAPSLEPN

SEQ ID NO: 2472 - DNA, 717 bp, Myceliophthora thermophilia
atgaaagcggccaacgacgaactgacgcgctgggacttttggttcaagcattcggacgacccggccgaggagctggcccgcttcaacatcacgctggtcaaggaccttccaggcgtgggcgagaacctgggcgataactacgagggttccctgctcgccctgggcgccgccccaatcgactcgggcctcatcaccctgctcctacgcacaccctcggccccgaccgccaggcgtaacatcttcgcctgggcttctggccccggtttccccacctaccacggcccgacccagtacgagtgcgccctggtgcacctggcgcccaagtcccaggccggctctgtccgtctcgtctcggccgacccgcaggatcgacccgaaatcaacttccgcttcttccgcgaccgcggcgacgaggaccctgaaggagctgctacacccctgcccggacaaaagtgctccgacgagtcccaggccgagtatatcaagctccaggcctactcgcaccacgcgacatcgacctgggccatcggcgccgacgacgacctcatggccgtgctcgatcacaaattccgcgtccggggtgtcgaaggcctccgcgtcgtcgacgcgagcgccttccccgccgtccctggcgcgttcccgagctgcccgactatggtgctcagtgccaaagccgctgaggtcatcctggcggatgcctccgagaggctccggtaa

SEQ ID NO: 2473 - protein, 238 aa, Myceliophthora thermophilia
MKAANDELTRWDFWFKHSDDPAEELARFNITLVKDLPGVGENLGDNYEGSLLALGAAPIDSGLITLLLRTPSAPTARRNIFAWASGPGFPTYHGPTQYECALVHLAPKSQAGSVRLVSADPQDRPEINFRFFRDRGDEDPEGAATPLPGQKCSDESQAEYIKLQAYSHHATSTWAIGADDDLMAVLDHKFRVRGVEGLRVVDASAFPAVPGAFPSCPTMVLSAKAAEVILADASERLR

SEQ ID NO: 2474 - DNA, 1116 bp, Myceliophthora thermophilia
atgctaccattcgttattaagtcatcgacgctcgcgcctcccgactgggagaagcgcggcgcgcccaacgccaccttcgtgttcgaccggactgttttctacgtgcactcttcctcctacggtccactccaggtgtcgtattattccaagagggtgcacccgaccaacacatcgtttgctgaagctctcaggaccatcgacctgcgcccgagccgatctggcttcaacggcgggctcctatccggcagtgcgtacacaaccgagaccattcacccagcatccgctacccgatcgtcctcgcatacaagctatctcacctgcgcaatacagaacattcaactcaaggtttacaacatggctcttgcgtccaaaattctgttcaggggcgacaaagaaaccggtgtcactgtgtccaccgagggaacgtccctctacaccctaacggcgaccaaggaagtcgtcctgttcgccggcatgtttcactcgcctcagctcctcatgctttccggcgtagggcctcggcccctgctcgactcgctgcggatcccagttatctccgacctacccggtgtagggcagcacctccaagaccctatcttcatctcggtccagagcggtgtcaaaacgccatcgttggcaagcgagctggccgacccaaatcggctgggccccaatctcacggcgtacatcaacaagaaagcgggtccttacagctccgcgggtggttacatagcgtttgagaagctgccagccgcgtcccgcgcggttttctcggcccgcaccagggatggctcaccgaccctgcgaacgccgagcagctggaaggtggttcccgaggtcacgcccggccggtccgtcgagacagacgagcagatcctggactatatccagaacaaggctatgcagatgtggcacgcgagtgccaccgacgccatgggtaatgacccggccaatggcaccgtggttgactggcgcgccaaagtcttcggcgtcgacggactgcgagtcgtggacgcctctgctctgccattcgccctgccagggcatcctcaggtaaccatatacgcgttcgccgaagagattgcggcgttgattctagaggatattaaacaatag

SEQ ID NO: 2475 - protein, 371 aa, Myceliophthora thermophilia
MLPFVIKSSTLAPPDWEKRGAPNATFVFDRTVFYVHSSSYGPLQVSYYSKRVHPTNTSFAEALRTIDLRPSRSGFNGGLLSGSAYTTETIHPASATRSSSHTSYLTCAIQNIQLKVYNMALASKILFRGDKETGVTVSTEGTSLYTLTATKEVVLFAGMFHSPQLLMLSGVGPRPLLDSLRIPVISDLPGVGQHLQDPIFISVQSGVKTPSLASELADPNRLGPNLTAYINKKAGPYSSAGGYIAFEKLPAASRAVFSARTRDGSPTLRTPSSWKVVPEVTPGRSVETDEQILDYIQNKAMQMWHASATDAMGNDPANGTVVDWRAKVFGVDGLRVVDASALPFALPGHPQVTIYAFAEEIAALILEDIKQ

SEQ ID NO: 2476 - DNA, 570 bp, Myceliophthora thermophilia
atggcgtccaaggcggcagcctccgctgctggcggagtcgtcagcatttcgaagaaatataccctccaatcgaccggcatctgggagcgcatccggcgcgcgaccgccatcgacccgaaccgctccaacggtgtgccgctcaacccgtacaaccggaacccggcgcccggcagcaacgacccgctcaagtacgacgaccccgtcaccgcgccggcgggcgacatcgccgacaacccgtactggaagcgcgacgtgcgccgcaactacccgcgccccagcgtcatcaaccaggcccagcaggtcgccctgctcaccgtcggcagcgccgcccagccgcgcgtcgagctgatcggcgaggagggcagcaaggcgctggtggcggccgagcaatccggtaaggagctcggcgtcgccggctacctggagaacagcggcgtcgaggccgccaagagggtcctcgagatgacgggcggccttcccccgctgcctagcgggcagagcctgcgggggggcaagtgggacgtgcacaagtatagcctgaactcggagcagtcgtatggagagaagtga

SEQ ID NO: 2477 - protein, 189 aa, Myceliophthora thermophilia
MASKAAASAAGGVVSISKKYTLQSTGIWERIRRATAIDPNRSNGVPLNPYNRNPAPGSNDPLKYDDPVTAPAGDIADNPYWKRDVRRNYPRPSVINQAQQVALLTVGSAAQPRVELIGEEGSKALVAAEQSGKELGVAGYLENSGVEAAKRVLEMTGGLPPLPSGQSLRGGKWDVHKYSLNSEQSYGEK

SEQ ID NO: 2478 - DNA, 1188 bp, Myceliophthora thermophilia
atgggcggcttttggcactcggctgccccgccgcttgcccgcgcagccggatcaacaacaccgagagaacccgccctcctgctgaactctgcatcttctcccatcccaccaactcaccgggctgcgtcgcgacgagagagattcagaatgaagcctgccgtgaggttatggaagcccgtcctccgcgcccagcgccgggcgttttcgtcttcggcgcgcagactggacaactatgccttcatcggtctggggcaaatgggctaccagatggcgaggaatttgcaggcgaagttgccgccaagcgacaccattcgtgtcttcgacatcaacaaatcggcggcggacaagctggtgcaggagatggccgcacaacaggccggcggcgcggctccggaggtggcacacagcgcggcagacgcagcaagggatgcggatacgcttatcacctgtctcccggaaccgaaacacgtcaagtcgacatatgacgctatcatctcggcttttcagacagaaccgaaaagagacaaatcctcgcagtccaaatcgcgtctgtttatcgattgttctaccattgaccctacctcgtcacgagaagtcgctaatgccgtgtcctcggccttccccaacggtgagggcgtcttcgttgacgcgccaatgtcgggtggtgttgttggggcgacggctgggactttgaccttcatgttgggagctccacaaagcctgctcggccgggttgaacctatcctcctgcggatgggtaagcgtgttttgcattgcgggccacaaggggcagggttatcagccaagctggccaacaactacctgcttgcgattgagaacatcgcaacagcagaggccatgaatttaggagttaagtgggggctcgatcccaaggtcctcgccagcgttatcaatgtcagcaccggaaggtgctggccaagcgaggtcaacaaccccgtgccaggcgttgtggaaacggcgccggcgggccgagactacgcaggcggcttcggtatcggcctgatgagaaaagatttgaggcttgctatcctcgcagccaaggaagctggcgcagagctcccattagcgagcaaggcgtcggaagtttatgaggcagccgagtctgacgagaagtgtaaggggcgtgatttttcggtggtttaccgttggcttggtggaaaggagtga

SEQ ID NO: 2479 - protein, 395 aa, Myceliophthora thermophilia
MGGFWHSAAPPLARAAGSTTPREPALLLNSASSPIPPTHRAASRRERFRMKPAVRLWKPVLRAQRRAFSSSARRLDNYAFIGLGQMGYQMARNLQAKLPPSDTIRVFDINKSAADKLVQEMAAQQAGGAAPEVAHSAADAARDADTLITCLPEPKHVKSTYDAIISAFQTEPKRDKSSQSKSRLFIDCSTIDPTSSREVANAVSSAFPNGEGVFVDAPMSGGVVGATAGTLTFMLGAPQSLLGRVEPILLRMGKRVLHCGPQGAGLSAKLANNYLLAIENIATAEAMNLGVKWGLDPKVLASVINVSTGRCWPSEVNNPVPGVVETAPAGRDYAGGFGIGLMRKDLRLAILAAKEAGAELPLASKASEVYEAAESDEKCKGRDFSVVYRWLGGKE

SEQ ID NO: 2480 - DNA, 1245 bp, Myceliophthora thermophilia
atgagaggcccgtccaactcgggaatctcgcagctgatgcgcccctcactctcccgagccctattatcaacctccccccaaggtcaacaatggccacggccagcctcatgggagacgactcgcttgaacccaaccggccgcttactattattactacaacatgccaatcaacgctcggccttctccaccaccaccacatcatcccttttcgaggagaaagcggcccaggagccgcagcagccgaaccagccgaaatggcggccgcctagcgatcaagcactcgagcagcgccccgtgctggtcgtcggggcgggtaacattggccggcgcgtggcgctggtatgggcgtcgaaccggcggccggtcaccatctacgacatctcgccggaggcgctgcggtcggcgaccgaacgcacccggggccccgtgcggacgacgacggacctgcggacggcgacggcgacgtcgggctcgccggcgcgcgactcggccgggggctcgccggcgcgcgactcggccggggcggtcgcggccgaggagctcgccagggcgccgtggctggcgatcgagtgcctgcccgagtcgcggccgctcaagacgtcggtgctggcgctgctggagcggtcgctccccgccgactgcgtgctggcgtccaacagcagcagcctgacgacggccgagatggcggccgagggcccgctgaaccacccgcaccggctgctcaacacgcactacctgatcccgccgcgcaaccgcatggtggagatcatgtcgtccggggcgaccgacccggccatcgcgcccttcctggcggcccacatgcgccgcgtcgggctggcccccgtcgtggtgcccgacggcctccagtcgcccggcctcgtcttcaaccgcgtctgggcggcctgcaagcgcgagacgctggcggtgctggccgagggcgtggcgcggccggccgacgtcgacgccctgttccgcgacttcttccacgccgagaagggcccctgcgagcgcatggacgaggtcggcctcgacacggtcgcccgggtcgagcagcacaacctcgagcgcgcgccggggctcggcagcgagggcgtgctgcgctggctgcgcgacaactacgtcgacaagggcaggctcggcgagaagaccggcgacggcctgttcaccgaggccgagagggctcggctgagggaggtgcacgagcgagggaggcatgagaaggtcgaggaaacagccggcgcataa

SEQ ID NO: 2481 - protein, 414 aa, Myceliophthora thermophilia
MRGPSNSGISQLMRPSLSRALLSTSPQGQQWPRPASWETTRLNPTGRLLLLLQHANQRSAFSTTTTSSLFEEKAAQEPQQPNQPKWRPPSDQALEQRPVLVVGAGNIGRRVALVWASNRRPVTIYDISPEALRSATERTRGPVRTTTDLRTATATSGSPARDSAGGSPARDSAGAVAAEELARAPWLAIECLPESRPLKTSVLALLERSLPADCVLASNSSSLTTAEMAAEGPLNHPHRLLNTHYLIPPRNRMVEIMSSGATDPAIAPFLAAHMRRVGLAPVVVPDGLQSPGLVFNRVWAACKRETLAVLAEGVARPADVDALFRDFFHAEKGPCERMDEVGLDTVARVEQHNLERAPGLGSEGVLRWLRDNYVDKGRLGEKTGDGLFTEAERARLREVHERGRHEKVEETAGA

SEQ ID NO: 2482 - DNA, 2646 bp, Myceliophthora thermophilia
atggagacgacgctgccgctccccttcctcgtcagcgtcaatgtccctccgggactcggcggcgagaaggaagggctcaagcgcgaggaagtgtcatgccttggctgcgtcttctttgaggttgcccccccgacattcgacaagatcctccgcttcctgagccgccacaacaccgagttccagtccttcttcgacgtcacacgcctcgagtcccgcgatgacgtcgtcaccctgctcgacgccggcgcccgcaaggtctttgtccgccccgagcagctgcccgactttgccgagttcggttcccgggttgccgcggtcgtgagcggtggcgatgtcagcaacttgtcctcggccgatacagagcgcggccttctcgtctctggtttcgaccagtcagcacccgacgccgcgcgtttcgccgaagaagtcaagacgaagaagattgggtccttgttcatcaagcccgttgcggggactaacctgcgagacttcgtccagcttgccgccgagtgcagcgccatccccatcctgccatcgacggggctgagcagcaagccgcaggacgacaagcttgccgtatcccagatcctcgccgctacgtggaagtcggaccgcccggacggactggtccccaccgtcgtcgtggacgagcacgacaccgccctcggcctcgtgtacagcagcgaggagagcgtcggggaggccctgaagacccagactggcgtctaccagagtcggaagcgcgggctgtggtacaagggggcaacgtcgggcgacacgcaagagttggtccggatatcactcgactgcgacaacgatgcgctcaaattcgtcgtcaggcaaaaggggcgtttctgccacctcgaacaaccgggctgctttggggatctgaagggcatcgccaagctcgagaagacgctcctgtccaggaaacagtcgtcgccagagggttcctacaccgctcgcctgttctcggatgagaagttgctgcgggccaagatcatggaggaggcggaggagctctgcgacgcaaagacgcccgaggaggtcgccttcgaggcggccgacctcatctactttgccctgaccagggccgtgggtgccggcgtgacgctggccgatatcgagaagagcctcgatgccaagagcttcaaggtcaagcgcaggacaggcgacgccaagggcaagtgggccgagaaggagggcatcaagcctgacgcgagcgcgaacgcgagcgcgagtgcgactcccgtcgagcccgctcagggggctgcgcccaaggaagcgcccagggaggcgccaaagaaggaggtcgcggccgagaagatcactatgaaggtctacgacatggccaccgtttcggcggccgagctcgacgaggcattgaagaggccgtcccagaagtcgtcggacgccatcctcaagatcgtcactcccatcatcgacgatgtccggaagaacggcgacaaggcggtcctcgcctacacgcacaagttcgagaaggcaacgtcgctcacgtcgcccgtcctcaaggcgccgttccccgagtcgctcatgcggctgccgcccgagaccgtcaaggcgatcgacgtgtcgttcgaaaacatccgcaagttccacgcggcgcagaaggaggagaagccgctgaaggtcgagaccatgcccggcgtcgtctgcagccgcttctcgcggccgatcgaggcggtcggcctctacgtgccgggcggcactgccgtcctccccagcacggcgctcatgctcggcgtcccggccatggtggccggctgcaagaagattgtgctcgcgtcgccgccgcgggcggacggcaccatcacgcccgagatcgtctacgtggcgcacaagatcggcgccgagtcgatcgtgctggcgggaggcgcgcaggcggtggcggccatggcgtacggcacggagagcgtgagcaaggtggacaagatcctcgggccgggcaaccagttcgtcacggcggccaagatgtacgtcagcaacgacaccaacgcgggcgtcagcatcgacatgccggccgggccgtccgaggtgctggtcatcgccgacaaggacgccaacccggcgtttgtggcatcggacctgctgtcccaggccgagcacggcgtcgacagccaggtggtgctgatcgccgtcgacctcagcgacgcgcagctggccgccatcgaggacgaggttcacaagcaggcgatggcgctgccgcgggtggacattgtgcgcggctcaatcgcgcactccctcacggtgcgcgtgaggacggtggacgaggcgatggagatcagcaacaagtacgccccggagcacctgatcttgcagctcaaggacgccgaggcggcggtggacaaggtcttgaacgccggcagcgtcttcattggcgaatggacgccagagagcgtgggggattattcggctggtgtcaatcactcgctgccaacctacggctatgccaagcagtactcgggcgtcaatctcgcgtcctttgtcaagcacatcacgagctcgaacctcacggccgagggcctgcggaacgtgggcgaggcggtgatgcagcttgccaaggtggaggagctcgaggctcaccggagggcggtcagcatcaggttggcgcacatgcagcggtga

SEQ ID NO: 2483 - protein, 881 aa, Myceliophthora thermophilia
METTLPLPFLVSVNVPPGLGGEKEGLKREEVSCLGCVFFEVAPPTFDKILRFLSRHNTEFQSFFDVTRLESRDDVVTLLDAGARKVFVRPEQLPDFAEFGSRVAAVVSGGDVSNLSSADTERGLLVSGFDQSAPDAARFAEEVKTKKIGSLFIKPVAGTNLRDFVQLAAECSAIPILPSTGLSSKPQDDKLAVSQILAATWKSDRPDGLVPTVVVDEHDTALGLVYSSEESVGEALKTQTGVYQSRKRGLWYKGATSGDTQELVRISLDCDNDALKFVVRQKGRFCHLEQPGCFGDLKGIAKLEKTLLSRKQSSPEGSYTARLFSDEKLLRAKIMEEAEELCDAKTPEEVAFEAADLIYFALTRAVGAGVTLADIEKSLDAKSFKVKRRTGDAKGKWAEKEGIKPDASANASASATPVEPAQGAAPKEAPREAPKKEVAAEKITMKVYDMATVSAAELDEALKRPSQKSSDAILKIVTPIIDDVRKNGDKAVLAYTHKFEKATSLTSPVLKAPFPESLMRLPPETVKAIDVSFENIRKFHAAQKEEKPLKVETMPGVVCSRFSRPIEAVGLYVPGGTAVLPSTALMLGVPAMVAGCKKIVLASPPRADGTITPEIVYVAHKIGAESIVLAGGAQAVAAMAYGTESVSKVDKILGPGNQFVTAAKMYVSNDTNAGVSIDMPAGPSEVLVIADKDANPAFVASDLLSQAEHGVDSQVVLIAVDLSDAQLAAIEDEVHKQAMALPRVDIVRGSIAHSLTVRVRTVDEAMEISNKYAPEHLILQLKDAEAAVDKVLNAGSVFIGEWTPESVGDYSAGVNHSLPTYGYAKQYSGVNLASFVKHITSSNLTAEGLRNVGEAVMQLAKVEELEAHRRAVSIRLAHMQR

SEQ ID NO: 2484 - DNA, 1530 bp, Myceliophthora thermophilia
atgctggatcagcgcggcacgggaccggacccggacccggccgtggccatcgccgtcgcggttgccgtcctcgtcgctctatacttggtccgcctcaaccagctgtttctgagcacgcccgacgaggtcaagaaggcggcgccgaccagatggacggacaaactgctgcgagacacgtacgcgaggctcgaggcgcaccccgtgacgactaaatcctacgccgcccgcatccctcccaagctcgagagacgatatatcgtcactggcggttccggtctcgtgggcggcttcatcgtcctgcagcttctcgaacggggccaaccgcccgagagcatccgcgtcgtcgactttcgggcgcccgaccgcgccgacatgctccggggcccggcgacgcgcgtcgactttgtccggaccgacatctcctcggccgaggcgacggcgaaggccttctcgaagccgtggcacccgtcggtcgcgggcctgcccctgaccgtgttccacaccgcggccgtcatcgtgccgtcggaccggtcccggctcctctcgggcttctgcgaggccgtcaacgtccggggcacccgcaacgtggtggaggcggcgcggcgggcgggcgccgacgtgctcgtgtccaccacgtcggccagcatcagcatccgccccgtcgagctctgggtcccgccctggcggctgtggtcgacccgggcctccccgccccggggctactggcaggtgcaggacgagagggacttcttcgagcccctgcgcgagcacgccgccttctacgccaactacccggcgtccaaggccgaggcggagcggaccgtgtgtgcggccaattcggccgccttgcggaccgggtgcatccggcccgccaacggagtctacggcaaccctaccgacaacaccgtcggcggcgccctggcatggagactctatcccacgtggacttcgcacatcgtccagaactttgtccacggcatcaacgtggccatcgcgcacctcgacttcgaagcgatcctcgccgcgaccgggtccgagtcgcgcccgcaggccgggcggccctttgtcgtcacggacccgaacccgcccatccgctatggcgacctgtaccgcctcctgcggaccctctccgtcacccggttccgcgtgctgcccctccagccggtgctcatgatcctactgtcgtaccccatcgagtggtacacgctcgcgctcgcccggtggcccgccctgcgccgggtcctgccacggctccccggcaacgtgaagcacctccagccgggcatcttcagcatctgcacccacctggtggcgtccaacgacgcggccggccgcccggtcgcccagggagggctcgggtacactggggtgctgacgacgctcgagggcatgacgcaggaggtcgtcgagtggaaccgggaccaccgggacgccaaggaggggccgcccaggtcgtacaagaccagcgtctcgctggccgacgacattgccagggcggcggcggtgatggagtccgttacaggcggttga

SEQ ID NO: 2485 - protein, 509 aa, Myceliophthora thermophilia
MLDQRGTGPDPDPAVAIAVAVAVLVALYLVRLNQLFLSTPDEVKKAAPTRWTDKLLRDTYARLEAHPVTTKSYAARIPPKLERRYIVTGGSGLVGGFIVLQLLERGQPPESIRVVDFRAPDRADMLRGPATRVDFVRTDISSAEATAKAFSKPWHPSVAGLPLTVFHTAAVIVPSDRSRLLSGFCEAVNVRGTRNVVEAARRAGADVLVSTTSASISIRPVELWVPPWRLWSTRASPPRGYWQVQDERDFFEPLREHAAFYANYPASKAEAERTVCAANSAALRTGCIRPANGVYGNPTDNTVGGALAWRLYPTWTSHIVQNFVHGINVAIAHLDFEAILAATGSESRPQAGRPFVVTDPNPPIRYGDLYRLLRTLSVTRFRVLPLQPVLMILLSYPIEWYTLALARWPALRRVLPRLPGNVKHLQPGIFSICTHLVASNDAAGRPVAQGGLGYTGVLTTLEGMTQEVVEWNRDHRDAKEGPPRSYKTSVSLADDIARAAAVMESVTGG

SEQ ID NO: 2486 - DNA, 687 bp, Myceliophthora thermophilia
atgaacaagaaaaggaaaacgcagcccgtccttcagttcaccaccgggctcggcccgaaacccgtgcagccggacgacctgtcggggcgcactgccgtagtggtaggcggcgccttcggcattggcttcgatgtgttgcgagcgctgactggcgcgggctgccgcgtgctcatggccgagtcgccggggggggcgcaggtcgagtggcacgagtgcgacatgggcgacctggcgcaggtccgcgaggtcttcgcgcgcctgcgggaggagcggctccggggggggacgacgacggggccggctcgactaattacctggttgctgtcggcaggcatcaacaccaacgagttcggcctcgaccgcgacggcatcgaccggcactttggcgtcaactttgctcgcccagttctacgtcgtcaacctgccgtggccgctgctgcgcaagacggccaagctgtccggcggcggagcggcaggacctgggacagcgccctgtgggccctgacgtcggacaagcgatttttccagaacggctggtactacagcgaccaggaccagcccggcaaggagtcgtcccaggcttcggatccgaacatgggggcggcactctgggacctgtcgcatcgcatcaccagggagaagttgggggaggatgctttggtggactggaaggcctgcgcctattag

SEQ ID NO: 2487 - protein, 228 aa, Myceliophthora thermophilia
MNKKRKTQPVLQFTTGLGPKPVQPDDLSGRTAVVVGGAFGIGFDVLRALTGAGCRVLMAESPGGAQVEWHECDMGDLAQVREVFARLREERLRGGTTTGPARLITWLLSAGINTNEFGLDRDGIDRHFGVNFARPVLRRQPAVAAAAQDGQAVRRRSGRTWDSALWALTSDKRFFQNGWYYSDQDQPGKESSQASDPNMGAALWDLSHRITREKLGEDALVDWKACAY

SEQ ID NO: 2488 - DNA, 384 bp, Myceliophthora thermophilia
atgagcttcgcccagctgaaggccggaggcacgggcgtggtcgagctcgtccgtcctgggccgcctgcgcgcggtccgaccccatggacgacgcaacagcagccgctcaccccgacccgggacgaacccctccaccgaaccctgtcgctgcgcctggcgaccggccgcgtcacgccggaggaccaacaccaccaccatcaccaccaccaggcagcagcccaagaaccggcagcacggacaccgcacaccattctctacgacgacctcctcgcgcgccaccccgagttcgccattgtcttgccccggaggagggggaggagggggaggagaggaatggggaagggaggccgagggaggggccgagggcaccgaagaaggcattga

SEQ ID NO: 2489 - protein, 127 aa, Myceliophthora thermophilia
MSFAQLKAGGTGVVELVRPGPPARGPTPWTTQQQPLTPTRDEPLHRTLSLRLATGRVTPEDQHHHHHHHQAAAQEPAARTPHTILYDDLLARHPEFAIVLPRRRGRRGRRGMGKGGRGRGRGHRRRH

SEQ ID NO: 2490 - DNA, 642 bp, Myceliophthora thermophilia
atggttcagaacggaggtgacttcgacctcgacatcgacatggctaccaacgaactcgagaaccgcgaaaagtactcgcagaagttggtcaacgaggcctatgccaaaatcgaggcactcgagggcgccaaagcgaagcgtatcaagatcgaactacctggcaaatacggaggaactaaggaggatctcgtaggattcctaacaaacctccgatcctacttccggctcaatgacgacaagtttccagacgacaaagccaaagtcctctatatagctacgagactagaggacaaacgagacgcgtttacgcaggcagtcttccgatcttataaccgtttcgaagaagagcttcggaaagtttttagcgataaagacgagaagatttatacgaaggaaattacggctatcgacaaaaccactaaggacgtcatcaaagtagtagccacgagctacgaagataagggcagtgacgcggatagtctcggacacgacggcaacggtaaagacgaacaagcactatactccaaactagtcactgtagatctagagacaggtcttgccgaatgggacatggcaggagagtatgcgccgctaatttcgattctcccagccttaaggcagtggggtttcatagtcacgtag

SEQ ID NO: 2491 - protein, 213 aa, Myceliophthora thermophilia
MVQNGGDFDLDIDMATNELENREKYSQKLVNEAYAKIEALEGAKAKRIKIELPGKYGGTKEDLVGFLTNLRSYFRLNDDKFPDDKAKVLYIATRLEDKRDAFTQAVFRSYNRFEEELRKVFSDKDEKIYTKEITAIDKTTKDVIKVVATSYEDKGSDADSLGHDGNGKDEQALYSKLVTVDLETGLAEWDMAGEYAPLISILPALRQWGFIVT

SEQ ID NO: 2492 - DNA, 1488 bp, Myceliophthora thermophilia
atggagatcgaacttgcagcgccgaatggcaggaagtggacccagccactgggcctcttcatcaacaacgagtttgtcaagagcagcaatgagcagaagatcgcctccatcaaccccacaacggaggaggagatatgctccgtctttgccgccacggccgacgatgttgacaaggccgtggcagccgcccgcaaggccttcaaagatccctcatggaggtccctttccggcactgagcgcggggccctcatggtgaagctggccgacctggttgcgcagcacgccgagacgctggccaccatcgagtgtctcgacaatggtaaaccctactcggtcgcgctcaaggagaacgtgccggaggtgatcaacgtcctcaagtattatgccgggtacgccgacaagaactttggtcaggtcatcgacgttggcccggccaagtttgcctacaccctcaaggagcccctaggcgtctgcggccagattatcccctggaattatcccctcgacatggcggcctggaaactgggacccgccctctgctgcggcaatacggtggtgctcaagcttgccgagcagaccccgctctcgatgctgtacgtggcacggcttatcaaggaggccggctttccgccgggcgtggtcaacattatcaatggccacggccgggaggcgggcgcggcgctggtgcagcaccctggcgtggacaagatcgccttcaccggcagcactgccaccggcaaggagatcatgaagatggcctcggcaaccatgaagaacatcacccttgagacagggggcaagtcgccgctcattgtgtttgaggacgccgacctcgatctagcggcgcagtggtctcatatcggcatcatgagcaatcagggccagatctgcaccgccacgtcgcgcatcctggtccacgagaaggtgtacgacgagttcgtcgggcggttcaaggccaaggtcgaggagatctcggtggtgggcgacccgtttgaggagaccacgttccaggggccgcaggtgacaagggctcagtatgatagagtgctttcgtacatcaagtcgggccaggaagaaggcgcaacgattgtcctgggtggcgaaccgctgccacagaaaggcaagggcttcttcatcgcgccaaccgtcttcaccaacgtgaggcccgaaatgaagatcttccgcgaggagatctttggcccttgcgtggctatcgtcaagttcgatacggaggaagaagccattcagctgtccaacgacacgacgtacggcctcggggcagcgctcttcaccaaagacttggtgcgggcgcaccgggttgccagggagatcgaggcgggcatggtctggatcaacagcagcaacgattccgatttcaggatcccgttcggaggcgtcaagcagtcgggaatcggcagggagctgggcgaggccgggttggcaccgtactgcaatatcaaggcggttcatgtgaacatggcggcgtga

SEQ ID NO: 2493 - protein, 495 aa, Myceliophthora thermophilia
MEIELAAPNGRKWTQPLGLFINNEFVKSSNEQKIASINPTTEEEICSVFAATADDVDKAVAAARKAFKDPSWRSLSGTERGALMVKLADLVAQHAETLATIECLDNGKPYSVALKENVPEVINVLKYYAGYADKNFGQVIDVGPAKFAYTLKEPLGVCGQIIPWNYPLDMAAWKLGPALCCGNTVVLKLAEQTPLSMLYVARLIKEAGFPPGVVNIINGHGREAGAALVQHPGVDKIAFTGSTATGKEIMKMASATMKNITLETGGKSPLIVFEDADLDLAAQWSHIGIMSNQGQICTATSRILVHEKVYDEFVGRFKAKVEEISVVGDPFEETTFQGPQVTRAQYDRVLSYIKSGQEEGATIVLGGEPLPQKGKGFFIAPTVFTNVRPEMKIFREEIFGPCVAIVKFDTEEEAIQLSNDTTYGLGAALFTKDLVRAHRVAREIEAGMVWINSSNDSDFRIPFGGVKQSGIGRELGEAGLAPYCNIKAVHVNMAA

SEQ ID NO: 2494 - DNA, 2820 bp, Myceliophthora thermophilia
atggtcgccgcaaagattgacgggacggcgattgcccggaaggtgcgcgagcggttgcaagcgcaaattgccgaaaagaagtccatcaacccgaggttccagccgtgcctcaaaatcatccaagtcggtgaccgctccgattcatccacatatgtgcgcatgaaactcaaggccgccgaggagtgcggcatcgcttgcgagctgatcaagtttgatgaaacggccaccgaggcggaactgattgctcgtattgtcgccctcaacaacgaccctgctgtgcacggcatccttgtgcaacttcccctgccgaagcacatctccgagtacaatgtaacgtcgaccgtggccagtgagaaggatgtcgacggctttggcacctacaacatcggcgagctggccaagcgtggggggcgccctttcttcgtgccatgcacgcccaagggcatcatggtgcttcttgaagaggccggcgttgaactggccgggaagaacgccgtggtgctggggaggagcgacatcgtcggcagcccggtcagctacctcctgaagaatgccgatgccacagtgaccgtctgccactccaagaccaaggatctggactcgtacctgaagaatgccgatgtgcttgttgttgctatcggacagccgggcttcgtcaagggcgaacagctcaagcctggagttgtcgtcattgatgtaggaacgaactacattcccgacgcaaccaagaagtccggccagcgtctcgtgggagatgttgatttcgagtcggcctcccaggttgcctcccagatcactcctgttcctggaggcgttggtcccatgacggtcgccatgctcctccaaaacgttgtcgaggctacgacccagtcgttcgaggtggaaaagcagaggcacattgtgcccctaccgcttaagcttctcaaccccgttccttccgacatcgtcatctctcgagcgcaggcgcccaaacccatcactcaaatcgcaaaggaaatcggcattgccgcctcggagctcgaaccgtatggccagtacaaggccaaggtcgaccttagtctgctgaaacgtcttgaccaccgtcggaatggtcgctatgtcgtcgtcacagggatcacccctactcctctgggcgaaggcaagtcgacgacgacaatgggtctcgcccaggccctaggcgcgcatgttggtcgcgtcacgttcgccaacgtacggcagcccagccagggcccaacattcggcatcaaaggcggtgctgctggcggtggctacagccaggtcattccgatggatgagttcaacctgcatctgacaggcgacatccacgccatcaccgccgcgaacaacctgcttgccgctgcgatagacacgcgcatgtttcacgaggccacccaaaaggatgcagccctctacaggcgactggttcccgtcaagaacggcaagcgggagttcacgcccgtcatgttgcgccgcttgaagaaactgggaattaacaaaacagaccccgactcgctgaccgaggaggagatcgcccgcttcgctcgtcttgacatcgacccggagaccatcacttggcgccgcgttctcgatgtcaatgaccggcacctgcgcgggatcgtcatcggcaacgcacccaccgagaggggtcacagccgccagaccggttttgacatctccgtggccagcgagtgcatggcgattcttgcgttgagcacgagcctggctgacatgcgggagcgcctcggcaggatggtcgttgccagctcgagaagcggtgaacctgtcacctgcgacgatatcggcgctggtggtgccctcacagccctgatgaaggacgctatcaagccgaacttgatgcagagcttggagggcacccccgtttttgtgcacgcgggaccctttgccaacatcagcatcggcaacagctccattctggctgataagatggccctgaagcttacaggtaccgagcccgatgaggaccactcggccaaggctggcttcgtcgtaacggaggctggcttcgactttaccatgggcggtgagcgctttttcaacatcaagtgccgcacctcgggcctcgtcccggatgtggtcgtcgtggttgctaccatccgcgcgctcaaggttcatggaggaggcccgcctatctcacctggcgctcctctcgatgcggtttacaaggaggagaacgtcgaggtgctgcgcaagggctgcgtcaacctggccaagcatgtcgccaatgccaagtcatacggcgtgcccgttttggtggctatcaataagttctcaacggatacacaagccgagatcgacgttgtccgcgaagaagctatcaaggcaggtgccgaagatgcagtcctggccaaccactgggccgagggcggcaagggcgctgttgaccttgcaaaggccgtggtggccgccgctgagaagcccaaggatttcaagctgctgtacagcctcgaaggcaccatacagcagcgtatcgagaagatcgcccgcgacatgtatggtgccgccgctgtcgagtttagcgagctcgcgcagaagaaggtggacacatacacgcgccagggcttcggaaatctgcccatctgcgtcgccaagactcagtactcgctcagccacgatccggacctcaaaggtgctccgacagggttcacgatacccatccgggacgtccgcatggctgctggcgccggctacctctatgccctagctgcggacattcagactattcctggcctgcccaccgctcccgggtaccttaacgtcgacgttaataccgagacgggcgagatcgatggcctcttctga

SEQ ID NO: 2495 - protein, 939 aa, Myceliophthora thermophilia
MVAAKIDGTAIARKVRERLQAQIAEKKSINPRFQPCLKIIQVGDRSDSSTYVRMKLKAAEECGIACELIKFDETATEAELIARIVALNNDPAVHGILVQLPLPKHISEYNVTSTVASEKDVDGFGTYNIGELAKRGGRPFFVPCTPKGIMVLLEEAGVELAGKNAVVLGRSDIVGSPVSYLLKNADATVTVCHSKTKDLDSYLKNADVLVVAIGQPGFVKGEQLKPGVVVIDVGTNYIPDATKKSGQRLVGDVDFESASQVASQITPVPGGVGPMTVAMLLQNVVEATTQSFEVEKQRHIVPLPLKLLNPVPSDIVISRAQAPKPITQIAKEIGIAASELEPYGQYKAKVDLSLLKRLDHRRNGRYVVVTGITPTPLGEGKSTTTMGLAQALGAHVGRVTFANVRQPSQGPTFGIKGGAAGGGYSQVIPMDEFNLHLTGDIHAITAANNLLAAAIDTRMFHEATQKDAALYRRLVPVKNGKREFTPVMLRRLKKLGINKTDPDSLTEEEIARFARLDIDPETITWRRVLDVNDRHLRGIVIGNAPTERGHSRQTGFDISVASECMAILALSTSLADMRERLGRMVVASSRSGEPVTCDDIGAGGALTALMKDAIKPNLMQSLEGTPVFVHAGPFANISIGNSSILADKMALKLTGTEPDEDHSAKAGFVVTEAGFDFTMGGERFFNIKCRTSGLVPDVVVVVATIRALKVHGGGPPISPGAPLDAVYKEENVEVLRKGCVNLAKHVANAKSYGVPVLVAINKFSTDTQAEIDVVREEAIKAGAEDAVLANHWAEGGKGAVDLAKAVVAAAEKPKDFKLLYSLEGTIQQRIEKIARDMYGAAAVEFSELAQKKVDTYTRQGFGNLPICVAKTQYSLSHDPDLKGAPTGFTIPIRDVRMAAGAGYLYALAADIQTIPGLPTAPGYLNVDVNTETGEIDGLF

SEQ ID NO: 2496 - DNA, 1359 bp, Myceliophthora thermophilia
atgcaatttgtactgtacctcgggtacgcgacgtgcagtggtttgaacaacgctactacaagtacgaaatactgccgccgacgaaccattgaggactgggccggtgttgcccttcacgctacaccatcctcctacggctacattacattaaacccccaaatcccccccccctttgccttagacgccttggttgcgtcaccctcccttaaggtggcccacaaccactccagtgtcagctttttaaccgtcgccgccgccgccaccgccgccgccaaccaaatggcacgacagtcgctgcagctcgagctcgccgagcggccgacgggcgcgatcgtacccggcaggacgttccggcagcggcgggtgccggcgccgaccgaggcggacctgcgggagggcgagctgctgctcgagtgcctgtacgtgtccttcgacccggccatgcgcggctggctcgacgaccggcgctcgtacgtgccgcccgtgcggatcggcgaggtcatgcgcgccgccaccatcgcgcgcgtgctcgcctcccgctcggcccgcgcccgcccgggagacatcgtcacggccctgatgggcatccgcgaggtcggcatcgtgtccgaggacaaggtcgagcccgcgccccccgggttcgcccgcgccggtgccggcgccagggtgacggacctgctgggcgtcttcggcctgaccggcatgacggcctactttggcatgctccgcatcggcgagcccaagcccggcgagacggtggtcgtctcggctgccgcgggcgccaccggcagcgtggccgcccagatcgcaaagattgccggcgcccgcgtcgtcggcatcgccggcagcgacgagaagtgcaggtggctcaccgaggagctcggcctggacgttgcccttaactacaaggacccggacttcaaggccaagttcaagaaggccacccccaacttcatcgacgtcttctttgacaacggtaaaaagaacattcttcccggctacccttattctccgagacggatgtgttggggtatgttagtcggaggcgagcaactcgatatggcgcttggccgggccaacgcgtttgcccgcttcgtcatgtgcggcggcatctctcagtacaacgcggagaacaagtcggggccgggcttcatcgtgttcgactttgccaaggagtaccctgcggcgcgggagcagatcggccggtggctcgccgagggcaagctcaagaggagggagaccatcatcaagggcggcgtcgcagcgtccgaagaggcgttcaagcagctattcgagggcggaaacatcgggaaactcttggtcgaggtcaagaacccggatgaggtggcacggctgtga

SEQ ID NO: 2497 - protein, 452 aa, Myceliophthora thermophilia
MQFVLYLGYATCSGLNNATTSTKYCRRRTIEDWAGVALHATPSSYGYITLNPQIPPPFALDALVASPSLKVAHNHSSVSFLTVAAAATAAANQMARQSLQLELAERPTGAIVPGRTFRQRRVPAPTEADLREGELLLECLYVSFDPAMRGWLDDRRSYVPPVRIGEVMRAATIARVLASRSARARPGDIVTALMGIREVGIVSEDKVEPAPPGFARAGAGARVTDLLGVFGLTGMTAYFGMLRIGEPKPGETVVVSAAAGATGSVAAQIAKIAGARVVGIAGSDEKCRWLTEELGLDVALNYKDPDFKAKFKKATPNFIDVFFDNGKKNILPGYPYSPRRMCWGMLVGGEQLDMALGRANAFARFVMCGGISQYNAENKSGPGFIVFDFAKEYPAAREQIGRWLAEGKLKRRETIIKGGVAASEEAFKQLFEGGNIGKLLVEVKNPDEVARL

SEQ ID NO: 2498 - DNA, 1041 bp, Myceliophthora thermophilia
atgtctatccccgctacccagaagcagtggatcatccagagcgccggcaaggggctcgatgagctggcctaccaggacgccccggtgcccaaactcggtgagactgatgtgctcgtcaagttgcggggcgcgtcgctcaactatcgcgacttgttgattcccaagggtcaataccccttcccgctcaacctccccgtcgtcgcgtgctccgacggcgccggcgaggtggtggcggtcgggccccgcgtgaccaagtggaagcccggcgatcgtgtggtgacgctcttcaaccagggccaccagtcgggccccctcgacgaggccgccagcaagacgggcctgggcgggtgcatcgacggcacgctgcggcagtacggcgccttcgaccaggacggcctcgtccgcatgcccgcgaacctcgactttgtcgaggccgccaccctcacctgcgccgcgctgaccagctggaacgccctctacggcctgaggaggctgcagaagggtgagacggtgctcgtgcagggcacgggaggtgttagcttgtttgcgctgcagtttgccaaagctgcgggcgccactgtcatcgccaccacgtcgtcggcggagaaggccgaggttctgaagaagctgggcgccgaccacgtcatcaactaccgtgaggaccccaactggggcgagacggcgcgcaagctgacgcccggcggcgcgggcgtcgaccacgtcatcgaggtcggcggcgaaaacaccatgacgcagagcttccggtccatcaagtacgagggcatcatctccatcatcggcatgctcggcgggttccagcccaaggacaacatcttggaggttctcgcgcgcgtgtgcaccatccgcggcgtctacgtcgggtccaaggcccagatggaggagatggtggaggtcatggagaagcacgatatccacccggtcctggacggcaaggtgttcaccctggacacggccaaggaggcgtatgagcatctgttgaacaaaaagcactttggcaaggttggcatcaagatcgagtaa

SEQ ID NO: 2499 - protein, 346 aa, Myceliophthora thermophilia
MSIPATQKQWIIQSAGKGLDELAYQDAPVPKLGETDVLVKLRGASLNYRDLLIPKGQYPFPLNLPVVACSDGAGEVVAVGPRVTKWKPGDRVVTLFNQGHQSGPLDEAASKTGLGGCIDGTLRQYGAFDQDGLVRMPANLDFVEAATLTCAALTSWNALYGLRRLQKGETVLVQGTGGVSLFALQFAKAAGATVIATTSSAEKAEVLKKLGADHVINYREDPNWGETARKLTPGGAGVDHVIEVGGENTMTQSFRSIKYEGIISIIGMLGGFQPKDNILEVLARVCTIRGVYVGSKAQMEEMVEVMEKHDIHPVLDGKVFTLDTAKEAYEHLLNKKHFGKVGIKIE

SEQ ID NO: 2500 - DNA, 1014 bp, Myceliophthora thermophilia
atgactatcaaggtcggcatcaacggtttcggccgtatcggccgtatcgtcttccgcaactccatcgagcactcggatgtcgagatcgttgccgtcaacgaccccttcattgagcccaagtacgctgagtacatgctcaagtatgactcgacccacggtatcttcaacggcaccatcgccgtcgagggcaacgacctcattgtcaacggcaagagggtcaagttctacactgagcgggaccccgccaacattccctggagggaaactggtgccgagtacatcgtcgagtcgaccggtgtgttcaccaccaccgagaaggctagcgcccacctcaagggcggcgccaagcgcgtcatcatctctgctccctcggccgatgcccccatgtacgtcatgggcgtcaacgagaagacctacgacggcaaggcccaggtcatctctaacgcctcgtgcaccaccaactgcctggctcccctcgccaaggtcatccacgacaagttcggcctcgttgagggtctcatgaccaccgtccactcctacactgccacccagaagaccgtcgatggtccctctgccaaggactggcgtggtggccgtggtgctgctcagaacatcatccccagcagcactggcgccgccaaggccgtcggcaaggtcatccctgagctcaacggcaagctcaccggcatgtccctccgtgtccccacccccaacgtttccgttgtcgacctcacctgccgcctcgagaaggaggctacctacgacgacatcaaggccgccatcaaggaggccgccgccggccccctcaagggcatcctcgactacactgaggacgacatcgtctcgagcgatctgattggcaaccccgcctcgtccatcttcgacgccaaggccggtatctcgctcaacaagaacttcgtcaagcttgtcagctggtacgacaacgagtggggctactcccgccgtgtcctggacctcctcgcctacgtcgccaaggtcgatgccggcaactag

SEQ ID NO: 2501 - protein, 337 aa, Myceliophthora thermophilia
MTIKVGINGFGRIGRIVFRNSIEHSDVEIVAVNDPFIEPKYAEYMLKYDSTHGIFNGTIAVEGNDLIVNGKRVKFYTERDPANIPWRETGAEYIVESTGVFTTTEKASAHLKGGAKRVIISAPSADAPMYVMGVNEKTYDGKAQVISNASCTTNCLAPLAKVIHDKFGLVEGLMTTVHSYTATQKTVDGPSAKDWRGGRGAAQNIIPSSTGAAKAVGKVIPELNGKLTGMSLRVPTPNVSVVDLTCRLEKEATYDDIKAAIKEAAAGPLKGILDYTEDDIVSSDLIGNPASSIFDAKAGISLNKNFVKLVSWYDNEWGYSRRVLDLLAYVAKVDAGN

SEQ ID NO: 2502 - DNA, 1419 bp, Myceliophthora thermophilia
atgcagccccagttcttcaacgttgtcaacgacgagctgcgcagcagcagcaacattcaccgggtgacggacccgcggaccgaggaggagctctggccgtgcccgatcgcaaccacgcaggactttgaagatgccgtcgccgccgcacaggaggccttcaagacctggtccctgactaccgttgaggagcgccaagcgctgctggtgaagctcgccgacgtcatccgggacaatgccgaggagctcgccagcatcctcatgcgggagacgggcaagtcaaagatcctggccgacattgacgtccaggcgggtatcgcgcaggccctctactactcccaaaacgccctcaccgacgaagtgcagcacgaggacgagcaccaaaaggtggtggcgacccacatcccgttgggcacggtggcggccatctgcccgtggaacttccccctgatcctgtccaacatcaaggtggtgtcggcgctggtgacgggcaactgcgtcatcgtcaagccgtcgcccttcacgccgtacgccgtcatgaagtgggccgagctcagccggggcgtgctcccgccgggggtgttccaggtgctcaacgcgggcgccgacctgggggcggccatgacggcgcacccgggcatcgccaagatcagcttcacgggcaccatcgcggtcggcaagaaggtgctggccgcctgcgcgccgacgctcaagaaggtgacgctcgagctcgcgggcaacaacgcgtgcgtcgtctgcccggacgccgacctcgaccgcgccgtccccgccgtcgccagcggcggcttcttcaacgccggccaggtctgcgtcgcgagcaagcgcatctacgtgcacgagagcatctacgacgagttcctggagcgcctcgtccgcgaggtcgagacgaactttgccatccaggaggacggccaggcgccgagcgtgttcggtcccttggacaacaaggcccagtacgaggtcgtcaagggcatcatcgaggactgcaagagcagggggtacaacgtcgtgacgggcgggcagacggacaaggtcaggcccaaggggttctggctgccgccgaccatcgtgtcgcgaccgtccgaggactcgcggctggtgcaggaggagcagtttggccccgtcctccccatcctctcgtggtcggacgaggacgacgtgatccggcgcgccaatctcgctaacgcggggctgggcgcgtcggtctattcgtcggacctggcgcgggcggagcgcatcgcgcgccggctcgagactggcagcgtctggatcaaccagttcgagcggcccaactttgccgcctacttcgggggcatcaaggacagcgggttcggcggcgagatgggcaagcaggggctgctgtcgtactgctacaccaagtgcctgcattaccccaagtaa

SEQ ID NO: 2503 - protein, 472 aa, Myceliophthora thermophilia
MQPQFFNVVNDELRSSSNIHRVTDPRTEEELWPCPIATTQDFEDAVAAAQEAFKTWSLTTVEERQALLVKLADVIRDNAEELASILMRETGKSKILADIDVQAGIAQALYYSQNALTDEVQHEDEHQKVVATHIPLGTVAAICPWNFPLILSNIKVVSALVTGNCVIVKPSPFTPYAVMKWAELSRGVLPPGVFQVLNAGADLGAAMTAHPGIAKISFTGTIAVGKKVLAACAPTLKKVTLELAGNNACVVCPDADLDRAVPAVASGGFFNAGQVCVASKRIYVHESIYDEFLERLVREVETNFAIQEDGQAPSVFGPLDNKAQYEVVKGIIEDCKSRGYNVVTGGQTDKVRPKGFWLPPTIVSRPSEDSRLVQEEQFGPVLPILSWSDEDDVIRRANLANAGLGASVYSSDLARAERIARRLETGSVWINQFERPNFAAYFGGIKDSGFGGEMGKQGLLSYCYTKCLHYPK

SEQ ID NO: 2504 - DNA, 906 bp, Myceliophthora thermophilia
atggcggaacgtggggggctcgaaatggtgctgtcccagcttcctgatatatctcttgccgagttcgacttcctggactcttcctttttcgtcagccagtaccacggtatgcgcagttgccgcaagctaccgagcccgcaagaggtgctagacgcaagcggaaagccattgggctgcgatggagtttggcactttcaggagttccaggaaccgggcttgctggtcaagtttggccatcgttccagggttcacttggaagaggccctggcactgcgcgtcatcaacaagattctccccgacggtgtccctgcccccgaggtgtttggctggaagtcgacccgtgacccaggatacgagtcgaatttcatctatatgagtttccttcctggccagacgcttcgggatgcatgggaaactctcagtcagaaggacaaggcttccgtgtctcaacaactagctggttccttaaaccgagggccagttcaagatctctactttagcccagaccagcacaaaggcccgtttacaagtacccgagcattccatgactttgtacagtttgtatcggcaccttgggtgcccgttgaagacagaaatccggacccttaccggcctatgttgccggatgccgcaccaatatgtctaacccacggggacctacatcccggcaacattctcgttctgaaatcacctgatggaagtcagatcactgtatcgggaattgtagactgggggcaggccggttggtatcctgactactgggagtactgcaaggccatgatcgtcgtgccgtacaacgacgaatggagggagggcggatgggcggacattatgcttcaaccgagcgagcgcgagcttgaggctttggaggcttttgagttctattggaattcgcggtgcccctga

SEQ ID NO: 2505 - protein, 301 aa, Myceliophthora thermophilia
MAERGGLEMVLSQLPDISLAEFDFLDSSFFVSQYHGMRSCRKLPSPQEVLDASGKPLGCDGVWHFQEFQEPGLLVKFGHRSRVHLEEALALRVINKILPDGVPAPEVFGWKSTRDPGYESNFIYMSFLPGQTLRDAWETLSQKDKASVSQQLAGSLNRGPVQDLYFSPDQHKGPFTSTRAFHDFVQFVSAPWVPVEDRNPDPYRPMLPDAAPICLTHGDLHPGNILVLKSPDGSQITVSGIVDWGQAGWYPDYWEYCKAMIVVPYNDEWREGGWADIMLQPSERELEALEAFEFYWNSRCP

SEQ ID NO: 2506 - DNA, 678 bp, Myceliophthora thermophilia
atgaaacaaaaagaacaaaaaccgaccaaagtcggcgggaaaatcgtgtggacttcgcgggaggccactgtgacgatccctgtttgtctattacgcgtcaacccgtcaacccgtcacagctcaccacaacaagctgagcccacgcatattcgaggccaaaaacgttcgcaaccaccgaagatgaagcttctctaccccaacatgctcaagctcgacatcgccgctatatcaggcttccctaccatcacgctacgctcgctacctgcggggccaaacgacgtactcgccaccggcttcgatacagcccacgtgcaggtgacgactgggtcgggcctgcatgaccgcaccgtggccgagcacaccctgggcctgctgctcaaacgcgacctggcgcttctacgaaatgcgcgactgccaggtgccgctaagcacctggagccgctgcccgccgggaacaagctgtataataaggcgcggaatttgattttatcgcctcatatagtgggtggcaggccgcaaggcgccgagaagttgattgtagagaacttgaggaggttcctggctgggcaggagctgtggaaccatttgaaagtggctgcgtacctagaagggctagaagtcaggctaggatgccgcaaacggctggaataccaaggtgtcaccctgctggaacaatag

SEQ ID NO: 2507 - protein, 225 aa, Myceliophthora thermophilia
MKQKEQKPTKVGGKIVWTSREATVTIPVCLLRVNPSTRHSSPQQAEPTHIRGQKRSQPPKMKLLYPNMLKLDIAAISGFPTITLRSLPAGPNDVLATGFDTAHVQVTTGSGLHDRTVAEHTLGLLLKRDLALLRNARLPGAAKHLEPLPAGNKLYNKARNLILSPHIVGGRPQGAEKLIVENLRRFLAGQELWNHLKVAAYLEGLEVRLGCRKRLEYQGVTLLEQ

SEQ ID NO: 2508 - DNA, 1152 bp, Myceliophthora thermophilia
atgaacggcatcaagagcgtcaacggtaccaacggtaccgagggtatcaatggtaccaccggtgcggtcaaggcctccaagcccaacattggcgtcttcacgaatcccaaccacgacctgtgggttagcgaggccacaccgacgctggagagcgtccagaagggagaggagcttaaggagggtcaggtgaccgtcgccatcaggagcacaggtatctgcgggtcggatgtccacttctggaagcacggctgcatcggccccatgatcgtcggttgcgaccacattctcggccacgagtccgccggcgaggtcatcgccgtgcaccccagcgtgacgagcctcaaggtgggggaccgcgtcgccgtggagccccaggtgatctgcaacgagtgcgagccgtgcctgacgggccggtacaacgggtgcgagaaggtcgacttcctgtcgacgccgcccgtgccgggcctgctgcggcgctacgtcaaccacccggccgtgtggtgccacaagatcggcgacatgtcgtacgaggacggcgcgatgctcgagcccctctcggtggccctcgcgggcctgcagagggccgaggtgcggctgggcgacccggtgctcgtctgcggcgcgggacccatcggcctcatcacgatgctctgctgcaaggcggccggcgcgtgcccgctggtcatcacggacattgacgagggccggctgcgtttcgccaaggagatctgcccggaggtcgtcacccacaaggtcgagcggctgtcggccgaggagtcggccaaggcgatcgtcaagagcttcgggggcatcgagcccgcggtggcgctcgagtgcacgggcgtcgagagcagcatcgccgccgccatctgggcggtcaagttcggcggcaaggtgtttgtcatcggcgtcggcaagaacgagatccagatccccttcatgcgcgccagcgtccgcgaggtcgacctgcagttccagtaccgctactgcaacacctggccgcgggccatccgcctggtccagaacggtgtcatcgacctcaagaggctcgtcacgcaccgcttcggcctagaggacgccatcaaggcgttcgggacggcgtcggatcccaagaccggcgctatcaaggtgcagatccagagcctggattga

SEQ ID NO: 2509 - protein, 383 aa, Myceliophthora thermophilia
MNGIKSVNGTNGTEGINGTTGAVKASKPNIGVFTNPNHDLWVSEATPTLESVQKGEELKEGQVTVAIRSTGICGSDVHFWKHGCIGPMIVGCDHILGHESAGEVIAVHPSVTSLKVGDRVAVEPQVICNECEPCLTGRYNGCEKVDFLSTPPVPGLLRRYVNHPAVWCHKIGDMSYEDGAMLEPLSVALAGLQRAEVRLGDPVLVCGAGPIGLITMLCCKAAGACPLVITDIDEGRLRFAKEICPEVVTHKVERLSAEESAKAIVKSFGGIEPAVALECTGVESSIAAAIWAVKFGGKVFVIGVGKNEIQIPFMRASVREVDLQFQYRYCNTWPRAIRLVQNGVIDLKRLVTHRFGLEDAIKAFGTASDPKTGAIKVQIQSLD

SEQ ID NO: 2510 - DNA, 1569 bp, Myceliophthora thermophilia
atgtctggcgcagtcgctcgcctagcgaacatcaacgttggcggcgctcccaaagcgggcacctctctgctacagtccgatgaaaatgctaacaatggtgccagcgctgatatcggcctcatcggcctggccgtcatgggccaaaacctgatcctgaacatggctgaccacggcttcactgtttgcgcgttcaaccgcaccgtgtccaaggtcgacgttttccttgccaacgaggccaagggcaagtcgatcgtcggcgctcattcggtcgaggagttcgtctccaagctgaagcgcccccgccgcgtcatgctcctcgtccaagctggcaagcccgtagacgactggattgagactctgctgcctctgctcgaggctggcgacatcatcatcgacggcggcaactcgcacttccccgactcaaaccgcaggacaaagtacctcgcctccaagggcatccgcttcgtcggctccggtgtttccggcggcgaggagggtgctcggtacggcccctctctgatgcccggcggcaacgaggaggcctggccttacatcaaggacatcttccagagcattgctgccaagagcgagggcgaggcctgctgcgagtgggtcggcgacgaaggtgctggtcactacgtcaagatggtgcacaacggtattgagtacggcgacatgcagctcatctgcgaggcgtacgacatcatgaagcgcggcctcggcatgaccagcaaggagatcggcgacgtctttgccaagtggaatcagggagtcctggactccttcctgatcgagattacccgggacattctgtatttcaacgacgacgatggcgtcccgcttgtcgagaagatcctcgacaaggccggccaaaagggtaccggcaagtggacttctgtcaacgctctggacctgggcatcccggtcactcttatcgccgaagccgtccttgcccgttgcctgtctggcatcaaggacgagcgtgtcaaggcgtcgaccaagctccagtatgtcagccgccagaagaccttcgaaggaaacaaggagcaattcctggaggatctcgagcaggccctctacgcgtccaagatcatctcgtatgcccagggcttcatgctcatgcaggaggctgcccgtgagtacggctggaagctcaacaagccctcgatcgccctcatgtggcgcggcggatgcatcatccgctccgtcttccttaaggacatcacggcggcgtaccgcaacaacccggatctcgagaacctgctcttcgacgatttcttcaacaaggccatccacaaggcgcagcccggttggagagatgtcgttgccacggctgcctacctcggcatcccgaccccggctttctcgacggccctgtcgtggttcgatggctaccgcaccaaggacctgccggccaacctgctgcaggcgcagcgtgactacttcggtgcccacactttccggatcaagcccgaggcggcgaatgaaaagtacccggagggcaaggacatccacgtcaactggaccggacgtggcggcaatgtttctgcgtcgacatatcaggtgtaa

SEQ ID NO: 2511 - protein, 522 aa, Myceliophthora thermophilia
MSGAVARLANINVGGAPKAGTSLLQSDENANNGASADIGLIGLAVMGQNLILNMADHGFTVCAFNRTVSKVDVFLANEAKGKSIVGAHSVEEFVSKLKRPRRVMLLVQAGKPVDDWIETLLPLLEAGDIIIDGGNSHFPDSNRRTKYLASKGIRFVGSGVSGGEEGARYGPSLMPGGNEEAWPYIKDIFQSIAAKSEGEACCEWVGDEGAGHYVKMVHNGIEYGDMQLICEAYDIMKRGLGMTSKEIGDVFAKWNQGVLDSFLIEITRDILYFNDDDGVPLVEKILDKAGQKGTGKWTSVNALDLGIPVTLIAEAVLARCLSGIKDERVKASTKLQYVSRQKTFEGNKEQFLEDLEQALYASKIISYAQGFMLMQEAAREYGWKLNKPSIALMWRGGCIIRSVFLKDITAAYRNNPDLENLLFDDFFNKAIHKAQPGWRDVVATAAYLGIPTPAFSTALSWFDGYRTKDLPANLLQAQRDYFGAHTFRIKPEAANEKYPEGKDIHVNWTGRGGNVSASTYQV

SEQ ID NO: 2512 - DNA, 1074 bp, Myceliophthora thermophilia
atggcccaagaagagggtaaggttatcgtgcgacacgaagcagccgaagaattcgttgtcgcacttctcgaggcatcgggggtgtcccggaagaacgccgagatcgtcgcgcgaggattggtgcaggccgacctgcgcggagtcgagagccatggcatcaaccgcatcccgtcctacctctctcggattcgcaacggtgtgctagaccctaaggccgagcctacactcacccaggtaacccctgtcgttgctcaggtcgacggccacaatggtttcggcttccctgccgcccacctcgccatggacacggccatatccatggcgcgcaccttcggcatcggcatggtgagcgtcaagcacagcaaccattttggcatgtcggcctggatcgtccggcaggccgtcgatgcgggcatgatgagcctcgtctttaccaactcgtccccggccctgcccgtctggggcggcaagtcgcagctcattggcgtctcgccgatcgcgtgcggggcccccggcggcccgagctcggtccccttcatcctggatatggccccctccgtcgccgcccgaggcaagatctacaaggccctgcggcgaggcgagaagatccccctggactgggcgctggatgcggacggcaagccgacggacgaccccgaaaaggctctgaagggcgtcatgttgccgatgggcgggccaaagggatcggccctggccatcatgatggacgtcttctccggcgtgctgtctgggtctgcctttgccggaggtgttaccgggccgtacgacatgtcgaagccgggcgacgttggtcacttcatcgtcgccatcaagcctgatttgttcatgagcctagacgagtttaggcagcggatggatatcctctaccagcgagtcgtgggttcggacaagatggaaggagtggacaagatatacttcccgggcgagattgagcagctgaccgaggcaacaaggctcagccaagggattccctttgttcaaggcgagattgacgccttgaacgcagaagcggacatgctaggcgtaccaaaactccgaccagcagctgcttag

SEQ ID NO: 2513 - protein, 357 aa, Myceliophthora thermophilia
MAQEEGKVIVRHEAAEEFVVALLEASGVSRKNAEIVARGLVQADLRGVESHGINRIPSYLSRIRNGVLDPKAEPTLTQVTPVVAQVDGHNGFGFPAAHLAMDTAISMARTFGIGMVSVKHSNHFGMSAWIVRQAVDAGMMSLVFTNSSPALPVWGGKSQLIGVSPIACGAPGGPSSVPFILDMAPSVAARGKIYKALRRGEKIPLDWALDADGKPTDDPEKALKGVMLPMGGPKGSALAIMMDVFSGVLSGSAFAGGVTGPYDMSKPGDVGHFIVAIKPDLFMSLDEFRQRMDILYQRVVGSDKMEGVDKIYFPGEIEQLTEATRLSQGIPFVQGEIDALNAEADMLGVPKLRPAAA

SEQ ID NO: 2514 - DNA, 1494 bp, Myceliophthora thermophilia
atgtccaacctcttcgtcgagctcaagacgcccatcacgggcccctacaagcaacccaccggacttttcatcaacaacgaattcgtcgagggtgtggagaagaagacgttcgaggtcattaacccgagcaccgaagaggtcatctgctcggtgcacgaggccacagagaaggatgtcgacatcgccgtcgccgccgcccgcaaggcgtttgagggcgagtggcgccgcgtcaccccgcagcagcgcggcgtcctgctgctaaagctggccgatctcgccgagaagaacctggaccttctggccgcggtcgagtcgctcgacaacggcaagtccatcaccatggcccgcggcgacgtcgccgccgttgtcgggtgcatccgctactacggcggctgggccgacaagatcgagggcaggaccatcgacatcaacccggacatgttcagctacacgaggcgcgagccgattggtgtctgcggccaaatcattccctggaacttcccgctgctcatgcttgcgtggaagatcggccctgcgctggccaccggaaacacggttgtcctcaagacggccgagcagaccccgctgtcggccctcgtctttgcccagttcgtcaaggaggccggcttccccccgggcgtcctcaacatcatctcgggtttcggcaggaccgccggcgccgccctctcgtcgcacatggacgtcgacaagatcgcctttaccggctccaccatcgtcggccgtaccatcatgaaggccgccgcctcgtccaacctgaagaaggtcaccctcgagctcggcggcaagtctcccaacattgtcttcaacgacgccgacatcgaggaggccatcagctgggtcaactttggcatctactacaaccatggccaatgctgctgcgccggttcgcgcatctacgtccaggagggcatctacgacaagttcgttgaggccttcaagaagcgggcggagcagaacaaggtgggcgacccgttccacccggagaccttccagggcccgcaggtcagccagctgcagtacgaccgcatcatgggctacatccagtcgggtaaggagcagggcgcgcgcgtggtgacgggcggcaaccgccacggcgacaagggctacttcatccagccgaccatcttcgccgacgtgaggcaggacatgacgatcatgcaggaggagatcttcggccccgtctgcgccatcgcaaagttctccaccgtggaggaggccatcaagctcggcaacgacacctcctacggtctggccgcctcggtccacaccaaggacctcaacacggccatccgcgtcagcaacggtctcagggccggcaccgtctgggtcaactgccacaacatactcaaccacgccctcccgttcggcggcttcaagacgtccggcatcggccgcgagctcggcgagctggccctggccaactacaccgagaacaagagcgttgccgtcaacatggccggcaagctgttctaa

SEQ ID NO: 2515 - protein, 497 aa, Myceliophthora thermophilia
MSNLFVELKTPITGPYKQPTGLFINNEFVEGVEKKTFEVINPSTEEVICSVHEATEKDVDIAVAAARKAFEGEWRRVTPQQRGVLLLKLADLAEKNLDLLAAVESLDNGKSITMARGDVAAVVGCIRYYGGWADKIEGRTIDINPDMFSYTRREPIGVCGQIIPWNFPLLMLAWKIGPALATGNTVVLKTAEQTPLSALVFAQFVKEAGFPPGVLNIISGFGRTAGAALSSHMDVDKIAFTGSTIVGRTIMKAAASSNLKKVTLELGGKSPNIVFNDADIEEAISWVNFGIYYNHGQCCCAGSRIYVQEGIYDKFVEAFKKRAEQNKVGDPFHPETFQGPQVSQLQYDRIMGYIQSGKEQGARVVTGGNRHGDKGYFIQPTIFADVRQDMTIMQEEIFGPVCAIAKFSTVEEAIKLGNDTSYGLAASVHTKDLNTAIRVSNGLRAGTVWVNCHNILNHALPFGGFKTSGIGRELGELALANYTENKSVAVNMAGKLF

SEQ ID NO: 2516 - DNA, 1524 bp, Myceliophthora thermophilia
atggcctctgatttgcattctggaggctccgtcgagctcaaggacaacaccgtcatcgttgtccttggcgcctccggcgacctcgctaagaagaaaacgtttcctgccctttttggactctaccgaaaccagttcctgcccacggatatcagaatcgttggatatgcgcgaacaaagatggaccacgacgaattccttcgtcgcatcaagtcgtatatcaagacacctacgaaggacatcgaacaacagctggaggagttctgcagcctgtgcacatatgtgtctggccagtacgacaaagacgagtcattcctgcagctcaacaggcacctcgaggagctcgagaagggaaggaaagagaccaacagattgttctacatggcacttccgcccagtgtcttcaccatcgtctcgcagcatctgaagaagtgctgttacccaagcaagggcattgcccgcgtcatcgtcgagaagccatttggcaaggacttggcgagctcccgcgagcttcaaaagtcgcttgagcctgactggaaagaagaagagctgttccgcatcgaccactatcttggcaaggaaatggtgaagaacatactcattctgcgattcggcaactccttcttgggcgcgacttggaacaggcaccacatcgacaatgtgcaaatcacattcaaggagccgtttggaaccgaggggcgcggtggatattttgacgagtttggcattattcgcgatgtgatgcagaaccatctacttcaggttttgaccttgcttgccatggagaggccggtttccttctccgccgaggacattcgcgacgagaaggtgcgggtacttcgtgctattcccgccatcgagcccaagaacgttatcatcggccagtacgggaagtcgctggacggtagcaagccggcatacaaggaggacgacactgttcccaaggactcgcggtgccccaccttctgcgcgctcgttgcctacatcaagaacgagcggtgggacggcgtgcccttcattatgaaggcgggcaaggcgcttaacgagcaaaagacggaaattcgcgttcagtttaaggacgtcacctccgggatctttaaggacattccgaggaacgagctcgtcatgcgcatccagcctaatgagagcgtctacattaaaatgaactcgaagcttccgggcctgacaatgcagacggtggtgacggagctcgacctcacataccgcaggcgattctccgatctcaagatccctgaggcgtatgagtcgctaatcctcgattgcctgaagggcgaccactccaactttgtcagagacgacgagctcgacgccagctggaggatctttacacctctgctacactacttggacgacaacaaggagatcattcccatggagtacccatatggctctcgtggtccggctgtgctcgatgacttcacctcgtcttacggctacaagttcagtgatgccgctggatatcagtggccgacaacctcggctctgggcccgggcaacaagttgtga

SEQ ID NO: 2517 - protein, 507 aa, Myceliophthora thermophilia
MASDLHSGGSVELKDNTVIVVLGASGDLAKKKTFPALFGLYRNQFLPTDIRIVGYARTKMDHDEFLRRIKSYIKTPTKDIEQQLEEFCSLCTYVSGQYDKDESFLQLNRHLEELEKGRKETNRLFYMALPPSVFTIVSQHLKKCCYPSKGIARVIVEKPFGKDLASSRELQKSLEPDWKEEELFRIDHYLGKEMVKNILILRFGNSFLGATWNRHHIDNVQITFKEPFGTEGRGGYFDEFGIIRDVMQNHLLQVLTLLAMERPVSFSAEDIRDEKVRVLRAIPAIEPKNVIIGQYGKSLDGSKPAYKEDDTVPKDSRCPTFCALVAYIKNERWDGVPFIMKAGKALNEQKTEIRVQFKDVTSGIFKDIPRNELVMRIQPNESVYIKMNSKLPGLTMQTVVTELDLTYRRRFSDLKIPEAYESLILDCLKGDHSNFVRDDELDASWRIFTPLLHYLDDNKEIIPMEYPYGSRGPAVLDDFTSSYGYKFSDAAGYQWPTTSALGPGNKL

SEQ ID NO: 2518 - DNA, 1833 bp, Myceliophthora thermophilia
atggcaccaaccatcccagtgcccacacagggcggcatgttccatacctttcaaggagttaccccacgcaagacatccacggattcacaggacagcaccaagaccaacgggtcaggcaccgctaagaggataaccacaccacacgcctgtgccgagtgcaagcggcgcaagatccgctgcgatggccagcaaccatgcggccagtgcctctccagcagggcacccaagcggtgtttctatgacaagcaccggcagcgggtgattccctctcgcaagaccctcgaagccctgtcgcagtcactcgaagaatgccggtccatcctgaagcggctgtaccccaaccatgaggtccaggccttgctgcccctgtcacggcaagagctcctcaacctcttggacaggcccgtcatagatacctcgattggcggcttgccatcaccgcccatcaacacctcgcccatctcggacctcggctcgcccatgatgcccaagtccgagagcatcctggagcagcttccgtcgagggacaccgaatgggacgaggagcggaggggccgggatccgatccctgccgaggccgacgacatcaacgccctctcgctctcggttgaccggcaaacgtcctacctgggcgcctcgtccatcaaggccgccctgatggtcatgctcaaggtgcagcccagcctgcggcacaccttggccgcgcccctgagcggtgtcgagatctcgcacaacttccccgccatccggcagaagccgtcggggacccagaaagaaggccagcggatcccctggtcctggaaggggcagaccctgatcgacgcctacttcaagcgcatccacgtcttcatccccatgctcgacgagagcaccttccgggccgactacctcgaggggcagcgcaccgacgcgccctggctcgcgctcctcaacatggtgttcgccatgggcagcatcgccgccatgaagtcggacgactacaaccacgtcaactactacaaccgcgccatggagcacctgcccatggacgccttcggcagcagccacatcgagacggtgcaggcgctcgccctcatcggcggctactacctccactacatcaaccgccccaacatggccaacgcggtcctcggcgccgccatccgcatggccagcgccctcggcctgcaccgcgagtccctcgtccagtcgagcagcgacatcgtcgcggccgagacccgccgccgcacctggtggtccctcttctgcctcgacacgtgggccaccacgaccatgggccgcccgtccttcggccgctggggccccgccatcaacgtccgcccgcccgagttcggcatcaacgggaaccgcgactcgtcccagcacgccggcatcctgcccctgatcgagaacatcaagttctgcaagatcgccacccagatccaggacatgctcgccatcagccccctcctccgcaccgaggaccgctgccacctggacgcccagctcgtctcgtggtacaactcgctcccctggctcctgcgcaccaccgacccctgcgccgagccgctctacatggcgcgctgcatcatgaagtggcgctaccagaacctgcgcatgctcctgcaccggcccgtcctcctctcgctcgcctcgtccggcctgaacccgcacacccaggcctgcgacgccgacctggccgccatcgaggtctgccgcgagctcgccgcccagaccatcgacgacatcgcgcgcgagtgggcccgcaaccagatgagtgggtggaacgccgtctggttcctctaccaggccgccatggtgcccctcgtcagcgtctttgttcctggcccatag

SEQ ID NO: 2519 - protein, 610 aa, Myceliophthora thermophilia
MAPTIPVPTQGGMFHTFQGVTPRKTSTDSQDSTKTNGSGTAKRITTPHACAECKRRKIRCDGQQPCGQCLSSRAPKRCFYDKHRQRVIPSRKTLEALSQSLEECRSILKRLYPNHEVQALLPLSRQELLNLLDRPVIDTSIGGLPSPPINTSPISDLGSPMMPKSESILEQLPSRDTEWDEERRGRDPIPAEADDINALSLSVDRQTSYLGASSIKAALMVMLKVQPSLRHTLAAPLSGVEISHNFPAIRQKPSGTQKEGQRIPWSWKGQTLIDAYFKRIHVFIPMLDESTFRADYLEGQRTDAPWLALLNMVFAMGSIAAMKSDDYNHVNYYNRAMEHLPMDAFGSSHIETVQALALIGGYYLHYINRPNMANAVLGAAIRMASALGLHRESLVQSSSDIVAAETRRRTWWSLFCLDTWATTTMGRPSFGRWGPAINVRPPEFGINGNRDSSQHAGILPLIENIKFCKIATQIQDMLAISPLLRTEDRCHLDAQLVSWYNSLPWLLRTTDPCAEPLYMARCIMKWRYQNLRMLLHRPVLLSLASSGLNPHTQACDADLAAIEVCRELAAQTIDDIAREWARNQMSGWNAVWFLYQAAMVPLVSVFVPGP

SEQ ID NO: 2520 - DNA, 2247 bp, Myceliophthora thermophilia
atgtcgccctcctccaacggcgactcgccccactcggtcacggccaccatgactactgctgccgcagccggcgccacggtcgtcaggcagtacccgccgctgccgaattgggacttcaccgtcgagataccctctccgcagcagctctctgccggcgccaacggcgccaacacgatcaagtctccgaactcgctcaaggcggcaacacggactccgaacttcagccgggaaggcatcctcggctcggcccagaaagcccgcaacctatcgcagtcgtcggataacaggcccgagacgatcacgaacggcattcccaagtctgcgagtgaagagggcgttaatccgctcaagaggagaaatacagatgccgccgtcgattatcctaggcggagagcgaccattgcctgcgaagtctgccgctcgagaaagtcacgatgtgacggtacgaaaccgaaatgcaagctctgcacagagcttggtgcagagtgcatttatcgcgagcccggcatcaagctcgacgcgggggataagctcatcctggagcgccttaacaggattgagagccttctgcagatgaacctggttgccaaccaaggaaacggtatcaacttgtctcacgactcgccaaacatgagcaatggaaccgccctgagcggggataacctcctggtgcgggacccgagcagcaattttgtctccgtcatccccagcggcggcctggggacctggtcggcaaactcgacaaacatctcaactatgccaaaggtgcacaccaacgccgccctccaccttctgcaatggccgctgatccgcgacttggtctcgcggccgtatgaccctcaaattctcctccagcttgaaatggcccgcgaaccgctgcactcgctcgcgaagacgccctgcgtcgacttgtccaacacgaatgcgtacatcgaggcgtactttgaccgagtcaatgtgtggtacgcctgcgtcaacccatacacctggcggagccactaccggatcgctctatccaacggcttcagggagggtccagaaagctgcattgtacttctcgtcttggcgctcgggcaggcgagcttgagaggcagcatatccaggatcgtcccgcacgaggaccccccgggccttcagtacttcacggccgcttggtcattgctcccgggcatgatgacttccaacagcgtcctggccgcccagtgccacctgctcgcggccgcctacctcttctacctggtgcggccactggaggcctggaacttgctctgcaccacaagtacgaaactgcagctcctgctcatgacgccgaaccgagttcctccggaccagcgagagcttatcgagcgaatctactggaacgccctgctcttcgagagcgacttgctcgcagagttggatctaccccactctggcgtcgtcgcgtttgaggagaatgtgggcttgccctgcggtttcgagggggatgaacaggaggcagtcgggcgagacgagctatggtacttcttggccgaaatcgcgctccgccgattgctgaaccgggtcagccaactcatttactccaaggactcgatggcctcgacgaccagtctcgagccggtggttgccgagctggatttccagctgacgcagtggtacgaaagcctgccggtgcccctgcaattcccatttacgcgcaccatgttaccggatccggtgcagacggtgttgaggctgcgcttcttcgcatgccggaccatcatctaccgcccgtacatcctcgcggtcctggacaacgaacaggccatattggaccccgcggtgcgggaggcctgtaccaagtgcctagaagcctccatccggcaattggagcacattaccgcgcatcacgccggacacatgccttacctctggcaaggtgcgctttccatcgtgtcgcagaccctgctcgtcatgggtgccacaatgtcaccgtcgctgtctaccatcctctggagcctcgtcccccaccgcgaggcaatcgaccaaatcatcaacgacgtggtcatggaaattgaacgctacgccgttctttctcccagcctcagcctttccgctgaaatcatcaaagaagctgaggtccggcgccggactttcctgagcgtcaaacatcacgcgatagccccggcatccctgaccggcaccctcgcaaccaagtgctggggcacagcggaggtttcggcggtctacgacatcagctgcgaaactgcgcgcctggttttcctgtga

SEQ ID NO: 2521 - protein, 748 aa, Myceliophthora thermophilia
MSPSSNGDSPHSVTATMTTAAAAGATVVRQYPPLPNWDFTVEIPSPQQLSAGANGANTIKSPNSLKAATRTPNFSREGILGSAQKARNLSQSSDNRPETITNGIPKSASEEGVNPLKRRNTDAAVDYPRRRATIACEVCRSRKSRCDGTKPKCKLCTELGAECIYREPGIKLDAGDKLILERLNRIESLLQMNLVANQGNGINLSHDSPNMSNGTALSGDNLLVRDPSSNFVSVIPSGGLGTWSANSTNISTMPKVHTNAALHLLQWPLIRDLVSRPYDPQILLQLEMAREPLHSLAKTPCVDLSNTNAYIEAYFDRVNVWYACVNPYTWRSHYRIALSNGFREGPESCIVLLVLALGQASLRGSISRIVPHEDPPGLQYFTAAWSLLPGMMTSNSVLAAQCHLLAAAYLFYLVRPLEAWNLLCTTSTKLQLLLMTPNRVPPDQRELIERIYWNALLFESDLLAELDLPHSGVVAFEENVGLPCGFEGDEQEAVGRDELWYFLAEIALRRLLNRVSQLIYSKDSMASTTSLEPVVAELDFQLTQWYESLPVPLQFPFTRTMLPDPVQTVLRLRFFACRTIIYRPYILAVLDNEQAILDPAVREACTKCLEASIRQLEHITAHHAGHMPYLWQGALSIVSQTLLVMGATMSPSLSTILWSLVPHREAIDQIINDVVMEIERYAVLSPSLSLSAEIIKEAEVRRRTFLSVKHHAIAPASLTGTLATKCWGTAEVSAVYDISCETARLVFL

SEQ ID NO: 2522 - DNA, 1857 bp, Myceliophthora thermophilia
atggcggacgaagtctatgacggtgccattggcatcgatctcggcaccacctactcctgcgttgctacgtacgagggtaccaatgtcgagatcatcgccaacgagcagggtagcttcaccacgccctcgttcgtctccttcactgaggacgagcgcctgattggtgaggcggccaagaaccaggccgccatgaacccggcgaacaccgtcttcgatgtcaagcgtctgatcggtcgccgcttcgatgaccccaccgtcaagaaggacatggagtcgtggcccttcaaggtcgtggatgacggcaacggcaaccccaaggtcgaggtccagtaccttggcaccacccacaccttctccccccaggagatctcggctatggtcctcagcaagatgaaggagattgccgagaccaagctcggtaagaaggttgagaaggccgtcatcaccgtgccggcctacttcaacgacaaccaaagacaggccaccaaggatgctggtgccatcgctggcctgaacgtcctccgtatcatcaacgagcctacggctgccgccatcgcctacggtcttggctctggcaagtccagcaaggagcgcaacgtgctcatctacgatctcggtggtggtactttcgatgtgtcgctcctgaacatccagggcggtgtcttcaccgtcaaggctaccgctggtgacacccacctcggtggccaggactttgacaccaaccttttggattactgcaagaaggaattcacgaggaaaactaagaaagacctctcgggcgattctcgtgccctccgccggctgaggactgcctgcgagcgcgccaagcgcactctgtcgagcggtgctcagaccaccattgagatcgactctctgttcgatggcgaggacttcaacatgcagatcactcgtgcccgtttcgaggatctgaacgccaaggccttcgctggtaccctggagcctgttgcccaggttctcaaggacgccaacatcgagaagagcgcggtcgacgagatcgtccttgtcggtggctcgacccgtattccccgcatccagaagctcctcagcgagttcttcgacggcaagaagcttgagaagagcatcaaccccgatgaggccgttgcctacggtgccgccgtccaggccggtatcctctctggcaaggccacctctgccgacacctcggacctccttctgctggatgtcgttcctctgtctctgggtgttgccatggagggcaacatcttcgcccccgtcgtcccccgtggccagaccgtccccaccatcaagaagaggacgttcaccacggttgccgacaaccagcagaccgtccagttccctgtgtaccagggtgagcgtgtcaactgcgaggacaacacctctctgggtgaattcacccttgctcccatccctcccatgaaggctggcgagcccgtcctcgaggtcgtcttcgaggttgatgtcaacggtatcctcaaggtgacggctaccgagaagacctctggccgcagcgccaacatcaccatcaccaactctgttggcaagctctcgtcgagcgagatcgagagcatgatcaacgggttaccagatgccgagaagttcaagtccaaggatgaggctttcagcaagcgcttcgaggccaagcagcagctcgagtcgtacatctcgcgtgttgaggagatcatctcggacccgacactgtcgctcaagctcaagcgtggccagaaggacaagattgagcagtcgctgagcgaggccatggcccagctcgagattgaggactccacggccgaggacctgaagaagaaggagcttgctctcaagaggctggtcaccaaggccatgtcttcgcgttaa

SEQ ID NO: 2523 - protein, 618 aa, Myceliophthora thermophilia
MADEVYDGAIGIDLGTTYSCVATYEGTNVEIIANEQGSFTTPSFVSFTEDERLIGEAAKNQAAMNPANTVFDVKRLIGRRFDDPTVKKDMESWPFKVVDDGNGNPKVEVQYLGTTHTFSPQEISAMVLSKMKEIAETKLGKKVEKAVITVPAYFNDNQRQATKDAGAIAGLNVLRIINEPTAAAIAYGLGSGKSSKERNVLIYDLGGGTFDVSLLNIQGGVFTVKATAGDTHLGGQDFDTNLLDYCKKEFTRKTKKDLSGDSRALRRLRTACERAKRTLSSGAQTTIEIDSLFDGEDFNMQITRARFEDLNAKAFAGTLEPVAQVLKDANIEKSAVDEIVLVGGSTRIPRIQKLLSEFFDGKKLEKSINPDEAVAYGAAVQAGILSGKATSADTSDLLLLDVVPLSLGVAMEGNIFAPVVPRGQTVPTIKKRTFTTVADNQQTVQFPVYQGERVNCEDNTSLGEFTLAPIPPMKAGEPVLEVVFEVDVNGILKVTATEKTSGRSANITITNSVGKLSSSEIESMINGLPDAEKFKSKDEAFSKRFEAKQQLESYISRVEEIISDPTLSLKLKRGQKDKIEQSLSEAMAQLEIEDSTAEDLKKKELALKRLVTKAMSSR

SEQ ID NO: 2524 - DNA, 2118 bp, Myceliophthora thermophilia
atggccgctgctacgacgacaacaacaaaggccaagccggcctccaaggctggtggcaacgccaaccctaaacaaaagacccagatgcatcgccgttcaaggacagggtgctacacctgcaggctgaggaggaagaagtgcgacgagggctcgccaatatgcacggcatgcaggcacctcggcctgcaatgcgaatacaagcggccaatgtggtggagcaacaacgacatgcggaggaagcagaaggaggacatcaagatgatcatcaagcgcaagaagctgtcggagaagtcgacgcacacccacacccacactcacacgcacaccatccagaccgccgtcggctcgccgccgggcctctcgcactcgctcccgacgtcggcgaccttctccgacccgctcgaccgcgcgcgatcggcctcgatcgactcgcactttggcttcaacttcaacagcccgcagagctcgcacgagtacgagtacgagtacgggccgttcacgccccagatgcacccggacttcatgttctcgccctactcgccgtacgagatcgacgtcaagacggagaggcaaatgttcatcaacgacgtcccgacgctgcgcgaatccacgacgtcgaccttcagcacctacgcgacccctccgccgccgggcaccgtcctgcccccgttccctctggaaggcgaatggacggagcaggtctactcggaacggagggagtcgtcgctgaccgaggagacgctcaacgtcaacttcttcgacttctcccacgggccggcggccgcctccaggcaggtggccatcgagctggacgagggcgaccagcggctgctcgaccacttcgtccggtcggtgctccccaccatcttccccatcctcgagtcgaaccagcacgggtccgtcagctcggacctcatcctcccggcgctggccaacaacaagggttacctgcactgctgcctgagcatcgccgcgcagcactacaaggcggtcatgggcctgcggggcgacgagatcgacggcgacatcatgcgccaccgctacgcgaccatctcggccctctgcgacgccctcaaccgggacgagaaccaccagcagatcctcgaggccgccctcggcctcatcttcttccagtgcggcgtcggccgcttcgacgactcgctcccggacatcccctggcaccagcacttccaggccgtcgtctcgctcgtccagaagctcgacctgccccgcatcgtctcggaccccggcgagcccctgacgcaggcgcccttcaacatgaccctcgccgcctggatcgacatcctcggcgccaccatgcaagggcgcgccccgacctttgcccacacctaccgcgagaagcacctgtcggccgccaacccgtcgctcggcctgcgcgagctcatgggctgcgaggaccgcgtcatgtacctcatctcggagatcgcctgcctcgaggcgctcaagcgggacggcatggacgacatcacgctctgccagcacgtccacgtcctcggcgaccagatcggcctgaccgagatgggcgagggcgcccccgtcctgcccttcaacgccaacggctccctcagccccaagcagctcagcaagaacatcacggccgccttccgcctggccgcccgcatctacctctgcagcctcgtcccgggcttctccccgctccaggacagctgcgtcggcctggtcgagaagctcacctcggtcctgcaccacatcccctcggggcctaacggcttcgaccgctccctcgcctgggtctacctcgtcggcggctccgtcagcctgcccgcctcctccttccgcgccttcttcgacgaccgcgtcgcccagctcggcgacctcgccaactttggcagcttcggccgcgtcgcctgcctcctgcgcgacgtctggctgcagaacgacgcgccccagccttcttcctcctcctcttcctcggcgatggggagctcgtcttcttcttcatcatcatcgtcgtcgccccaacaacaacaacaagaacatcaggaggttccacagcagccgcaaccgcaacagcagcagttcgtccactggcgggacgtcatgcagatgaagggttgggactacctgctcatttga

SEQ ID NO: 2525 - protein, 705 aa, Myceliophthora thermophilia
MAAATTTTTKAKPASKAGGNANPKQKTQMHRRSRTGCYTCRLRRKKCDEGSPICTACRHLGLQCEYKRPMWWSNNDMRRKQKEDIKMIIKRKKLSEKSTHTHTHTHTHTIQTAVGSPPGLSHSLPTSATFSDPLDRARSASIDSHFGFNFNSPQSSHEYEYEYGPFTPQMHPDFMFSPYSPYEIDVKTERQMFINDVPTLRESTTSTFSTYATPPPPGTVLPPFPLEGEWTEQVYSERRESSLTEETLNVNFFDFSHGPAAASRQVAIELDEGDQRLLDHFVRSVLPTIFPILESNQHGSVSSDLILPALANNKGYLHCCLSIAAQHYKAVMGLRGDEIDGDIMRHRYATISALCDALNRDENHQQILEAALGLIFFQCGVGRFDDSLPDIPWHQHFQAVVSLVQKLDLPRIVSDPGEPLTQAPFNMTLAAWIDILGATMQGRAPTFAHTYREKHLSAANPSLGLRELMGCEDRVMYLISEIACLEALKRDGMDDITLCQHVHVLGDQIGLTEMGEGAPVLPFNANGSLSPKQLSKNITAAFRLAARIYLCSLVPGFSPLQDSCVGLVEKLTSVLHHIPSGPNGFDRSLAWVYLVGGSVSLPASSFRAFFDDRVAQLGDLANFGSFGRVACLLRDVWLQNDAPQPSSSSSSSAMGSSSSSSSSSSSPQQQQQEHQEVPQQPQPQQQQFVHWRDVMQMKGWDYLLI

SEQ ID NO: 2526 - DNA, 1884 bp, Myceliophthora thermophilia
atggtctcagcattccagatgccgtccttctacagggcgccgttaacagtcgacaccaccaacgctcagaagttcttcgaagaggaggatgcgaacatcctcgacgagaacattcttgaccacagcgcacttgattcgggcttggatatgtcacctcagatggtagagagcaggagggactctttcggtgtgacgccctcgatcttctcaccgaagacggaggagtggcagccggtcgacatgcagtctgtgccctcgaacaaccctttcttcgatcagcacagcaacaaccccttcctgcgcatggatcagagccagcaagcattgtaccagaaccatgctgcatggcccatcaccacctctggctccgcgaccccgcaactccaggccttcgacggcctgccggtcgagtatgactcgtccaacctcgccgccttccaaaggcccgccacgatgcagactccgactcccttcactgcccctcccaacccggccgccatgttccaacagctcgggcaggccgcccctcagtcgatcccgacttccccccagaaggatgcgtggatgggccaggacctcaagacccaaggcatgaagaggcctcggccagccagccccctgatccggtcgcataacgaactcaggaggggcgatgggatccgcaagaagaacgcccgctttgacattcctgccgagcgcaacctcagcaacattgaccagttgatcgcgcagtcgacggacgagcaggagatcaaggagctcaagcaacagaagcgcctgctgcgcaacaggcaagcagccctggactcgagacagcgcaagaagcagcacacagagcggctcgaggacgagaagaagcagttcaccgagctcattgcccaaatggaggagaccatcgcgaagatgcagagggacatgcagaagctcaccttggagaagcaaaactgcgagtcgtacatccatgagctcgagaagaagcaggaggagttgatcagcaagcacaccatcgagacgggtgagctgcggaagaagatcagcgtcctgaccaacgaagtgcagtccatgggccgtgcctccaacaccgcgtcgggattctccggtgcttttagcgacatggatggcatcaacatggactgctcctgggacaacatgcccatgttcggcgacttctccatggagcagaacacttccgaggtcaaacaggagatgcagatcgtaccggccgccaagaagcccgaggtgtcgctgccgacgaccgccgactccgagaagcctgcccagcaaggcgggctcctcttcatgctcttcctcgttggcgcttttgtgctctcgagccggtcgtcgacgcccagcatcccgcgtgtctccgaggatgtccgcgccgcgtccgcgaccctcctggagaacgtgctcaaggatgcgggcgtgtcgcaggtcgcctcgggcctcgggagcgcagccccgcagccctcgggcaccacctggtcccaggcatcgcagccgtccctgtccatggccacgccgatggtcgacaacgtcgccccgtcgacgctgggcgagatggcagatgccctgacgcggcccaccgagcaacagaccaacgagcagatcttctcgctgtcggctgagcagtataatgacctgacctcgcaagatttcctccaggctgccccgccggccgaaaggtcgacgagccaagggagacgcaatcttgccgaggctctggccagcatgcgcagctcgaccaagcagtctgccgccgaggtctacactcggtcgctgctctgggaccagatcccgagcgacgtcgtccggacttttgccaagatggttgcggagagtaacaacgccgctaccagcgctggcgaggagaaccgggcgtaa

SEQ ID NO: 2527 - protein, 627 aa, Myceliophthora thermophilia
MVSAFQMPSFYRAPLTVDTTNAQKFFEEEDANILDENILDHSALDSGLDMSPQMVESRRDSFGVTPSIFSPKTEEWQPVDMQSVPSNNPFFDQHSNNPFLRMDQSQQALYQNHAAWPITTSGSATPQLQAFDGLPVEYDSSNLAAFQRPATMQTPTPFTAPPNPAAMFQQLGQAAPQSIPTSPQKDAWMGQDLKTQGMKRPRPASPLIRSHNELRRGDGIRKKNARFDIPAERNLSNIDQLIAQSTDEQEIKELKQQKRLLRNRQAALDSRQRKKQHTERLEDEKKQFTELIAQMEETIAKMQRDMQKLTLEKQNCESYIHELEKKQEELISKHTIETGELRKKISVLTNEVQSMGRASNTASGFSGAFSDMDGINMDCSWDNMPMFGDFSMEQNTSEVKQEMQIVPAAKKPEVSLPTTADSEKPAQQGGLLFMLFLVGAFVLSSRSSTPSIPRVSEDVRAASATLLENVLKDAGVSQVASGLGSAAPQPSGTTWSQASQPSLSMATPMVDNVAPSTLGEMADALTRPTEQQTNEQIFSLSAEQYNDLTSQDFLQAAPPAERSTSQGRRNLAEALASMRSSTKQSAAEVYTRSLLWDQIPSDVVRTFAKMVAESNNAATSAGEENRA

SEQ ID NO: 2528 - DNA, 1539 bp, Myceliophthora thermophilia
atggaccccagccatcgcgagcacacagcagttcgcacgctcccattgggttcctcatcacgcagtcgctctccccgccaaccagcgccagagaccgccttctcacctttctctcgacttctttctaggaaaagaagcaagagtcattcttcttgtccaccttctggttcacggaaggtcgaggagaagattgcctctgcccccaaagtcgccaacctggactttgaagcacgtgttccggtccctttcagtgtcttcccgtcctcgtacagggagtccgagaccgccacccaaacccactcccacgaagaggttgagatcaagctcccccagctcgccggacgggaaggtcaacactcttcattccaagcccaagcacatcttcctcccagcggagagggtcgcttcagagaagaagaggtccgcatcactcgtcaagaggaacatcaccgccgtcccggcatccgtgaagagttcgttcaccgcgaggagcgtcaccgagagcaagggaagaaaaagaaaaaggcggggaagacaatgggtggtgaatcaaaacaaaaactaaacttaccgtctcgcatcgagttcgatactgagcaccgcactcacaactccgtcattgacgttgctgagagcgagtatcgtgcccgtgtccagcccaactaccgcaaggaagcttccgtagtcggtaccaccgtcgacggatcccgcttcagccacagccgcaaggccagcagcaccacctccacccacaccgacgagtacaccgtcgatccccctagccaccgccccgtctacaagaaggagtcggttgaagtcgccggtaccactgttgacccccctgctcctcgttcgacctaccacgagcaggtgaacattgttgaagagaccgttgacgctcaccgttacgctcctcaacccaacaacaacaacaagatgggctactacgacgaggacggccactaccactctttccgccatggattgcacaagttggctgaccgtattgcgcatcctgaaggccatgaccgcgttgaggtgagcgaggttcgtgagacccgccgcacccgcgctccgtcttcggaggcgtacacgccgaacacggtcaccattccgtgccaccacatccgcctcggcgacatcctgatcctccagggccgcccctgccaggtcatccgtatctcgacctcggctgccactggccagcaccgctatcttggtgtcgacctcttcaccaagcagctccatgaggagtcgtcgttcgtctcgaaccctgctcccagcgtcgtcgtccagacgatgcttggccctgttttcaagcagtaccgcgtcctcgacatgcaggacggccacatcgtcgccatgaccgagacgggcgatgtcaagcagaacctgcccgtcatcgaccagagcaacctctggggccgcctcaagcaggccttcgagactggccgcggcagcgtccgtgtcctggtcgtttctgacaacggcaacgagatggctgttgacatgaaggtcgtccacggctcgcgcctctaa

SEQ ID NO: 2529 - protein, 512 aa, Myceliophthora thermophilia
MDPSHREHTAVRTLPLGSSSRSRSPRQPAPETAFSPFSRLLSRKRSKSHSSCPPSGSRKVEEKIASAPKVANLDFEARVPVPFSVFPSSYRESETATQTHSHEEVEIKLPQLAGREGQHSSFQAQAHLPPSGEGRFREEEVRITRQEEHHRRPGIREEFVHREERHREQGKKKKKAGKTMGGESKQKLNLPSRIEFDTEHRTHNSVIDVAESEYRARVQPNYRKEASVVGTTVDGSRFSHSRKASSTTSTHTDEYTVDPPSHRPVYKKESVEVAGTTVDPPAPRSTYHEQVNIVEETVDAHRYAPQPNNNNKMGYYDEDGHYHSFRHGLHKLADRIAHPEGHDRVEVSEVRETRRTRAPSSEAYTPNTVTIPCHHIRLGDILILQGRPCQVIRISTSAATGQHRYLGVDLFTKQLHEESSFVSNPAPSVVVQTMLGPVFKQYRVLDMQDGHIVAMTETGDVKQNLPVIDQSNLWGRLKQAFETGRGSVRVLVVSDNGNEMAVDMKVVHGSRL

SEQ ID NO: 2530 - DNA, 3801 bp, Myceliophthora thermophilia
atggcatccgacccgcagaggaatcagggcagggcggcagcactccccggcgttagtccctacaccctgcgcccgctgcttcgcggcgtgcccttgtccgccgacggcacaaaggaggatgtcaagataaactgcgtcgactactatgacgggaacctctatgttggcaccagcgcctcagaactcctgcacttcttccgcatccctcccgatcccagcgatcccggcgatcccggcgatcccagcggctccagcagcccttcgaatttcattctcgccactcggctgtcgcccatatactcggagcctgccggcggcttcaatggctcgctcccgggtgtgcagcagatcctcctcctgccgcgcgtggccaaggcctgtgtgttgtgcaactggaccgtcaccttctactcgctacccgagctgagccccgtctttggcgccacccaggtcaggaactgcaactggatcggcggggtggacctgaacgagggcagcgatgcgagcttcgagaggtcggccggcgttaccattctcttgtcgctaaaccgccggatacaggtggtcagaatcggggaagaagatgcgcgagtcatccggaaaattgactttgcaggtagcacgctgtcggtgcgcagggattccatcgcctgcgtcgcagactccaggaactacgtcctgttggacattgaccgccagctcaagatcccgctcatgaccatttcatcactcgatgattcgcagcaggatgccgccttcggacaagcccagaacattgccagcgtccccgacggcggcctgtcgaggagcgcgtcctcggcgaccgcccgtgtccccgcccactccccaggccactctaggagcacaagccttggagacttcatctcgggaatgcggagaaatgacaaacgacctggagaagcggaggaccctgtcttccaggcgtctgatgcccccccgacttcgcggagcccggggccggcagacaaacccctgcccccgccgccacgagaccacggggacccggtgacaactcaggcagccgcggctgcgcctccctatcggacagcgacacctccggtacgatcggggacgtctccgaagcccggatctgtcttcctgaaaccgcatattgtgtctccaactgcggaagagttcctcttggtcaccgggactggcccccttgaaccaggcattggcatgtttgtgaacctcgacggagaccccacacgccctaccctagaattcgacaggtacccgcgcgagattgccgttgacggcggccctaccgacttctcttcctttctcccacccatgagcaccggggaggagggctacgtccttgcgtccatgaccagagatttcgaggacggcttgcaccacgggctcgagatccagcgtcttgacgcgaatgcgggtgaagacgggccggaaaagtggtggctggaggtcagaggcgaccagtccaaacccttcacccctatcggcgtccggccgttactccagaaggaagacatgattttcgaggacgtcgtggagcggctgtgccagcggcgattctcgcccttcaaggagcacacggaaaccccaaccacgtccctaaagagcagcgattctcgaacagcgctatcgatacaacggctatcccaggaaaaggagctctttgatcgggataccgagtcggaggatgagcagctgccccctggatgggaagccaccaggaaccaggagggagaggaatttgtacggcgactggcgaggacatcatcacgcctggccgtttgggccggagatgacatatggtgggccgtgcgaaacccgctgctcactcagctagactctgtgctggacttggcggctcatcagagcccgcaagcagcggcagtcataggtcccgagaacagacggcagcttctctccctgctcgacgccatcaaggatcgtgaaccaacaacagagctcgagttcatgacgttggggtacataaggcagaaagcaagcataatgcttcttacgacgttcctgagctcgccggagccgccacttacggatgccgaaatggaagcaatggagcaaaacctggttggcggggacttagacgcgagggtcgtcctgtctctaatacctgcccttcgtaacgagattgtcgttaaccgcagaggcatatggatctatggtggtatcaaaaggatcgtcgagagctacatgtcggccgagccggatggtttagccatccagggtatcagttcgctgcctgcccatgtcctgaggttcttgaggcgctttctcctcgcctggaggaagaaaaaggggtttggtagcataccaaacgaggtattccggacggtggatgcgtccctgctcctggtgctcctagaactcgaccgggacacgcctgctggccaacctggaaaacccggctcggtccggaaggacctgtacgagctcgtcgaccatggtgtcgactgctttgacagagccgtgggcctgctcgagacatatcaccgcctctttgttctcagcaggctctatcagcaccgcaagatggcagcggacgtgctagggacatggagacgcatcatcgagggcgaggaagacagaggaggtgagctgggcgacggcgagcagcgcgtcaggaactacctcagcaacatcagcaaccaagccctagtccaggaatacggcctgtggctggccagccgcaatcccaagctcggtgtgcaggtttttacggacgagaaagccaaggctcccaaactcgaacacacccaaatcgtcgccctcctccgcgaggaggccccagatgcggtcaagtactaccttgagcatctcgtcttcggcaagggcaacactgcctacgtcaacgaactcatcacctattacttggatatcgtcatcaccgatctccagacctcgtccgcctcacgcgacatgatcgcggcctcctacgacgcctaccgcgctctcgagccgccaaaaccgacctacctccgcttcctcgccgacaacgcgccgcccaataacgaagtctggcaaagccgcttacgcctccttcaactgctgagcggcgggcacgattacgatatcggcgccatccgcgcgcgcatcgaggactcgctatctcgcacatcattaccgcaggcccgccccgtcaatgggggggacggattgtccacgacaataacgaaaacaacagcaacgaaaacaaggagcgccacagccaacggctttgctcaatatgactacctcctcgtccccgaatccatcatccttgcctcccgctcccaccaccacgcggcggcgctacacctgctggtccaccgcctggccgactacgacacggccgtatcctactgcatccgcggcggcgccgccctcgacccttccggtaccgccggcgcgactcgccgacacctccgccgccaagggcgcgagcgcgacggcgacggcgacggcgacggcgacctgccgccgacgtgggaggagcagacggccctcttccgcaccctgctctcggagttcctggcgatcgaggacgatggcgagaggatggcgcagacgggggcgctgctggagcggttcggcggctggttcgacgtggtcgaggtgctggagctggtgccggccgggtggagcgtcgaggtgctgggcggcttcctggtggccgcgctgaggcggctggtctgcgagcggcgcgaggccatggtggagcgggcgctgagcggggccgagaacctgagggtcgggttcgactttgtggtcaaggtggaggagaagggccctattgttgaggggggctaa

SEQ ID NO: 2531 - protein, 1266 aa, Myceliophthora thermophilia
MASDPQRNQGRAAALPGVSPYTLRPLLRGVPLSADGTKEDVKINCVDYYDGNLYVGTSASELLHFFRIPPDPSDPGDPGDPSGSSSPSNFILATRLSPIYSEPAGGFNGSLPGVQQILLLPRVAKACVLCNWTVTFYSLPELSPVFGATQVRNCNWIGGVDLNEGSDASFERSAGVTILLSLNRRIQVVRIGEEDARVIRKIDFAGSTLSVRRDSIACVADSRNYVLLDIDRQLKIPLMTISSLDDSQQDAAFGQAQNIASVPDGGLSRSASSATARVPAHSPGHSRSTSLGDFISGMRRNDKRPGEAEDPVFQASDAPPTSRSPGPADKPLPPPPRDHGDPVTTQAAAAAPPYRTATPPVRSGTSPKPGSVFLKPHIVSPTAEEFLLVTGTGPLEPGIGMFVNLDGDPTRPTLEFDRYPREIAVDGGPTDFSSFLPPMSTGEEGYVLASMTRDFEDGLHHGLEIQRLDANAGEDGPEKWWLEVRGDQSKPFTPIGVRPLLQKEDMIFEDVVERLCQRRFSPFKEHTETPTTSLKSSDSRTALSIQRLSQEKELFDRDTESEDEQLPPGWEATRNQEGEEFVRRLARTSSRLAVWAGDDIWWAVRNPLLTQLDSVLDLAAHQSPQAAAVIGPENRRQLLSLLDAIKDREPTTELEFMTLGYIRQKASIMLLTTFLSSPEPPLTDAEMEAMEQNLVGGDLDARVVLSLIPALRNEIVVNRRGIWIYGGIKRIVESYMSAEPDGLAIQGISSLPAHVLRFLRRFLLAWRKKKGFGSIPNEVFRTVDASLLLVLLELDRDTPAGQPGKPGSVRKDLYELVDHGVDCFDRAVGLLETYHRLFVLSRLYQHRKMAADVLGTWRRIIEGEEDRGGELGDGEQRVRNYLSNISNQALVQEYGLWLASRNPKLGVQVFTDEKAKAPKLEHTQIVALLREEAPDAVKYYLEHLVFGKGNTAYVNELITYYLDIVITDLQTSSASRDMIAASYDAYRALEPPKPTYLRFLADNAPPNNEVWQSRLRLLQLLSGGHDYDIGAIRARIEDSLSRTSLPQARPVNGGDGLSTTITKTTATKTRSATANGFAQYDYLLVPESIILASRSHHHAAALHLLVHRLADYDTAVSYCIRGGAALDPSGTAGATRRHLRRQGRERDGDGDGDGDLPPTWEEQTALFRTLLSEFLAIEDDGERMAQTGALLERFGGWFDVVEVLELVPAGWSVEVLGGFLVAALRRLVCERREAMVERALSGAENLRVGFDFVVKVEEKGPIVEGG

SEQ ID NO: 2532 - DNA, 2019 bp, Myceliophthora thermophilia
atgggagacaccgccgtcgcggcgctcaacgccctcctccgaggtgcctccatcgacgaccacgccgaggcactcgacctcgcaagtgccgccctgcgctctgcaaagggtcgtggtgcccaactggtcgcagcccagcacacgcgcgtggtggcgctcctgaacctcgaccgctttgacgacgccctgcgcgccattgctgagggcggtgatgccctggccaagacgtgcgtcttcgagaaggcatatgcgctctacaagacgggggacttggaggcggccgaggctgtgctgcgggacgccggggtttccagcggaagggcgctcaggggcctgaagcacatcgccgcccaaatagcataccgcgccgagaagttcgaccaggccgccgcaacctaccgagagctcgcggcagatcgggacggcggaaactacggagaggagaacgacctgcgtatcaacctgtccgcagtcaatgcgcagctcgagtggcagggcaagggttgggcggtgccggaacaggagaaacagcctgccagagaggacctggaagcgtttgagactgcttataatgccgcctgtggctgcatatcccgtggggactataccaaggccgccgtctttctgaagcgctcgagggacttgtgcgaggccacggatgaattgagtgacgaggagaagaaggcggagctggtgcccatcatcgtgcaacaagcgtatgtcttcaccaagctcggcaagttagaagaagccgtcagccttcagaactccctgaacctcgacgataccgcggacccttctgccaagctcgtggcccgcaccaactccctcgttctccaggccgagaccaaccccgtacctggcacagcggggaacgacaggttgtttgagtaccagagctctgttcttcgccgcaatagatacgtcctcagtctacaagtccagaagtttcccggcgttgagaggtccacttccaggatactgtccaaggacacggctccgtccatttcgagctccaagtgcgaccttggagttctcgaagcggcagcggcatgccagctccgaactggccaagaagcgctgcgcagaatccttccgctgctcgagacacggcctgacgacgtcggccttctgctcaccgccatccagctttacatccggctccagaaccccagccctgctataacactcctagaagcattctttaagcgcctggaggttgccgccactcccgatcatgccgatgtgcgcttcgccccaggactggttgctcttgctgtatctctctaccgtacacaaggtcggcaagcagcgatacgcaaggagctcgccaaggctgccgcacactggcaagggaagacgggcatcgccgcctctgggccgggtacctcactcctgcgcgaggccggtatcgagctcctccgctcgtcccatcccgccgacctcgccgcagcgggcgaggctttctctcacctagtcgcggttcaacccgaggatcgcatcgccaaggccggtcttgtcgctagcttcgcgacaaccgaactctccaaagcccagccctacctcgacgccctcccttccgtcgaggacttgacccgaggcgtggatgttgccgccctgctagaagcaggcgtcgccacggctgctcccgcgtcacatgtacagcagcaggcaagaggcaaaaagcgttcccgcgaggacggggcggaagaagaaggggccggcaaagggaagcagcaggcccagcccgccaaaaagcgcagaaagaggaagctgcccaagtcgtacgaccccgacaagaagcccgatccggaacggtggctgcccttgcgtgaccggagcagctaccggcccaagggcaagaagggcaagaagcgggccgccgaggccacgcagggcggcatcgtgcgcgaggaggagacgctcgagctggccggcggtgctgggtccgtcaaagtggaaaaggcgcccgcaccagggggcgggggtgggaagaagaagaagaaggggaagaaatga

SEQ ID NO: 2533 - protein, 672 aa, Myceliophthora thermophilia
MGDTAVAALNALLRGASIDDHAEALDLASAALRSAKGRGAQLVAAQHTRVVALLNLDRFDDALRAIAEGGDALAKTCVFEKAYALYKTGDLEAAEAVLRDAGVSSGRALRGLKHIAAQIAYRAEKFDQAAATYRELAADRDGGNYGEENDLRINLSAVNAQLEWQGKGWAVPEQEKQPAREDLEAFETAYNAACGCISRGDYTKAAVFLKRSRDLCEATDELSDEEKKAELVPIIVQQAYVFTKLGKLEEAVSLQNSLNLDDTADPSAKLVARTNSLVLQAETNPVPGTAGNDRLFEYQSSVLRRNRYVLSLQVQKFPGVERSTSRILSKDTAPSISSSKCDLGVLEAAAACQLRTGQEALRRILPLLETRPDDVGLLLTAIQLYIRLQNPSPAITLLEAFFKRLEVAATPDHADVRFAPGLVALAVSLYRTQGRQAAIRKELAKAAAHWQGKTGIAASGPGTSLLREAGIELLRSSHPADLAAAGEAFSHLVAVQPEDRIAKAGLVASFATTELSKAQPYLDALPSVEDLTRGVDVAALLEAGVATAAPASHVQQQARGKKRSREDGAEEEGAGKGKQQAQPAKKRRKRKLPKSYDPDKKPDPERWLPLRDRSSYRPKGKKGKKRAAEATQGGIVREEETLELAGGAGSVKVEKAPAPGGGGGKKKKKGKK

SEQ ID NO: 2534 - DNA, 2148 bp, Myceliophthora thermophilia
atgcttgttaccaggcacgccgctacggagcagaattcttggtccataagcaagttcgaacccgcctttcgcaagtctgcggaaagatcacgcatgtcgaacaacttcgacacggtgacacagtcggactggcagggccagtactcattcctcccgccgggggacaacaccatcttttcgcagccgtatgagcatgtggcaagctcgacagagaatgcagagtcaccggcgcagccgcgaacggtggttgcaccgagtgaggcgcccaaagcagagggttccccgctgggtcagcgtcttgacccgctcggtttacgacagacaaagcagccgtcgccgatcccagagcagccagagaaccaggaagaacagtgtccgtccaaggcacccgaactgacgcatgaggagtcaacgacctcgaccgagacccgcgacgtgtctctagggtcgaaccccctgagctcagtgtcatcggctccggggcaaggctctgaagcgggggccccgagccagtcgggtaacgaggggcaacccgccgccgtgaaggaggaggaggaggaggaggaggttgtggaggacgaggagatggcagaagggggggaaggggggaccgaagcgcagcctcagcagccacagacagcggccgagcgaactgcgcagcggcgcaaaatgaagcgcttcaggcttactcatcaacagacgagatttttgatgagcgagtttgctaagcaaccgcatcccgatgccgctcatcgcgagcgcctctcgcgagagatcccgggccttagcccacgccaggtacaggtgtggtttcagaaccgtcgcgccaaaatcaagcgcctcaccgcggacgatcgcgagcgcatgatgaaaatgagggcggtcccggaggattttgacagcctcagtgcgctccactcgccgtacggcgccgttcacgccctcgggacacccattacgtcgcctgtcgaccttggcggatcttcgtacgcgcctctcatggtggatgtaaggaggcatgacggcgacgagcacctgtcccccaccggcctgagtccggcgtttggaaatataggtttcggccactcggcaggacttggcacaccagatattctctcgcccatctcccctacctctactgaccggtacggctacccgagccatctctcgaccacgccgctgagtgccgggccaaggacgtccaacccgtttgcaaggcaggcaagcctggactcaggaatgcagatgcacaacgcccactcccgacaacagatccgaccgctgcagcctctccagcttcgcgacaccatgaccagatcgcgctcggacagcctccagtcgccattgcgttcgagcatgtcgtggaagggcgacgcgattgactacacgacctaccaagggggaaatccttcgtcacatctgggaagtaggcagcacagtatctaccaccaagatcaggtgggcggcagctcagctggtggcttgggcgcctacgagtcgggcaactattccggtaggttctccttctcagaaaatgtcaagttcaaagccaagcgtggctcgagggtacaggagctaaccgcgagccagcagcggaactcgcggttgagagctgcgtctgcctcctcgctcccactcggcttagatctgcggacacagttcaggtccgccatcgggtccggcggcggtctaccaaactcgacacagtctccaggtccgcggacggcttcgaccccgcaactgggcggcgtctcgtccggcttcacgggcagcttcccgtcgacgcctctcacggcacccgtcgacttctccttgcccaggtcatccgccgcgtaccgaacctcgaccaccgactactcgatgccccagatgagcgcccctatcgcgcctccaaacgacttctcgcaagccttccaggccagcatgtcgagcccgagcgcgaggacaccgatgagggattcctttggcggcggcggcggcggcggcggcggaggggccgggccgctggggctggggccgcagagacagggtccgggagatcgcagcgacgactactcggaccctctggggatgaagcggaagcgcagcttcacggggccattacccgccacgacggccggcgctggcgcttacggcagcacggcgtga

SEQ ID NO: 2535 - protein, 715 aa, Myceliophthora thermophilia
MLVTRHAATEQNSWSISKFEPAFRKSAERSRMSNNFDTVTQSDWQGQYSFLPPGDNTIFSQPYEHVASSTENAESPAQPRTVVAPSEAPKAEGSPLGQRLDPLGLRQTKQPSPIPEQPENQEEQCPSKAPELTHEESTTSTETRDVSLGSNPLSSVSSAPGQGSEAGAPSQSGNEGQPAAVKEEEEEEEVVEDEEMAEGGEGGTEAQPQQPQTAAERTAQRRKMKRFRLTHQQTRFLMSEFAKQPHPDAAHRERLSREIPGLSPRQVQVWFQNRRAKIKRLTADDRERMMKMRAVPEDFDSLSALHSPYGAVHALGTPITSPVDLGGSSYAPLMVDVRRHDGDEHLSPTGLSPAFGNIGFGHSAGLGTPDILSPISPTSTDRYGYPSHLSTTPLSAGPRTSNPFARQASLDSGMQMHNAHSRQQIRPLQPLQLRDTMTRSRSDSLQSPLRSSMSWKGDAIDYTTYQGGNPSSHLGSRQHSIYHQDQVGGSSAGGLGAYESGNYSGRFSFSENVKFKAKRGSRVQELTASQQRNSRLRAASASSLPLGLDLRTQFRSAIGSGGGLPNSTQSPGPRTASTPQLGGVSSGFTGSFPSTPLTAPVDFSLPRSSAAYRTSTTDYSMPQMSAPIAPPNDFSQAFQASMSSPSARTPMRDSFGGGGGGGGGGAGPLGLGPQRQGPGDRSDDYSDPLGMKRKRSFTGPLPATTAGAGAYGSTA

SEQ ID NO: 2536 - DNA, 1227 bp, Myceliophthora thermophilia
atgttttctcctgtccagagcgagcagtcccctgagatccacccggacactttgctcgacatctactttacccgctttcacgacaaacccttctacatttttgacgaatccacattgcggcaacgtcttcagctcaaccaggtagctagccacctggttcacgccatctacgcggtagctgccagatacgcgcctcacccaaacggctaccagtccgccgtgaaactgagcgaagaatatgccgccagggcaagggcggaagttgacacggacgatccatctgtggatgcactacagaccctggtacttctcgtgacggctttcacggcatctggaaagggaaagaaggcatacatgctgctgacaagcgctgttgggatggctatggctctggagttgcacagggagttggatgtgaacgcccgcgtcaccccgatcgaacgggaaacacgccgaaggctgttttggacttgctacctgctcgaccgtttcatgtcctgtggctcgaagcgcccgtctctcatatccgatcgtgccattctcttacgactgccgtgctggtacccgagcccgaacacgatgcccatggagggcgatttcttccagagttatacaaacctccaacacctgcacggcggaggcaagaggtcccaagggagcaacgggatgttgatcgatatctgccgcatcctcggcacgacgaaccagtacttggctgccggcggagtcaagggggattctcatttcccgtggcactcgctgtccaacctgtccaagatccgccaggacctggacgtgtgggcttcgggaacagaagacgtgttttccagcgtggactcgctatttggacagccggattccaccgtgcttgtgctaagcaagctcatataccatctcattcactgcctcatataccgtcccttcctccccatcgatttggcggagcttgcagggtccggtcaacaccagtcatggcagatcgaggccacaaacatgtgcttcctgcacgcaaacgccatcgcagagctggtggaactcggcaagcagacagcatccgtcgaatggcccgcgtttgtcggttactgcatctgcacagccggcacggtacacatccacggagcgcactatagccgcatcgggacacacaacaaccacaccaatggtaacgagcgaaaggatttgggtagcgtggagttcttgaagggggttcatcttgggaaactttag

SEQ ID NO: 2537 - protein, 408 aa, Myceliophthora thermophilia
MFSPVQSEQSPEIHPDTLLDIYFTRFHDKPFYIFDESTLRQRLQLNQVASHLVHAIYAVAARYAPHPNGYQSAVKLSEEYAARARAEVDTDDPSVDALQTLVLLVTAFTASGKGKKAYMLLTSAVGMAMALELHRELDVNARVTPIERETRRRLFWTCYLLDRFMSCGSKRPSLISDRAILLRLPCWYPSPNTMPMEGDFFQSYTNLQHLHGGGKRSQGSNGMLIDICRILGTTNQYLAAGGVKGDSHFPWHSLSNLSKIRQDLDVWASGTEDVFSSVDSLFGQPDSTVLVLSKLIYHLIHCLIYRPFLPIDLAELAGSGQHQSWQIEATNMCFLHANAIAELVELGKQTASVEWPAFVGYCICTAGTVHIHGAHYSRIGTHNNHTNGNERKDLGSVEFLKGVHLGKL

SEQ ID NO: 2538 - DNA, 4779 bp, Myceliophthora thermophilia
atgtctgacgaagtttccgactttttgcgctcggtcgagctgctgaaggagaggcgggaagaagaagacgaagcccggtcgcgcgagctcgaggagaagatcttacaggaaaagaaagaacgccaggcccgacgcgcagagcgcgcgaggtcaatttcgccccaaaagtcatcgcccgcgaacacgccacccccaaccgcccatcgcgttggtatccttccgtcggcatccggcggcacgactttggagtcgcctggccttgacaacgctgggagtcccaggcaacgcgccctcgaaccgccttccgatgccatggataaaatcgcggtcgatcacccggattctccgaccaaggagaacgactccccgtttgatgcggaaaccaaacgaaccagcatgaccttgagctcgccctccattggcatgccgtccgctcgatcgcccctctcgtggcagaggcgaccgacttcgcaagcctccgatcgcccgagaagccgaccgttatccgtggtggccgctgagaacgccgcccggaatagccccagcagcgccgattcacccgagccgaccttgtctcgcgatcagatcgctcagtctctctcgagcaaagacccgtcttggttccgtcagactgctgatccgggccgcgggtcaggggctttccggaagacccaggtggaggaccaggacaccgtggttatgccctccacgcgcacacagcttcccggcatggcgcgagagctgacactagaatcgcccaaggagagctccgcgggccgaccagtgacgcccaccaacctacccagcaaacctgggtccccgcttcctttgtcgggcaccgaacgcctggatcctcccgcggtcggcagcgcagagaatgcggagacgacctctccagagtctcagtctgtaacctcgccacgagggcggacctcgcccaccaggcccatttcccccacaaagggcatgggagggtttgtgcagagcgccatgatgaggcgttcggacagcgttaagcggtggagtgtcaactcccctggcggcttgcagcgggcggattccgtaccctccagtccagccgctgcagacagtgcgcatcgccccaccacccccaaggccagcgcgcgcccaaaaagtatgcttcgggagacatgcgccgtgtcttccctcccgccaacctccggcgaggagaaggatgagaaggacgagaaggaggctggatcagaggaacagcccgcttccgccagaccttccacgccaaccgagacaaaaccgagggacggagaggagaaggcgagcccaccaataagtccatccaagaccatggatccccggagatggagcccgacaaagggctccagctggctcgaggcagcactgaacaagccagagtcgcccaaggccaaaccagccgcttccgcaccggctcagccagcgtggatggtcgagctgaacaaagcaaaggcccagagagccagcgcagatcctgcccgcaactcatccttaccgaaaaagcccgaggtcaagaccggtgggcttatgaggtccacgcccatgggcgcgagtgtgaagccaagtgctctgagtggcctccccgttgtccctcccgtacccgcgtccgacaaaccagtcattgccgggttgcgtggtagcctccggaaaacgtttccgactacggagggttcggaagagagccatgacaccccttcggtaaaagacctccgcgccaaccttaggcctcgagcgccaccgcccgaatccaagccgggaaattctgttgatgagttgaagaatgttgttgggagcttgaggagaaccaagacgcaaagctacgtggctccggatgagctgaaggataacatcctgtctggcaaagcggccttgaacaccactggtggacccaagaagacggagtcgagagacgaattcaaggaagcgatactaaagaagaaggaggactttcagaaggcacaggaggaaggacgaggtgtcaccagacagccgaactccgctagcgatccgtcagttcctgagggaattgcagttgcgaagaagttagagcggcagcgaacggggaccgtctccaagcacacctcggccgcttctgatcttagccatgccccttctcgttccaggcatgagattcccagcctgggttctgaagttgccgtgaacgtctcacccgaggcttcgaaagagcctgttgcagattcggctgctcccaacactttatcgaaaccggcagatgcgccgggccgagttggaggcaaagtcagtggcttggccggtcggttcaatcctgccctggcggatctccttgcacggggtcctccgccggcctcgggacctagatcgtcggggactgcgggcgcctccgggacgtcagaaacaaacgaacctgctggtcccggccctcaactgacccacatgacgaagaatcgagctcgtggtcctaagaggagggctcctacgtctgtcgcgcctcaacgcgcagcgccggttgagacgtcagccagcgctgcctccgaaccaaaaactgcatcgctttcctcaactcctgagcctaaggagaccatgtcgtctcatccagcagaggcagaagaacctatcacttctcccgcggcagggcgaacgatcgcttcctcggaaccgaggaaaccggtcatttctcctaaaccagagagttctgcgccatccacccctgtacctgtcacgctggcagaccgtagaaagtcctttatacaaaatcggacagggtcctcaggcgagggcacgtctctggaatcgccaaagcgcgtactcaaagaggatccgaaaccagtcggccagtccggcgcccccactgagcctagcccggttcagactcgtccccgttcacctaccaaggtccacgagcaggtggcagctctagcggcactgagccagcaatcaccgaagcccgccgataccaaggccgggatcgcttcacagccgccctcaccgaagaagctcgacatgaagagaatgtccaggttcttggaagaacagaagcagccgagctccgagattgagccggtaaagtcgaggccgtcttcaccaatcaaggatcgctccgactctgtaagctcgaagcccgtgtctctggtcagagagcgggcagagtcgatcacgggagggcccgtttctctcgtcaggaaccgttcggattctttgcggtcgaggtcatcctctccgatcaaggaccgcttccctggtctcgagatgccgtcactgaggaaccgtacggaaaccgagcagcctgaagcgaggactgcgttttcgagcagaggcggcgcggcgccgtcgggtggtgccggactgggcctgacacagcctacaacggcaccggcaccaaccgttcagaagcctgcggagacagagctgccgcgaccgttggccccccagacaaccaggccactcccggcaactcccaccgcagcatctccacccgtcacgacaccccgcgtagcctccccagcgcggtcgccgaacaagcaagcagcggacgcatcagaactcatcaacaatttctttgggccagaacgcccgaggcgcaagtacacggctgatgcagccgagatcctgatgaatcaaccagtctcgaccgccaaggtgcagacccagcgggctcagctcattcagctcacttctgaaggcaagaagatcccagtgccttcgcactacgagcgggtcctgttcgagcgcgagatgtacatctgcccgcacagttacctcgacggctccggcaagcaggtggtcgacgtctacttttgggttggcgacgaggtgcccgagtcacaggtagatgatgcccagctctttgccgcgcgggaggctagggcgttcggcggaaatctagtcaagctgacccagggcaaagagacgtcccagttcatgcaggctctcggcgggatcatcatcatccgccgcggttcgagcaacaagtacgactcgctcgcaccccacatgctctgtggccgccgctatctgggccaagtcgcctttgacgaggtcgacttctccccgctgagcctctgctccgggttcccctacctcatcacccagcagggcaagtgttatctctggaaaggcaagggcagcgatgccgaggagctgggctgctctcgactcgtaggaatggacctcgcgctgatgggcgagctcatcgaaatcgaagaaggtagcgaaccggacagcttctgggagatttttggcggtggcacgcggccaatttcggcggatcactggcgcctcaagccgagctatgacaagtaccgcagcaggctgttttgtgccagctcaaccgacaggcaccagcgaggaaagattacagaaatgtgccccttctcgcaggcggaccttctcccgtccaatatatacgtcctcgacgccttcttcgagctgtacatcattgtcggcgcccagtcacagcaccagtacgccgccttccgcaacgccctcgacttcgcccaggagtatgccatcctggcggccggcgcggaggaccgccccttcgtacccgtctcgacgattgtgctcgaggggatcccccgggacctcaagagcgtgttccgcaagtggcgggacgccaatagcccaaccattatgcacgttaccaaccctcctcctccttctcagcctggcgtgagcggtggcggcccatcttctgccggtgggcagccgacgccgagtccgttgaagagggggcgcagcttaaggatcgtgccgttgacgcaagcgctgcaggcgctggcggagtaa

SEQ ID NO: 2539 - protein, 1592 aa, Myceliophthora thermophilia
MSDEVSDFLRSVELLKERREEEDEARSRELEEKILQEKKERQARRAERARSISPQKSSPANTPPPTAHRVGILPSASGGTTLESPGLDNAGSPRQRALEPPSDAMDKIAVDHPDSPTKENDSPFDAETKRTSMTLSSPSIGMPSARSPLSWQRRPTSQASDRPRSRPLSVVAAENAARNSPSSADSPEPTLSRDQIAQSLSSKDPSWFRQTADPGRGSGAFRKTQVEDQDTVVMPSTRTQLPGMARELTLESPKESSAGRPVTPTNLPSKPGSPLPLSGTERLDPPAVGSAENAETTSPESQSVTSPRGRTSPTRPISPTKGMGGFVQSAMMRRSDSVKRWSVNSPGGLQRADSVPSSPAAADSAHRPTTPKASARPKSMLRETCAVSSLPPTSGEEKDEKDEKEAGSEEQPASARPSTPTETKPRDGEEKASPPISPSKTMDPRRWSPTKGSSWLEAALNKPESPKAKPAASAPAQPAWMVELNKAKAQRASADPARNSSLPKKPEVKTGGLMRSTPMGASVKPSALSGLPVVPPVPASDKPVIAGLRGSLRKTFPTTEGSEESHDTPSVKDLRANLRPRAPPPESKPGNSVDELKNVVGSLRRTKTQSYVAPDELKDNILSGKAALNTTGGPKKTESRDEFKEAILKKKEDFQKAQEEGRGVTRQPNSASDPSVPEGIAVAKKLERQRTGTVSKHTSAASDLSHAPSRSRHEIPSLGSEVAVNVSPEASKEPVADSAAPNTLSKPADAPGRVGGKVSGLAGRFNPALADLLARGPPPASGPRSSGTAGASGTSETNEPAGPGPQLTHMTKNRARGPKRRAPTSVAPQRAAPVETSASAASEPKTASLSSTPEPKETMSSHPAEAEEPITSPAAGRTIASSEPRKPVISPKPESSAPSTPVPVTLADRRKSFIQNRTGSSGEGTSLESPKRVLKEDPKPVGQSGAPTEPSPVQTRPRSPTKVHEQVAALAALSQQSPKPADTKAGIASQPPSPKKLDMKRMSRFLEEQKQPSSEIEPVKSRPSSPIKDRSDSVSSKPVSLVRERAESITGGPVSLVRNRSDSLRSRSSSPIKDRFPGLEMPSLRNRTETEQPEARTAFSSRGGAAPSGGAGLGLTQPTTAPAPTVQKPAETELPRPLAPQTTRPLPATPTAASPPVTTPRVASPARSPNKQAADASELINNFFGPERPRRKYTADAAEILMNQPVSTAKVQTQRAQLIQLTSEGKKIPVPSHYERVLFEREMYICPHSYLDGSGKQVVDVYFWVGDEVPESQVDDAQLFAAREARAFGGNLVKLTQGKETSQFMQALGGIIIIRRGSSNKYDSLAPHMLCGRRYLGQVAFDEVDFSPLSLCSGFPYLITQQGKCYLWKGKGSDAEELGCSRLVGMDLALMGELIEIEEGSEPDSFWEIFGGGTRPISADHWRLKPSYDKYRSRLFCASSTDRHQRGKITEMCPFSQADLLPSNIYVLDAFFELYIIVGAQSQHQYAAFRNALDFAQEYAILAAGAEDRPFVPVSTIVLEGIPRDLKSVFRKWRDANSPTIMHVTNPPPPSQPGVSGGGPSSAGGQPTPSPLKRGRSLRIVPLTQALQALAE

SEQ ID NO: 2540 - DNA, 2184 bp, Myceliophthora thermophilia
atgacgaagctgtggcttcccagaggcctcagtaggccgcttcggcggccagtgcgccgcaacggaacggggatttccaagcggaggacttttgcaacagtcggaaccgattcgaggccgtttgatgtcgtcgtgattggcggtggccacgccggctccgaagcatgcgccgcagcagcccgcgcgggcgcccgaaccgccctcataacgccctccattgacaaccttggcgtctgctcgtgcaacccgagcttcggtggcatcggcaagggcaccatcctgcgcgagatcgacgccctggacgggctggccggacgcatcatcgacaaggcgggcgtgcagttcagggtgctgaaccggagaaagggtccggccgtatgggggcctcgcgcccagatcgaccgggccctctacaagaagcacatgcgcgaggagctcgaggcgtacccgaacctgtccatcgtcctcggcagggtatccgacattgtcatcgccgacaaccacgacgacccggccgccgacggcgccaagagcaagatcacgggcgtgcgcctcgagtcgggcgaggtgctgcccacgagccaggtcgtcatcaccaccggcaccttcctgggcggcgagatccacatcggcctcgaggcctacccgtccggccgcatgggcgagcaggcgacgttcggcctgagcaagtcgctccgcgacgccggcttccagctcggccgcctcaagacgggcacccccccgcgcatcgccaaggacagcatcgagtgggacatactcgaggagcagcgcggcgacgaaccgcccgtgcccttcagctacctcaacgacgccgtcgccgtccaggaccagctcctctgctacgcgacctacaccagcccggccacgcacgacattgtgcgcgccaacctggacaagacgatccacatccgtgagacggtcaaggggccccgctactgcccctcgctcgagtccaaggtgatccgcttcggcgaccgcgagcggcacatcgtctggctcgagcccgagggtttcgacaacgacgtcatctaccccaacgggctcagcatgacggtgcccgccgacgcgcagctgcagctcctccgcaccatccgcggcctcgagaaggccgagatgctgcagcccggctacggcgtcgagtacgactacgtcgacccccgcagcctcaagcgcacgctcgagaccaaggcgatccgcggcctctacctggccggccagatcaacggcaccacgggctacgaggaggccgcgggccagggcatcatcgccggcatcaacgccggccgcgccgcccgctcgctgccgggcgtctccctctcgcgcgccgacggctacatcggcgtcatgatcgacgacctcgtcaccaagggcgtctcggagccctaccgcatgttcacctcgcgctccgagttccgcctcagcgcccgcgccgacaacgccgactcccgcctgaccccgctcggccgcgagtggggggtcgtctcggacgcccgctggcgccgcttccgcgacgacgcccagcgccgcgccgacctccgccgcatcctgcgcgacaccgtcctgagcgccgaggcctggcgccgcctcggcgtccccgtcctgacaaacgagtccgacggcggcggcggcaagcgccgcgacggctgcgaggtgctccgcctgccgggggtgcttcccgagcacctgacgtcgcgcatccccggggtgaacgacgccgagttccccgcgcgcgtgcgcgagcgcgtggccatcgaggtcgtctacgagccctacgtgcgcatgcaggccgccgaggccgcccgcctgcgccgcgacgaggacctccgcctcccgggcgacctcgactactccgccatcttcggcctctccatcgtcgagaaggccgccctctcccgcgcccgccccgagaccatcgcgcaggcccgccgcatcgagggcgtcacccccgccgggctcgtcaagctgctcggccacgtcaggcgctcgcagaggcgagggccgacgccgccgccgccgccgccgcggagcgagcagcagcagcagcagcagcagcgggagggggcaggggcagcagcaccggcagcggcattggaagggttggatctcaccggggcggaggacctggagacgctggatgccaagagcagggttgccgacctgtga

SEQ ID NO: 2541 - protein, 727 aa, Myceliophthora thermophilia
MTKLWLPRGLSRPLRRPVRRNGTGISKRRTFATVGTDSRPFDVVVIGGGHAGSEACAAAARAGARTALITPSIDNLGVCSCNPSFGGIGKGTILREIDALDGLAGRIIDKAGVQFRVLNRRKGPAVWGPRAQIDRALYKKHMREELEAYPNLSIVLGRVSDIVIADNHDDPAADGAKSKITGVRLESGEVLPTSQVVITTGTFLGGEIHIGLEAYPSGRMGEQATFGLSKSLRDAGFQLGRLKTGTPPRIAKDSIEWDILEEQRGDEPPVPFSYLNDAVAVQDQLLCYATYTSPATHDIVRANLDKTIHIRETVKGPRYCPSLESKVIRFGDRERHIVWLEPEGFDNDVIYPNGLSMTVPADAQLQLLRTIRGLEKAEMLQPGYGVEYDYVDPRSLKRTLETKAIRGLYLAGQINGTTGYEEAAGQGIIAGINAGRAARSLPGVSLSRADGYIGVMIDDLVTKGVSEPYRMFTSRSEFRLSARADNADSRLTPLGREWGVVSDARWRRFRDDAQRRADLRRILRDTVLSAEAWRRLGVPVLTNESDGGGGKRRDGCEVLRLPGVLPEHLTSRIPGVNDAEFPARVRERVAIEVVYEPYVRMQAAEAARLRRDEDLRLPGDLDYSAIFGLSIVEKAALSRARPETIAQARRIEGVTPAGLVKLLGHVRRSQRRGPTPPPPPPRSEQQQQQQQREGAGAAAPAAALEGLDLTGAEDLETLDAKSRVADL

SEQ ID NO: 2542 - DNA, 879 bp, Myceliophthora thermophilia
atggccgcttcagtgtcgtccgaccagaccagactgtctgttgttagcatctcatcagatcacctcgagagagtggtagccagaatttggtataattatttacccgtcgtcccccccccaccccccaaaaaaaaggctaacccgaggttcctcacacgggagctccgcacatggatcttacgatccttggacgcccaatccggcggcggcggcgggatgggacccggagcaagggaccatcgaccctcgactcttaacggagccccagaccgccccggacgtggcgacgcaggactcctttgcaagcaactcttattctgtcagtacacctcttccagcaacctagcaacccacggagaccagtcccatctgccttggccctcctgtcctccagagcagtcgtactttactcgggtcagagccggcagagcccgttttcgtccgcctcagaggtcgctagtctcgccgaaggtgcttagatacctcactacagagacatggctagccctggtgccaacaattcgggatccggccccggccccgcccccgcccccgacgctcatctttctcccgacgcccatgccctcccctcgggacgccgtggctcatcaggacgcctattactcgtcctccttttggtctcaccaaaatgtctcattcccttctccgtccgccacgaacggcttcggagctgctcaacgacaacattcccttactgacgccactctgcctccccaggccgagtacaacgaacaacaccaacacctccaagccggggctcagtaccccgcttctgcatcttccaccaccggcccgccgtacgtgtgcggcatagagggctgcacgagatcgtatcctcgacacggcgaacttgagtaa

SEQ ID NO: 2543 - protein, 292 aa, Myceliophthora thermophilia
MAASVSSDQTRLSVVSISSDHLERVVARIWYNYLPVVPPPPPKKKANPRFLTRELRTWILRSLDAQSGGGGGMGPGARDHRPSTLNGAPDRPGRGDAGLLCKQLLFCQYTSSSNLATHGDQSHLPWPSCPPEQSYFTRVRAGRARFRPPQRSLVSPKVLRYLTTETWLALVPTIRDPAPAPPPPPTLIFLPTPMPSPRDAVAHQDAYYSSSFWSHQNVSFPSPSATNGFGAAQRQHSLTDATLPPQAEYNEQHQHLQAGAQYPASASSTTGPPYVCGIEGCTRSYPRHGELE

SEQ ID NO: 2544 - DNA, 2238 bp, Myceliophthora thermophilia
atgaattgtctcctttccgtcggtccaggcaacggggacctgaagtggtcggatagccatagcatcgactcggacgacgctcggtcagtcgcaatgccctcgccttggctgggctctcgctcgacggggtccagctcggtctcagcctcttcttcgagcctggggttctcccacaccggccagctttcgcccatcagcaacggcgtggacctgccctgtggagctgtccacggctccgccagtctcgcctctccgtctcagtctccctcggtgacggccacatcccgtccggcatcgtcgtctgtccaaacccccgcctggccgccgccaggttgtgttggccccgaaaacccctctccacttcccggtcccgaggagcgctacgatgcacaacaccgggatgctgctgcctcagaagggggggacgtagccgaggttttggttcccaagctggaaccgatggaggacgatgacttctgtatgaatgacttccaggaggctccttcgcccttcgctacccgcgcgctccccggccacccaccgcaagaagaagccttggaacactcgaagcagaagagaccgaggggacgaccacggaagcacccgttcgtaccgaacgtcgtcacacacaacaagatcaccaaggttgtttgcgagggctacccagagaagcagatctggaaaagcggaaaagaaagggccgaagaggaacgcctcaggtgccggggcttcccgtccatcaccatgcgccccctcttccactgtctcgagacggtcgaggacaggatattttggaaacattacaacgaacaccttagcgctgtgctgaccgtcgagagcgagcacaagaacgccttcaaagacatgatgattccaatcgcggtgaagcaccgagggttgatgcactccatcctgtccctggcgagcaagcacatcgactacgagacgccatacggtctcaacatcctgaggaacaatcccaacaccaccctcgaggctctgaaacagcgctcgttctaccatcaccaacaagcgcggttcaacatgtaccgggacattgatgcggccaggaaggcaccgcacacgatcgacagagtttcgaccgaggcccggtatggccaaatgctttgtttcctcctcgaggctctcgtcgagggcgactcgagaagtgaacacaggccgcatctccaggcttactgcaatcttatctccagctcaccacccgaggactcccccttcctgtcctttattgccgaggtcttccaatactacatattcgccgccgaactcatccccggcctcaatggccacgccgctcgtcgccttgagcctctcccgccgtttcccaccatggataaaccccggttgctcggcgtcgccgacggcctgctgaattacctgtcccagatcaccgagatccgcaacaccattcggagcaagatgatggcacaggtggacctagccgttgactaccaagtgctctatcaaggcagcgagatcgatggcgccattcgcgatttcacaacctattggccccccggagacagccgccagcaggtcaccctcctgtacaagcagatgctgtggatatacctcaaccggaccgtccatctgccatcttcgacgccgtcgtccatggcatcgtcctcgacatccctcttatcgaacaatagtcaaacttgccatggccggtatccggcctcggtggtcaatacgcctccgcaatccgcgtcaaccagttgcgcctcctctccccagctcaccgcctccggccatgagtcaaaccatagcgatggccgaccgaattcgcgcctgggcccgacgtctcgcccacagggcagcattgcagcagacagcggagtgaccgcagccgggcgcgacaaccgagcggaatcccctgccccaacccgacagccgccggacctcgatcctgacctcgcccaggccgtcgaagagtcactgaatctgttggagtggttcaagcctagtgacccttgtcagaccctccttctcctcccgtgcttcttggtcgggacggcctgcttcaggccctcacagcagcagcgcgtccgtgctgccatcagggccgtcaagggctacactgggctgcggaacgcagactgcgtgcttcagctcctcgaggaagtctggcggctcatggaggccggcgactgggtcgcggcgtgggactggcctggagtggccgagaatctaggactggacttcatccctgcatga

SEQ ID NO: 2545 - protein, 745 aa, Myceliophthora thermophilia
MNCLLSVGPGNGDLKWSDSHSIDSDDARSVAMPSPWLGSRSTGSSSVSASSSSLGFSHTGQLSPISNGVDLPCGAVHGSASLASPSQSPSVTATSRPASSSVQTPAWPPPGCVGPENPSPLPGPEERYDAQHRDAAASEGGDVAEVLVPKLEPMEDDDFCMNDFQEAPSPFATRALPGHPPQEEALEHSKQKRPRGRPRKHPFVPNVVTHNKITKVVCEGYPEKQIWKSGKERAEEERLRCRGFPSITMRPLFHCLETVEDRIFWKHYNEHLSAVLTVESEHKNAFKDMMIPIAVKHRGLMHSILSLASKHIDYETPYGLNILRNNPNTTLEALKQRSFYHHQQARFNMYRDIDAARKAPHTIDRVSTEARYGQMLCFLLEALVEGDSRSEHRPHLQAYCNLISSSPPEDSPFLSFIAEVFQYYIFAAELIPGLNGHAARRLEPLPPFPTMDKPRLLGVADGLLNYLSQITEIRNTIRSKMMAQVDLAVDYQVLYQGSEIDGAIRDFTTYWPPGDSRQQVTLLYKQMLWIYLNRTVHLPSSTPSSMASSSTSLLSNNSQTCHGRYPASVVNTPPQSASTSCASSPQLTASGHESNHSDGRPNSRLGPTSRPQGSIAADSGVTAAGRDNRAESPAPTRQPPDLDPDLAQAVEESLNLLEWFKPSDPCQTLLLLPCFLVGTACFRPSQQQRVRAAIRAVKGYTGLRNADCVLQLLEEVWRLMEAGDWVAAWDWPGVAENLGLDFIPA

SEQ ID NO: 2546 - DNA, 6624 bp, Myceliophthora thermophilia
atggcggacaaacaacccgagcccattgccatcgtgggcatggcctgtcgcttgccggggagcgtgtcacacccgggtgagttctaccgcatgttatgccggcagaagacaggatggtcaaagatccccccgggtcgcttcaatgcggaggcgtatcaccacccaaacccggacaagaagggctgcatcaactcggaaggggggtacttcatcaaggacgacatctcgatgtttgatgccgccttcttcgacattaccagaaaggaggccgagtcgatggatccggcccagcgactgttgttggagtgcgtatacgaagcgttggaaaacgccggaatcccaaaggaaacagtgtccggggaaaagattggggtatttgtcggtgccaactacagcgagcaccgggttggaaacctccgagatctggaccacattcccagcttcgatgccacgggcaaccaaggagccttcctcgccggccgggtggcttattacttcaaccttcacggcccaacgcttacggtcgacactgcatgctcgtcaagcatgcacgccctgcatcttgcagtgcaaagtatccgggccggcgagtcggaacaagccattgtcggagcttcacacttgataacccatccggacatctgggtgtctatgggaaagcttcgcctcttttccaattcaggacgaacgtacgcctttgataaccgggccaagtcgggatatgcgaggggggagggcgcaggatgtctggtgctgaagcctctggccagggcccaggctgataacgaccacgtcttttccgtcatcactcattcgggcgccagccacaacggccgcacgatcggcattgtcgccccgagcccggaggagcaagagaagctggtcaagagagttctcgccgaagcgagcatcgacccctgcgacgtcgggttcttcgaggcccacggaacgggtaccaagaagggggaccccatcgaagcgacaggcatctaccaagcggtcggccgttatttcactcccgagaatccgctatatatcggttccgtcaagcccaacattggtcacctcgaatgcgccagcggtgtcgtgtcggtcatcaagagcgttctgatgctgtactacggcttcatccttcccaacgcggatttcaagtggacgaacaaagcaatccccctcgatgaatggaacatgcgcgtggccacgcagcaaaaaccgtggccggccaagcggaagtacgtctgcgtcaacaactttggcttcagtggctcaaactcgatgtgcgtcttgcaggccgctcctcaaatcagggggctcgaggtcggagacaacagttcctacagcccgctcaggctctttgtcctctcggccaacgacgaaacggcgctgcaacactccatcagaaaactcggcatctggatcgagcagcatgccgagctctaccagaccaccatgccgcgaaacttggcatacaccctctgccagcgcaggtctcatctcccgtggagggtggcagtggtggcaaacatgtgtagcagcgtcgccagcgcgcttaacagccacgataccgtacccgcgcgcgccccgagcgagccaccccggctagcctttgtgtacaccggccaaggagcccagtggttcgccatgggccgcgagctgctcggcacacatcccgtgttctttgatgccgtcagtcgtgccgatgccgtcttgcgcgctctaggggccgacttctcggttctcgaggagcttcaccgcgacaagacgtcgtccagggttggcctggcacgtatcagtcagccgatctgcactgccgtccagttagcattgactgaattgtttgccgccttcggagtcaggcccgctgccgttaccggccactcaagcggcgagatagcagcagcgtatgcggcaggtgccctgacgttcgagtccgccatggctgccgcgtaccacagagggcacatcattgtggaactgaaggagaggtatcccaatctcaggggctctatgatggcagtcggcgctggcgcggatgaactaagtcccatgcttcaagaactgaatgaaggaggcgggccccaagtggttgtggcgtgcgagaactcgccgtcctcgaccaccttgtctggcgacgaggaagctatcgaccgtgtgggaaagctgtttcaggacaagggcgtcttcaaccggaaactgtttgtcgacgtagcctaccactccccacacatgcagctgatcgccgagtcttacctcgcccaagtcagccacatcgaagccccggtaggcgggacgtcctccggcgtcgagttcttctcctccctccatggccgcaagattagccttggtgaactgggaccccagtactgggtcgacaacctcacccggacagtccgattttccacagccatacagaagctgtgcaccgagtatcgcccagacatacttctggagatcggacctcacgcggccctcaagggacccattatgcaggcattgaagaggctgggttctgcagcgctcaagatatcgtacctgccttctttgattcgcggcgaggacgccgcgcgcacttgtctcgagacggccgggcaactttttgtccgcgggcatcccctaaacttcttcgagatcaaccacaaccgcgaggagaacgagaagccggaggtggtgcccgtgctgtacacgtacccctggtcacggcagaggtattggtacgagtcccggctgtcttggcagcaccgtctcaagccttttccacggaacgatttgcttggcgctcttgcggactggtcgagcgctctggacccgacatggcgcaacgtcatccgtaccgaggacttgccctggctgaaggagtatcaagtccagtcgcgtatggtttttccggtgtccggcttcatttctatggttgttgaagcagcggcccaaaccgcatgcctgaacgagacagacgctgccatgttcgagatcaagagccttagaatatccgaacatctctacctggctgacggccaagagtttgaacttcttctgaacttccgccccctcgatacaggcgacagaacgggtcacgcgtttcgaatctcttcgtacgaagctaatcgaaactggttggagcactgcacgggcatcgtgactgtgaagctcaactcatcgtctgccccagcgtcagtcggcgctgaaaatgggagagcactgagccgagcaggcaccaaaagtttctcaaccttccagaacggttctactgactctggatctgcccagcctagagcctcggacaaaggttcggatatcggaaatggattgttgaaaccatcgcagaaaaacagctcccagatggatatgtacaaacgccttgagtcacggagtctgtcgtttccggcgtcgtttaagtctttggtcggtactatcatgagaaagtcccgggtgagggcgcattgtgttgtccgaaacacgcgatcccacatgccgctggaacatgagactccatacacgattcatccggcagtcctggatgccatgctgcagataccgctgctctacccagacgcaaagagcgaggtgaagacgagcgatgcagcttgtctcccctcttccatccggcacatgatcatacgctctcattggacccataagtcgggggacagttttgaagtcagcgccgctccggagccaaagacggcatcgttcatggtggaactcttttctgccgccggcgctgccgctgctgtatccatgtctggactgaaattcaagccgttggaatgcaagcctcaggagccgccctcaccacgccagctgtgctacaaaacgacatgggagccactgaataagacgaccgaaattgatgaagtagcgagacggcacatcgcaggagctgataaagccattgtcatcgtcactgagcgaggacgcgacaccgaagaccctctcgtgaccctgttgatccgcaagctgaaggaatgtacaaccgtcccggtggtggcatgctcccttggtgcgatcgacgactggaacaattatttcattgtcttatgcgaactgaggacgccaatactatatcccatcgaccaagcccggttcgatcaggtcatagcactactcacggaggcaccagggctgatgtgggtgaccagaggggccacacgctttccaacatccccgagtgccagtctcgccctggggttgacccgcacggccagatcggaaaggaacgcggttgcttctactcttgacctgactgcattctccaggctccacatcacgcggcaggcggagctgattcgaaatgcattcggggtgtcggtattgtcagggggtgaggcggcagagatggaatttgctgaggaggctggggagctgatcgtcccgcggatcgtcccggacgcggagctcaacctcgatgtccatcggtcactgggccaatcggctccgtatcaccaggctatccaccagccggaacgccagtttcgcctttcccgccagatagatgcgtcttctggcgacgagctctactttgaagacgcagcggatgtaccattagaggataacgaggtcgagctgctcgtcgaggccagcgcgttaactcaggacgacatcacatccggcacggtgggcgacgagccgagtacgacgatccctcgcagctgtgcgggcaccattacgcgcgttggtcgggcagtcggcaacatccgagtcggggacagggtttgcgccctggccgagggcccgttcgggacgcacgcccgggcaagacggacgagcgtggccatcatccccgacacgatccgcagcaaaactgcggcctgcatcccaggacctctacttgccgcctactacgctctcgttaacacagcgaatgtcagacaaggcgagcgcgtcctcgttcagctgtcgggacctgcggggctcgcggccgtggcggtggctcggcaccttagagcaagcctgtatgccttaatcctggacgagcagcagggggcattggcgcggaagatcggattgccgccagagcgaatcctggacgcaagaagcatctattttcgccaggagctcgaggaagccacccagggccggggcatggaggtggtgctcgcattgtcagggcaggggacggccagcgcgtgggaatgcctggccaactttggtcgattcgtggaaatcaggaccccaggtgcccacgaaagaaccaggcctgaactcggaatcaacgcaaccttctcgtccgtcaacatgattaacatagcggcagaacggccggaggccatgagcatcctaggtgtggtcgttcataaggttgccaccggcgccatcaccccgcccacaacaataaccaaggcccccatctcgcagctccacaggggcatccggatggtgcgcgatggcgccgtcgagtcggtggtagcactgattggcgacggaacggagcaagtcagggctctgcatagagtatcgaggtccatctttcgaagcaacgggacacacctcatcatcggtgggacaggtggccttggtcggtcaatggcgagatacatggtggagcacggagcgcgtaacatagtgcttgtttcgaggagcggcggcggtggagatgcagttgatgaactgcaacggaagatgcagcgcagtggcgcgcgtctcgtggtaatgaagtgcgatgtcaccgacgagggtcaagtccggcaactcatcgaggcttgccaaagatctctgcctccgatctgtggtgtcatccacgcggccatggtgctccggctgacgaaagcctttcaggacgttctgctggagaacatgtcgcatgcggaatatcagcaggtcattcagccaaaggtgctcggggcaaccaacatccacacagctctgacggcgaccagggtcaagctagactattttgtgattctctcttcggcagcgggcattctcggcagccgcggacaaggcgcatatgccgctgccaacaccttcctcgactcgttcgcacagtatctggtggagaggggcgttcccgggacggcgctcgacctgacggcagttaccggcgccgggtacttggccaagaacgcggaacgccaggaagaaatcatccgcaattttggcaacgagtcagtgagcgaggacgaggtgctcgctcttctgtcggctgcggtccgtggcatgtgtggaccccaatgccttaccgggctcaaactgcacctcggccgcgatggccagtggccgtactatgccaacgacgctcgcttcgcccacctcaaggccgagagcttggcggctgccgagagagaaggcctcgtcccaaggcaggccgtgtctccgggggcggccttccgggctgccaattcagacaaggaggcaacgcacatcgcggcgcaaggagtcgccgagaagctatcggaagtgctgactatcgcggtggaggacctggatgtagccaggaacatcacgtcgtacggactcgactcgctgaccgccatcgagctgcggaattggatcgccaaggagttccggaccaacctgcagatccttgagttgttgtcgagcggaacgattaatgaccttgcgggactgatcgtgcagaaggcaagaacggcttgcgctgatgagaggccatgcaagagccctgtgtaa

SEQ ID NO: 2547 - protein, 2207 aa, Myceliophthora thermophilia
MADKQPEPIAIVGMACRLPGSVSHPGEFYRMLCRQKTGWSKIPPGRFNAEAYHHPNPDKKGCINSEGGYFIKDDISMFDAAFFDITRKEAESMDPAQRLLLECVYEALENAGIPKETVSGEKIGVFVGANYSEHRVGNLRDLDHIPSFDATGNQGAFLAGRVAYYFNLHGPTLTVDTACSSSMHALHLAVQSIRAGESEQAIVGASHLITHPDIWVSMGKLRLFSNSGRTYAFDNRAKSGYARGEGAGCLVLKPLARAQADNDHVFSVITHSGASHNGRTIGIVAPSPEEQEKLVKRVLAEASIDPCDVGFFEAHGTGTKKGDPIEATGIYQAVGRYFTPENPLYIGSVKPNIGHLECASGVVSVIKSVLMLYYGFILPNADFKWTNKAIPLDEWNMRVATQQKPWPAKRKYVCVNNFGFSGSNSMCVLQAAPQIRGLEVGDNSSYSPLRLFVLSANDETALQHSIRKLGIWIEQHAELYQTTMPRNLAYTLCQRRSHLPWRVAVVANMCSSVASALNSHDTVPARAPSEPPRLAFVYTGQGAQWFAMGRELLGTHPVFFDAVSRADAVLRALGADFSVLEELHRDKTSSRVGLARISQPICTAVQLALTELFAAFGVRPAAVTGHSSGEIAAAYAAGALTFESAMAAAYHRGHIIVELKERYPNLRGSMMAVGAGADELSPMLQELNEGGGPQVVVACENSPSSTTLSGDEEAIDRVGKLFQDKGVFNRKLFVDVAYHSPHMQLIAESYLAQVSHIEAPVGGTSSGVEFFSSLHGRKISLGELGPQYWVDNLTRTVRFSTAIQKLCTEYRPDILLEIGPHAALKGPIMQALKRLGSAALKISYLPSLIRGEDAARTCLETAGQLFVRGHPLNFFEINHNREENEKPEVVPVLYTYPWSRQRYWYESRLSWQHRLKPFPRNDLLGALADWSSALDPTWRNVIRTEDLPWLKEYQVQSRMVFPVSGFISMVVEAAAQTACLNETDAAMFEIKSLRISEHLYLADGQEFELLLNFRPLDTGDRTGHAFRISSYEANRNWLEHCTGIVTVKLNSSSAPASVGAENGRALSRAGTKSFSTFQNGSTDSGSAQPRASDKGSDIGNGLLKPSQKNSSQMDMYKRLESRSLSFPASFKSLVGTIMRKSRVRAHCVVRNTRSHMPLEHETPYTIHPAVLDAMLQIPLLYPDAKSEVKTSDAACLPSSIRHMIIRSHWTHKSGDSFEVSAAPEPKTASFMVELFSAAGAAAAVSMSGLKFKPLECKPQEPPSPRQLCYKTTWEPLNKTTEIDEVARRHIAGADKAIVIVTERGRDTEDPLVTLLIRKLKECTTVPVVACSLGAIDDWNNYFIVLCELRTPILYPIDQARFDQVIALLTEAPGLMWVTRGATRFPTSPSASLALGLTRTARSERNAVASTLDLTAFSRLHITRQAELIRNAFGVSVLSGGEAAEMEFAEEAGELIVPRIVPDAELNLDVHRSLGQSAPYHQAIHQPERQFRLSRQIDASSGDELYFEDAADVPLEDNEVELLVEASALTQDDITSGTVGDEPSTTIPRSCAGTITRVGRAVGNIRVGDRVCALAEGPFGTHARARRTSVAIIPDTIRSKTAACIPGPLLAAYYALVNTANVRQGERVLVQLSGPAGLAAVAVARHLRASLYALILDEQQGALARKIGLPPERILDARSIYFRQELEEATQGRGMEVVLALSGQGTASAWECLANFGRFVEIRTPGAHERTRPELGINATFSSVNMINIAAERPEAMSILGVVVHKVATGAITPPTTITKAPISQLHRGIRMVRDGAVESVVALIGDGTEQVRALHRVSRSIFRSNGTHLIIGGTGGLGRSMARYMVEHGARNIVLVSRSGGGGDAVDELQRKMQRSGARLVVMKCDVTDEGQVRQLIEACQRSLPPICGVIHAAMVLRLTKAFQDVLLENMSHAEYQQVIQPKVLGATNIHTALTATRVKLDYFVILSSAAGILGSRGQGAYAAANTFLDSFAQYLVERGVPGTALDLTAVTGAGYLAKNAERQEEIIRNFGNESVSEDEVLALLSAAVRGMCGPQCLTGLKLHLGRDGQWPYYANDARFAHLKAESLAAAEREGLVPRQAVSPGAAFRAANSDKEATHIAAQGVAEKLSEVLTIAVEDLDVARNITSYGLDSLTAIELRNWIAKEFRTNLQILELLSSGTINDLAGLIVQKARTACADERPCKSPV

SEQ ID NO: 2548 - DNA, 789 bp, Myceliophthora thermophilia
atggccgctgcaactgcaacaggagcagcctgctcgagtctcggcaatgactttgaactgttgaaccccttcacctgggaccaagctgcagccaacaccctgggcgaccacgtcgaccctgcctcaatcaccgccgcaaccgcaccgcccggggcagacgggcactcccacttctcgtcgcccgaactagacctcgacctcgcacactgtctcgacgccttttctacccctgtcttcgacttcttcattcctccttccacttctccgctgcccgctccgcccttgagctcggcaaccacatccctcggcagtaccccggcgaccaccaatctccaatctccttcgcccacgccgccgagcccggaagacggtggcaccgctctcattcctggtctcaagctgccgcgcgcaaaaacaaggaccttgtcaagtaaaccaggtcggcgaccggccgcagcctcgctcttgcagaccaccggcggcaggatcaccaagcacggcagccacggcgcacccgccgcctcctcgtcggtagctgcggcagtggcatcggcagcggcgccggaagacgtcgatcccgagattctcgacaggcgatatcgcaacaacctcgcggccaagcggtaccgtcaaaagaaaattgatcggatcgagcagctggaaaaggaggtgaccgatttgaaacaggagagggatgatctgaggattcggttggcccgccaggaggccgaggtagcggcgttgagggagatgttgaagatgaaaaacagcgaaaggtctaaggattaa

SEQ ID NO: 2549 - protein, 262 aa, Myceliophthora thermophilia
MAAATATGAACSSLGNDFELLNPFTWDQAAANTLGDHVDPASITAATAPPGADGHSHFSSPELDLDLAHCLDAFSTPVFDFFIPPSTSPLPAPPLSSATTSLGSTPATTNLQSPSPTPPSPEDGGTALIPGLKLPRAKTRTLSSKPGRRPAAASLLQTTGGRITKHGSHGAPAASSSVAAAVASAAAPEDVDPEILDRRYRNNLAAKRYRQKKIDRIEQLEKEVTDLKQERDDLRIRLARQEAEVAALREMLKMKNSERSKD

SEQ ID NO: 2550 - DNA, 1014 bp, Myceliophthora thermophilia
atggcttcggaagcgttccgaccacaatggggctggccatctggagtgaattcgcaggctaaccgcgaagcgacgactccggcagtcgatgaacaaacgcgccgcgctaccagctcgtcaacccccccatcgtccggtcccacgcccacgcagaggcagcgccatcgtcactacaagccgcgaacctgccgcatctgtctcgaggttgtctatcccacgacggtcattgacgactcgctcgcgggccgggtcttctcatccaaggcgcgcgtgcgctatgtatccgaggaccccgagctaggccgcctcatgagcccgtgcaaatgcaagggctcgcagaagtacgtccacgaggggtgtctgcgggcctggaggaacgcggcgcctctatccgacaggaactactggcggtgcccgacctgccagttcgagtaccgcctcgagcggctgcggtggggccgatggctgtccagcaaggtcctccgggtcaccctgaccgtggccatcttggtcttcaccgtcttcatcctcggattcattgccgatcccatcattggcttctgggaagatccgtttggcagcctcgtcgggggcctgctggacattgactttgattacgatgagcccgtcttgccggacgaagggcctgggagctggtccctccacttcttgaaggggttcctctccctcgggcttcttggcttcctcaagaccatgtattttatgtcaccgtggcactggttcaacatacggttcggtggataccgtcgacggagaggtgccggaagggacaggctagaacagatcaactggggccttgttctggttggcgtactgacgttcttgggggcaacgtggaagtttgtgaaccatctcatggccaagactcttgagaaggctagcgaccgtgtcgttgatgtccaggaagatgacccggacgatgatgaagcggacgatgttccaggtgccgccgcacccgagacagcaaccaacgagtcgaaaaaggataggtag

SEQ ID NO: 2551 - protein, 337 aa, Myceliophthora thermophilia
MASEAFRPQWGWPSGVNSQANREATTPAVDEQTRRATSSSTPPSSGPTPTQRQRHRHYKPRTCRICLEVVYPTTVIDDSLAGRVFSSKARVRYVSEDPELGRLMSPCKCKGSQKYVHEGCLRAWRNAAPLSDRNYWRCPTCQFEYRLERLRWGRWLSSKVLRVTLTVAILVFTVFILGFIADPIIGFWEDPFGSLVGGLLDIDFDYDEPVLPDEGPGSWSLHFLKGFLSLGLLGFLKTMYFMSPWHWFNIRFGGYRRRRGAGRDRLEQINWGLVLVGVLTFLGATWKFVNHLMAKTLEKASDRVVDVQEDDPDDDEADDVPGAAAPETATNESKKDR

SEQ ID NO: 2552 - DNA, 1923 bp, Myceliophthora thermophilia
atggctcccgccgtcggtattgatttgggcacgacctactcgtgcgtgggtgttttccgtgaggaccggtgcgaaatcatcgccaatgaccagggcaaccggacaactccgtccttcgtcgccttcacagacaccgagcgcctcatcggtgatgctgccaagaaccaggtcgccatgaaccctcacaacaccgtctttgacgccaagcgcctgattggtcgcaagttcaccgaccccgaggttcaggccgatatgaagcacttccccttcaaggtcattgagcgcaatggcaagcccgtcatcgaggtcgagttcaagggcgagaccaaggtcttcacccccgaggagatctcctccatggtcctgaccaagatgcgcgagactgccgagtcctacctcggtggcaccgtcaccaacgctgtcatcaccgtccccgcctacttcaacgacagccagaggcaggccaccaaggacgccggtctcattgccggcctcaacgtcctccgcatcatcaacgagcccactgctgccgccattgcctacggtctcgacaagaaggccgatggtgagcgcaacgtcctcatcttcgatcttggcggcggtaccttcgatgtctccctcctcaccatcgaggagggtatcttcgaggtcaagtccactgccggcgacacccacctgggtggtgaggacttcgacaaccgtctcgtgaatcatttcatagctgatctctccaccaacgcccgtgcgctgcggcgtctccgcaccgcttgcgagcgtgccaagcgcactctctcgtcgtctgcccagacctcgattgagatcgactctctctacgagggtatcgacttctacacgtccatcacccgtgctcgcttcgaggagctgtgccaggacctcttccgctcgactctccagcccgttgaccgtgtcctgacggatgccaagatcgacaagtctcaggtccacgagatcgtgctcgttggtggctcgactcgtatccctcgcatccagaagctgatcagcgactacttcaacggcaaggagcccaacaagtcgatcaaccctgatgaggctgttgcctacggtgccgccgttcaggccgccattctctctggcgacaccacgtccaagtcgaccaacgagattctcctgctcgatgtcgctccgctgtcgctcggtatcgagactgctggtggcatgatgaccaagcttatcccccgcaacaccaccatccccaccaagaagtccgaggtcttctcgaccttctccgacaaccagcccggtgtgctcatccaggtctatgagggcgagcgccagcgcaccaaggacaacaacctgctgggcaagttcgagcttactggcattccgcccgcccctcgtggtgttccccagatcgaggttaccttcgaccttgatgccaacggtatcatgaacgtctccgctctggagaagggcaccggcaagacgaacaagatcgtcattaccaacgacaagggccgcctgtcgaaggaggagatcgagcgcatgcttgccgaggccgagaagttcaaggcggaggatgaggccgaggctgcccgtgtctctgccaagaacgcccttgagtcgtacgcctactcgctgcgcaacactctcaacgactccaaggttgatgagaagctcgacgcgtctgagaaggagaagctcaagtccgagatcgacaagatcgtttcctggctcgacgacaaccagcaggccactcgcgaggagtatgaggagcaccagaaggagcttgagagcatcgccaatcccatcatgatgaagttctacggtgctggcgctggcggcatgcccggcggcatgcccggtgccgctcctggtggcttccccggcgctggtggtgctagcaacgacaacgacggccctaccgttgaggaggttgactaa

SEQ ID NO: 2553 - protein, 640 aa, Myceliophthora thermophilia
MAPAVGIDLGTTYSCVGVFREDRCEIIANDQGNRTTPSFVAFTDTERLIGDAAKNQVAMNPHNTVFDAKRLIGRKFTDPEVQADMKHFPFKVIERNGKPVIEVEFKGETKVFTPEEISSMVLTKMRETAESYLGGTVTNAVITVPAYFNDSQRQATKDAGLIAGLNVLRIINEPTAAAIAYGLDKKADGERNVLIFDLGGGTFDVSLLTIEEGIFEVKSTAGDTHLGGEDFDNRLVNHFIADLSTNARALRRLRTACERAKRTLSSSAQTSIEIDSLYEGIDFYTSITRARFEELCQDLFRSTLQPVDRVLTDAKIDKSQVHEIVLVGGSTRIPRIQKLISDYFNGKEPNKSINPDEAVAYGAAVQAAILSGDTTSKSTNEILLLDVAPLSLGIETAGGMMTKLIPRNTTIPTKKSEVFSTFSDNQPGVLIQVYEGERQRTKDNNLLGKFELTGIPPAPRGVPQIEVTFDLDANGIMNVSALEKGTGKTNKIVITNDKGRLSKEEIERMLAEAEKFKAEDEAEAARVSAKNALESYAYSLRNTLNDSKVDEKLDASEKEKLKSEIDKIVSWLDDNQQATREEYEEHQKELESIANPIMMKFYGAGAGGMPGGMPGAAPGGFPGAGGASNDNDGPTVEEVD

SEQ ID NO: 2554 - DNA, 1464 bp, Myceliophthora thermophilia
atgtcggacagcggggagaaggagattgcggctcaacaaattgagcagtcccgggtcgactcgacgaaagaggccgagtactcggacgccagcgtggccgactcggagctcgagtggaccgaggaggaggagcgggcgatccggcgcaagatcgatcggcacacggtgccgctggtgacggtgctatacatgctgtgcttcctcgaccgcatcaacatcggcaatgccagcatccagggcatgagggacgacctcgacctcgggggcgtgcgcctgaactgggccctctccatcttctatatcgtctacctcctcgtcgaggtgccgagcaacatgatcctcaagcgcttcggcccgcgcttctacctccccctcctcgtctgcggcttcggcttcatctcgctgtgcaccgccttcgtccgggacttcgccggcctcatggtcgcccgcgtcttcctcggcctcttcgagggcggcgcgttcccgggcctggccttcttcctcagctgcttctacaagcgcaacgagctgctcttccgcatgggcatctacgtctcggccgcctccatcgccggcgccttcggcggcctcctggccaccggcctctccaggatccccgagtgggggggctcgtcaccatccctggtcggcctggccgcgcccgtctggatgcccacgacgcccggcgaggcccggttcctgacggcgcgcgagcgccgcatcgccgccgagcggctcgtccgcgagcacaaggccaacccggtcggcaaggtgacctggcgggacatcaagcaggccgtcctgtgcgtccacaactacacctgcgccctcggcttcttcctcatcaacatcaccgtccagggcctctccgtcttcatgcccaccatcctgcaggacctcggctggaccgacaccaaggcccagctctactcggtgcctccctacgtcgccgcctgcctggtcgccatcgccatcgcctacgccagcgacaagacccgccagcgcggcgcctggctcgccgccttctcctgcatcgccctcaccggcttcgccatcctccgctgggtcgagaaccccaagctccgctacatggccctctactttgtcaccgtcggagctttccccggcggccctggcttcctggcctggggaatcaacaactcggctggcccgtcggtccgtgccgtgagctccggctacatcgtgaccttaggcaccatcggtggcatcgtggcgacatggacctacacgcgatccgacgctccccgatatcacaccgggcacaccatcaacctgtgtggtcagatcgccaccgtcgtcctcgccatctttggcatcctctactgcttgtacgaaaacagggcgagagccgctggaaagagggactaccgcctcgagggtttgacagaggaggagcaggaagcccttgggaacaaccatccgaactttcggtactggacctga

SEQ ID NO: 2555 - protein, 487 aa, Myceliophthora thermophilia
MSDSGEKEIAAQQIEQSRVDSTKEAEYSDASVADSELEWTEEEERAIRRKIDRHTVPLVTVLYMLCFLDRINIGNASIQGMRDDLDLGGVRLNWALSIFYIVYLLVEVPSNMILKRFGPRFYLPLLVCGFGFISLCTAFVRDFAGLMVARVFLGLFEGGAFPGLAFFLSCFYKRNELLFRMGIYVSAASIAGAFGGLLATGLSRIPEWGGSSPSLVGLAAPVWMPTTPGEARFLTARERRIAAERLVREHKANPVGKVTWRDIKQAVLCVHNYTCALGFFLINITVQGLSVFMPTILQDLGWTDTKAQLYSVPPYVAACLVAIAIAYASDKTRQRGAWLAAFSCIALTGFAILRWVENPKLRYMALYFVTVGAFPGGPGFLAWGINNSAGPSVRAVSSGYIVTLGTIGGIVATWTYTRSDAPRYHTGHTINLCGQIATVVLAIFGILYCLYENRARAAGKRDYRLEGLTEEEQEALGNNHPNFRYWT

SEQ ID NO: 2556 - DNA, 513 bp, Myceliophthora thermophilia
atggggaactggtgcgctttctaccaaccgcaggagtccaaacggatgaggcccgccaacggtcgagacccagaggcagagagaaccatcggaagggcaatcaaggggcaggacgcttcggtaccgagcgggcaatggagcaagcgacgaggtgggaggggcggcatccgattcgtaaagcgggcaaccctccgagagcagcgaaacccgtccgcggaagccaggaatggcagcgaagcaaaggaaaggcccggcggccgccgcgtccagtacgtccaggtagcacgacgccagaccagcctcggtcgggcacgaggcaccgcagccgcggtctcaaaaagtgtcaacatagcccaaacaaccatcgtggccgccgagcagctgcccgatcggatgggcctggatgatgcacgtcatgctctgcgagctcgaaacgaacatcaaatccaatccgatccactcgggacgcaaggcatggagcatgctgcattcctgacgtgcaaggtcgcgtag

SEQ ID NO: 2557 - protein, 170 aa, Myceliophthora thermophilia
MGNWCAFYQPQESKRMRPANGRDPEAERTIGRAIKGQDASVPSGQWSKRRGGRGGIRFVKRATLREQRNPSAEARNGSEAKERPGGRRVQYVQVARRQTSLGRARGTAAAVSKSVNIAQTTIVAAEQLPDRMGLDDARHALRARNEHQIQSDPLGTQGMEHAAFLTCKVA

SEQ ID NO: 2558 - DNA, 405 bp, Myceliophthora thermophilia
atgcgtctggggacggaagcacgaagcgaagtttccatgtttgtcggaggcattgccgaaagcacctgggggccgtgtgttggtcgagatcccaaagagagcttgttcgaggtcgatcggtggaggccagttttcaagggattcgcccgcgctcagcatcggactttgtcgacgagagcggcatatggcagcagcggcctgaacgaagtgggctacgccaagccagtcccgttgtacgtgatgttgcaccgagaatttacagagaacttacctaagttctgcaaacttaggaaggagcaatgctctcgaaacatggagactactatgccagtgttcctgatcacgcccgcgccaggcaacagcgccaaagaaagtgagatcgtccgacatggaaatcgggactga

SEQ ID NO: 2559 - protein, 134 aa, Myceliophthora thermophilia
MRLGTEARSEVSMFVGGIAESTWGPCVGRDPKESLFEVDRWRPVFKGFARAQHRTLSTRAAYGSSGLNEVGYAKPVPLYVMLHREFTENLPKFCKLRKEQCSRNMETTMPVFLITPAPGNSAKESEIVRHGNRD

SEQ ID NO: 2560 - DNA, 960 bp, Myceliophthora thermophilia
atggcgtccgaacagccctcgaacccgatcaagaagattcgactggtgcgcatcgcccatgtctggtacgagcacgcggacatcgagaaggttaaacagttcgccctggactttggctttgtagagacggcccaaatcggcaagacgacattcttccgcggctatggcaccgagccattcgccctcgccctcgtggcatcggacaagaacgagtttggtggtgccgcattcgtcgtcgagtccgaggaggacctggtgcatgcgtccaagacgctacccaaggaatgcagggcgaccgaggtgcacgagatgaaggacgtgcccggcggcggaaagcgggtcaccttctacgatcccgtcgacgggttcccgttccatctcgtctacggccagacgccagtggcactggaggacccagggttcccagcgctcaagttcaactatcccattgagaagaatcgcggccccaaccagttccagcgcttcaagaaacgtccggcgccggtacacaagctgggccactttggcatgtgcgtgaccgactttgccaagtgctacgagttctataacacctacttcaacttccacccgagtgagctcgtctacaatgaacaaggcgtgaacaagacggtcttcttccgactcgaccgcggcgacgagctcgtcgaccaccactgctttttcttcttcgagggccccaagatgcacgtccaccactcgtcgttcgagacgcacgattttgacgcccaggttttgggccacgactggctgcgttcccagggctacaagaactgctggggtgttgggcgccacgtcatgggcagccagatctttgactactggttcgacccagcggggttcatcatggagcactacgttgatggcgacctgctggacatgagggagccgactcactacaccaaggccgcacccgacaatctgcacgtctggggtaattaa

SEQ ID NO: 2561 - protein, 319 aa, Myceliophthora thermophilia
MASEQPSNPIKKIRLVRIAHVWYEHADIEKVKQFALDFGFVETAQIGKTTFFRGYGTEPFALALVASDKNEFGGAAFVVESEEDLVHASKTLPKECRATEVHEMKDVPGGGKRVTFYDPVDGFPFHLVYGQTPVALEDPGFPALKFNYPIEKNRGPNQFQRFKKRPAPVHKLGHFGMCVTDFAKCYEFYNTYFNFHPSELVYNEQGVNKTVFFRLDRGDELVDHHCFFFFEGPKMHVHHSSFETHDFDAQVLGHDWLRSQGYKNCWGVGRHVMGSQIFDYWFDPAGFIMEHYVDGDLLDMREPTHYTKAAPDNLHVWGN

SEQ ID NO: 2562 - DNA, 2580 bp, Myceliophthora thermophilia
atgggcgccagcgaaaaagaccaatttcgcattgtgattgtcgggggcggcgtggccgggctcacgctggccaacgcgctcgagcaagccggcgtcgactacgtcctgctggaacgccgcggcgaggtggccccccaggtcggcgcctcgattggcgtgttccccaatggagcgcggattctggaccagctcggagcatggaaggcgatcgaggagctctcggcgcctctgaaaacctattacaaccgcaacaagcgaggagacctcatcactaaaccagattatgtcggctctctcatgctgaaagcaaaaacgggatacacggttgcatggggcgagcgacagaacctgctgcgcgtcctacatgagaacctaaaggacccaagccgagtcctcgtcaacaagactctcgtagacatcaagcacgaatccgacggtgtcactgctatctgcgaggatggctcctccttctcgggccaccttctcgtcggtgccgatggttgttttagcaagacgcgcagcaagatgtggcagctggccgagtcggaccatcccgatcttgttcaggccgacagagactgcccccttttctttaaaaattcttttgttattgttgttatgattgttgttgttctttccgcctgcttgctgcgcagctgttcaaccactcacctcctcccgtcccaaggcctgatctcggaatacaactgcatgttcggcatctcctatggcatcaccaagctccagcccggggatttcatcacgtgctacaaccccggccgctgtgggttggccatcgtggccgagggaggcaaggtgttctggttcgtccaagagcggctgccacggacgtatcgcctgcacgagattccgcggtacacggacgacgacgcacgagactttattgcccgtcactcggaccttatcttcctcaagggaccggacggcctgacccttgccgacttctgggagaagacatcgtccttccgcctggttcccatcgaggaggccaagttcaagctctggcattggggccgcatcgtctgcgtcggtgacagcatccacaagtcgacccccaacctcggcgtcggcgccaatgcggccatcgaaagtgccgccgctctcgccaacggcatcaagcggctagccgaccagtggcgcgccacagacggcagcctcccaaatattcgggacatcgaggccatgctggccgagtaccacagagcacgcgtcgtgcgcgccgatgccggcgtcgattcctcgggcttcctggcccggtcgcacaacatgcacggcttggggcgccgcctattcgtccgctttgtgatgccccacacgaccgagttcgtccccgagctgatgggcaacgccatgattggcgccgtcaagctcgactatctcccgctccccatggcctctctgactggcaccaagcccttcaatccgtcgcagggcgacggcaagcaggagagcaagctcaagcgcgccctcttcgcctcgccgctgctcgccctcgccttcgtcgccgcctgggtcatggacccgaattccgcgggcccgtgggctgctgccctccgcgacagcggcgtctttgagctgccctcgggagacttcgtgcccatcctccgctcgttctaccgcctgcccgcctttgacgactttgtcgccctggtcaacacctttttcttcccctctgtctacggcactgatcccgtctcccgccgccaggtgctctccttcctgaccgacggaaccgtcctcctgactatctggatttttgagtctgcccggcgcgccaatcttctgacgcccatacaatggccacatatgtacgccaccctaggtcagctgctgggcatcggtgtcgtctctcccgcctactgcttcctgcactacgtgctgtcgccgatcgagaaattttcggccctcgatcagcgcctgaccaacacgcgcaccagcttcgccgccctgcccgtcgtgctgctcacctacctgctgcccttctactccatgctggcttggcccgacctccttacccgccaagtcctgctctacctctggcagctctacccgctatgggcggccgccgccctcttcgccggctcgcgcctcttccttcgggacaccatggcaaccgacaagctgtctcgcccgctgagggacctgcccgtcatgaggttgtacgtcggcgcggccgccgcgctgtcggcggttgtgtggtggcacacccggctcggggcgggcgggctcgttcacgtcttcgtgcccgccggcctgccgcggagcgagcacaacctgacccgcttcaccgccgagttcctcaagtgggacgaggtcttcggtttcggctcgcacctgctctggctggcttacctgttctgggacctccgcagcgccggcatgctgagggaagggtggctccgcgtcgtcggcctcggcctgctcagcctggtcctcttcgggcccggggccaccctcggtctgggctggctcttccgcgagcatattctggccaccaggcgacacaagaatgccctgactcccgagagcgtcggaaggctgcacggaagcgccttttaa

SEQ ID NO: 2563 - protein, 859 aa, Myceliophthora thermophilia
MGASEKDQFRIVIVGGGVAGLTLANALEQAGVDYVLLERRGEVAPQVGASIGVFPNGARILDQLGAWKAIEELSAPLKTYYNRNKRGDLITKPDYVGSLMLKAKTGYTVAWGERQNLLRVLHENLKDPSRVLVNKTLVDIKHESDGVTAICEDGSSFSGHLLVGADGCFSKTRSKMWQLAESDHPDLVQADRDCPLFFKNSFVIVVMIVVVLSACLLRSCSTTHLLPSQGLISEYNCMFGISYGITKLQPGDFITCYNPGRCGLAIVAEGGKVFWFVQERLPRTYRLHEIPRYTDDDARDFIARHSDLIFLKGPDGLTLADFWEKTSSFRLVPIEEAKFKLWHWGRIVCVGDSIHKSTPNLGVGANAAIESAAALANGIKRLADQWRATDGSLPNIRDIEAMLAEYHRARVVRADAGVDSSGFLARSHNMHGLGRRLFVRFVMPHTTEFVPELMGNAMIGAVKLDYLPLPMASLTGTKPFNPSQGDGKQESKLKRALFASPLLALAFVAAWVMDPNSAGPWAAALRDSGVFELPSGDFVPILRSFYRLPAFDDFVALVNTFFFPSVYGTDPVSRRQVLSFLTDGTVLLTIWIFESARRANLLTPIQWPHMYATLGQLLGIGVVSPAYCFLHYVLSPIEKFSALDQRLTNTRTSFAALPVVLLTYLLPFYSMLAWPDLLTRQVLLYLWQLYPLWAAAALFAGSRLFLRDTMATDKLSRPLRDLPVMRLYVGAAAALSAVVWWHTRLGAGGLVHVFVPAGLPRSEHNLTRFTAEFLKWDEVFGFGSHLLWLAYLFWDLRSAGMLREGWLRVVGLGLLSLVLFGPGATLGLGWLFREHILATRRHKNALTPESVGRLHGSAF

SEQ ID NO: 2564 - DNA, 369 bp, Myceliophthora thermophilia
atggggcagaaacaatccgtggcacagtccactttcttctgccccacgaccggcactgagattgacgaccctctgggcctctgcgcgcgctgccaggccaaccacgacatcatctggcagtccgtctttgtgtgccccaacaccgggtaccggatcgagcagccgccgtcgcggcccgaccgcgagtgcccctcgtgcttccagatgcaccagccctacagcaaacgcgtctatatctgccccgtcacgggcgccaccatcccccacccgcgcgacacgggcggccggtgccagaagtgcaaccgtacccacgaggacaactcgacccccgtgagcagcaaggaggccgtcagcgaaaggagtcgatga

SEQ ID NO: 2565 - protein, 122 aa, Myceliophthora thermophilia
MGQKQSVAQSTFFCPTTGTEIDDPLGLCARCQANHDIIWQSVFVCPNTGYRIEQPPSRPDRECPSCFQMHQPYSKRVYICPVTGATIPHPRDTGGRCQKCNRTHEDNSTPVSSKEAVSERSR

SEQ ID NO: 2566 - DNA, 1575 bp, Myceliophthora thermophilia
atgggcgtgatcaaccacaatgcggacgctccgcgtcccgagaccctcgtaactgccaccctcgccttcctcgagaaacactggcccgtcctcctcgtcggcggcctggtgatccgcgccctgtacaagcgctacgcctcaccgctgcgtaagtatccgggccccttcctggcctccttcagccgactgtggaaggtgttgtcgacggcgtccgggcacacacacctggaccacatcgcgctgcaccggcggtacggcccggtggtgcggatcgcgccgggcgaggtgtcggtctcgtccccggaggcggcgcggactctgctgagcgccggtcgccgcttcttcaagacgcccttctacggcgtcttcccgccgcccgagaacccggacatcttcaccgagacgcgcgaggacgtgcacgccaccaagaagcgcgtcgccaatgtgccctacagcatggccgccatgcagcagctgagccccttcatcgacgacaccgtcgagctgctggtgcgcaagattgacgagttcatcgacaagaacccccgcggcgtcttcaacctcggtgactacctccactacttcgccttcgacgtgctcggcgaggtcgccttcagtaggagcttcggcttcctcgagcaagggaaggacgtggatggggccatcaagaccatcgacaactcgcagtggtacaatggggtcgtcggccaggtgcccgagctggaccacttcctgcggcggaacccgctgtggcagttcgtgccctggctgagcaccaagaatgccctcatcacccgaatggcccttgaggagatggcgaggcgccagccgttcgacaaagacaacggaggccttttgagaaccggcgatggccgccaggacctgatggccagtctcatccaggggcacctcaaggatcccgagaagtttggtgaaggagatgtctttgccgtcgcccacggtgcgatcttcgccggctccgactcgacggcctccaccatgcagtcttttttctggcacatcctcgatgccaaaccggtgtatcagggtatcgtacgcgagctcgaggaggccgtcaaggagggagtcatccccgccgagggcaacctcacctggaaccaggcgcagaagctgccctacctgcaggcctgtcttaaggaggccatgcgcgtccgtccggctgtcgggctcaacatcactcggctcgtgccgcccgagggcgccgagctggacggccacttcttcccgggcggtacgaccgttgcctgcaacggctgggtgttgcaccgggataaggagatcttcgggcaggatgcggacgacttccggcccgagcggtggctggaagacgaggagagggcaaagaagatggagcggtacatgttccagtttggcggcgggagtcacttgtgcatcggccgcaacctggcgctcctcgagatcaacaaggtcgtgccgaggctgctgcgcgacttccggatcgaattggcgcacccgggccggcccctcaaggtccacgcgtccttcttcgtggtccagtccggcctggaggtatacattagcaggaaagcatga

SEQ ID NO: 2567 - protein, 524 aa, Myceliophthora thermophilia
MGVINHNADAPRPETLVTATLAFLEKHWPVLLVGGLVIRALYKRYASPLRKYPGPFLASFSRLWKVLSTASGHTHLDHIALHRRYGPVVRIAPGEVSVSSPEAARTLLSAGRRFFKTPFYGVFPPPENPDIFTETREDVHATKKRVANVPYSMAAMQQLSPFIDDTVELLVRKIDEFIDKNPRGVFNLGDYLHYFAFDVLGEVAFSRSFGFLEQGKDVDGAIKTIDNSQWYNGVVGQVPELDHFLRRNPLWQFVPWLSTKNALITRMALEEMARRQPFDKDNGGLLRTGDGRQDLMASLIQGHLKDPEKFGEGDVFAVAHGAIFAGSDSTASTMQSFFWHILDAKPVYQGIVRELEEAVKEGVIPAEGNLTWNQAQKLPYLQACLKEAMRVRPAVGLNITRLVPPEGAELDGHFFPGGTTVACNGWVLHRDKEIFGQDADDFRPERWLEDEERAKKMERYMFQFGGGSHLCIGRNLALLEINKVVPRLLRDFRIELAHPGRPLKVHASFFVVQSGLEVYISRKA

SEQ ID NO: 2568 - DNA, 222 bp, Myceliophthora thermophilia
atgggcccgattggtcagctgcagccgctcaagctgtactcgcacaagcggggatcgaatccatggaaggttgcattgactcttgaggaactcgacatatcgtatgtctctgagtatctcgagttcgaccaaaccaagaccgagccctccttgtcgctcaacccgaatgggaagctccctacacttaggatcccaaccgtgaagtggttgtttttgagctga

SEQ ID NO: 2569 - protein, 73 aa, Myceliophthora thermophilia
MGPIGQLQPLKLYSHKRGSNPWKVALTLEELDISYVSEYLEFDQTKTEPSLSLNPNGKLPTLRIPTVKWLFLS

SEQ ID NO: 2570 - DNA, 639 bp, Myceliophthora thermophilia
atgatcgacaacgacgtcctggccctgaacaagtacgactcccacccggagctgcggaagctgaagccgtggagtccggccatgttcacggcgtcgtccttctccatcctcaactaccctaccgacattttcgacctcgtgcgcgacggcaccatccgggtgcacatcgccgacctgacgggcctgtcggcgaggacagtgcacctatccgacggcacacagcttgacgccgacgcactctgctgtgtcaccggctggaagcacatgccacccgtcgagtttctccccgagggcggcctggttctggtcgaccgccgaggcgttcctcgaggacgaccggcccgcggggacgacgccgagcgcaccgcttcctcatctggcgactcctcctcctcctccgaagcgggagaggaccgaggccgcgccgagccaatcaccacttccgtcgtcgccgcggccgacgacaacgatccggcgtatgtcgccatcgctgccggtgttgaggcgatgggccttaaccaagatgatgacgacgactccgggcgtgtcggctcggagatggaggtggatgggtcggctcaccgcttcaagcgtgtcgagatgtgggcgagggggtgtgtgggggaggtggtgctctag

SEQ ID NO: 2571 - protein, 212 aa, Myceliophthora thermophilia
MIDNDVLALNKYDSHPELRKLKPWSPAMFTASSFSILNYPTDIFDLVRDGTIRVHIADLTGLSARTVHLSDGTQLDADALCCVTGWKHMPPVEFLPEGGLVLVDRRGVPRGRPARGDDAERTASSSGDSSSSSEAGEDRGRAEPITTSVVAAADDNDPAYVAIAAGVEAMGLNQDDDDDSGRVGSEMEVDGSAHRFKRVEMWARGCVGEVVL

SEQ ID NO: 2572 - DNA, 654 bp, Myceliophthora thermophilia
atggcggttggtctcatcaagaagtccgtgtcgacgagcgaacctgtggcgttcgcctgccgcggcactgtcgacaccaaccggtttgacgacctcgtactggcattgaaggaggccttgggacccagctcgggcctcacttcggacgatgtcgatgtcggccacctcacccgattgatgcgggagtatgactcggatccgagagaatggtccaagttcgccatgggcgatgagagccgtggatacacgaggaacttggtcgacgaaggaaacggcaagagcaacctgctcgtcctcgtctggactcctggcaaggggagcccaatccacgaccacggaaatgcgcattgtctgatgaagattttgcgtggaaatctgacggaaaccagatatgaattccccaagggggatgaagagaagccgatgcgcgtcatctcagaacgggttcataaggagaatgaggtggcatacatggcagacgagctgggcgtgcaccgggttacgaaccagggcagcgacttcgctgtctccctgcacttgtacaccccgccaaacgttgccagaggggggtgccatatcttcgatcccgagacaggcaagaagagccatatcaagaactgcgggtactactccacatatgggaagaagtcgtga

SEQ ID NO: 2573 - protein, 217 aa, Myceliophthora thermophilia
MAVGLIKKSVSTSEPVAFACRGTVDTNRFDDLVLALKEALGPSSGLTSDDVDVGHLTRLMREYDSDPREWSKFAMGDESRGYTRNLVDEGNGKSNLLVLVWTPGKGSPIHDHGNAHCLMKILRGNLTETRYEFPKGDEEKPMRVISERVHKENEVAYMADELGVHRVTNQGSDFAVSLHLYTPPNVARGGCHIFDPETGKKSHIKNCGYYSTYGKKS

SEQ ID NO: 2574 - DNA, 1428 bp, Myceliophthora thermophilia
atggatgcctttgtaacgagaaagaagcgcaaacccgaccatgtcccgactgttgggccatctgtggacaaggatgagcccgaggagtcgacagatgtgaaactggccatcctatcctcgcttcacccgactgttgaccaggagacgctgcttgacatcctgctcgcccacgacggcgacgtcgaggcgacatcgcagaccatcaaggctcgactgccaaggaaaccgggcccagggtctatggtggttgcgcagtcttccctgcgatcctttgccgtcagcacggccggtgtcgacccttctccgtcgccaaagcgggccaaggtgctctcccgaaagggggccacgctccatctgtacgaccccgtcgacattagcgagcacacgccctgcactgtcatccacaacttcttgcctgccgaggaggcgaactccctgctcaaggagctgctggaggagtccaaaacgtttgagaagagtaccttcaagctgtttgataatgtcgtctcgagcccccacaccacgggcttctacgtcggcagctacaaggagctccagcagcagaagcacgagtacgtgtacaatggttccaggatgacggatgtccgaactctgacgccgcagcttgagcgcgtcaaggcccgcgtgcaagaggcggtcaaccgcgagatccaggagcgcatccgcactcgctacggcggcaagaagctcaagtatcagtcccccgggccatggacgcccaacgcagcgttcgtgaactgctacaacgggccaatggagaatgtcggctggcacagcgaccaactgacctacctcggcccgcgcccggtcatcggctccctctcgctgggcgtgacgcgcgagttccgcgttcgccgcatcctgccccaggacgacgcaggcacgagcgccgaggcgagggaccagagtaataacaataacaacaataacgataacagcaacagcaacagcaacgccgacttgacgggccagatcgccatccacctcccgcacaactccctcctggtgatgcacgccgagatgcaggaggaatggaagcacagcatcgccccagcccaggccatcgacccgcacccgatcgcgggcagccggcgcatcaacgtgacgtaccgccactaccgcgccgccttccacccgcgcaacaccccgcggtgcccgtgtgggatccccgccgtgctgcgggtcgcgaccaagaagcgggagaaccggggccggtatttctggatgtgtcacgccggtaacgtgccgggcaaagaggcgtgcgacttctttcggtgggcagagtttgacgaagacgggaatccgccgggtgtgggccgggatgggccgacggaggaagcagtagaccgggaaggaactggatcaggggaggaggatgaacctggaaaaccggacgagggagggtga

SEQ ID NO: 2575 - protein, 475 aa, Myceliophthora thermophilia
MDAFVTRKKRKPDHVPTVGPSVDKDEPEESTDVKLAILSSLHPTVDQETLLDILLAHDGDVEATSQTIKARLPRKPGPGSMVVAQSSLRSFAVSTAGVDPSPSPKRAKVLSRKGATLHLYDPVDISEHTPCTVIHNFLPAEEANSLLKELLEESKTFEKSTFKLFDNVVSSPHTTGFYVGSYKELQQQKHEYVYNGSRMTDVRTLTPQLERVKARVQEAVNREIQERIRTRYGGKKLKYQSPGPWTPNAAFVNCYNGPMENVGWHSDQLTYLGPRPVIGSLSLGVTREFRVRRILPQDDAGTSAEARDQSNNNNNNNDNSNSNSNADLTGQIAIHLPHNSLLVMHAEMQEEWKHSIAPAQAIDPHPIAGSRRINVTYRHYRAAFHPRNTPRCPCGIPAVLRVATKKRENRGRYFWMCHAGNVPGKEACDFFRWAEFDEDGNPPGVGRDGPTEEAVDREGTGSGEEDEPGKPDEGG

SEQ ID NO: 2576 - DNA, 1563 bp, Myceliophthora thermophilia
atggcggacgcggccgattcgcaggccgcccgcgagcggcgcgagaagcaccacgaggccgacgtcgtcgtcgtgggtgcgggcgtcttcgggtgcgcgatagcctacgccctcgccaatcaagggcgcagcgtcatcctgctcgagcggtggatgcacgagccggaccgcatcgtcggtgagctgctgcagcccggcggcgtggccgccctgcgggagctggggctagggcactgtctcgagggcatcgatgccgtgccttgctacggataccacattgtgtaccgcggggacgaggtggcgttccggtatccgtctctggagaaagacggtgaggtgattgtggaccccgcgggcaacagggaaaagtacaagcaggggctggccgcgtttgccgacggacatgccaacgggcaagccaacgggcatgcgaaggacgccggccggccggagggcaggagtttccaccacggcaggttcatcatgcagctgcgccgggcctgcctggatcacccgaacatcagcgtcttcgagacggaagtcacggcgaccatcaagggcgaccactcggacgcggtcctgggggtgcagacccgaaccaaggataaggcgacgggcaagaaggatcccgactgcttcttcggccacctgaccgtcatcgcggacggctacgcctccatcttccgcaaggagctcctcggcacgacgcccgtggtgcgcagcaagttctacgccctcgagctgatcgactgcccctcccgccggccaacacggccacacgtcgtcatcggcgatcagtgcctcgccctcctctaccagatcggcacgcacgagacgcgcgccctgatcgacgtgcccaacgaccacccggccgcggcgccctcggccggcggcgcgcgcggctacatcgagaacatcgtgctgcccgcgctcccgccgcacgtgcagccgagcgtgcgcgccgccctggccgacggccgcatcccccggagcatgcccaactcgtggctgccgtcgaccaagcagacgcggcacgacggcgtcatcgtcgtcggcgacgcccacaacatgcggcacccgctgacgggcggcggcatgacggtcgccttcaacgacgccctcgtcctcgcctcgctgctctccccggcccggatcccctccctgtcggaccacgcggccgtgcgcgcggccatggcctccttccactggcgccgcaagcgcctcacgagcatgatcaacgtgctcgcccaggcgctctacagcctcttcgccgccgacgactggcagctgcgcgccctccagcgcggctgcttcgcctacttcaagcgcggctggaccgacgagcccgtcgccatgctcggcggcgtcctccgccgccccaccaccctcgcctaccacttcttcagcgtcgccttcctcgccatctggttgcacctcctcgacctctgcggccgctcccccctcggcatcctcatgctgcccctcgccctcgtgcaggccgtgctgatcctctggaaggcctgcgtcgtcttcttgcccgtcatggcggccgagttgcgctga

SEQ ID NO: 2577 - protein, 520 aa, Myceliophthora thermophilia
MADAADSQAARERREKHHEADVVVVGAGVFGCAIAYALANQGRSVILLERWMHEPDRIVGELLQPGGVAALRELGLGHCLEGIDAVPCYGYHIVYRGDEVAFRYPSLEKDGEVIVDPAGNREKYKQGLAAFADGHANGQANGHAKDAGRPEGRSFHHGRFIMQLRRACLDHPNISVFETEVTATIKGDHSDAVLGVQTRTKDKATGKKDPDCFFGHLTVIADGYASIFRKELLGTTPVVRSKFYALELIDCPSRRPTRPHVVIGDQCLALLYQIGTHETRALIDVPNDHPAAAPSAGGARGYIENIVLPALPPHVQPSVRAALADGRIPRSMPNSWLPSTKQTRHDGVIVVGDAHNMRHPLTGGGMTVAFNDALVLASLLSPARIPSLSDHAAVRAAMASFHWRRKRLTSMINVLAQALYSLFAADDWQLRALQRGCFAYFKRGWTDEPVAMLGGVLRRPTTLAYHFFSVAFLAIWLHLLDLCGRSPLGILMLPLALVQAVLILWKACVVFLPVMAAELR

SEQ ID NO: 2578 - DNA, 1851 bp, Myceliophthora thermophilia
atgttcgaaagccttgttgcttctctgggattggggccttccaatttcaccaatctttcggtcccgcagttcaacatcttcacttttacctcgcggatccccgggccagctcccccgtccgccgtttcccttttcttcctccccaccctccaccagctcctgggtgtgtcgctgtgccacgcatcacaacacctccagcacctcagctacatccccgcctcactgcgctcgctcctcagggaccccaacgcgcaaatggctgccaacgcgacaagctcgcccctggcgagcatcaagtacggtgccgccaacgtggcgccccagctcgaatatgttatcgactatgtctccaaggcgagcacgtggagcattctcgcgactatcctcgcgactcttgtcgtctacgatcagctcgtctacatctggaacaaggggccgattgccggtccggctttcaagatacctttcatcgggcccttcctccagtccgtgaaccccaagttcgaggagtactacgccaagtgggtgagcggtcctctcagctgcgtctcggtcttccacaagttcgtggtgatcgcgtcgacccgtgatatggcccggaaggtcttcaactcgcccgcctatgtcaagccctgcgtcgtcgatgtcgcccacaagctgctcggtgccgacaactgggtgttcctcgacggcaaggcccacgttgagttccgcaagggattgaacggcctcttcacccgccgcgccctcgagatctatctgccgggccaggaggaggtttataaccggtacttcaaggagttcgtcgagatcaccaagcaggccggtggcaagcccgtccccttcatgacgcacttccgcgaggtcatcacggccgtctcgtgccgcacgtttgtcggccactacatctcggacgacgcggtcaagaagatcgccgacgactactacctgatcactgccgcgctcgaactggtcaacttccccatcatcatcccctacaccaagacgtggtacggaaagaaggcggccgacatggtgttggccgagttcgcccggtgcgctgcgaagagcaaggcccggatggctgctggcggcgagcccaactgcattatggacgcctgggttctccagatgatccagtccaagaggtggcgcgaggcggaggagaagggtagcactgaggggcttgagaagccggcccacttgctccgcgacttcaccgactacgagatctctcagacggtcttcacgttcctctttgcctcgcaggacgcgacgagcagcgctgccacctggctcttccagaccatggcccagcgccccgatgtcctggatcgtgtgcgcgaagagaacctgaaggtccgcaacggggacatccacgcccccgtcaacatggaccagctcgaatccatggcgtacactcgtgccgtcgttcgcgagctgctgcgttaccgcccgcccgttcttatggtcccctatgtcgtcaagaagccgttccccatcaccgacacgtacaccgctcccaagggatcgatggtcgttcccacgacgtatatggctttgcgtgaccccgaggtgtacgataggcctgacgagttcgatccggagcgctactacaccggcgacgccgaggtcaagggcgccaagaactacctcgttttcggtaccggtcctcactactgccttggacagcactacgctcagctcaatctcgctctcatgatcggaaaggcgtcgctcctgctcgactggaagcaccacccgacccccaagtcagaggagatcaaggtgtttgcgaccatcttcccaatggatgactgccccctgacgtttgaggagaggaagtggtag

SEQ ID NO: 2579 - protein, 616 aa, Myceliophthora thermophilia
MFESLVASLGLGPSNFTNLSVPQFNIFTFTSRIPGPAPPSAVSLFFLPTLHQLLGVSLCHASQHLQHLSYIPASLRSLLRDPNAQMAANATSSPLASIKYGAANVAPQLEYVIDYVSKASTWSILATILATLVVYDQLVYIWNKGPIAGPAFKIPFIGPFLQSVNPKFEEYYAKWVSGPLSCVSVFHKFVVIASTRDMARKVFNSPAYVKPCVVDVAHKLLGADNWVFLDGKAHVEFRKGLNGLFTRRALEIYLPGQEEVYNRYFKEFVEITKQAGGKPVPFMTHFREVITAVSCRTFVGHYISDDAVKKIADDYYLITAALELVNFPIIIPYTKTWYGKKAADMVLAEFARCAAKSKARMAAGGEPNCIMDAWVLQMIQSKRWREAEEKGSTEGLEKPAHLLRDFTDYEISQTVFTFLFASQDATSSAATWLFQTMAQRPDVLDRVREENLKVRNGDIHAPVNMDQLESMAYTRAVVRELLRYRPPVLMVPYVVKKPFPITDTYTAPKGSMVVPTTYMALRDPEVYDRPDEFDPERYYTGDAEVKGAKNYLVFGTGPHYCLGQHYAQLNLALMIGKASLLLDWKHHPTPKSEEIKVFATIFPMDDCPLTFEERKW

SEQ ID NO: 2580 - DNA, 360 bp, Myceliophthora thermophilia
atgatccctgtctggccccgaaatgaagttcgctggccgttgcgaatgccgaccccacttcaccgagggctacaaaatattggggagaaggctggccctgctgcgtctctggcgtcgcctgggagcctgcaggagctcggcttttcatcaggcttggcagaatggggagagtcatgcgacagattgccgatgcacaaccggcagatccctcgagacgcagagcacggttaccagacgacgctccaggttagcggcggtcaatttacaccacggagcggagaacgtcagcagtctacaccgccgcctctgaagaaacttgccaactcaaccacgcttactgtgtacatacctacacagtag

SEQ ID NO: 2581 - protein, 119 aa, Myceliophthora thermophilia
MIPVWPRNEVRWPLRMPTPLHRGLQNIGEKAGPAASLASPGSLQELGFSSGLAEWGESCDRLPMHNRQIPRDAEHGYQTTLQVSGGQFTPRSGERQQSTPPPLKKLANSTTLTVYIPTQ

SEQ ID NO: 2582 - DNA, 690 bp, Myceliophthora thermophilia
atgcccgccacgcaggccccccctaccagcgaggacgagcacggaacgagacccctccccgtatcgcgcgcggttgacatcctgccagacccgcgctctgcactccctcgctacgccgcctacttccgcgcccgccaccgtttctgggaggccttcccggaggggcaatacgtgcgcctgcccacgccgggtaccgacctcgagtgcggcttccacgcgctcatcctgtccatgcggcatcagctgggcgcacgctgcgcctccggccccggctccgatcccggcggcgaggcggggtcggcggtgcgggtccccaccctggaggagctgcgggccgtctttcgcggggcggtcgtgcagggggagaacgcgggggcggggatggcgaacctgagctggttcacggccgaccagctggcggccgtctttgccgagtgggggcggcggttcctgggcggcgggcagaggtgtcagatggggtgggtgaccgaccgggacgaggagctgggcctggaggggtggccggtcatgatgaacactccggacgtggagaccggggaggtcggggaggggatcgtgagggtctgggtttggaacgacggcggctcgttacggggcgggatcggccactttgagggcatcaggcggccgacgcagagggagctggcggtgatgggagatgggcagtag

SEQ ID NO: 2583 - protein, 229 aa, Myceliophthora thermophilia
MPATQAPPTSEDEHGTRPLPVSRAVDILPDPRSALPRYAAYFRARHRFWEAFPEGQYVRLPTPGTDLECGFHALILSMRHQLGARCASGPGSDPGGEAGSAVRVPTLEELRAVFRGAVVQGENAGAGMANLSWFTADQLAAVFAEWGRRFLGGGQRCQMGWVTDRDEELGLEGWPVMMNTPDVETGEVGEGIVRVWVWNDGGSLRGGIGHFEGIRRPTQRELAVMGDGQ

SEQ ID NO: 2584 - DNA, 1080 bp, Myceliophthora thermophilia
atggctccgtcggcaatcgataccgagacccctacggtgaccaaaggtccggctcgtgagcctctcaagctctcgggggcacttgaagcgtacgaatactttgatgtcactcccgtcattggtcgagagttccctacggccaaactggacgaatggctgaatgcccccaactccgacgagcttttgagagatctggccatcactatctcccagcgtggcgtcgtattcttccgtgcccaggatggcctgaccaacgagacgcagaagaatctcatcctgagactcggtgagctgaccggacggcctgccacctcggggctccatattcatcccatcctcaactccgagcgtgaactgggaggtgatgacctcgagatcagcaccatcagctcgatccagaataagaagttttattccaaggttgccccagagacgctcagcgcgaaaaagcagaacagtggtcaatggcatagcgatattgcattcgaacctgtgccagctgattacacgtccctccgcttgattgagcttcccaccactggtggagacaccctctgggcatcgggatacgaaatctacgaccgcatcagcgagccgtaccagaagttcctcgagggtcttacggccaccttcgagcagcctggattccagaaggtggccgaggcgtctggtttcaagctttacgacaagccacgaggcgcccctgagaacgtcggcaccgagcttaaggcagttcaccccgtcgtgcgtaccaatcccgtcaccggctggaagagcattttccccgtgggtggccatgtcaaacacatcaacggcttgacccaggaggagagctcgaggctcctcgaatggtttctagacctgatctacaaaaaccacgacctgcaggtccggtttaagtggaaaaaccccaacgacatcgccatctgggacaaccggtccgtgttccataccgctacctttgactatttggacgggaaccatggtgaacgctttggaaaccgagcggtcggcctaggcgaacggccgtacctagaccctaatagcacttcgaggagggctacgctcagcaagacctaa

SEQ ID NO: 2585 - protein, 359 aa, Myceliophthora thermophilia
MAPSAIDTETPTVTKGPAREPLKLSGALEAYEYFDVTPVIGREFPTAKLDEWLNAPNSDELLRDLAITISQRGVVFFRAQDGLTNETQKNLILRLGELTGRPATSGLHIHPILNSERELGGDDLEISTISSIQNKKFYSKVAPETLSAKKQNSGQWHSDIAFEPVPADYTSLRLIELPTTGGDTLWASGYEIYDRISEPYQKFLEGLTATFEQPGFQKVAEASGFKLYDKPRGAPENVGTELKAVHPVVRTNPVTGWKSIFPVGGHVKHINGLTQEESSRLLEWFLDLIYKNHDLQVRFKWKNPNDIAIWDNRSVFHTATFDYLDGNHGERFGNRAVGLGERPYLDPNSTSRRATLSKT

SEQ ID NO: 2586 - DNA, 1563 bp, Myceliophthora thermophilia
atgtcaccccactgcacgaacgagatggagcacccggcgctcagcaacggcgctgaagataccgatgcggtcccgaggctggtgaatggcgccgccaacggctcttcagcgcgagagttccccaaaagcccctatctccggcccgcagatcccgacgcggtcctcgatttggtctgcgtcggcttcgggcccgccagcgtggctattgcagtcgcactccacgactccatggaagccggcaagataacgcaggcgccgaaagtgctgttccttgagaagcaacctgagtttgcctggcacgccggcatgctgctcccgggcgccaagatgcagatttccttcatcaaggacctcgcgtcgctgcgggacccacgatccaacttcaccttcctcaactacctacacaagagcaaccggctcctcgactttattaacctcaacacatttcttcccgcgcgtgccgagtatgaggattatctccggtggtgcgctcggcattttgacgacgttgtccgctatcagaccgaggtcctctcgatctcgcctgtcgagaaggagggccctcacaggacctttgccgtgacatctcgcaacctcaagactggcgccacaaccacttccctggcgcgcaatgttgtcgtcgccgtcggcggccagccgtccatccccaagctctttccggcgcaccacccccgcgtcatacactcgtcgcagtacgcccagctggtccccaagatcttgcccgacaagacggcgccctaccgcgtagccgttatcggagccggccagagtgcggccgagatcttcagcaacatccagagcctgtacccgaacagcaacgccttcatggtcatgaggtccgagtttctgaagccgagtgacgattcaccattcgtgaactgcatcttcaaccccgaattcgtcgacactatttatcccaagtcctccgcctaccgcgccaaccttcttgctgaggcacggaccacgaattacggagtggttcggctggagctcatcgagcacctgtttgagatcatgtaccaccagaagcggacgcttgggcccgacgagaagaagtggccgttccggctgctccctggccgcgaggttgtggccgtggaggagaagggtgacgcgctccgcctgagagtcgcgatgctgtcggctcccagcacggacgacgggcctctcgcgggcgcggagaccctggacgtcgatctgatcatctgcgccaccggctacaagcgcaccgcccacgtagagatgctcaaagacacatggcatcttctgccagaggctccgagcccgtgcggcgaggccgacgtgcctatcaatgaccgctggctggtgcagactggcgaggcccagggctcgtccaccagggtgatgcaagttggtcgtgattacggggtccgcttctcccccggagccgttgcccctggttccggtatctggttgcaaggttgctgcgaggcaacgcatggtttgagtgatacccttctttccgttctctctacgcgctctggcgagatggtccagtccattttcggggcttcggcgtga

SEQ ID NO: 2587 - protein, 520 aa, Myceliophthora thermophilia
MSPHCTNEMEHPALSNGAEDTDAVPRLVNGAANGSSAREFPKSPYLRPADPDAVLDLVCVGFGPASVAIAVALHDSMEAGKITQAPKVLFLEKQPEFAWHAGMLLPGAKMQISFIKDLASLRDPRSNFTFLNYLHKSNRLLDFINLNTFLPARAEYEDYLRWCARHFDDVVRYQTEVLSISPVEKEGPHRTFAVTSRNLKTGATTTSLARNVVVAVGGQPSIPKLFPAHHPRVIHSSQYAQLVPKILPDKTAPYRVAVIGAGQSAAEIFSNIQSLYPNSNAFMVMRSEFLKPSDDSPFVNCIFNPEFVDTIYPKSSAYRANLLAEARTTNYGVVRLELIEHLFEIMYHQKRTLGPDEKKWPFRLLPGREVVAVEEKGDALRLRVAMLSAPSTDDGPLAGAETLDVDLIICATGYKRTAHVEMLKDTWHLLPEAPSPCGEADVPINDRWLVQTGEAQGSSTRVMQVGRDYGVRFSPGAVAPGSGIWLQGCCEATHGLSDTLLSVLSTRSGEMVQSIFGASA

SEQ ID NO: 2588 - DNA, 609 bp, Myceliophthora thermophilia
atgtctgacgcaacgatggaccagcacggaattgaaattaccgcaccccaggacattcttcaatcccggtattggcgcgttgttgacatcgtggagaggctgaagcttacctcgcaccaccctttttaccttcaatgcgctcagtacgtggccaccgaaataagattattttggttttggagcttgacggctgagccaattgcaaaattgctgccgccaatcggattaaccgtgtgtggaagtcggttgaaggcgggcagggagtcagcagtcttgatgttgcagcagaacgtatgcgaacctgaggaagaagaaggcatatgggggctgggtgcaagtgtccgaaggacttacttcattgttcctgagaaggacgagggcgtcgaatatcccggtgggggagtggcattgctacgagatggtggtattgttcaactcgccaagagaagtgaatcatccttattcacgatgagcttgactctgagcgagcgagtagaagatatgaggaaatcaccgaggtatcggatggagtctagaactccccaatatatgacactatataaagatgcacttagagttcccaacgttcctggcctcatcaacatctag

SEQ ID NO: 2589 - protein, 202 aa, Myceliophthora thermophilia
MSDATMDQHGIEITAPQDILQSRYWRVVDIVERLKLTSHHPFYLQCAQYVATEIRLFWFWSLTAEPIAKLLPPIGLTVCGSRLKAGRESAVLMLQQNVCEPEEEEGIWGLGASVRRTYFIVPEKDEGVEYPGGGVALLRDGGIVQLAKRSESSLFTMSLTLSERVEDMRKSPRYRMESRTPQYMTLYKDALRVPNVPGLINI

SEQ ID NO: 2590 - DNA, 366 bp, Myceliophthora thermophilia
atggccacgaaggacacgactagtacaaaggagcagtattatgctgcgctagcgtctaacaatgtctctcccctctggaccgtacttagtaagatggttccgccacgcgtaaacccgacagcacaggttacttcatggccgtacgaatccatttgttcgctgctaatggattcggggacactgataacggcggaggaagccgagcgtcaagtcttgatgcttcttacaggattcaggcactcggaggccagacttggccgacccacccccagggatgacggaccagggttcaagatgtatttagagagcttctatcagtgcctccggcacttgagaataatcaaccatcatcatcaccacttctga

SEQ ID NO: 2591 - protein, 121 aa, Myceliophthora thermophilia
MATKDTTSTKEQYYAALASNNVSPLWTVLSKMVPPRVNPTAQVTSWPYESICSLLMDSGTLITAEEAERQVLMLLTGFRHSEARLGRPTPRDDGPGFKMYLESFYQCLRHLRIINHHHHHF

SEQ ID NO: 2592 - DNA, 1587 bp, Myceliophthora thermophilia
atgggtctcatccaagatctgggaggcccgctggccgaggggttctcgcgcctcgggctggcgtcgcaaatcggtgtcgcggttggggggttcgtgctcctgtccgtcatcctcaatgtgctcaaccaggtgctcttcaagaatcccaatgagccgcccgtcgtcttccactggttccccttcatcggcagcaccatcacctacggcatggacccgccgcgcttcttcaaagagaacagggcgaagtacggtgattgcttcaccttcatcctgctcggcaagaagacgaccgtctacgtcggccccaagggcaatgacttcatcctgaacggcaagatccgcgacgtctgcgccgaggagatctacacggtgctcacgacgcccgtttttggcaaggacgttgtctatgactgcccgaactcgaagctcatggagcaaaagaagttcatgaagatcgccctgacgacggaggcattccgctcctacgtgcctatcatctcggatgaggtcaagagctacttcaagaggtctcccgatttcaagggccagtcgggtatcgtcaacatctctgcccagatggcccagatcaccatcttcaccgcctcccacgcgctgcagggcaaggagatccgcgataagttcgacgagacgctggccgacctctaccacgacctcgacatgggtttcacgcccatcaacttcatgctgcactgggccccgctcccgtggaacaagcggcgcgaccacgcccagaggacagtggccaagatctacatggacacgatcaaggctcgccgtgagcgcggcgagacgggggcgcaggatatcatgtaccacctgatgaactcgacgtacaagaacggcgtccgggtgccggaccacgagattgctcacatgatgattgcgctcctgatggccggccagcactcgtcgtcgtcgaccagctcgtggatcatgctccgcctggcttcccgcccggacataatggaggaactctaccaggagcaaatcaagaacctcggcccggacctgccgccgctgacgtacgaggatctggccaagctgccgctcaaccaggccatcgtcaaggagacgctccgcctgcacgcgccgatccactccatcatgcgggccgtcaagcagccgatgccggtgccgggcaccaagtacgtcatccccaacaaccacgtcctcctggccgcgccgggcgtctcggcctcggacgagcagtacttcccgcagccggacctctgggagccgcaccggtgggagaaggaccacccgctggcgcccagcatggtgcgcaacccggacgaggaggaggaggagaaggtcgactacggctacggcctggtcagcaagggtgcagcctcgccgtacctgcccttcggcgccggccgccaccgctgcatcggcgagaactttgccaatctgcaactgcagaccatcatcgccgagacggtgcgcatgttcaagttccgcaacgtggacgggagcgacaaggtcattggcaccgactacgcctcgctcttctcgcggccgctggagccggccaacatctactgggagaagagggacaagcagtag

SEQ ID NO: 2593 - protein, 528 aa, Myceliophthora thermophilia
MGLIQDLGGPLAEGFSRLGLASQIGVAVGGFVLLSVILNVLNQVLFKNPNEPPVVFHWFPFIGSTITYGMDPPRFFKENRAKYGDCFTFILLGKKTTVYVGPKGNDFILNGKIRDVCAEEIYTVLTTPVFGKDVVYDCPNSKLMEQKKFMKIALTTEAFRSYVPIISDEVKSYFKRSPDFKGQSGIVNISAQMAQITIFTASHALQGKEIRDKFDETLADLYHDLDMGFTPINFMLHWAPLPWNKRRDHAQRTVAKIYMDTIKARRERGETGAQDIMYHLMNSTYKNGVRVPDHEIAHMMIALLMAGQHSSSSTSSWIMLRLASRPDIMEELYQEQIKNLGPDLPPLTYEDLAKLPLNQAIVKETLRLHAPIHSIMRAVKQPMPVPGTKYVIPNNHVLLAAPGVSASDEQYFPQPDLWEPHRWEKDHPLAPSMVRNPDEEEEEKVDYGYGLVSKGAASPYLPFGAGRHRCIGENFANLQLQTIIAETVRMFKFRNVDGSDKVIGTDYASLFSRPLEPANIYWEKRDKQ

SEQ ID NO: 2594 - DNA, 1932 bp, Myceliophthora thermophilia
atggcaccctcggcagtcctcgacaaaccttccgacgaccacgatcagatgagcgaggaccggatcgagacggacgagtgtgtcgaccctctgaccctgctccggagcatgcccgaggcgcccctggaatgccaggtatgcgtcgtcggggccggtccggccggcctgatgctggcatgcaacctcgcccgggccgacggtctacagcccaagtccatcgagacctttcggcagatgcgcctagcggacccccttcttcagcgcggcgtccgggtctacgacatcgccttttggcgcagcaccgccgacgagcctctccatcggctcggccgcgagatccactacccgcccgtcatcgacgtcctggatccctacctcttgctggtgcaccagggcatggtcgagagcttgttcatcgaagacctcaagaagcgtggcgtcgaggtgcgcaggaatacggcctttgactcgtacagcgtctgcgagaacaaggccggccccctccaggtcaactgccggaccaacgtgacccaggagcgcaggtcgctcctcacgcaatacctcgtcggctgtgggtatcgcccctgggacatcggtgacggcgcccactccaaggtcagaaagagcattcccgaggccaagccggttggcctgtcgcagcccatggtctggggcgtgctcgacggcgagctcgtgaccgacttccccgacatctggtccaagacgctggtgtactcacaggagcacggctccatcctgatcattcctcgcgagcgcaacatgactcgcttctacatcgaactcaagacctctcctagggcggacaagagccaattcggccaggagttcgtcatgcagcgcgcaaaggagatcatggccccgttcgaggttggctggaagtacattgagtggttcggtcgctatcagataggccagcgggtcgcgagccgtttctgcgacagccatcgtcgcgcctttctcgccggagacgccagccacacgcactcgcccaagtcggcccagggcatgaacacgtcgatgcacgatgcctggaacctctgctggaaactcaacctcgccgtccggggccttgcgaagccggcgttgctcgagagctacgagcaggaacggcgaaagattgccttggatctcgtcaacttcgattacgaacacgcaaaccagatcgccggaggggacgcggtggcgcttgcggagaactttaggaccaacgtgcgcttcatctcgggcatcggggccgagtacggcgagaacgccatcaacatgcccgcctcccagtcctgggtcatgggcgaggccaagccgggctgcctgctgccgccggccaaggtgacacgttaccttgactccaacccggtcgatatccagctcgacatccccatgctgggccagttccgtgtctacctgttcatgtgggatgtccaccaatcccgcatcttcctagaaaccttctgccaggctatcgcgtcaagcaagtccctcataagccagctctccgccgcagcaagcatctcgtatgccaagcaacctcgtgcccccgccccggaggacatctacctccgtccggagcgctacacggccgtcagccacctcttcacattcgctctgatcactaccatgcccaaagccgacatcgaaatcaccgacctcccgcctctccttcaagacagccgctggacgttttacctggacaatgtccccgagctggacacgcgcggctcgctgtgcaccaacaagtggctcggcagtctcggcccgggcgaggtggccatcgtgaatgtgcgccccgacggctatgtcggctccatcggccgctgggactcgagtatcgacgaatccggagaggaggcggcccagtggatggatgactactactcgaggtttctgcaggtacctgcctcggtgcaggtctaa

SEQ ID NO: 2595 - protein, 643 aa, Myceliophthora thermophilia
MAPSAVLDKPSDDHDQMSEDRIETDECVDPLTLLRSMPEAPLECQVCVVGAGPAGLMLACNLARADGLQPKSIETFRQMRLADPLLQRGVRVYDIAFWRSTADEPLHRLGREIHYPPVIDVLDPYLLLVHQGMVESLFIEDLKKRGVEVRRNTAFDSYSVCENKAGPLQVNCRTNVTQERRSLLTQYLVGCGYRPWDIGDGAHSKVRKSIPEAKPVGLSQPMVWGVLDGELVTDFPDIWSKTLVYSQEHGSILIIPRERNMTRFYIELKTSPRADKSQFGQEFVMQRAKEIMAPFEVGWKYIEWFGRYQIGQRVASRFCDSHRRAFLAGDASHTHSPKSAQGMNTSMHDAWNLCWKLNLAVRGLAKPALLESYEQERRKIALDLVNFDYEHANQIAGGDAVALAENFRTNVRFISGIGAEYGENAINMPASQSWVMGEAKPGCLLPPAKVTRYLDSNPVDIQLDIPMLGQFRVYLFMWDVHQSRIFLETFCQAIASSKSLISQLSAAASISYAKQPRAPAPEDIYLRPERYTAVSHLFTFALITTMPKADIEITDLPPLLQDSRWTFYLDNVPELDTRGSLCTNKWLGSLGPGEVAIVNVRPDGYVGSIGRWDSSIDESGEEAAQWMDDYYSRFLQVPASVQV

SEQ ID NO: 2596 - DNA, 2703 bp, Myceliophthora thermophilia
atggagcttccaagcgcattagccacgcgtttgccacagctgtatgaggctgttcaacgcagtggccagtcccttttcgcagtcgcgccgtttgcagtcgttacgacggtctgggaacgtgaacaggtcgcggccggcaaaacatcgggcgagcggcgagccggtgtgctgagtcagcaaccgcatcccaagattttgcttacagtgtacggattactgtcggacgatttctgtttccagatctgggctgctttccgggtggaactcgattttgccgagtctccatcttccgttccgtcttgcaccattccggcctctgttttcaagctgctggccgtccctcgccggccccgctttgccgcccgacccggggtccggattccgaatagtcacaatcggtccgtcctcttccccatccggacacgccacacatccgccgccatgtccaagagggtgtgtatcgtcggtgcggggcctgccggtctcgtggccgccaagtcactgctccatgacgcgcctcgaggcaccttcgacgttactttgttcgactcccagacccggattggtggtctctggccctcgcacaaggacgacagtaccggccttcttcatcccctcacgattacgaaccagagcaaacacaccgtccagttcagcgaccttgcctggccggaggacgccccacagctgccccgggcatggcaggtcggtaggtatctcgctgagtacctgcagagatactgctccggggctgagctgaggcttggaacccacgtggaaaaagcggaacccttcgcagcgtctaccaccagcggctcaccgtcgggctggcgcgtgcagacgcgttccgccgagggaaaagtgcgggaagagacctttgactacctcttggtcgcttcgggcttctttggcaagccaacagttccgccggtgagcaatcgcggtcacgatgtcccgatcatccacagcagtcagtaccgcgatctgcagagcctcgttgggaaaacgagcgggtcgggaggcaaaatcctcgtcgttggcggccagatgtctggcgtcgaaatcgcgggcacaatcgcatcgcatctctcgtccgccacccattccccggaacctagcccgatcgccaaccctgaaaagtacaccgtacaccatatcatccagcagcccgtgtgggtgttcccgctccacacctctccgaatccaacggcgcctgcgcctccgttcctacctctcgacctggggtcttacaatctctccaacagggtccagccattgaccaactcgcaggggcacatctcaccggaagctgccaagattgtccattccatctatcagacgactctcgggaccgaccagtcgatcttttcgcccgatcttgccgtcacaacagcgcataccggtaacccgccataccttgccgttagcgagaactaccttgactttgtccgttccggcctcatcgcgctgtctcggggaaagctggcggctctttccgccgacggggcgacattaacaccctcgaacgagcagatcggcgacgttgccgcggtggtgtatgcgacgggcttcgaggcgtcgccctcgatctcgttccttccagcatccgtgaaggaggcgttgtccctgagcccgtccgacctgaacaacacggtcgcgctggcatttcacggcacctaccaccccgacgtcccaaacctcggcttcgtcggcttctaccgctcgccgtactggggcatcatggagatgcaagcccgtttcctcaccgccctgtgggcagccggcgggccatcctcgccctctctgcccccgtcgatcaaggaggccctgagcaacgacaggtcgatcgagcggacgctcggcctccgcaccgatcccagggcgtcccagttcccgatgggcgactacgcctggctcatgcaggagttcgccgccgcgctcgggctcgagcgctcgccgcacctggggcccatgcctcggctgccgcccgcggacaaggagatggacatcctgacgcccgcgcggtacccgtccggatcgcttaccgagtcccagcgggccgaggtcgccaggtctctggcgcacaccgaggcgaccgcctgggcgggcgtgcgctcgggcaggttcgtcgccagggccgtcttccgctccctcctcggcgagtggaacctcgagcgggacctggtcagcaagctgcccggccacccgagcgggcacttcagcgggaccgccaagttcctcctccgcgacggcacgagggacgggcgcgaggccgagttcgacgccctcggagaggacggcgacccggggcaggagtatctctacgtcgaggagggcgagtttgcggcgtccaacggcctgacgttccgcgccacgcggcggtacgtctggcgctacgacgagaagagggacaagctgagcgtgtggttcgtccggacggacgaccagaagcgggccgactacctcttccacgagctcgatttcgtcttgcccagcgggggggtggggggcggggaggacaggaataacgggaataacgggaagggctgggaagcaaaggccgggcacctgtgcgtcgacgacttctacgacgtcaagtaccagttcaacttcaaggccgtcaacttgtgggattggcggctggcatacacggtcaccggccccaagaaggattacacgattgatggactgtacagccgctag

SEQ ID NO: 2597 - protein, 900 aa, Myceliophthora thermophilia
MELPSALATRLPQLYEAVQRSGQSLFAVAPFAVVTTVWEREQVAAGKTSGERRAGVLSQQPHPKILLTVYGLLSDDFCFQIWAAFRVELDFAESPSSVPSCTIPASVFKLLAVPRRPRFAARPGVRIPNSHNRSVLFPIRTRHTSAAMSKRVCIVGAGPAGLVAAKSLLHDAPRGTFDVTLFDSQTRIGGLWPSHKDDSTGLLHPLTITNQSKHTVQFSDLAWPEDAPQLPRAWQVGRYLAEYLQRYCSGAELRLGTHVEKAEPFAASTTSGSPSGWRVQTRSAEGKVREETFDYLLVASGFFGKPTVPPVSNRGHDVPIIHSSQYRDLQSLVGKTSGSGGKILVVGGQMSGVEIAGTIASHLSSATHSPEPSPIANPEKYTVHHIIQQPVWVFPLHTSPNPTAPAPPFLPLDLGSYNLSNRVQPLTNSQGHISPEAAKIVHSIYQTTLGTDQSIFSPDLAVTTAHTGNPPYLAVSENYLDFVRSGLIALSRGKLAALSADGATLTPSNEQIGDVAAVVYATGFEASPSISFLPASVKEALSLSPSDLNNTVALAFHGTYHPDVPNLGFVGFYRSPYWGIMEMQARFLTALWAAGGPSSPSLPPSIKEALSNDRSIERTLGLRTDPRASQFPMGDYAWLMQEFAAALGLERSPHLGPMPRLPPADKEMDILTPARYPSGSLTESQRAEVARSLAHTEATAWAGVRSGRFVARAVFRSLLGEWNLERDLVSKLPGHPSGHFSGTAKFLLRDGTRDGREAEFDALGEDGDPGQEYLYVEEGEFAASNGLTFRATRRYVWRYDEKRDKLSVWFVRTDDQKRADYLFHELDFVLPSGGVGGGEDRNNGNNGKGWEAKAGHLCVDDFYDVKYQFNFKAVNLWDWRLAYTVTGPKKDYTIDGLYSR

SEQ ID NO: 2598 - DNA, 1404 bp, Myceliophthora thermophilia
atggaagaaaacggtgggattaggcagtcagtcaacggcgcagccggtgcgtcaaactcggtggcaaacggatccggccgcaggctcacagatgatgagttcgaaaggtactctcgccagatgattgttcctggcatggggaaggaggggcaactccgattaattaattcccgagtactgatcatcggagccggcggcctgggctgccccgccgctcagtatattgccggcgcgggggtcgggaccattggaatcatagacggcgatgtcgtcgaggcttccaatcttcaccgtcaggtcggccattcgacctctaggatcggcatgaagaaggttgacagcttaatcgcgcacctcaaagcgctcaaccccttgcctacttatgtcccctatccctttcgactcacccctcaaaatgccgcagacattatatcgaagtacgacctcatcttggactgtaccgacaatccggtaaccaggtacctgatctcagacgtttgcgtcctcgtctgcaagcccctcgtcacggccgcagcaatccaaaagtcgggccagctcaccgtgctaaactgtccgccaacaccccaaggcttggtcgacggcaagtatgctccttgttaccgatgctgctttcgaaaaccgccaccaccgagctctatggtctcatgcggcgaggcgggaatcatgggccctgtggttggcatgatgggggtggcacaggccggcgaagccatcaagatcctcgcgtccgcgctgcacattccggccgaggccgggggaggagacagcagcaatactgagaggaaccttcaacagccgacgctcctcatctacacctacgacctcgagagcgcagtgggcccgtacaccttccgcgccctcaagatgggcggccgcaagaggaactgctttgcctgcggcgagaactcgaccctgacgctggagggcatcaaggccgggaccccggactacgtacagttctgcagcgctcccgcgccggccgtgagcctcccgccggaagaacgcatcacggccgcggcgtaccatgccgcaagggagaagggcgaactgcccgagcacatactcatcgacacgcgcgagaaggagcacttttcatttggcagcatcgaaggcgcaatcaacgtgccgttcgggaaattcctcatgaaggcggcggcgatcaagcgagacggcgggccggctagtgagattctgcctgctgacgcagcaaccagtgacaagcccatcttcgtggtgtgccggacgggggcggattcacaggagacggtagagaagctcaaggagcttgggctggatcgagggggtaagaggaggatcgttgacattgttgggggtatgaaggcttggaagcaggaggtcgatcctacgtttccgtatatatga

SEQ ID NO: 2599 - protein, 467 aa, Myceliophthora thermophilia
MEENGGIRQSVNGAAGASNSVANGSGRRLTDDEFERYSRQMIVPGMGKEGQLRLINSRVLIIGAGGLGCPAAQYIAGAGVGTIGIIDGDVVEASNLHRQVGHSTSRIGMKKVDSLIAHLKALNPLPTYVPYPFRLTPQNAADIISKYDLILDCTDNPVTRYLISDVCVLVCKPLVTAAAIQKSGQLTVLNCPPTPQGLVDGKYAPCYRCCFRKPPPPSSMVSCGEAGIMGPVVGMMGVAQAGEAIKILASALHIPAEAGGGDSSNTERNLQQPTLLIYTYDLESAVGPYTFRALKMGGRKRNCFACGENSTLTLEGIKAGTPDYVQFCSAPAPAVSLPPEERITAAAYHAAREKGELPEHILIDTREKEHFSFGSIEGAINVPFGKFLMKAAAIKRDGGPASEILPADAATSDKPIFVVCRTGADSQETVEKLKELGLDRGGKRRIVDIVGGMKAWKQEVDPTFPYI

SEQ ID NO: 2600 - DNA, 1473 bp, Myceliophthora thermophilia
atggacgcggtgattaggaggcgaggcgcctatgtgtgccgcagctgcacccagaccctccagaggcggttgcggcgggcgtactcgagcacggcggcgcagcaacccgacatttacgatgtggtctgcgtcgggggaggccccgcggggctcagtctgctgacggcgctgcgcgcgaatcccgtcacggcacacctccggatcgccctcgtcgaagcccaggacctggccaagaccagatcgtggaagctgccccccaacaaattctcgaaccggtgcagctccctgacgccctcgtccgttcagtttctcgaggagattggcgcttggaaacacttggagcgagaccgggtccaggcgtaccaggagatgcaggtgtgggatggcgtgacgggtgcgcgcatcgagttcgactgggccccgggcacggcctctgctgccgggaccaccatcgcgtatatgaacgaaaacttgaacctgacatccggtctcctgaaacggatcgaggagctaggcggcgtgtccgtgttcgacaaggcaaaggtcgagagcatagcctacgcggaggagaccgacgagttggatctgcgggagtggcccgttgtccgcttgtccgggggcaagcagctggctgcgcgactcctggtcggcgctgacggagccaacagccctgtgcgctcctttgccggcatcgaggctcgcggctgggactacaaccgccacggcgtcgtggctactctcgagatggaaggggagggctggggcggacgagagaccaagatcgcctatcagcgcttcctccccaccggtcccgtcgctatgctccccctcccgggcaactactccactctggtctggtcgacaacccccagcaacgcgtccctcttgaagagcctctcggccgaggacttcgtcgccatggtgaacgccgcctttcggctgagccctgcggatctcgaatacatgcacacgcaggattcgggccaggcggacgagtactcgtggaggctggagcacaccccgttcgaccatcgggccgttccccagacggtcgtgggcgttcaggagggcaccgtcgcctcgttccccctgaagatgcggcacgccgacacctacattgccgagcgcgtcgccctcatcggcgatgcagcccacacgatccaccccctcgcgggccagggcttgaaccagggacagggcgacgtgcagagcctcgccaagacgatccagtacgcggtcagccatggccaggatatcggcgtcaccatgtcgctcgagccgtacgtctccgagcgctatgcggcgaaccatgtgcttctaggggtctgcgataagctgcacaagctctactcggttggcagcggccctctggtgcccctcaggtcgattggcctgagtgccgtcaacgcccttgggccgctcaagaccttcctcatgaaccaggcggctggaaacggtatcaaggtcttctga

SEQ ID NO: 2601 - protein, 490 aa, Myceliophthora thermophilia
MDAVIRRRGAYVCRSCTQTLQRRLRRAYSSTAAQQPDIYDVVCVGGGPAGLSLLTALRANPVTAHLRIALVEAQDLAKTRSWKLPPNKFSNRCSSLTPSSVQFLEEIGAWKHLERDRVQAYQEMQVWDGVTGARIEFDWAPGTASAAGTTIAYMNENLNLTSGLLKRIEELGGVSVFDKAKVESIAYAEETDELDLREWPVVRLSGGKQLAARLLVGADGANSPVRSFAGIEARGWDYNRHGVVATLEMEGEGWGGRETKIAYQRFLPTGPVAMLPLPGNYSTLVWSTTPSNASLLKSLSAEDFVAMVNAAFRLSPADLEYMHTQDSGQADEYSWRLEHTPFDHRAVPQTVVGVQEGTVASFPLKMRHADTYIAERVALIGDAAHTIHPLAGQGLNQGQGDVQSLAKTIQYAVSHGQDIGVTMSLEPYVSERYAANHVLLGVCDKLHKLYSVGSGPLVPLRSIGLSAVNALGPLKTFLMNQAAGNGIKVF

SEQ ID NO: 2602 - DNA, 1872 bp, Myceliophthora thermophilia
atgactcccgtcgagctcatggcgcaacccaacggtcatgccgaggcaatcaacaagcccccacggccaggtggtacttacacggtccgggaacaacccctcggctcgacacggcacatccgcatcgtggccatcggggccggcgccagcgggctgaatctcatcaggaccctccggctcaacctgaccgactacgagatcaccgtctacgagaagaacgccgacgtgggcggcacctggctcgagaaccgatatccgggctgccgatgtgacgtacccagccatagctatcagttctcatggcggcagaagaaggactggacaaacttcttctcggcggccgaggagattggcgagtacctctgccaggtgtgtgacgaggaaggtatgaggggttccatcaaaactctgcaccaggtcgtcttggcccggtggaacgaggagcatggccggtgggagctgattgttcggaacctggagtcgggagaggagtttaacgaccacgccgatttccttgtgaacgggagcggtatcctaaacgactggaagtggcctgacgtcgagggcctcgacgcctatcagggacgtctcatccacactgcgcggtggccaaaggactttgaccacacaggcaagaccattgccgtcatcggcaacggctcgagcggcatccaagtgctgccggagctccaaccagcggccgagaaactctaccacatcgtccggactcccacctgggtgcttccaccgaggatacaggcgtggaagctcatgggtcaggcaggcgaggtcctcagcaagatccagctggacgcgcaagagaacttttcccaggagacgatcgaaaagttccagtccgaccccgacttctaccgcgagttcgtcaagaagctcgaggtggaagtgaacaatgccttcccggtcgtgctaacaaatggccctgtgcaagcctttgcgcgggcgaaggtaaccgaatacatgacggccatgctggggggaaacgaggagctttgccgagcgctcatccccgacttcccgctcgggaccaggagaatgacgcccggccacgggtacctccaggccctgaccaagcccaacgtggtcatcaagagatccggcatcaggcggttcgtgcccgagggtatcgagctcgagacgggagaggtgctccgggtagacgccatcgtctgcgccacggggttcaacacgtccttcatcccgcgcttccccatcatcggccgcgacgggaacctccaagagaggtggaagaaggagacgcccaaggcgtacatgtcgtgcgccgtggacggcctgcccaactacttcatgtttctcgggcccaacgccccgatcgggcacggcagcgtcttcaccctcagcgagcacatcgccaagtacatcacgggggcgatccggaagtgccagaccgagggcatccggtcgctggcgccgtcgcgcggcgccgtcgacgactacttcgagcacgtcacggccttcatgccgcgcacggcgtgggcggcacccatctcgtcgtcggacggcagcggaggaggcagcggaggcagccggtcgtggttccggagcgacgacggccgcgtcacggcgctgcaccccggcagccggatccacttcttccacatgctcgagcggttccgcggcgaggactgggagtacgactatctcccctccggcggcgagtgcgagagcgagggcgagggtgaagaaaggaggaggaagggatggaaccggttcgcgtacctggggaatggcttctcgaccaaggagttggatcccgcgagcgactcgacctggtatcttgacgaggacgcgattgtgcggcgaggctggaacaaacccaggaaggtggtgtaa

SEQ ID NO: 2603 - protein, 623 aa, Myceliophthora thermophilia
MTPVELMAQPNGHAEAINKPPRPGGTYTVREQPLGSTRHIRIVAIGAGASGLNLIRTLRLNLTDYEITVYEKNADVGGTWLENRYPGCRCDVPSHSYQFSWRQKKDWTNFFSAAEEIGEYLCQVCDEEGMRGSIKTLHQVVLARWNEEHGRWELIVRNLESGEEFNDHADFLVNGSGILNDWKWPDVEGLDAYQGRLIHTARWPKDFDHTGKTIAVIGNGSSGIQVLPELQPAAEKLYHIVRTPTWVLPPRIQAWKLMGQAGEVLSKIQLDAQENFSQETIEKFQSDPDFYREFVKKLEVEVNNAFPVVLTNGPVQAFARAKVTEYMTAMLGGNEELCRALIPDFPLGTRRMTPGHGYLQALTKPNVVIKRSGIRRFVPEGIELETGEVLRVDAIVCATGFNTSFIPRFPIIGRDGNLQERWKKETPKAYMSCAVDGLPNYFMFLGPNAPIGHGSVFTLSEHIAKYITGAIRKCQTEGIRSLAPSRGAVDDYFEHVTAFMPRTAWAAPISSSDGSGGGSGGSRSWFRSDDGRVTALHPGSRIHFFHMLERFRGEDWEYDYLPSGGECESEGEGEERRRKGWNRFAYLGNGFSTKELDPASDSTWYLDEDAIVRRGWNKPRKVV

SEQ ID NO: 2604 - DNA, 1140 bp, Myceliophthora thermophilia
atgtccaccgtggtgactgctccggtcgttgacactcccggattggccttgttcgccaggaccaatacggatgctcccgctctcccggccggcttcccagaccagctccggcacaagctagcctggaccggttctgacttcaagggctcgtccgaccatatcatggtcctgagtgatgtccaccttgccgagatcaagtctgccctcgagagctacaagtgcaagtctctcggtcaggacggtgaccttgtggaagctgccaacttcccgctcccgacccttggtccaaagctcagggagctcagcgatgacgttcacaacggcaagggcttctgtgttatccgtggcatcaatcctgcctcgtacagcgtggaggacttgactctgatttacctcggcgtccaatcgtatattgctgaacagcgtgggcgccaggacaagcgtggaaacatgcttgtccatatcgtcgcggacaacagcaccaagcgagcggccaaccaccaccgccactcgaccaaagcaattacgttccacaacgaagaggccggcgatgtcgttagctggctgacgcgcagcacagccgcgacgggcggcaagtgcatcatcgcctcggcttatacggtttacaacgtcctgacggctacaagacccgacgtgatccgtacactggcccggtctgattggccctttgctctgcctcgctttcaatgccgtccggtcatattttaccaagactcgaagctcattatgaactttggtcgcgctgctctcatggggagcgaagcgcatcctcgaccccggaacctgccatccttgtcggcgcgtcagatcgaggccttggatgccatcgaagcgattgcccgagccactcagttggagatccaaacgcaggcaggagatatgcatttcatcaacaacctggctatcctgcaccgccgcgagggttttgctaacgggcaggcacccacggagaaacgccacctggtgcgcatgcgcctccgcagcgccgagaagggatggccgatcccccgcgagcttgagacagagtgggatgcggccttcaggaagcacggagtcaagcactggcacgtggagcccatgccgtcgtactttttccccatgcgcaaccagcccaactaa

SEQ ID NO: 2605 - protein, 379 aa, Myceliophthora thermophilia
MSTVVTAPVVDTPGLALFARTNTDAPALPAGFPDQLRHKLAWTGSDFKGSSDHIMVLSDVHLAEIKSALESYKCKSLGQDGDLVEAANFPLPTLGPKLRELSDDVHNGKGFCVIRGINPASYSVEDLTLIYLGVQSYIAEQRGRQDKRGNMLVHIVADNSTKRAANHHRHSTKAITFHNEEAGDVVSWLTRSTAATGGKCIIASAYTVYNVLTATRPDVIRTLARSDWPFALPRFQCRPVIFYQDSKLIMNFGRAALMGSEAHPRPRNLPSLSARQIEALDAIEAIARATQLEIQTQAGDMHFINNLAILHRREGFANGQAPTEKRHLVRMRLRSAEKGWPIPRELETEWDAAFRKHGVKHWHVEPMPSYFFPMRNQPN

SEQ ID NO: 2606 - DNA, 1413 bp, Myceliophthora thermophilia
atggaccaacaacgcccggcatcccaaaaggttccggccgggctggcttgcgtgctgaattcgcccgaggagaatcgtgactcggcgtatttttccagcactgacacatcgagcaaacacacgtcggcagcttcaggtatgggcgtgctgagccctcctcattcgggttttcagccgtcccccgtcgacaagacaccgtctccgacgacgacgacatcccatctgcttccgcagtcgctcgtgtcaccggcaaccagcaacggcaacatgagcgtagcgtcaatggtctcgccaacgacaccgggaagctccgacccccgccgcttcgaccggacgcagtcgatggactccgcccctaacagcgccggtttcgtctccggggatacaccggaggccctgtcgaggagagagagcgtggatagcaggatcaaccagggtttccacgacatgaggctcggtaactcgccctatgcgagccacaaccattcgacgacctcgatccacacgactttgcagcagcagaggaacccgcgtcccgctctcgacacgctctccgttcaccgtatctcgaatggttaccagccaagtgccgagcggaacccggacggccacccgaaaacgatgaggattgcacccgccatcacgggcccggccaccagccagattgcccgggcagccgagccaaccaagggtcaggcctgggccttcccggaggaggagatccagcggatgccgtcgactgcgaacgggtcgctgatcgactcgcgcagaagcagcattgccgagtcccggctgccgccagggcaaaggcgcctggaggagagcattaccccctaccagcggctgtcgaatgcttctggcgagtactcgacggttcaccaccacacccttcaacacaagcagatcggagagctacggagcgaagagggaagcgcgcatgccggcacccagccgtacagcaggactcctgagctgcgcgtaagccacaagcttgccgaaagaaagcggcgcacagagatgaaggagctgtttgaccagctcagggatttgatgcctcaagagagaggttccaaggcttccaagtgggagattttgaccaaagcgatctcggagcaccaacgccaagccgatctcatcaggcaactccaaaccatcaacgcaacccagcagaacgagattgacatgctgcgccgtgagctcgagcggatgcacggggcccagcagtcccgcccggtcacggatccctattcccaggaccagtatggcagaccgcgaccaccggagctgccaccgctgcggtcgctccagtcgcccacgggcccaccacctcagggacccgagtcgatgacgggcgtacagtacgagccgccgagagctaacggttatcggcccgccgagaccggcaggttctag

SEQ ID NO: 2607 - protein, 470 aa, Myceliophthora thermophilia
MDQQRPASQKVPAGLACVLNSPEENRDSAYFSSTDTSSKHTSAASGMGVLSPPHSGFQPSPVDKTPSPTTTTSHLLPQSLVSPATSNGNMSVASMVSPTTPGSSDPRRFDRTQSMDSAPNSAGFVSGDTPEALSRRESVDSRINQGFHDMRLGNSPYASHNHSTTSIHTTLQQQRNPRPALDTLSVHRISNGYQPSAERNPDGHPKTMRIAPAITGPATSQIARAAEPTKGQAWAFPEEEIQRMPSTANGSLIDSRRSSIAESRLPPGQRRLEESITPYQRLSNASGEYSTVHHHTLQHKQIGELRSEEGSAHAGTQPYSRTPELRVSHKLAERKRRTEMKELFDQLRDLMPQERGSKASKWEILTKAISEHQRQADLIRQLQTINATQQNEIDMLRRELERMHGAQQSRPVTDPYSQDQYGRPRPPELPPLRSLQSPTGPPPQGPESMTGVQYEPPRANGYRPAETGRF

SEQ ID NO: 2608 - DNA, 3153 bp, Myceliophthora thermophilia
atgaccgaccagctattgctgccgagaaccgcgtaccgaccgccctccccgctgggccggaggaggatggcgcagacacttaatcctataatggaggagcccgaggatacaagagactcgttcgtcgagcggaggaggaaaaggcggtccgtcgaaaagatcgagcagtggctttcgccaatgagcgaccactttcccacaccgagaggccagcacttccttgcggcgcctgtcttgccggccaccccctcctgcgtgtcgagcgacgctgagcccgagcccgagcccgagctcgacctcgacaacgacgacaccagttcccaggcttcctcgtcgatcccgtcccttcagtggaatcgccataacaacagcagcaaccgagacagcataatgaccgacgtgaccgagtttgacgatctttacgatgtctccgatgacgaaatcacacgagagcaacgtctccaatctaacggtatcagccgccaacgaagctccacgagtctcaggagagcctcgcgggcgtccgtgggactgttgagatccttggctcccttggtgatccctgaggagcaggccccggcagcagccaagaagctgatgtcgcctatcccaccgacaccaccgtctgctgttgccatgtcgcccgccgtcaagagctttatggagttgcgccaggctcaagagactccccgcgtctcggcacctccttccctcgacgggagcatcaactcggaggagatggcccaaatgtccgctcccccaacgccttcgatcggtgcccaggacaaccaagacgaagagtgggccggagtccacctgcagcccggtgcactcgagacgctccaggccctctctgggagcgatgcagagtacgaggaggaacctgctcaggtcatcgagataccacaagagatgacccaagcacgtcaacagctcccccgactcgttaccggcgctggcgtcgacagggctccctcactccgacactccctgattgggctgacaaggctcgagataccttccccgggcggcttcttttcagaactgtcatctgccagccggcggacctggaatagccagccagaagaggccaacccacctacttcgaccaccgccgagaacttttacaagaccccctggacaaaacccgcagagaagaccccgccgccgccgccaccaccacgacggcccctgcacctcgacgaccttccatccgccatcgtcgagcgcgtcgttgagcttcccctgaacaacgattccggggacccaccgacggccatccgggagcagaaaactccagtcactgctcttagaataccgcctactccgaaacagcccgaggcaccgagctccggcgcagcagctgaggaacccctgtctcctgccgatgtcgacgagataatcgccgagtatgatcctgagtgcgtcgccaagagggaggaaaatgcactgtcgcacatcgaccgcactaagatgtggttggcggcacaacgcgcctatctccagggtattgtaggcttctcagaggagagagaagcgtccgaggagtctgagtctgagtccgggccgcacgtcgagtccgaggggccatccgcggtcgcctcccccgagcctgaaggagccgagcccaagaagaagagtgtccgcttctccgaagttgtctccaagaaggatatcccgcgcaggttaccttccaagctcgcgcgccaagaatcttcctactaccgggctttcaccgattactctgtaaggacttgtgccccggatgtcttcatccaccgccatacgcgcttcgaggccctccaggcccagcgcgcctgcctcagggatgctcaccgcaaccaattgctcggcaagttccagctgtcggtggtgccccagtcgacaaagaagcgcatgagcgccaacgttgtgcgtggcgacgatgtagtcgtcgatgatcccgagaaacttcgcgcggagaaggaagccgaggctctctcgcagatgcgcatggctacctggcatgtcgccgccaccaagctcctcaacggcggccgcctgatcgccgcccccgtgggcaagcgtctgggccgccagagctacatggccacccgcgccgacggcaccagccgtgaccgcgcgcgcatcctcgatctcggaggacagggcacctgcgactgggcctggcacgccgctctgctgtatcccaacaccgagatctataccgtcaccaccaaggccattcgtcagctcagcaacagcaacatccgcggcccgcccaaccaccgccaggtcgccgtcaccagccttgccaaactcccttttgccgacaaccagttcgacctcatctcggcgcgcgagctgcacgccgtgatcaagctctttggcgagcacggtatcaacgagtgggatgcttgcctgcgcgagtgcatgcgcgttctgaagcccggcggctacctcgagtttacccttctcgacgccgatatcatgaacgccgggccgctcggcaacgcaaaggccgtcgaatttcactttgccctgcagacgctcggctacgaccccaacccaacccgatccttcctcggccgcctccatgccgcgggcttcgacgagatccgtcgcgcgtgggtgtgcctgcccgtcgggccgaaacaccccccgcagtccgtcttcaccaccgctagcagaaactcgacaacgtcctcctcctcctcctcctcctcctcctcatcatcatcatcatccgtcaaagtacaccgtctcgaagcgatggtcaccggctcgaccgacaacatcgccgccgtcacgggcatcgccgcgggctggagctgggagcggtggctgctgcgcgccgagatggagagggccgccggcgaactgcgcctggccgacaccgtcacgcccgggacggccatgcgcgaggccggcaagatgattgccgacgtgcattccgtggtcgaggaagggcggaagatagggtcctgcttcaggatgctgaggggttatgcgcgcaagccggggccggcgccggcgccaaaggcaacaacaacagcaacaagaacaacaacaagagcgacgaagcgagtggaaatggaagaggtcgcagattccgggtttctggaccggagcggatccattcggatttgcttagacaccgagtctttaatgtga

SEQ ID NO: 2609 - protein, 1050 aa, Myceliophthora thermophilia
MTDQLLLPRTAYRPPSPLGRRRMAQTLNPIMEEPEDTRDSFVERRRKRRSVEKIEQWLSPMSDHFPTPRGQHFLAAPVLPATPSCVSSDAEPEPEPELDLDNDDTSSQASSSIPSLQWNRHNNSSNRDSIMTDVTEFDDLYDVSDDEITREQRLQSNGISRQRSSTSLRRASRASVGLLRSLAPLVIPEEQAPAAAKKLMSPIPPTPPSAVAMSPAVKSFMELRQAQETPRVSAPPSLDGSINSEEMAQMSAPPTPSIGAQDNQDEEWAGVHLQPGALETLQALSGSDAEYEEEPAQVIEIPQEMTQARQQLPRLVTGAGVDRAPSLRHSLIGLTRLEIPSPGGFFSELSSASRRTWNSQPEEANPPTSTTAENFYKTPWTKPAEKTPPPPPPPRRPLHLDDLPSAIVERVVELPLNNDSGDPPTAIREQKTPVTALRIPPTPKQPEAPSSGAAAEEPLSPADVDEIIAEYDPECVAKREENALSHIDRTKMWLAAQRAYLQGIVGFSEEREASEESESESGPHVESEGPSAVASPEPEGAEPKKKSVRFSEVVSKKDIPRRLPSKLARQESSYYRAFTDYSVRTCAPDVFIHRHTRFEALQAQRACLRDAHRNQLLGKFQLSVVPQSTKKRMSANVVRGDDVVVDDPEKLRAEKEAEALSQMRMATWHVAATKLLNGGRLIAAPVGKRLGRQSYMATRADGTSRDRARILDLGGQGTCDWAWHAALLYPNTEIYTVTTKAIRQLSNSNIRGPPNHRQVAVTSLAKLPFADNQFDLISARELHAVIKLFGEHGINEWDACLRECMRVLKPGGYLEFTLLDADIMNAGPLGNAKAVEFHFALQTLGYDPNPTRSFLGRLHAAGFDEIRRAWVCLPVGPKHPPQSVFTTASRNSTTSSSSSSSSSSSSSSSVKVHRLEAMVTGSTDNIAAVTGIAAGWSWERWLLRAEMERAAGELRLADTVTPGTAMREAGKMIADVHSVVEEGRKIGSCFRMLRGYARKPGPAPAPKATTTATRTTTRATKRVEMEEVADSGFLDRSGSIRICLDTESLM

SEQ ID NO: 2610 - DNA, 2061 bp, Myceliophthora thermophilia
atgaagagaaaggcggctggctccgccgacggcaagaatccggccaagaagcgacccaagaacactctcggcagagaagatgccaaagctcgcttccggaagggcctcttcgacaaggaggtgctcgacaagtacacgtcgcagtacgcgtcgtcaagtccctacaagcactgcgtcatcagcggcctgatcgatgacgacctcctgcgcaaggtccggtccgagatcaaggcgaacgtccacttcactccgaaggagaccgacatctacaagatccaccagagcggcgaccttgccaacctggacggcctcgacgacgaggccctctccaagctcccctcgcttctcgccctgcgcgacgccctctactcgcagaccttccgcgactacgtctcccacatcaccaactgcgggcccctgagcgggcgcaagaccgacatggccatcaacgtctacacccccggctgctacctcctgtgccacgacgacgtcatcggctctcgcaaggtcagctacatcctgtacctgaccgaccccgacacgccctggcagcccgagtggggcggcgccctgcggctctaccccgtggtggaccgcgagggcaaggacggcgaggtggccaagaccccgctgccggacgtggtcaaggtcatcccgcccgcgtggaaccagctttccttcttcgcggtgcagcccggggagtccttccacgacgtcgaggaggtctaccatgcctcctccaaggaggagctcgacaagaacggcgggcgcatccgcatggccatcagcggctggttccacatcccccagatcggggaggacggttacgtggagggagccgaggagaaggcggcccagaagagcggcctgatgcagctacagggcaaccccgaccagcacgatcggccccgggcgaagcccgttcccgtcgagcctggcgatggcgaggccagcgacgagttccccctggacgaggcagacctcgagttcctcctcaagtacatcgcccctacgtacctgaccccggacacactcgagcgggtcgccgaccactttgaggaagagttcagcatcaccctgtcggacatcctgcatcccaagttcgccgccaagctgcgcgagtatgtcgaatcccaggaggcccagccgctgcccgaggatagcgaggagatcgacaagggcccgtggaaggtcgcccgtccgccacacaagcaccgctatctcttcctgcagcccggccaggagaagctcgaggcgtcgccgctacaggaacttctcgaggtcctcctgccgtccaagcaattccgcctctggctgcagatggcgacacgctcgcgcatagagagctacgacgtgcttgcgcggagattccgtcgcggcaaggactacacgctcgcgaccggacacgagggcaagccgaggctcgaggtcaatatcggtctcaccccgacggacggctggggcgacgtcgacgatgacgacggcggcagctccgaagcctcatccgaatccgaggaggctcaggaaagcagcaagacacctggcaagaatggtaagaaggggaccgcttctgctgtcaacggcgagtccaaggacaagggcaagggcaagggcaagggcaaggccgttgagaaggacgtagaggaggaggaggaggaggaggaggaggaagaagaagaagaagaggaagggaaggaggaagacggggaggtcggcggtcacgaagtgtacatggcgggcgacgacgacggcgacgaggatgcggccatctacaagagcagcgccgacgacgacaacatcctgttcttccaggcggcggcgtggaacaagatgaccatcgtcctccgcgacagcggaacgctgcggtttgtcaagtacgtcagcgccagtgccaagggagaccggtgggacattagcgccacgttcgagattgaggagcaggacgaggcgccggatgagaaggacgacggcgccgagggctcgggtgccggggtgccggaggacgagtcggaggaagagtttaacggtttttcgagcagcgaggcgagcgattcggaatag

SEQ ID NO: 2611 - protein, 686 aa, Myceliophthora thermophilia
MKRKAAGSADGKNPAKKRPKNTLGREDAKARFRKGLFDKEVLDKYTSQYASSSPYKHCVISGLIDDDLLRKVRSEIKANVHFTPKETDIYKIHQSGDLANLDGLDDEALSKLPSLLALRDALYSQTFRDYVSHITNCGPLSGRKTDMAINVYTPGCYLLCHDDVIGSRKVSYILYLTDPDTPWQPEWGGALRLYPVVDREGKDGEVAKTPLPDVVKVIPPAWNQLSFFAVQPGESFHDVEEVYHASSKEELDKNGGRIRMAISGWFHIPQIGEDGYVEGAEEKAAQKSGLMQLQGNPDQHDRPRAKPVPVEPGDGEASDEFPLDEADLEFLLKYIAPTYLTPDTLERVADHFEEEFSITLSDILHPKFAAKLREYVESQEAQPLPEDSEEIDKGPWKVARPPHKHRYLFLQPGQEKLEASPLQELLEVLLPSKQFRLWLQMATRSRIESYDVLARRFRRGKDYTLATGHEGKPRLEVNIGLTPTDGWGDVDDDDGGSSEASSESEEAQESSKTPGKNGKKGTASAVNGESKDKGKGKGKGKAVEKDVEEEEEEEEEEEEEEEEGKEEDGEVGGHEVYMAGDDDGDEDAAIYKSSADDDNILFFQAAAWNKMTIVLRDSGTLRFVKYVSASAKGDRWDISATFEIEEQDEAPDEKDDGAEGSGAGVPEDESEEEFNGFSSSEASDSE

SEQ ID NO: 2612 - DNA, 1815 bp, Myceliophthora thermophilia
atgggtgagatgccaactccgaacggcttcaacgagaaggttggcgacgagttcacaatcaaagatgtcgccgtcgagaacatgaggcccctcagggtgatcgtggtcggggccggcttctccggcattctggcggccatcagaataccagagagattgaggaacgtggagctggtcgtgtatgagaagagcgagcgcgttggcggagtctggtggctgaacaaatatcctggagttgcctgcgacatcccatcacactcttaccagtactcgttcgcacccaaccccaactggagcaacctgtatgccccggggagcgagatccaacagtatctcgaggacgtggccgagagattcggcgcaatgaggttcatcaagacacgccaccaagtcgagcactgtgcgtgggacgatgtctctaagaaatggaacgtcagagtgaccaacctcgccaccggggaggtgatcgaggactcggcaaacgtcctcgtcactgctcgggggcagctcaacgacatgtcgtggcccgacatccccggcctcggcacgttccaaggcaagctcatgcactcgggggactgggacacgagctacgacttccgcaacaagcggatcggtatcatcggcaacggctcgagcgccatccagatcatcccgagcctgcaaaaggtcgagggcgcccagctgacctgcttcatgcgttcccccacctggatctcgtccgctttcggggaccaaggcatgatcgagctgggaatggatcccgccaacacagccttctcgcccgaacaacgacaacagctggcgaccgacccggtggcgctgttcaagctccgcaaggtcttcgagagcggcggcaacctcatccacgacagcacgatccgcggcaccgccatgcagaaggagtgccaggccgccttccaccgggccatgcacgacaagctgtcgtcgcggccggacctcctggccctgctcatccccaagacgttcgccccgggctgccgccgcctgacgccgggcaagggcttcctcgagtcgctgctcgagcccaacgtgaaggtggtgagcgaccgaatcggcgagatcacgcccgcgggcgtcatcacgacggcttcggcaagcagcaccaccagcagcagcagcagcagcagcagcagcgccgagaccgagacgcaccagctcgacgtgctgatctgcgcgacggggtaccgcgtctcgtcggcgccgccgttcgcggtgctggggcgcgggggcctgtcgctggcggagcggtgggcggggcgggccgagtcgtacctgtcggtggccgtggacgggttcccgaacatgctcatcatgttcgggcccaattcggcgatcgggttcggcagcctgacgcgcatcctcgaggccgaggccgactacatcctggcggtggtccgcaaactgcagcgcgaggactacgcgtcggccgagccgcggccggagcgcgtgcgcgactttgtcgagtacgtcgacgcctacttccgcgacaccgtctacatggacgactgccgcagctggtaccggcgcggcgacaaggtggtcggcctctggcccggctccaccctccacgcgctcgaggccctccgcgcgccccggtgggaggactgggtgtacgagccggtcgacgacgccggccggaggaacgggctgaggtggctgggcaacgggaggagcgtcacccaggtcgagggcgacccgccctggtacatcaacccggacgaggtccaagtgccgctcgaggggcggcccgaggagaatgcgagattcaaggctaggccgtggtgctactag

SEQ ID NO: 2613 - protein, 604 aa, Myceliophthora thermophilia
MGEMPTPNGFNEKVGDEFTIKDVAVENMRPLRVIVVGAGFSGILAAIRIPERLRNVELVVYEKSERVGGVWWLNKYPGVACDIPSHSYQYSFAPNPNWSNLYAPGSEIQQYLEDVAERFGAMRFIKTRHQVEHCAWDDVSKKWNVRVTNLATGEVIEDSANVLVTARGQLNDMSWPDIPGLGTFQGKLMHSGDWDTSYDFRNKRIGIIGNGSSAIQIIPSLQKVEGAQLTCFMRSPTWISSAFGDQGMIELGMDPANTAFSPEQRQQLATDPVALFKLRKVFESGGNLIHDSTIRGTAMQKECQAAFHRAMHDKLSSRPDLLALLIPKTFAPGCRRLTPGKGFLESLLEPNVKVVSDRIGEITPAGVITTASASSTTSSSSSSSSSAETETHQLDVLICATGYRVSSAPPFAVLGRGGLSLAERWAGRAESYLSVAVDGFPNMLIMFGPNSAIGFGSLTRILEAEADYILAVVRKLQREDYASAEPRPERVRDFVEYVDAYFRDTVYMDDCRSWYRRGDKVVGLWPGSTLHALEALRAPRWEDWVYEPVDDAGRRNGLRWLGNGRSVTQVEGDPPWYINPDEVQVPLEGRPEENARFKARPWCY

SEQ ID NO: 2614 - DNA, 2784 bp, Myceliophthora thermophilia
atggctccgcaagcaaagccaaagttatcccagacacgattgacgacaccccaaaaacctgcgccgaaaatctcgttctctacgaccaagacagcggggtcaaagccaaaaacgaaagtgaagccgaatcacagcatcttgagtttctttaaaaaggcgccggcaccagatgagggcttattcatcggtgaaggtgggccaggccctgtctgtagtggcccggacgagatcgaagatgagggctctggggttgatggcgacgcagatgggcgcgaaggcgatcagaaggaggatcttaacggaacgaatctctcttccgccacttgcgacgtcaacgatgcgactaggtataacgagttaggtggggcggttaagaagagaaggttaagcccccctctaagggtggtcagaacggaagcggatggaggtgactcggtgtcagccgctggatcggcagagagtctcggggcgacgacggcggtgtcgagacccgatttgaacacgccagcagcgccgaaaagaaaggcggggaatccgtttttggacgattcttcggatgacgacgacgacgacgacaaggagaatagtccaatggtgagaccgccaccgcctgcgtctgctgagtcaaatcatgaagaatatgaaggtcctgagccggcgaagcttaccaaagaagaggaggtttccaggagagcgccgcttctgaggcagaagacgtcgggagaggacctaaacagtgacgacaagatgtgcggcggaccggacgatagcgattcaaacaaggccgaggctactttaataaaggactttacttgcgaggaactcgaggcgatgatatacatggaagagcaggcgcggcgtgaagcggaggaagaaggggaagaacacgagcagagcgaatacaccagcgacgagacgatgacggagtgctgccccgtctgcaacggtagtttggcgggtacaacatcggacgaggccacagcccacgtcaattcctgtctggatggcaaccccacgcccttaccaaaacctgcagtccaggtttgtgaaatcactgatgagaccgaggggcccgccgtaggcaaacgatttgccaaagccgctgttgcgcggccagggcaagccaatccaatcaccctctcagacaatgccgaagacccgaagtcgaactctgccttcactaagctcatgtccgggcacgccgaggacgcagcctgggcggcggcggcggcggcagagaccgtgtcgagaggcatgcccgcctacaagcgaacctgccccttctacaagatcatgcccgggttctttatctgtgtcgatgccttccgttatggcgccgttgagggctgcaaagcgtacttcctgagccacttccacagcgaccactacatgggcctcaccgcaaactggactcacggccccatctattgcagcaaggtgacggggtcactggtcaaatcacagctgaagacagcggcaaagtacgtcgtggagttggagttcgaagagacggtgctagttccggacaccggcggggtcacagtcaccatgatccccgcgaaccattgccctgggagttccctttttctcttcgagaagagcgctgccgggagaacgcagcgaatcctccactgcggcgactttcgggcctgccctgcacatgttgagcacccaaagctgcgacccgagacggtcgatgccgtttccggccggacgaagcagcagaagatagacgtgtgttatctcgacaccacctacctaaacccgcgctactcgctccctccgcaggacgacgtgatcacagcctgcgccgagctctgcgcactcctcaacaaggccctcctcgccaacgatgaccgtgagtgggaagccttacttcgccgacagcgcgcgggaagctcctccgataccaaggacgtcagcaagttcttcactgctgctgctgctgctgctgccgcctcctccgccacatcgaccagctcggccactcccagacccgatcagaacgccttcacggccctcgacggccgccgccaccaccccaaccgcctcctcgtagtctgcggcacctacagcattggcaaggagcgcatctgcgtcgccatcgctcgggccctacgaaccaaaatctacgcctccccggccaaggtcctcatgtgcagacagctcggcgaccccgagctctcctccctcctcacctccgatccagccgaagctcaagtccacatgcagatgctcatggagatccgcgctgagaccctcgccgagtacctcgaggggtacaaagtccgcggccagttcggacgcatcatcgggttccgcccgtccgggtggaactaccggccctcggccggcaaacctggcaacggcggcagtgctaccatcggagcgaaccttcccccgacctccctccccaccacagagctgctccacggtcccggctggaagacgcgcttcgctctcaaggacctagtcccccagcggggcagctcccgggaggtgctgtgctttggggtaccatacagcgagcatagcggcttccgggagctggccatgttcgtgatggcgctgcgcatcgagcggattgtgccgaccgtcaacgtcgggagcgaggtgagccgacggaggatgaggggttggctggaccggtggctgtccgagaggaggaggggcgggttggtgagggttctgccgtcaggggaggaagaagggggaaagggaagagggaatgcagcagagttgtgggagggtaaggatgggcggggtggcggggtgtattggtaa

SEQ ID NO: 2615 - protein, 927 aa, Myceliophthora thermophilia
MAPQAKPKLSQTRLTTPQKPAPKISFSTTKTAGSKPKTKVKPNHSILSFFKKAPAPDEGLFIGEGGPGPVCSGPDEIEDEGSGVDGDADGREGDQKEDLNGTNLSSATCDVNDATRYNELGGAVKKRRLSPPLRVVRTEADGGDSVSAAGSAESLGATTAVSRPDLNTPAAPKRKAGNPFLDDSSDDDDDDDKENSPMVRPPPPASAESNHEEYEGPEPAKLTKEEEVSRRAPLLRQKTSGEDLNSDDKMCGGPDDSDSNKAEATLIKDFTCEELEAMIYMEEQARREAEEEGEEHEQSEYTSDETMTECCPVCNGSLAGTTSDEATAHVNSCLDGNPTPLPKPAVQVCEITDETEGPAVGKRFAKAAVARPGQANPITLSDNAEDPKSNSAFTKLMSGHAEDAAWAAAAAAETVSRGMPAYKRTCPFYKIMPGFFICVDAFRYGAVEGCKAYFLSHFHSDHYMGLTANWTHGPIYCSKVTGSLVKSQLKTAAKYVVELEFEETVLVPDTGGVTVTMIPANHCPGSSLFLFEKSAAGRTQRILHCGDFRACPAHVEHPKLRPETVDAVSGRTKQQKIDVCYLDTTYLNPRYSLPPQDDVITACAELCALLNKALLANDDREWEALLRRQRAGSSSDTKDVSKFFTAAAAAAAASSATSTSSATPRPDQNAFTALDGRRHHPNRLLVVCGTYSIGKERICVAIARALRTKIYASPAKVLMCRQLGDPELSSLLTSDPAEAQVHMQMLMEIRAETLAEYLEGYKVRGQFGRIIGFRPSGWNYRPSAGKPGNGGSATIGANLPPTSLPTTELLHGPGWKTRFALKDLVPQRGSSREVLCFGVPYSEHSGFRELAMFVMALRIERIVPTVNVGSEVSRRRMRGWLDRWLSERRRGGLVRVLPSGEEEGGKGRGNAAELWEGKDGRGGGVYW

SEQ ID NO: 2616 - DNA, 546 bp, Myceliophthora thermophilia
atgcttgcaccacccgtgaacctgccaaagtggcttgaagagaactcccacttactcaagccgcccatcaataactactgcgtctacaatggcgatttcaccgtcatgatcgtaggcggcccgaacgcgcgcacggactaccacatcaacgagacgcccgagtggttctaccagtacaagggcgcgatgctgctcaaggtggtggacgagggcggcgagttccgcgacatcgtgatcggcgagggcgacatgttcctgctgccggcggggacgccgcacaacccggtccggttcgccgacacggtcggcctcgtgctcgagcagcgccggccccccggatccctcgaccgcatgcgctggtactgccccgcctgccgcgccgtcgtccacgaggccgccttccactgcaccgacctcggcacccagatcaaggacgccgtcgagcgcttccgccaggacgaggacgccaggcgctgcaagagctgcggccagcttgccgactggcgccccgagcccggctccgtccggaacccgaacctcgagtga

SEQ ID NO: 2617 - protein, 181 aa, Myceliophthora thermophilia
MLAPPVNLPKWLEENSHLLKPPINNYCVYNGDFTVMIVGGPNARTDYHINETPEWFYQYKGAMLLKVVDEGGEFRDIVIGEGDMFLLPAGTPHNPVRFADTVGLVLEQRRPPGSLDRMRWYCPACRAVVHEAAFHCTDLGTQIKDAVERFRQDEDARRCKSCGQLADWRPEPGSVRNPNLE

SEQ ID NO: 2618 - DNA, 786 bp, Myceliophthora thermophilia
atgacagcgcgccccgatctgcgcgtcctctgcttcggcgactcgctcacggccggctactcctactgggggagcgtccatcacccgtacaacgagatgctggagaacatgctgtccatggcatacccggacctgaagatcgtcacggtcgaagatgggctttccgggtcgaccgtcaagcacgagtttctgagccggatgaacacgcagttcgccgcgcccaagaagaagaagcaggatgagggccctgatgggaaacggtacgactgggccatcgtgcttggagggacaaatgatctcgccatgggcttccccccggaggatatcttcgagactctcaaagaagtctgggacgtgccgctctcgcaccagtgcaaggtcctcgccctcacagtaccggaggcgggcgtgacaggggagtccagggagcggcttgacgcccggcgagacaagctcaataatctcatcaagggttacaagcgggacaatttccacgtcttcgacttgcacaaggctgtcccctactggggtatgtccgagtcagaccgcaggagatactgggacgaccacatccatttcacacccgccggctacgacttgatcggcaacaaggtcggcatttcactggtcagcctcctcgcgatggaaaaggccaactccccgcagcggccgcaaaagcgcaggcgcatgttcaaggacgacgataaggagtttgaagaagaaggcggagacccttcagccatcaatcagggttacgtggtggtacggagggcggatttggactag

SEQ ID NO: 2619 - protein, 261 aa, Myceliophthora thermophilia
MTARPDLRVLCFGDSLTAGYSYWGSVHHPYNEMLENMLSMAYPDLKIVTVEDGLSGSTVKHEFLSRMNTQFAAPKKKKQDEGPDGKRYDWAIVLGGTNDLAMGFPPEDIFETLKEVWDVPLSHQCKVLALTVPEAGVTGESRERLDARRDKLNNLIKGYKRDNFHVFDLHKAVPYWGMSESDRRRYWDDHIHFTPAGYDLIGNKVGISLVSLLAMEKANSPQRPQKRRRMFKDDDKEFEEEGGDPSAINQGYVVVRRADLD

SEQ ID NO: 2620 - DNA, 1050 bp, Myceliophthora thermophilia
atggcgacaaggtactcggagtactctgctgttgtagaaatcgacgccttctttcaaaaaacatcagcaacacgctccggatgcgacgccagagcacgggagcttactggcggcaaggtcgtccctgttgaagtccagggcgtctgcagctactctgtttatgccggcccggaactggaatacgttgttcaatttcgcctcgagtctctggcgctcaagactgaagtcacttctctagcgaccgagatttacgggtcacttgtaccgacggtgtccttcgaagggaaagtaggggaagatggggagaaagagccagtctacgtctacctaatgagccgtctgcgtggaatgacccatctagactttattctcgcccatggcttcccggaacactcactcgacaacctttcctgtcgccggaatctgatcggcgatatcgcgcacttcatggctctgtcttggaaagcccctcggccagtcagctcagagtatcgtgacactttgcggcagacttatgttagggatctacgacttttgcaggctgcgcttccctcccggttccggtctatcattcagacctgtctcaactcgatagacgacatcctatctctacccatcgttcttctccatcgagattttggctcttgcaatatcatagtcgacgaaacgacatgccatctcgttggtgttgttgactgggcggaagcagaaatatgtccattcggaatgaacctgcattctctccagtccctaaccgggaagcttcatctgcgaaacggctggacgcgattcgaggactacgacgctctacaagatgtcttctgggagaggtttaagcaggaagttggtggcttgtctggcgatcagctccggacgatcaagttggcaagggccttgggtctgttattgtcgtctggctttactagccgtcttgggaacgagccacgaccagtgccgattggcgacgacgagcatgggcgctacaacatgatgtcactagatggattccttatcaatccgcaaacaaagttcgatggtttggagtactag

SEQ ID NO: 2621 - protein, 349 aa, Myceliophthora thermophilia
MATRYSEYSAVVEIDAFFQKTSATRSGCDARARELTGGKVVPVEVQGVCSYSVYAGPELEYVVQFRLESLALKTEVTSLATEIYGSLVPTVSFEGKVGEDGEKEPVYVYLMSRLRGMTHLDFILAHGFPEHSLDNLSCRRNLIGDIAHFMALSWKAPRPVSSEYRDTLRQTYVRDLRLLQAALPSRFRSIIQTCLNSIDDILSLPIVLLHRDFGSCNIIVDETTCHLVGVVDWAEAEICPFGMNLHSLQSLTGKLHLRNGWTRFEDYDALQDVFWERFKQEVGGLSGDQLRTIKLARALGLLLSSGFTSRLGNEPRPVPIGDDEHGRYNMMSLDGFLINPQTKFDGLEY

SEQ ID NO: 2622 - DNA, 216 bp, Myceliophthora thermophilia
atgtatacagatgccgcctgggccaccgacacaaatgggccaatcaagccgaagaatgatggactaattaggacaggatcacacttggcaagaaacgatcctagcagaggatcactggctcacgacgtgagccagatagtcactcgttatggtggactctgggagttcaccagtggtaataattacaaccacagtacttataccaagcattgctga

SEQ ID NO: 2623 - protein, 71 aa, Myceliophthora thermophilia
MYTDAAWATDTNGPIKPKNDGLIRTGSHLARNDPSRGSLAHDVSQIVTRYGGLWEFTSGNNYNHSTYTKHC

SEQ ID NO: 2624 - DNA, 936 bp, Myceliophthora thermophilia
atgacgctccgagtcttgcggctcattaagggacgtcggaccgtcttcaaactacgttcggcttgtcattccgagcgcttctccctacagagcaactgcaagggccagagagtgcagccgcgcatcggtctcgaacgatctggcgcacggggcagaagcatagcggtctggcccgtcgccacgccgtgggcgggcgattgcggctctcggccgtggcgcgatccttgcgggtctccgaccagatgcgagagcttactgcgcgttttgggtttgcatggatctcgctctgccgcgaaaatggatcgagagtcgtacgatgtcaaggacactgccgaagcgaagcgctgcggactcgcgtgttgtttggggtggattctggcagggacagctggcggtgatgccggcattgatgagggtaacttccggagatggggtctggaagcccgctctttcccgaaagagatttttgagcaccctgggaaggccagcaagcagtctcccacaccatctgttgggatgacaagcacgtgcgcaaaaatgagcgttttggcgaactattttcaaggttgccagatcggtgtggagctggcgctaactacggattacactgccctttccacaattcgttcacaggccatgagatcagggggttttcgaccgactggacccttgttcgcaggccatgccttccacgagcagcgtagagttgtatcaagaaaattccgtgagaacaacgcgtgggggggaaccaatgacgggcaacggctcgtgctccgcacgtgggcatccgaagggacaatgtggggcaagccgcgcttcaggatccctgctgctcaccccatcatacgagccaggcttcctgggctggacttcgactcgccgcagtctctaatccgtacacggcagtctatggaggaggagggagattcgccctaa

SEQ ID NO: 2625 - protein, 311 aa, Myceliophthora thermophilia
MTLRVLRLIKGRRTVFKLRSACHSERFSLQSNCKGQRVQPRIGLERSGARGRSIAVWPVATPWAGDCGSRPWRDPCGSPTRCESLLRVLGLHGSRSAAKMDRESYDVKDTAEAKRCGLACCLGWILAGTAGGDAGIDEGNFRRWGLEARSFPKEIFEHPGKASKQSPTPSVGMTSTCAKMSVLANYFQGCQIGVELALTTDYTALSTIRSQAMRSGGFRPTGPLFAGHAFHEQRRVVSRKFRENNAWGGTNDGQRLVLRTWASEGTMWGKPRFRIPAAHPIIRARLPGLDFDSPQSLIRTRQSMEEEGDSP

SEQ ID NO: 2626 - DNA, 1017 bp, Myceliophthora thermophilia
atgggtaggggagaatcaggccagacctccgcgcaggccggaggcgcgcccccggccctgctcgacctgaccatcgacaacatcacgcccaacacgatccgcatcaactcgcagagcgacaacgcccgcctgacgtacctgatggcgcggttggtgacacacctgcacgactttgctcgcgagacgcggctgagcacggccgagtggatggcggcgatcgagttcctgatcagctgcggaaagatctgcagcgatgtgcgcaatgagttcatcctgctgtccgacgtcctcggcctgtcgctgctggtcgacaacatcaaccaccccaaaccgccgggcggcaccgagggctccgtgctcgggcccttccacacgcatgacgcgccggtgctgcccaatggcgcgagcatgacgtcggacccggcgggcgagccgatgctggccgtgtgcacggtcaaggacacgcagggccggcccataccgggcgtgaccatcgacatctgggagacggacagctccggccactacgacgtgcagcacgccgaccgcgatggccccagcgagcggtgcgtcatggtcagcgatgagcaggggaggttctggttccgcggaatcaaacccgtgagctacccgatcccccacgacggccccgtgggcaagttgctgcagatgttgaatcggcattgttggcggccggcacacgtgcatttcatgtttgcgaaagagggctgggaccgtttgatcacagccttgtatctccgaggtgacccctacgagacgtctgacgccgtgtttggcgtcaagaagagtctgataatcgacctcgacagggtcgacaagaagacagccgaggagtacggcgtagaggaggggatatggctgctgaagcacgacttcgtgctgacgacccaggaggagacggagcagctcagagaccagctggctaccgaagcgttgcaaaagctgggattgaacctcaagttggttgatcacctcccggtgcctgatttggattga

SEQ ID NO: 2627 - protein, 338 aa, Myceliophthora thermophilia
MGRGESGQTSAQAGGAPPALLDLTIDNITPNTIRINSQSDNARLTYLMARLVTHLHDFARETRLSTAEWMAAIEFLISCGKICSDVRNEFILLSDVLGLSLLVDNINHPKPPGGTEGSVLGPFHTHDAPVLPNGASMTSDPAGEPMLAVCTVKDTQGRPIPGVTIDIWETDSSGHYDVQHADRDGPSERCVMVSDEQGRFWFRGIKPVSYPIPHDGPVGKLLQMLNRHCWRPAHVHFMFAKEGWDRLITALYLRGDPYETSDAVFGVKKSLIIDLDRVDKKTAEEYGVEEGIWLLKHDFVLTTQEETEQLRDQLATEALQKLGLNLKLVDHLPVPDLD

SEQ ID NO: 2628 - DNA, 1404 bp, Myceliophthora thermophilia
atgggttctcaagaagaatcgagacgcttcgatgtcaatgatatcgctattataggagctgggccgtgcggtcttgcagcagccaaatacctccttgctcagaacgcctttaggaagatcgacatctttgagcagcaggcagaggtcggcggagtgtggaactacagcccgaggccttcagagacgattcgcgtgcctcaagtgagtgctgactgtcccccggacccgccattgccgtgtcgagaaggagaggcgcccgtgttcccctcgcccatgtacgatgccttacataccaatatcccccgcgatctcatggaattctcggatctgcgcataccggaggatacgctcatcttcccatctcgggaagatatccaaaattatgtggtggaatacgcgaaagatatccgccatctcatccggttctcgacacaagtgaaagacgttcgcttgagagtggtcgacggcgtggaccggtgggatgtggatacgacgtgtctgctgacaggaaagacaacgagcgcgacatacgatgccgtcgttgtagtgtccgggcattacactgcggtgtacattcctgatgcaaaagggataggtgaattccatgcagcgcaccccggggtcatctcgcactcgaaacattaccgcaaccccgaacgattcaccgggaagaaggttgtcattgtcggaaacgctgcatcagggctcgatatcgcagcgcaaatcagtcgtgtcacgcagaagccgttgttgctatcggtacagacgcccacgtcggaggccaacctagcgtactcgggagcggaggaagttcctgtgattgaggagttcctggtcgaggaaagaggcatcaggtttcagaacgggcgagtcgagaaagacatcgacgccgtcatctacgccaccggctaccttttcgctttcccctttctgcgctcactcaagccgccactggtgacggatgggcggagagtgtacggactgtacaagcatctcttccacatagaccacccgactctggtcttcacgagactcccaataaaggtggtcccgttcccgctcgccgagagccaggcggcggttttctcgagaacgtgggcgaacctgctgccgctcccatcggttgaggaaatgagacagtgggaggccgaggaggcagagagacaggggaccaaattccacgtatggcccgagggcggcgatgccaactacatcaactcggttcacgactggatcgtgcagtcaaagacaccgggcaaagtaccgccgcgttggagcccggagttggtttggcagaggcaaatctacgccaaggccaagctgcagtttgagctcagcggtaggaaggctaggagtttgaaagagctcgggttcgaatattcgccagaagagggtgataattga

SEQ ID NO: 2629 - protein, 467 aa, Myceliophthora thermophilia
MGSQEESRRFDVNDIAIIGAGPCGLAAAKYLLAQNAFRKIDIFEQQAEVGGVWNYSPRPSETIRVPQVSADCPPDPPLPCREGEAPVFPSPMYDALHTNIPRDLMEFSDLRIPEDTLIFPSREDIQNYVVEYAKDIRHLIRFSTQVKDVRLRVVDGVDRWDVDTTCLLTGKTTSATYDAVVVVSGHYTAVYIPDAKGIGEFHAAHPGVISHSKHYRNPERFTGKKVVIVGNAASGLDIAAQISRVTQKPLLLSVQTPTSEANLAYSGAEEVPVIEEFLVEERGIRFQNGRVEKDIDAVIYATGYLFAFPFLRSLKPPLVTDGRRVYGLYKHLFHIDHPTLVFTRLPIKVVPFPLAESQAAVFSRTWANLLPLPSVEEMRQWEAEEAERQGTKFHVWPEGGDANYINSVHDWIVQSKTPGKVPPRWSPELVWQRQIYAKAKLQFELSGRKARSLKELGFEYSPEEGDN

SEQ ID NO: 2630 - DNA, 1530 bp, Myceliophthora thermophilia
atggcgacgaatgtcgacgccgcggcccttgacgagacgccaatttccgagagcgtgcataaaccgagcaagcagaccgtcgacccctacaatgtctcgggcgaagttggcgaggacggcgtggtcaaggccatcgactacaacaagttgatcgacgagtttggcaccaagaagatcgacgacgagctgcttgcccgcttcgagcgtgtgaccggcaagcgcccgcaccacttcctccgacgaggcatcgtcttttctcacagagactttgagctcatcctcgaccgctacgagcgcggcgagcccttcttcctctacaccggtcgggggccctcgtccgacagcgtccacgtcgggcacacgatcccgttcgagttcaccaagtgtacgcacaaaaccatcaccgcaccagcgtgccagttgttggggaccccggggtgggctccaggataccttcgatgtccccgtacgttggttcggatgggccaagaatccgtccagggcaaggctaacgttatgaagctcattatcatgatgacggatgacgagaagtatctgttctccgagaagaaaacgattgaggaggttcagggctattgcaccaataacgcaaaggacatcattgcgattggttttgacccggccaagacattcatcttctctgatgtaagcacagagggcatggtgccaaggaccgaggagactgacctgagttcacagttcgactacgtcgggggtgccttctacaggaacattgtccgcctgtcaaagcacatcaccctcaaccaggcccgcgccatctttggcttcaacgacagcaccaacatcgggcggatccacttcggcagcatccaggacttccgcatgacgcgcgatgtgtcggcaaggttgaagtaccaggggaagccctacgccaagccatccctcatccacgcgctgttcctgccggctcttcaggggcccgggaccaagatgtcggcgtctatcgatgagtcagcgatctttttgaaagacactcccaatcagatcaagaacaagatcaacaaatatgccttctccggcggcaaggtgtcgcaggaggaacaccgccagtacggaggtgacacgagcgtcgatgtggcttaccaatacctccgcttcttcctcgaagatgacgaagagcttgagaggatcaaggtggaatatgagagcgggaggatgttgactggcgaactgaaggccatctgcatcagggagctccagaagtatgttgccgcgtttcaggagaggagagccaaggtggacgacgagacggtcaagctgttcatggagaggcggccgctccagtggagaggcaacccgcgcgcgcccctggttgttcccaaggttgaaaacggaaacgccggtgatgcgaccccggatggggaaggcaagttgaccaagaaccagctcaagaagctggagaaacagaagcaaatcgaggccaagaaggcgcagaaggccaaggagaaggcggagaaggcggagaaagctggcacggaggcggcatga

SEQ ID NO: 2631 - protein, 509 aa, Myceliophthora thermophilia
MATNVDAAALDETPISESVHKPSKQTVDPYNVSGEVGEDGVVKAIDYNKLIDEFGTKKIDDELLARFERVTGKRPHHFLRRGIVFSHRDFELILDRYERGEPFFLYTGRGPSSDSVHVGHTIPFEFTKCTHKTITAPACQLLGTPGWAPGYLRCPRTLVRMGQESVQGKANVMKLIIMMTDDEKYLFSEKKTIEEVQGYCTNNAKDIIAIGFDPAKTFIFSDVSTEGMVPRTEETDLSSQFDYVGGAFYRNIVRLSKHITLNQARAIFGFNDSTNIGRIHFGSIQDFRMTRDVSARLKYQGKPYAKPSLIHALFLPALQGPGTKMSASIDESAIFLKDTPNQIKNKINKYAFSGGKVSQEEHRQYGGDTSVDVAYQYLRFFLEDDEELERIKVEYESGRMLTGELKAICIRELQKYVAAFQERRAKVDDETVKLFMERRPLQWRGNPRAPLVVPKVENGNAGDATPDGEGKLTKNQLKKLEKQKQIEAKKAQKAKEKAEKAEKAGTEAA

SEQ ID NO: 2632 - DNA, 2253 bp, Myceliophthora thermophilia
atgtccggagaggaaagccaatggtggcccagccgggtctggaccttcctttacggcttctttcaaaagtcactggacccgaatcttccggtccctccgccaaaacttgctgctcaacgccctggcgagcgtacaattctcaggcatttgccagaaaggaagcatctcgcccaaactgcgccaagctgcgtcgcggacatcccgctgccgtcattcgacccaggcgtttttgacaacgagttgatcaagttaaggctgtatccaatcatcgactctcaggatccgtcaattgttcgagagcccgaggggaatatcagggagggtacgtaccggggaactcaggtagccctgactcaggcttactcccgaatcgagcagacctttgcttccctgtttgatgttcttggcgttgaagcaaccttaccgcgtttccgcaccctcgaagagcaaaggaatctctacaagttctcggaatatccaacaaatgccgacgggagtccggcgcagtatccacctcacctcgagcatatacctagtgatcgatctgtcagtgtgttcaagatcttcgacgttgcgggtctgctagagacccgagttctcctgaagaagatcacacccgacgaagatggaattttggggcgcactcgagaatggctgctcgaaaaggagcgtgccgtggcgttcggcggtgagccggaaaagggcgttagcattcaggatgtcgtggactacaacaaatatcaccgcaagttcgggaccgatatcgaaggtggcggcaacatcggcttgctgcaggactggttcagcgaccgccggttcgcagaccaacagttcacaggcaccaacccaaccacaatcactcgtgccacgccggcctggattggcgagtttacagccgccgctagagctggaaaatacgacaagtgggcggccgtcctcgccaagtcggatccaaattccttttttgtgcaagacggtagttatttccggaaggccgtcggcgtgtcagatccaaccacggtgctccatcataaggaaccttccagcgacgaatgctgggcggtaggcgccgtgagcttgttccagctacacgaggacggcaagctccaccccgttgcaatctgtatcgactaccgggaatccttggacaagtcggttaccatcttcaacaagcgaatgtcgccgcgagactcgacgagcagggagaaggaagactggccatggcgatacgcaaaaacatgtgcccaggtcacagactggatgcgtcacgaattggccgtgcatctcaccctctcccattttgtcgaggaagccattatcgtatcgacgaaccgctccctcccaatggaccacccggtgtaccggctgctctatccccattggtacaagacgctgtcgctcaacgctgctggtcgttcctctctggtgccccagattgtcgtcgacattgtgggcctcagcccagaccaatgttacaggtttatgaattacgcctacgatacctacgacttcgttggcagctacgtgcccaatgacctcagacggcgcggcttccccaatacgcagcttggcctgagccatccgcggtataggaactacccgtacgctaagaacgccctttctctctggacaagcatccgtgcctacgtcaaggccatgctgcatattcgcttccccaacgacggctgtgtcgccgcagacgaggacatccagcggtgggtgaacgagacgaaaacagccgcgcacatgcccacatttcccgagatcaagaccctggatgcgctggttgatgctgtgaccatgtgtattttcattgcctcgccttttcatacggccatcaattacctacagaacttctaccaggcattcgtgatcgcaaagccccccgcactatgtaccgcgccgccaactacgctcgaggagctgcaggaatacaaggaacatgacctcattgccgcgctgcccatcaatagacaacggcagtggcttcttgctgctcaagtgccctggctgctcagtttcaaggtcgagccggaccgcagtttgctaaactatgccgccagccagtggtatgtacacaagtacaagaggggcgaagacgatgtgaggatcaaaaaggcgagcgagaggctatacagtgatctgcagcggatgcagaggacgtttttccggaacagtctggccatggacagagggagcattccgtatatggtgctggatccgggcttgacggcggtttcgattctgatctag

SEQ ID NO: 2633 - protein, 750 aa, Myceliophthora thermophilia
MSGEESQWWPSRVWTFLYGFFQKSLDPNLPVPPPKLAAQRPGERTILRHLPERKHLAQTAPSCVADIPLPSFDPGVFDNELIKLRLYPIIDSQDPSIVREPEGNIREGTYRGTQVALTQAYSRIEQTFASLFDVLGVEATLPRFRTLEEQRNLYKFSEYPTNADGSPAQYPPHLEHIPSDRSVSVFKIFDVAGLLETRVLLKKITPDEDGILGRTREWLLEKERAVAFGGEPEKGVSIQDVVDYNKYHRKFGTDIEGGGNIGLLQDWFSDRRFADQQFTGTNPTTITRATPAWIGEFTAAARAGKYDKWAAVLAKSDPNSFFVQDGSYFRKAVGVSDPTTVLHHKEPSSDECWAVGAVSLFQLHEDGKLHPVAICIDYRESLDKSVTIFNKRMSPRDSTSREKEDWPWRYAKTCAQVTDWMRHELAVHLTLSHFVEEAIIVSTNRSLPMDHPVYRLLYPHWYKTLSLNAAGRSSLVPQIVVDIVGLSPDQCYRFMNYAYDTYDFVGSYVPNDLRRRGFPNTQLGLSHPRYRNYPYAKNALSLWTSIRAYVKAMLHIRFPNDGCVAADEDIQRWVNETKTAAHMPTFPEIKTLDALVDAVTMCIFIASPFHTAINYLQNFYQAFVIAKPPALCTAPPTTLEELQEYKEHDLIAALPINRQRQWLLAAQVPWLLSFKVEPDRSLLNYAASQWYVHKYKRGEDDVRIKKASERLYSDLQRMQRTFFRNSLAMDRGSIPYMVLDPGLTAVSILI

SEQ ID NO: 2634 - DNA, 1968 bp, Myceliophthora thermophilia
atggcaccctcagctgaaggcgccagcggcgccccgacccccgaagatctcaagctgcaccagctctctcagaaatacacggccgaagcagccaagcgtttccgacccgagggtcttggccagttcatccggctcaaggaggtcgggaatgaacggttccgcgccctcgcagaagatccttgggttgatcatgcagcgctgaacgcgaaagaaccggtcaaggacggctccaggtataagttcatcattctcggcgccgggtacggaggtttgctctatgctgtccgtctggccgaagccgggctggcgagtgggccggatgatatcctcatggtcgatgccgccggcgggtttggtggcacgtggtggtggaaccgataccccggcctgcactgcgacgtcgagagctacagttacatgccgttgctcgaggagaccgggtacatccccaagagcaagtacgcggcggggccggagctgctcgagcacgcgtaccgcatcgcgacgcagtggaagttgcatgacaaggcgctgttccggtcgaatgtcaagaccatcaggtgggatgacgaatctcggttgtggagtctcgaggtcaccgagggccgtggtcccgggcagcagagccgtgagctgaagctccaggctcggtatgtcttgcttgccagcggcatcctcaccaacccccaggttcccaaaatcccaggcctcgaaacctttaccggacccgttttccatacagcgcgctggaattacgacgttactggtgggagtcccacggatgaagcccttaaccggcttgaaggtaagcgtgtcggcatcatcggcacgggcgcaaccgcgattcaggtagtgcccaagctcgccaagtacgcgaaggagttgtacgtgttccagcgcacgccgtctggggtgtggtggcggggccagcgcccgacagacccggtggagtggaaaacgaaaattgctaggaagaaggggtggcagcgggagcggatgctgaaccttgactcgtacctgaccgacgccgccgaagagggccaggagaacatggttgcagacgggtggaccgaaatgcccgccttttctgccgttatcggctctccaagacatggcatagtcgagccaacgccggagaagatcgccgagcacctcgggcggctgtacaagctcgacctgcctcacgccgagcaggtgcgggcgcggacggacagcatcgtcaaggatccgaaaacagctgccaagctcaaggcgtggtacccaacatggtgcaagcggccaacatttagcgacgaatatcttcagacattcaacctccccaacgtgcatctcgtcgacacggatggcaagggtgtagatgcggccaacccgagcgggctggtggtcgcggacaaggaatatcctctcgacatcctcgtcctgagcaccggctacgtgacgccgagcatcggcggagggagccctgcagtgcgcactggtgttgacatctacggccgcggcggtaagtcgctggacgacaagtggcagacccatggtgcggcgaccctgcacggcgtgtgctcgaacgggttccccaacctcttcttcacccccctgtcccagtcgtcccaggcggccaacaacgccttcaccctagatgtcggcacggagcatatcgtccaggtcatcaagacagccgaggacagggtcgacggcgatgcccttgtcgaagtgacgagcgaggccgaggaggcctggtccttcgagatcatgaagcatgctggctggtttgcgagcgtcacgggctgcacgccgggctacatcacctccgagggcgaggctctgcggaagtcggaggacccgatggaaatggcaaaaagggccaggagtgggaacctgtcccaagggatggcgtcgtacatgaagttgttgcaggagtatcgggccgatgggtcgctcaagggattcgatatttcctcgagagcttga

SEQ ID NO: 2635 - protein, 655 aa, Myceliophthora thermophilia
MAPSAEGASGAPTPEDLKLHQLSQKYTAEAAKRFRPEGLGQFIRLKEVGNERFRALAEDPWVDHAALNAKEPVKDGSRYKFIILGAGYGGLLYAVRLAEAGLASGPDDILMVDAAGGFGGTWWWNRYPGLHCDVESYSYMPLLEETGYIPKSKYAAGPELLEHAYRIATQWKLHDKALFRSNVKTIRWDDESRLWSLEVTEGRGPGQQSRELKLQARYVLLASGILTNPQVPKIPGLETFTGPVFHTARWNYDVTGGSPTDEALNRLEGKRVGIIGTGATAIQVVPKLAKYAKELYVFQRTPSGVWWRGQRPTDPVEWKTKIARKKGWQRERMLNLDSYLTDAAEEGQENMVADGWTEMPAFSAVIGSPRHGIVEPTPEKIAEHLGRLYKLDLPHAEQVRARTDSIVKDPKTAAKLKAWYPTWCKRPTFSDEYLQTFNLPNVHLVDTDGKGVDAANPSGLVVADKEYPLDILVLSTGYVTPSIGGGSPAVRTGVDIYGRGGKSLDDKWQTHGAATLHGVCSNGFPNLFFTPLSQSSQAANNAFTLDVGTEHIVQVIKTAEDRVDGDALVEVTSEAEEAWSFEIMKHAGWFASVTGCTPGYITSEGEALRKSEDPMEMAKRARSGNLSQGMASYMKLLQEYRADGSLKGFDISSRA

SEQ ID NO: 2636 - DNA, 1206 bp, Myceliophthora thermophilia
atggctcccggtatcttggtcgacgagccccaaagcagccccgcgcagccactcaagcgcaatgatgaagccccgcgccacatcttccccgacggcgtgcggacgtcgggccagcacccaccgctctacgacgctctgaagccctacgctgccttccccaagcacatcaccggcccaaccgtgtggcaggcctccgagttcacctcgaacccggagcgctgggtccaccccctcactcccaccgagattgaggagctctcccaagccgctgacgccttcatcgcctcgggcgccccgctcactggcatttcgaaagaaagcttcgacctccccaccttttccaagaccctcagcgctctgcgcgacgacctgctcaacgccaagggcttcgccctgctcaagaacttccccacccacctctggtccccggaaaagacggcggtggcctacctcggcctgggcacccacctgggctacccggtctcccagaacgggcgcggccacgtgctgggccacgtcaaggacgtgggcgacgacccgacccagatccacgcggtgcgcatctaccgcacggcggcgcgccagttcttccacgccgacgactcggacatcgtcggcctgctgtgcctgcaccgcgcccaggaggggggcgagagcgacatcgtcagcgtccaccgcgtctggaacgtcctgcaggaggagcacccggacgtggccgagctgctgaccaagcccatctggtactttgaccgcaagggcgaggtcagcgacggccaggaggagtacatccgccagcccgtcgtctacctcgagaacggcggcaggggccggctgtactgcaagtgggacccctactacgtgcgcagcctgggccgtttcgtcgagcgcggcctcgtgccgccgctgagcgacgagcagaagagggccatggacatcctcgaggaggtgtgccagcgcgaggccctgcacatgatcctcgaggtgggcgacgtccagtttgtgagcaacgcgcatctgctgcatgcccggaccgcgtacaaggactttgctcccccagcaccacggcgccatctcctgaggttatggttggcgactccagagggcgagggcggatgggctctccccatgccggacagccacgagaagaagcgcggtggggtgcaagtgaacgacacaccgccgaaggcgccgctggatgcggagtag

SEQ ID NO: 2637 - protein, 401 aa, Myceliophthora thermophilia
MAPGILVDEPQSSPAQPLKRNDEAPRHIFPDGVRTSGQHPPLYDALKPYAAFPKHITGPTVWQASEFTSNPERWVHPLTPTEIEELSQAADAFIASGAPLTGISKESFDLPTFSKTLSALRDDLLNAKGFALLKNFPTHLWSPEKTAVAYLGLGTHLGYPVSQNGRGHVLGHVKDVGDDPTQIHAVRIYRTAARQFFHADDSDIVGLLCLHRAQEGGESDIVSVHRVWNVLQEEHPDVAELLTKPIWYFDRKGEVSDGQEEYIRQPVVYLENGGRGRLYCKWDPYYVRSLGRFVERGLVPPLSDEQKRAMDILEEVCQREALHMILEVGDVQFVSNAHLLHARTAYKDFAPPAPRRHLLRLWLATPEGEGGWALPMPDSHEKKRGGVQVNDTPPKAPLDAE

SEQ ID NO: 2638 - DNA, 1437 bp, Myceliophthora thermophilia
atggctcagaagaaacagttgatcatcaatgccttcgtcgagtcgtgcagcgggcaccagtcccccgggctgtgggcacacccagacgatcagtcgtccaatttcaacgacgttaagcactgggtaaaactggcgcagttgttggaggccgcaaacttccacggcatcttcattgctgatgtcctgggcgcgtacgatgtatacaagggcccccgaaaccctgacccggcaatcgtctcgggcgcccagtggccggtaaacgagccgctggcagtcgtctccgccatggcggcggctaccgagagcataggcttcggcgtgacggttgcgacaacgtacgagcaaccataccatctcgcccgccgcttgagcacggtagaccacctctccggcgggagggttggctggaacgtcgtcacgggttatctcgactcggccgcgaggaatctgggctacacagagcagccggcacacgacgagagatacgccattgccgaagagtatatggaggtcatgtacaaattatgttctaacgagcccacttcggtgcccacctcttctaggcaatcatcctggcgagacgatgccgtcaagctggaccgcgagaagcgcatctacaccgaccccagcctggtccgcaccatcgaccatgtgggcaagtactacacggtgcctggcccgcacatctgccagccgtctccgcagcgcacccccctgatcctgcaagcaggaacctccaaggccggcaaggcgttcgcggccaagcacgccgaggccatctttgtcgccgggcacagcccgtcggtggtggccaagaacattgccgacatccgcgccgccgcgagggacgagttcggccgcgacccgagctccatcaagttcctcgccctcttctgccccatcatcggggccaccgaggaggaggcccgggccaagtacgaggaatatctgtcgtacggctccgaggacggcgcgctcgccctgtttggcggctggacgggtatcgaccttgcccagtacggcgacgacgaggagctgcgccacgtcgagagcaatgccatccggtctgccgtcgaggcctggagccgggctgtcccgggcatccccaagtggaccaagcagaccgtggccaaccacatcaaggttggcgggctgggcgcgaccgccgtcggcacggccgagcaggtggccgacgagatggagcggtgggtccgggaagccgacgtcgacggattcaatctcgcctacgcgctcatgccgcggacgtttgaggaagttatccagtacctccttcccgtcctgaagcagcgcggcctcttctgggacggatatacggtgaagggcgggacctatcgcgaaaacatctatggtaagcctggcctgacgaggccgccggctgaccaccctgcggcaaagtaccactggaaagcggaatga

SEQ ID NO: 2639 - protein, 478 aa, Myceliophthora thermophilia
MAQKKQLIINAFVESCSGHQSPGLWAHPDDQSSNFNDVKHWVKLAQLLEAANFHGIFIADVLGAYDVYKGPRNPDPAIVSGAQWPVNEPLAVVSAMAAATESIGFGVTVATTYEQPYHLARRLSTVDHLSGGRVGWNVVTGYLDSAARNLGYTEQPAHDERYAIAEEYMEVMYKLCSNEPTSVPTSSRQSSWRDDAVKLDREKRIYTDPSLVRTIDHVGKYYTVPGPHICQPSPQRTPLILQAGTSKAGKAFAAKHAEAIFVAGHSPSVVAKNIADIRAAARDEFGRDPSSIKFLALFCPIIGATEEEARAKYEEYLSYGSEDGALALFGGWTGIDLAQYGDDEELRHVESNAIRSAVEAWSRAVPGIPKWTKQTVANHIKVGGLGATAVGTAEQVADEMERWVREADVDGFNLAYALMPRTFEEVIQYLLPVLKQRGLFWDGYTVKGGTYRENIYGKPGLTRPPADHPAAKYHWKAE

SEQ ID NO: 2640 - DNA, 255 bp, Myceliophthora thermophilia
atggaggctgagaacagagtagcagggggggaaagctctgcggcggcgctagcgaaacgactgcctgccgaccgacaagttccggctgctcgttgtcgctggggctttccctctctgttttataatgttctagaagttcgcttcggtgctgtctcgcaacttcacgagccaccactcacgcgctcctgggtgcgagcgaccgagcagattgccgccgaccttgggacccacgaaccccatgatagtagtcgatag

SEQ ID NO: 2641 - protein, 84 aa, Myceliophthora thermophilia
MEAENRVAGGESSAAALAKRLPADRQVPAARCRWGFPSLFYNVLEVRFGAVSQLHEPPLTRSWVRATEQIAADLGTHEPHDSSR

SEQ ID NO: 2642 - DNA, 810 bp, Myceliophthora thermophilia
atgggactgaagaagcgcagacgtaccagcaacgccaaatccaagtcgttgccaaaggcaacaaaagagccggagcgtaaaggaacaaagacgccctcctcaacccgaacgcgcgcccgcgggcccaccatcagagcccccttcaccccttacccaccgtccaaggtctaccgcctcatcgagccgggccccgtcctgctcgtctcgacgggcccggcgccgtccccggccggcagccccagcggtgacgacagctccactccctcctcctcctcctcctcctcggcggcggcggtggcggcggcgtacgacatcaacctgatgacgatgggcttccacatgatgctgcagcacgggtcgccgcccctggtggcggcgtgcatcgggccctgggacgcgacctacgcgcggctgcgggcgacgcgggaatgcgtgctggcggtgccgagcgtcgagatggcgcagacggcggtggacattggcaactgcagcgcggccgaagacggcatgacaaacaagtttgagaggttcggcctcgccgcgctgcccgcggagagggtgggcgcgccgctggtgggcggggagcatgtgattgccaacgtggagtgcgtggtcgaggacgacgcgatggtggacaagtacggcctgtgggtgttgagggtcgtcaaggcgtgggccaatccggcgttgatgccgggccagggcgggaggatgttccatcacaggggggatggcacgttcagcgtggatggcgaggaggtgttggacctcagggagaggatggtcaagtggaaaatgttccaggattga

SEQ ID NO: 2643 - protein, 269 aa, Myceliophthora thermophilia
MGLKKRRRTSNAKSKSLPKATKEPERKGTKTPSSTRTRARGPTIRAPFTPYPPSKVYRLIEPGPVLLVSTGPAPSPAGSPSGDDSSTPSSSSSSSAAAVAAAYDINLMTMGFHMMLQHGSPPLVAACIGPWDATYARLRATRECVLAVPSVEMAQTAVDIGNCSAAEDGMTNKFERFGLAALPAERVGAPLVGGEHVIANVECVVEDDAMVDKYGLWVLRVVKAWANPALMPGQGGRMFHHRGDGTFSVDGEEVLDLRERMVKWKMFQD

SEQ ID NO: 2644 - DNA, 1602 bp, Myceliophthora thermophilia
atgggttccctaggacacaccgtcccccctttccccgtcttggaagacacccgcccggacgacaggtccctcccggccttcatggtgtccaccacccggggttttctccctcgcatggacccgatcgagaccctgccgcccgactttgacgccctcgagtccatcctccagcggatgcccgtcaagacgctgtcgggcgagcccggtctgctggcccacggcaagctgggcgagaccgtcgaccgggagctgcctgacttgaccgacgccatcgacaagtataaggacgacctgcccctgatgaacgccctgtaccgcgactactccttcctggcctccgcctacctgctcgagccctgccacgagcgcttcgtcaggggagagggctacggcctggcgcgcgacgtgctgccggccaacattgcgcggcccatcgccaagtgtgctgctctctgcaacttcaaacccttcatggaatacgccggctcctacgccctcttcaactaccgcctcgtcgacccttccaagggtctcgcctccgacaacctccgcctgatccgcgccttcgagcacggcctggacccttcctcttccgaggccggcttcgtgctcgtccacatcgagatggtcaagcactcgggcccgctggtcgccggcgccgtcgcctgcatcgacgcctgctcctccccgtcctcctcctcctcctcatcccaccgccgctccagggcggagctcaacgaggggctgcgcaccgtcctagccgcgctgcgccggatcaacgccaccatggagaccatgtggtcgcgctcgcgcccggccgactacacctcgttccgcaccttcatcttcggcatcgcctcgcagtccatgttcccccgcggcgtcctctacgagggtgtcgagctgtccgacgacgacggcgactactactacaaggacggcggggaggaggagcagcagcagcagcagcagcagcagcagcagcagcagcagcagcagcaggacggcaggcgggagggggggcggcgcgtcgccttccgcggggagagcggcgccaacgactccatgatccccctcgtcgacaacctgctgtccattcccatgcccgacaccccgctgaccgagatcctccgggacttccggtcctaccgccccggcgagcaccgccgcttcctcgagtgggtcgcccgggccgccgaggagggcgggctcaaggcgtgggccctggggctggatggcggagaggaggctgaaggggaggtggaggacgagaagagggagacgcgggcgctgtggatccaggtgctcaaccaggtgcgggatttccggtggcggcactggtgcttcgcgagggagtacatcatcaagaggacgagccacccgaccgcgacggggggcagccccatcgtcacctggctgccgaaccagctggccgccgtcatggacgagatggtgaggttgtatgagcgggtgggtggcgcgggactgggcgccgaggtcgaggacatcatggaactggtcggcaggcagcgcgaaacgttgcgcaaggaggtgcgcaagttttgcgaggagcgcggcgtcaaggagtttgtccctgcgtag

SEQ ID NO: 2645 - protein, 533 aa, Myceliophthora thermophilia
MGSLGHTVPPFPVLEDTRPDDRSLPAFMVSTTRGFLPRMDPIETLPPDFDALESILQRMPVKTLSGEPGLLAHGKLGETVDRELPDLTDAIDKYKDDLPLMNALYRDYSFLASAYLLEPCHERFVRGEGYGLARDVLPANIARPIAKCAALCNFKPFMEYAGSYALFNYRLVDPSKGLASDNLRLIRAFEHGLDPSSSEAGFVLVHIEMVKHSGPLVAGAVACIDACSSPSSSSSSSHRRSRAELNEGLRTVLAALRRINATMETMWSRSRPADYTSFRTFIFGIASQSMFPRGVLYEGVELSDDDGDYYYKDGGEEEQQQQQQQQQQQQQQQQDGRREGGRRVAFRGESGANDSMIPLVDNLLSIPMPDTPLTEILRDFRSYRPGEHRRFLEWVARAAEEGGLKAWALGLDGGEEAEGEVEDEKRETRALWIQVLNQVRDFRWRHWCFAREYIIKRTSHPTATGGSPIVTWLPNQLAAVMDEMVRLYERVGGAGLGAEVEDIMELVGRQRETLRKEVRKFCEERGVKEFVPA

SEQ ID NO: 2646 - DNA, 942 bp, Myceliophthora thermophilia
atggctgcggttgatattcgcccagctcagcgggacgggccggcgctcgaggccatcacggacgccgtggccatggtcaacatcctccgagggatggcgacctcagagacgacggcattcgacgccgagtcgcgcttcgacagcgacaaggacaagtcggcattccggaagtacgacgaagcctgcgaccgggtcaagggcttctacgccgagcagcacgccaagcagacggtggcccacaacctggcagcccgccagcgcttctactcgcccacgcgcaagaggcccgagatgacggtctgggaggccatcgagaagctcaacgcactgatcgacaacagcgacccggacacggagctcagccagatccaccacctgctccagagcgccgaggcgattcggcgcgacggcaagccccggtggatgcagctggtcggcctgatccacgacctgggcaagctgatgctcttcttcgatggctgcgccgagggccagtgggaagtcgtcggcgacaccttccccgtcggctgccagtttgacgagcggtgcatctacccggaaacattcaaggccaaccccgactcgagccacgaggtctacggcacacgctatggcatctatcagccgggctgcggcatcaacaatctcatgatgtgctggggccacgacgagtacctgtacctggtaatcaaggatcagagcaccctaccccccgaggctctcgccatggtgcgcttccactccttctacccctggcacagggagggagcctacatggacttcatggctgagggcgacgaagcgctgctgcatgccgttcgcgctttcaatccctacgacctctacagcaagtccgacgaagtaccaaaagttgaggagttgaagccatactatcttgagcttatcgatgaattcttccctcagaaggttattaagtggtga

SEQ ID NO: 2647 - protein, 313 aa, Myceliophthora thermophilia
MAAVDIRPAQRDGPALEAITDAVAMVNILRGMATSETTAFDAESRFDSDKDKSAFRKYDEACDRVKGFYAEQHAKQTVAHNLAARQRFYSPTRKRPEMTVWEAIEKLNALIDNSDPDTELSQIHHLLQSAEAIRRDGKPRWMQLVGLIHDLGKLMLFFDGCAEGQWEVVGDTFPVGCQFDERCIYPETFKANPDSSHEVYGTRYGIYQPGCGINNLMMCWGHDEYLYLVIKDQSTLPPEALAMVRFHSFYPWHREGAYMDFMAEGDEALLHAVRAFNPYDLYSKSDEVPKVEELKPYYLELIDEFFPQKVIKW

SEQ ID NO: 2648 - DNA, 252 bp, Myceliophthora thermophilia
atgatcatgctacgatttgggtatgtgaagactgaactcgatgctttaaacattgctccaatgtacggaggacatcgcagcccgttccttgggtggaaccaaatccagaacgccgtacccgaccgcatttttgctcagatacctaataatttcctacacatcttgactcgctgcttgcttagcacccacttcgaagcagcacttgctcccaagctaccaaatcgccttgggagcatgaaccaccagcaataa

SEQ ID NO: 2649 - protein, 83 aa, Myceliophthora thermophilia
MIMLRFGYVKTELDALNIAPMYGGHRSPFLGWNQIQNAVPDRIFAQIPNNFLHILTRCLLSTHFEAALAPKLPNRLGSMNHQQ

SEQ ID NO: 2650 - DNA, 177 bp, Myceliophthora thermophilia
atgccaaccgccacggtttccgtgttcgaaaagacagatgctgtggggggcacctgggctaagaacacatacccaaggctcagctgtgacataccctctcagctctactcatattcgtttgcgccgaaccctgactggtccgaggtgtacgcctcccagcccgagatcctcgcctaa

SEQ ID NO: 2651 - protein, 58 aa, Myceliophthora thermophilia
MPTATVSVFEKTDAVGGTWAKNTYPRLSCDIPSQLYSYSFAPNPDWSEVYASQPEILA

SEQ ID NO: 2652 - DNA, 246 bp, Myceliophthora thermophilia
atggctacctctgcattcggcgctcgtgaacatcgagtgcgctcggtcgagtatatcctgcgagtgattggccgcctcgacaagcagaatacttccaaaacggaacgagtcaagattcaagtcacgccccgcgcgcatgcgtccttcaacaattggatccagaaaaaattgcgcggcctcgtctacacaccacgcgtgcggagctggtatatggacgaccgctcgggaaggaatacactcagctga

SEQ ID NO: 2653 - protein, 81 aa, Myceliophthora thermophilia
MATSAFGAREHRVRSVEYILRVIGRLDKQNTSKTERVKIQVTPRAHASFNNWIQKKLRGLVYTPRVRSWYMDDRSGRNTLS

SEQ ID NO: 2654 - DNA, 552 bp, Myceliophthora thermophilia
atgccaccatgtcaccatcgacgtggaccagctgggcagaaagccgttcctcctaggcgcctgcgtccaagaggtgcagcggctctacaacaagccgtgcggctaccggtacgtgctggaggacacgctgctgcgagacgccgatggacgcgagtacctgtgagaaagggggctaatcccgctcagtggctccacggggtgccgcacttgaacgaggatgtctggggcccggatgccgaagccttccgtcccgagcgtttcatcgacaacacgccgccgggggaggggaagaggcggcgcggttcgctgatacccttcggtggggggacgcacctctgtcccggcaggaggttcgccgtgaccgagatcaccggcctggtaggggccgtggcgctgctgttcgatgtcgacgacgtcacggtgcccacgatgcgagcgggatttgctggttgcgcgatggctcatccggactggaaatcgagtgatcctcctagggcggtgttccggcggagaaaagggtgggagaatgtccagctgaggtttactgtttga

SEQ ID NO: 2655 - protein, 183 aa, Myceliophthora thermophilia
MPPCHHRRGPAGQKAVPPRRLRPRGAAALQQAVRLPVRAGGHAAARRRWTRVPVRKGANPAQWLHGVPHLNEDVWGPDAEAFRPERFIDNTPPGEGKRRRGSLIPFGGGTHLCPGRRFAVTEITGLVGAVALLFDVDDVTVPTMRAGFAGCAMAHPDWKSSDPPRAVFRRRKGWENVQLRFTV

SEQ ID NO: 2656 - DNA, 318 bp, Myceliophthora thermophilia
atggctgacgagctctcccttgcaatgcaacccgatgttctacactactccgtatcccaagccgcagtcgggcagtcgctcggtctcattcttgagagcggggcagacagggcgtcgggcgatttgcttgaagtggaactgccgactaccgattttagcctggctcgtgcggctgcagagtgcgaaacaagcgccttcgtgctgcccgcgatggagctcaggggctcggggaaagagatgaaactcgaaggccttgtcacagctttttccagaacaacggttcgcaccttgaacaatgggaacggcttccaccactga

SEQ ID NO: 2657 - protein, 105 aa, Myceliophthora thermophilia
MADELSLAMQPDVLHYSVSQAAVGQSLGLILESGADRASGDLLEVELPTTDFSLARAAAECETSAFVLPAMELRGSGKEMKLEGLVTAFSRTTVRTLNNGNGFHH

SEQ ID NO: 2658 - DNA, 561 bp, Myceliophthora thermophilia
atgaaggcctactactacgacaacctcccgggcgaccaacggctgccgcacgaggacaccagcgccgggccgctctcccccgccgacctcgagacggtcggggtgcgctactaccacatgcccgagctggcgggcgtggacgcgctggcggccgagcgcgggtacaagaaccgggacgagatcacggtgtcgccggagaagatgggcgacgcgtacgagtccaaggtcaggatgttcttcgacgagcacctgcacgaggacgaggagatccgctacgtccgcgacgggcgcgggtactttgacgtgcgcgacaaggcggaccgctgggacgatctgattattctgccgccgggcatctaccatcggttcaccaccgatgagagcaacgtaagttccgaggagcgtagtggctttggaaaacggttgggggctgacatggtccagtacatccacgcgatgcgcctgttcaaggaggagcccaagtggacgccgttgaaccggtccgagaccgtagatcagaacccgtaccgcaaggagtatgtttcgcaatacctggcgtag

SEQ ID NO: 2659 - protein, 186 aa, Myceliophthora thermophilia
MKAYYYDNLPGDQRLPHEDTSAGPLSPADLETVGVRYYHMPELAGVDALAAERGYKNRDEITVSPEKMGDAYESKVRMFFDEHLHEDEEIRYVRDGRGYFDVRDKADRWDDLIILPPGIYHRFTTDESNVSSEERSGFGKRLGADMVQYIHAMRLFKEEPKWTPLNRSETVDQNPYRKEYVSQYLA

SEQ ID NO: 2660 - DNA, 1767 bp, Myceliophthora thermophilia
atggcggatgaagacttcctgcgctacttgcgggagataagcggcgaggatgcggccgtctgggacggcttcgacccctcttcgtggcgacatgctctcgaggagtccgcagtcgagggacttgaaggagccgaatcggcggacggcgcgagctctcctcttcaagatcttgcatactcctcggatgactcggccgagatgattctaaattaccacaagctgacggccgctgagagggcccgccaaaatcacggcgtctccaagctcagcaaggcgcgccagttagcgtccgaggaggtggcgtttccgcacaagctcgccgagttagaggccgtcaagtgggaggaaacgggccttggcttgggtggccggtccgccgacggagagctcttcgtaccgtggccgctcgttgagagttaccctgacatgtttgtcgggaaggccaacagtgttcgtgctgcgcccctgtttacgcttgacgctctgcacgagaagcgcgtctgggacctctactacatacattgccctgaggatatgcagatggaccctgttattttcgtcccaacttatcagtttcagcatctcctggacgtgatcaacgccaagctggagacccgattcacgataccgcccggcagcaacaaagagagattcatgatgtctttcggcaccgaaaagagccctcttccgcgctttctgggtcgctcggacagcgcccaaacgttcaaggctctgtgtggggcgatcccggaaccccatccagatgacgatttgagcaaggtacctcagctcggcgttgaggagtttaggaagctcctgaaacggacccgcgcggacagaaagaaggccaagaggtccgacaggaaccgcttaaagcgtatcgaagcccacaaggcatgggggcggtccatcaagcgagttcagcgctatcttggtctgcgagccagggcgggtgacggcatggccgccagactcaccgagtctgatttcagcaggcttatcattaacgagccagaacagttcgtgctgttcgtggccatagacatcgaggcttgggagcaagatcagaacctcatcaccgaaattggcatcgccgtgctcgacaccaccgaggtcaaggacattgcacccggcgaaggctgccagaattggtttccgctcatcgaagctcgccacatccgcgtcaaggagaattcatgggccaccaactcgcgcttcgttcgtggctgtgccgaccactttagcttcggaacaaccgagtttgtccgggaatctgatattgcgcagctcttaaaaggcgtaatcgacgacgcaaccttcgtcgaccgggtcgacgggacgaagaagccccgacccgttgtcctcgtcttccacgagtcgtcgtccgatatcaaatacctcaaatccgtgtcgtactacgtcgaggccgcgcgaaacgtcatcgaggtgatcgacacgcgcacgatgcaccagcacctggtccgcagcaacgactcggccagcctggcgaatgtgctgggccacctgggcatcccgtgccagtacctgcacaacgcgggcaacgatgctgtgtacactctgcaggcgatgatcggcttggcggccaagaagctagaggccagtcttcagaggcggagggacaagacagagggacacattccgtatgccgagttcaagcagaaagagggctggaccagcggcgaggacaccgatggcggctatgcggtcggcttgctcgatgcccagctaggctggggaagtgagtga

SEQ ID NO: 2661 - protein, 588 aa, Myceliophthora thermophilia
MADEDFLRYLREISGEDAAVWDGFDPSSWRHALEESAVEGLEGAESADGASSPLQDLAYSSDDSAEMILNYHKLTAAERARQNHGVSKLSKARQLASEEVAFPHKLAELEAVKWEETGLGLGGRSADGELFVPWPLVESYPDMFVGKANSVRAAPLFTLDALHEKRVWDLYYIHCPEDMQMDPVIFVPTYQFQHLLDVINAKLETRFTIPPGSNKERFMMSFGTEKSPLPRFLGRSDSAQTFKALCGAIPEPHPDDDLSKVPQLGVEEFRKLLKRTRADRKKAKRSDRNRLKRIEAHKAWGRSIKRVQRYLGLRARAGDGMAARLTESDFSRLIINEPEQFVLFVAIDIEAWEQDQNLITEIGIAVLDTTEVKDIAPGEGCQNWFPLIEARHIRVKENSWATNSRFVRGCADHFSFGTTEFVRESDIAQLLKGVIDDATFVDRVDGTKKPRPVVLVFHESSSDIKYLKSVSYYVEAARNVIEVIDTRTMHQHLVRSNDSASLANVLGHLGIPCQYLHNAGNDAVYTLQAMIGLAAKKLEASLQRRRDKTEGHIPYAEFKQKEGWTSGEDTDGGYAVGLLDAQLGWGSE

SEQ ID NO: 2662 - DNA, 942 bp, Myceliophthora thermophilia
atgggccagatgatacccgaccaaactccaggagcggctatggcgttcgagaccaacagtttgccaaagaaaccgccatatggcgggacgttcacagacagggtcatcgctgccacaggcccgaacgccaatcggcgcctggccgaagtgatgcccagccttgtgcgccacctccacgccttcgcgcgtgaggttaacctgactgttgctgagtggatggccgccgtcgatttcatcaacgaatgtggcaagatgtcggacgaccggcgaaacgagacccagctcttgtgtgatattgtgggtttggaaagcctggttgatgagataacgtccaagatgttggggacttccaactccgaaaccccctctgccattctgggcccgttctaccggcacgatgcgccattgttgccaaacggtagctccattgttcgaaatctgagtcctgcagtgtcctggtacgaccaagcagtcgccgactccgctctgataacgggccgcgtcttggcaagctcgggcgcgccgattaagggggcgatcgtggatgtgtggcacacggcgcccaatgggttgtatgagcagcaggatgagtcgcagccggatatgaactgtcgaggccggttccagaccgacgctgagggtcgcttcgctttctatgcactgcggccggtcgcgtatcctattcctaacgacggaccggcggggaaactgctgaacttgctggatcggcatccttatcggccgggtcacatccacgtcattgtttccgcgccaggcttccgagctttgacgacccagctgtatgacgatcgggacgaatacatctccaaggatgccgtgtttgctgtcaaggatgaactggtggtcaaatttgtaccacgcgagggagaccccaacgcgcggtggtcactcaagtacgacttcgtgctcggtcgtggttga

SEQ ID NO: 2663 - protein, 313 aa, Myceliophthora thermophilia
MGQMIPDQTPGAAMAFETNSLPKKPPYGGTFTDRVIAATGPNANRRLAEVMPSLVRHLHAFAREVNLTVAEWMAAVDFINECGKMSDDRRNETQLLCDIVGLESLVDEITSKMLGTSNSETPSAILGPFYRHDAPLLPNGSSIVRNLSPAVSWYDQAVADSALITGRVLASSGAPIKGAIVDVWHTAPNGLYEQQDESQPDMNCRGRFQTDAEGRFAFYALRPVAYPIPNDGPAGKLLNLLDRHPYRPGHIHVIVSAPGFRALTTQLYDDRDEYISKDAVFAVKDELVVKFVPREGDPNARWSLKYDFVLGRG

SEQ ID NO: 2664 - DNA, 306 bp, Myceliophthora thermophilia
atggaacgcctgaagggtgctctgtcccctgagggcagagtgttcgggggctttcccactcttctaaagatcgccccttatcgaaggtccgcgagaagacacccggcacacttgctgctcctccggagtgagagacattgctggggtaacgtctacacgcaatcgcgattggttgcgctaggatccctcgctcaccccgatatcgagcaggcgtcgatctctatggcaatcgccaaccgcgccatgaacccccctcgtcaagtggtgggagacaggctagcttgctaccttttagagaacgtttaa

SEQ ID NO: 2665 - protein, 101 aa, Myceliophthora thermophilia
MERLKGALSPEGRVFGGFPTLLKIAPYRRSARRHPAHLLLLRSERHCWGNVYTQSRLVALGSLAHPDIEQASISMAIANRAMNPPRQVVGDRLACYLLENV

SEQ ID NO: 2666 - DNA, 1050 bp, Myceliophthora thermophilia
atggagaaagcggcggtccaacaggacgggcttctcatcccgctcatcgacttctccaaattcctcaacggctccccctcccaaaaggccgaaacagccaaggccgtcctcgccggcttccagacagcggggttcatttacctgtccaacattccgatccccgcttccaccgtcactcaggccttcgatacgtcggccaagttcttccgccttcccgactcggtcaaggagtcgctctcgtggaccacgcccgaagccaaccgcggctactccgcccccgggcgcgagaaagttacgcagctgaaaagcgcggccgacgtttcggccctgcgcacctccattcccgacatcaaggaaacctttgagattggccgggacgacgaaccggcctacccgaaccgctggccgcccgagtccgaccccgagtccggttccgggcccggccacggcgagattaccggcttcaggcagatcatgacctccttcttcgacgccctctcggagctccacacctcagtcatgcgggccatcgccctgggcatggacctgcctgagacgttctttgaccgcttcgtctgcgaccgcgacaacaccctccgcctgctgcactacccggccgtgcgcaaggagctgttccagatcagcccgggccaggtcagggctggtgaacattcagactacggaacgctcacgtttctctttcaggacgacaggggcgggctgcaggtgcagagccccagcggcaagtttatcgacgccacgccgatggagggaacctgcgtcgtgaacgcgggggacctgctggcgcggtggagcaacgacacgatcaagagcacggtgcatcgggtcgttgagccgcctaggaaggaaggggaagcacagaatggggaggtgtacccggacaggtatagcatcgggttcttttgcaaccccaacttcaaggactacatcgaggctatcccaggaacttatgtcaccgaagccgacaaaaagtatgagggcatcaccagtggggagtatttggtacagagactgaaggccacgtattga

SEQ ID NO: 2667 - protein, 349 aa, Myceliophthora thermophilia
MEKAAVQQDGLLIPLIDFSKFLNGSPSQKAETAKAVLAGFQTAGFIYLSNIPIPASTVTQAFDTSAKFFRLPDSVKESLSWTTPEANRGYSAPGREKVTQLKSAADVSALRTSIPDIKETFEIGRDDEPAYPNRWPPESDPESGSGPGHGEITGFRQIMTSFFDALSELHTSVMRAIALGMDLPETFFDRFVCDRDNTLRLLHYPAVRKELFQISPGQVRAGEHSDYGTLTFLFQDDRGGLQVQSPSGKFIDATPMEGTCVVNAGDLLARWSNDTIKSTVHRVVEPPRKEGEAQNGEVYPDRYSIGFFCNPNFKDYIEAIPGTYVTEADKKYEGITSGEYLVQRLKATY

SEQ ID NO: 2668 - DNA, 1008 bp, Myceliophthora thermophilia
atgcctgtcccactccttgacgcatcccaagttcgggctggccctgaggcgcaaaagagcttcctcagggacctgatccagagtttccaggactatggattcgtgcggctcacgaaccatggcattcctccggcgagggtgaaggaaatgtttgagctggcgggtgaactgttcagtctcgacaccgaaactaaactcggattcgccaacattgccgatggcagcccccagcgcgggtatagcgctattggcgttgagaagaccgcttccttgcacggaaagctgatcggccgtaacgtggatgagaggctgaccgatgctagagagcactttgactgcggctccccgcttgatgaggagtacaggaaccggtggccgcagtccgaatctcttggctatttccggaaggaaatggaagcgttctacttcgagatggaacaggtaactgccgagctgcttggttggctggaagagggcctgggcgtgccccggggcacgttcaacaatctcgtgacgcacgagaagaacgccagcgagctccgtctgaaccactacccccccgtcccggcctcgcagctcctcagcggccaggtctcgcgcatctggcctcacttcgacctgggcgtcatcaccctgctcttcacctccggggtgggcgggctcgaagtggaggacaggaaggcgcccggaccgcagaccttcatcccggtcgaggccgagacgcaggacgagctcatcgtgaacatcagcgagaccctccagcgctggaccgacgacaagctcccggcgggcctgcaccgcgtctcgactccgaaggagctcgaggagaggatcaagaccgacagcagcgtcgagatcccgcggcgctacagcatcgcgtatctgtgcaaggctgaccgccacgcctccgtgggcacccttccggccttccagaccgaggagaagcctcactaccaggagatgacggcggccgagtatcaccgtcagcggctcttgacggcctactaa

SEQ ID NO: 2669 - protein, 335 aa, Myceliophthora thermophilia
MPVPLLDASQVRAGPEAQKSFLRDLIQSFQDYGFVRLTNHGIPPARVKEMFELAGELFSLDTETKLGFANIADGSPQRGYSAIGVEKTASLHGKLIGRNVDERLTDAREHFDCGSPLDEEYRNRWPQSESLGYFRKEMEAFYFEMEQVTAELLGWLEEGLGVPRGTFNNLVTHEKNASELRLNHYPPVPASQLLSGQVSRIWPHFDLGVITLLFTSGVGGLEVEDRKAPGPQTFIPVEAETQDELIVNISETLQRWTDDKLPAGLHRVSTPKELEERIKTDSSVEIPRRYSIAYLCKADRHASVGTLPAFQTEEKPHYQEMTAAEYHRQRLLTAY

SEQ ID NO: 2670 - DNA, 954 bp, Myceliophthora thermophilia
atgcatcccaagagaacctacttcctcgctccaacgcgcgatcaggctccgacggggcccatcgcgctcgggaacctgatcaggtcccctcgcgagcccgacttcccgctcaacgaccccaactctccgaccgtccggcgcctccagtccgccgcgaccgtcgtcccggaagcggacgcgacccggtcggcccacgccgcgcgctccctccagccgaccgtcttcctctccttcctctcgggcctcctcggccagaaccccgtcgagctcagcgtggcgtactcgacggcgggcggggccgcccccccgggagacccgcacgatccacccgtccgccggccgacgtcgccgccctcttcgccgagcccgcccgtccaggccgccctccgcgacagccgcttcaccgccaacctgtacctcgtcacggggctgcagatcgccacccacggcgccgagtacctggtgtcgggcgcgcgcgcgcgcggggtccgcctgcacttcctcacggatctgatcaccaccgctgccggcggggtaccggtcggtgccggggtgggcgccgaggcgacggaggcgatggagggccggtcggcgggtaggatcgaggggccgttcgtgctggcctatagcctgcgcgaggtgctgtacaggaggaagaaggtcacggggcagaggcggcccaggatcgaaggggatttgtatgccgatggggagaggaaggtcaggattattaagagggaggaggaggaggaggaggaggaggaggaggaggaggggcaggttgaatcattcgaagccgagctggcggggttgaaggatgaggatcccgagttgcccgagtactgggatttaatagatgtcgagactggggttgatcttgacggggccgaatgtcagattgttcgcgttgccgcggacaagcatgacggcgatgatgatctggatgaagactga

SEQ ID NO: 2671 - protein, 317 aa, Myceliophthora thermophilia
MHPKRTYFLAPTRDQAPTGPIALGNLIRSPREPDFPLNDPNSPTVRRLQSAATVVPEADATRSAHAARSLQPTVFLSFLSGLLGQNPVELSVAYSTAGGAAPPGDPHDPPVRRPTSPPSSPSPPVQAALRDSRFTANLYLVTGLQIATHGAEYLVSGARARGVRLHFLTDLITTAAGGVPVGAGVGAEATEAMEGRSAGRIEGPFVLAYSLREVLYRRKKVTGQRRPRIEGDLYADGERKVRIIKREEEEEEEEEEEEGQVESFEAELAGLKDEDPELPEYWDLIDVETGVDLDGAECQIVRVAADKHDGDDDLDED

SEQ ID NO: 2672 - DNA, 369 bp, Myceliophthora thermophilia
atggtctatcgccaccctccttttaacggtctagggtctaacacgtacattcaggacgcctacaatctggcgtggaagatcttgtacgtcatgtctagacgcgtaggccgcggcctcctcaaaacatatagcgttaagcggcagccggtcggcgtcgacattatcacgcgtacaaatcaggggctccgggatcatcacctgtggatgagggccatcggcatgaccgagccagacgtggagaagcgaaaagcggtgctcgccgagtttaaggacaagggcgaggttaggcggaggaggcggcagcaattccatgagggcatcgagaatacgggcaccgaattccacggactggggattgagatgaactag

SEQ ID NO: 2673 - protein, 122 aa, Myceliophthora thermophilia
MVYRHPPFNGLGSNTYIQDAYNLAWKILYVMSRRVGRGLLKTYSVKRQPVGVDIITRTNQGLRDHHLWMRAIGMTEPDVEKRKAVLAEFKDKGEVRRRRRQQFHEGIENTGTEFHGLGIEMN

SEQ ID NO: 2674 - DNA, 1161 bp, Myceliophthora thermophilia
atggcaccgtcggctatcattgagtccattgtggacacagctgaacccaggaaggataacatcgagctcccggagccggctcgtcaacggcttacaagggccgggatcgacctatccaacggttatccataccggccggctgtgcctctgtacttgcaggacgtgtacaagatcagaaatgaggagcgtccgtacgaggacgcaggagcgagagccgacaagtctaagaagcacttgttcgcggccgcgaccaaggtcacggacttgaccacccacattgggacggaaatcgagggcgtgcagcttaaggacctcacccccgagcaacgagacgagttagcactgctgattgccgagaggagtgtcgtcttcctccggaaccaggacctcaccccccagcaacagaaagagctcggcgagtattatgggcaggtcgaggtgcatcctcaaacgccccaggtccccggagtccccggtgtgaccgtgatctggccagccctcttcgcgcaggagaggccggccaacttccgcaacccaggcggcgcatcgtcgtggcataccgatctggtacacgaacgacagcccgccggaatcacccacctccacaatgacacggtaccgcctgtcggcggcgacacgctgtgggcgtcggggtatgccgcttacgagaagctctcgcccgaattccgcaagttcatcgatgggaagaaggccgtctaccgctccgcccaccagtacctggatcgcgagaacccgacggctgggccaaaatatattgagcgcattcacccgctcgtccgtgtccacccggcaaccggttggaaggccctctgggtcaaccggtccatgacggtccggatcgtcgggctggacaaagccgagagcgacctgatcctgaactacctatacgacgtctatgagaagaacgtcgacatacaagtgcgattcaagtggacccccgggacgagcgcactgtgggataacagaatcaccattcacaacgcaagctgggattatggtggaaaacatcctcgccatggcactcgtgtaacctctcttgccgaggtcccatattttgatcccaacgccccgacacgtcgtgaagctttgggcttgctagatgaaagtgagaaggaggccctggaatcgagtaagtactag

SEQ ID NO: 2675 - protein, 386 aa, Myceliophthora thermophilia
MAPSAIIESIVDTAEPRKDNIELPEPARQRLTRAGIDLSNGYPYRPAVPLYLQDVYKIRNEERPYEDAGARADKSKKHLFAAATKVTDLTTHIGTEIEGVQLKDLTPEQRDELALLIAERSVVFLRNQDLTPQQQKELGEYYGQVEVHPQTPQVPGVPGVTVIWPALFAQERPANFRNPGGASSWHTDLVHERQPAGITHLHNDTVPPVGGDTLWASGYAAYEKLSPEFRKFIDGKKAVYRSAHQYLDRENPTAGPKYIERIHPLVRVHPATGWKALWVNRSMTVRIVGLDKAESDLILNYLYDVYEKNVDIQVRFKWTPGTSALWDNRITIHNASWDYGGKHPRHGTRVTSLAEVPYFDPNAPTRREALGLLDESEKEALESSKY

SEQ ID NO: 2676 - DNA, 1584 bp, Myceliophthora thermophilia
atgtcctcgccggcatcagaagacaaacgggaagtttttggcctcgggcgaaaggtggccgtcgtcggcgccggaatcagcggcgtctgcgccgcggcgcacctgatcaagcaggggctccaggtgacggtctttgagcgctcaggcattgcaggcggcgtctggcactatgacaggcgtgtggcggaagatcctccatatcccaacaatgcgccctctagaggggattacctcctctccaagcccggggagtttgccttcgcaacacctcccccggagcatgatacggctgctggcgacacggcggatctccgaagcaggagcctgcttccagccgacctcgaggctcacttctcaccgcccggcccctgttacgcgggtctgaagaacaacgtgcccacacacctcatggccagttcgctggacccatggccggaagggaccgagccattcgtcagccaagacaaggttgaacagtacatccaggggcttgcaagcgaccacggtgtgaccgctgtcacctcgtttcacacgagggtcgacgagattcggaagacgccggacgggaccaagtgggagatacgctccgtggcgctggaagcgtgggatacggggccccggcttaacgagcgcacctcctacttcgacctggtcgtcgtcgcgacggggcactacaacatgccacggatccccgacacggaagggctcaaggagtggaaggagaggtaccctagccggatcatccactcgaaacaatatcggtctcccgagccgttccgggggcggaacatactcgtcattggcgccggggtctctgccctcgacatatgccgcgagaccgacggcgtcaccgccaagacgtaccaaagcgtgcgcggcggccggttcgaccttccgcaatctctcctaccagagtccacggtccgagttccggaagtcgccagatacgagctgcgcgcggacagcggtgggcggctcgatgatgaggcgccgattcccggctccgtcgtgctaaaagacggacaggtgctcgagggcatccatcacgtggtggtggcgacgggatatatcacctcgtatccctttctcccccacctgcactcggatgataccccaaacgtgcaggccggcgaggacatcgtggtggccgccgagggcgacatggcacacaacctgcaccgcgacatcttctacatcaacgacccgacactcgcctttgtcggcgtgccctaccacgtcgcgacgttttctctcttcgacttccaggcccaggcggtggctcgggcttttgcgggcaaagcccgcctgccgagccgagaagagatgcggagggagtaccagaagcggatggaggagaaggggctcggccggggattccattcgctgcacgtccgcggccatgagctcgagtacgtgcaaggacttgtggattgggtcaacagctccagcacggtgccgggggagccccaaatgaagggccactcggaggaatggaggcgggcttacaacgagatgaaggacaaaacaatgtcgctcttcaagtggtccgagaatgccggtgaagaggggccaaaagaacaatga

SEQ ID NO: 2677 - protein, 527 aa, Myceliophthora thermophilia
MSSPASEDKREVFGLGRKVAVVGAGISGVCAAAHLIKQGLQVTVFERSGIAGGVWHYDRRVAEDPPYPNNAPSRGDYLLSKPGEFAFATPPPEHDTAAGDTADLRSRSLLPADLEAHFSPPGPCYAGLKNNVPTHLMASSLDPWPEGTEPFVSQDKVEQYIQGLASDHGVTAVTSFHTRVDEIRKTPDGTKWEIRSVALEAWDTGPRLNERTSYFDLVVVATGHYNMPRIPDTEGLKEWKERYPSRIIHSKQYRSPEPFRGRNILVIGAGVSALDICRETDGVTAKTYQSVRGGRFDLPQSLLPESTVRVPEVARYELRADSGGRLDDEAPIPGSVVLKDGQVLEGIHHVVVATGYITSYPFLPHLHSDDTPNVQAGEDIVVAAEGDMAHNLHRDIFYINDPTLAFVGVPYHVATFSLFDFQAQAVARAFAGKARLPSREEMRREYQKRMEEKGLGRGFHSLHVRGHELEYVQGLVDWVNSSSTVPGEPQMKGHSEEWRRAYNEMKDKTMSLFKWSENAGEEGPKEQ

SEQ ID NO: 2678 - DNA, 1587 bp, Myceliophthora thermophilia
atgtctccctcagaaacactcacctttaataatagccgaggaggcagcacagaagtgctgccgatgccactgaacgagtatgcagtcacatcaaacggctttctaccagaggagccgcccctcaggaaactcccaaacccctactacggcccctgggagttgctggtcgagtctctcccaaacgcattggcaagcaggacgctgcgagaccaagtccaccagctccccatcctttcgacagaccgcctcaccgcggaacccgaatggcgccgagcctgcgtcatcctaggcttcctcgcgcacgcctatatctggggcggtgacactgccgctgagaccctaccgccccagataactctgcccttcctcgccgtcacgacccacctcggcactcctcccgtggcgaccttcgcctctcttagcctctggaactttgagatcgcctccaccagcaccaacaccgccagcacccccagcaacacaaccccctccacttctgttccggaccgcgacctggatctaacggacccggacgcgctccgcgccctgcacaccttcaccggcacggcggacgagtcgtggttctacatggtctcggtcgccatggaggcggagggggcgcgcctgcttcccgtcctcctgcgcgcgatgcacgccctgttcgcggcccgagaccaagatgttccccccgccaccaccaccgccgccgccgccgccgccgtggcgtcgcgggcgctgggcgagacgacggcgtgcatcgggcggctgggccgcctgctggaccgcatggacgagcggtgccggccggacgtcttctaccaccagatccggccgttcctggcggggagcaagaacatggaggccgcaggcctgccgaggggcgtgttctacgccgaatcggcggagggcgaaggcgaggcagagggaaaggccaacgggaagggcgagtggcggcagctgagggggggcagcaacgggcagagctcgctggtgcagttccttgatatcgcgctgggggtggaacatatcgcaatgggcagcagcaacagtagcagcggcggcggcggcagcagcagtaatagtattaattcggacccgaaggagggaggtggaggtcagggagggaagccagccgtcggcttccacgaggaagtgagggggtacatgccggagccacatcgcaggtttctcgaggacgtggcggccaggtaccccgggggcctgaggaagggagtggaagagttgctggcggcgggcggagagggaaagggagggctcggtccggaactgacagaggtgcgggaagcgtttcagacggcgacgagggcgttggccgagttcaggaataagcatctgcagatggtgacgcggtacatcatcatcccatcgcgccagcaaaacacgagacgggaagtcaacctggcaacggcgtcgtcgaagctgcgggcttcctcctccgccgaggcgaaggagacagtgccggcaggcggaggagagctgacgggtaccggaggaacggcgttgatgccatttctgaaacagaccagagacgagaccttccaggctgggcgcctagaataccgatga

SEQ ID NO: 2679 - protein, 528 aa, Myceliophthora thermophilia
MSPSETLTFNNSRGGSTEVLPMPLNEYAVTSNGFLPEEPPLRKLPNPYYGPWELLVESLPNALASRTLRDQVHQLPILSTDRLTAEPEWRRACVILGFLAHAYIWGGDTAAETLPPQITLPFLAVTTHLGTPPVATFASLSLWNFEIASTSTNTASTPSNTTPSTSVPDRDLDLTDPDALRALHTFTGTADESWFYMVSVAMEAEGARLLPVLLRAMHALFAARDQDVPPATTTAAAAAAVASRALGETTACIGRLGRLLDRMDERCRPDVFYHQIRPFLAGSKNMEAAGLPRGVFYAESAEGEGEAEGKANGKGEWRQLRGGSNGQSSLVQFLDIALGVEHIAMGSSNSSSGGGGSSSNSINSDPKEGGGGQGGKPAVGFHEEVRGYMPEPHRRFLEDVAARYPGGLRKGVEELLAAGGEGKGGLGPELTEVREAFQTATRALAEFRNKHLQMVTRYIIIPSRQQNTRREVNLATASSKLRASSSAEAKETVPAGGGELTGTGGTALMPFLKQTRDETFQAGRLEYR

SEQ ID NO: 2680 - DNA, 1293 bp, Myceliophthora thermophilia
atggcatcccccgaccagaagcccatcatcatcatcggcgccggcatcagcggcctgctcttggctcagtacctacgcaaatccggcacccgggttccttttcgcatcttcgaacgggatgccgatctgacgacgcgcgggatcggctgggggctgaccttgcactggtcacttccggctctgcggtctctgctgccggaagacattgttcgccggttgcccgaagcctacgtggaccgcgccgccgtcgccgagggccgtccctccaccttccctttcttcaaccttagcaccggcgagctcaaggccaagacacctaccgccgacgagtcgcagcgcattcggtggaacaaggcagccaacggcgtcaggacgaccgaagacggcactgtcacggtcacgtttgacgatggcacatcgtgcgagggcagcctcgttgtggcctgtgacggcggcagctcccgcatccgtgggcttttgttcccagaacacccaaagtatcgcatccccgtgagacttctcggcgtcaagatcgactgcactccggaggagatagagccgctgcggaagctggacccttattttctccagggagctgcatccgaaaacgactcttttgtgtactgcagcgttcttgacgcgcccggaaacgcgccagaaggcaatggcggcaagtacacgtaccaaatggtcttctcttggccggtccgcgacggcttcttcaatcagccggcgcccatcgagtttcccgagaccaacgagggccgcgtcgagctgatcaagaagttcgccaagacctgggccgacccgttccggtccctggcgctcagcattccgagcgacaccgaggttaagtcgctcgagctctacgactggcccccgcccaaaggcttgcgcaccaccggcaacgtggcgcttgtaggggatgcgctgcatccgatggtgatgtaccggggcgagggcgccaaccacgccatcgtcgacgttcacgacctggtggagcttgtcatgccgcatttcgtcgctgatgaacgagatgagcattccacaccggcacaacgggcagtggaccttcgggccgccttggaccgctacgaagacagggtggtaagcagaacgcgcccggctgtcttggcgtcgcgacaggcttgcatcgacgcccaccaatggagcaggatcaatgagaagagcccgctgctgagccgacgcgcaatgaacttggtatttgacgacgctgacctggatctgggcgtccacaagatcagcacccctggcagcgttcctgtagagtag

SEQ ID NO: 2681 - protein, 430 aa, Myceliophthora thermophilia
MASPDQKPIIIIGAGISGLLLAQYLRKSGTRVPFRIFERDADLTTRGIGWGLTLHWSLPALRSLLPEDIVRRLPEAYVDRAAVAEGRPSTFPFFNLSTGELKAKTPTADESQRIRWNKAANGVRTTEDGTVTVTFDDGTSCEGSLVVACDGGSSRIRGLLFPEHPKYRIPVRLLGVKIDCTPEEIEPLRKLDPYFLQGAASENDSFVYCSVLDAPGNAPEGNGGKYTYQMVFSWPVRDGFFNQPAPIEFPETNEGRVELIKKFAKTWADPFRSLALSIPSDTEVKSLELYDWPPPKGLRTTGNVALVGDALHPMVMYRGEGANHAIVDVHDLVELVMPHFVADERDEHSTPAQRAVDLRAALDRYEDRVVSRTRPAVLASRQACIDAHQWSRINEKSPLLSRRAMNLVFDDADLDLGVHKISTPGSVPVE

SEQ ID NO: 2682 - DNA, 192 bp, Myceliophthora thermophilia
atggccggcgaagaatacacgcgcctctactcgtggggcaacgatcccaagcgcaaggcaagccagcacggtacttgtttgtttcgagatatatgtcaatatgtgctaacacgcaatgccagggcgattatgacgcagcaagcccgtgcagccacgtcgacctcccctagacagacctcaaacctatcctga

SEQ ID NO: 2683 - protein, 63 aa, Myceliophthora thermophilia
MAGEEYTRLYSWGNDPKRKASQHGTCLFRDICQYVLTRNARAIMTQQARAATSTSPRQTSNLS

SEQ ID NO: 2684 - DNA, 1551 bp, Myceliophthora thermophilia
atgcccagaaaaggcattctgggtttcggccgactattcgagggcctcagagcaacacacaacgacagggggccccagtacgtgattgaggccatggacggcgagatgggcaaggacgtgcacaccgtcgttgtgcccatccacgactacgagctcctcgtctctcgtgaccctctcaatattcaagctgtgctcgtaacacaggctgccgactgggatctcagtgagcaccgcactgccagctgggagcccatggttggccacggcatctttacatcgcgtggagagagttggaaacattcgcgcgcacttatccgaccgcagtttgccacggaccaaatcaacgacttcgacatgtacgagcgccatgctcagcagttatttgtcgctatcgacagatatcgctacgggcccgagaatcaaagatggacgcgggccttcgatctccaaccgctgttctacaatctcgccctcgatgtcatgactgagatgctctacggctactccgtccactcccagaatccctctgagcgtgtagagctgcccgtgatcgccggtcacgagcctcccgaccgcgagaacatcggaatgcatatggatgctggcaaagcttggatcgaaacacgcggtgctatgtggaagtaccgatggctgctgccatcgctgcagttccagaagcactgcgctgccatccaccaatacgccggatggttcgtgcaactcaggctccagcaaggcgagaaatatttggacaatctccagcaacaaggcggactgcccaatcgtgatcgctacgtccttcttcatgagctagccaaggtaacccaggaccccctagagctacgcagccagacactcaatgtcctgacggctggccgcgacacaactgctgcactcctcggttggatcgtctactttcttgctcgccatccctcggtcacgaaaaagctgcggggggaggttctctacctgtttgggccgtatgtcccgggacagccgagtaggatcgaattcaggcgggtccgcgactcaatgccatacatgaacgccgtcatcaacgagaccctgcgcatggcgccggtcgtgcccttgaacgatcggatttcgctccgtgataccgtgttgcctcgcggtggcgggcccaaacgggaccagcctgtgtttgtccctgcgggaacccagatcctaatcccggtctacgccctggcgcagcgaccggacctctgggggcccgatgctgacgtattccggcccgaacgatggacggaggacggtgggcacaaagctgggttcgagtacatccccttcggagggggaggacggcagtgtctcggtcaacaactcgccaggctcaaatcggcttatataattatccggctcctgcagcggtacgatgacattgcgaatgcagagatgccacccgatgctgccgtgaggtttcaccacacgattgaaaacaggagcggtagcggtgtgcaggtcaggttgcatgtctcggactgcggtgttaccaagagaggagtggcgtcgggtccggctaaccgagaataa

SEQ ID NO: 2685 - protein, 516 aa, Myceliophthora thermophilia
MPRKGILGFGRLFEGLRATHNDRGPQYVIEAMDGEMGKDVHTVVVPIHDYELLVSRDPLNIQAVLVTQAADWDLSEHRTASWEPMVGHGIFTSRGESWKHSRALIRPQFATDQINDFDMYERHAQQLFVAIDRYRYGPENQRWTRAFDLQPLFYNLALDVMTEMLYGYSVHSQNPSERVELPVIAGHEPPDRENIGMHMDAGKAWIETRGAMWKYRWLLPSLQFQKHCAAIHQYAGWFVQLRLQQGEKYLDNLQQQGGLPNRDRYVLLHELAKVTQDPLELRSQTLNVLTAGRDTTAALLGWIVYFLARHPSVTKKLRGEVLYLFGPYVPGQPSRIEFRRVRDSMPYMNAVINETLRMAPVVPLNDRISLRDTVLPRGGGPKRDQPVFVPAGTQILIPVYALAQRPDLWGPDADVFRPERWTEDGGHKAGFEYIPFGGGGRQCLGQQLARLKSAYIIIRLLQRYDDIANAEMPPDAAVRFHHTIENRSGSGVQVRLHVSDCGVTKRGVASGPANRE

SEQ ID NO: 2686 - DNA, 204 bp, Myceliophthora thermophilia
atgatgcgtttcggatgcgacctcgaccatctgctgcgtggaggcattctatcggagcatggtgaaaaacctgggtggcgggccttgaagcactacgttgcgtgggacgctattcctcgctcccaaggcggagggaaacccggagaggtgcgcgagaagactgggggaaccaggtttgacggaactaacccctggacctattag

SEQ ID NO: 2687 - protein, 67 aa, Myceliophthora thermophilia
MMRFGCDLDHLLRGGILSEHGEKPGWRALKHYVAWDAIPRSQGGGKPGEVREKTGGTRFDGTNPWTY

SEQ ID NO: 2688 - DNA, 861 bp, Myceliophthora thermophilia
atggcgtcccgacaactgcaaaagatcagactagtacgtattgcacatgtctattacacttatgtcgatctcgatcaagcccgtcagttcctactcgactttggcttcaccgtaaccgaagatcggggggataccgtcttcttcaagggctacagtaccgagccgttcgtctactacgcgatcaagggagcagaaaatgcattcggcggcgcggggtttgttgtcgagtcaatggcagacctagaactcgtatccaagacactacctaaggtaaccgccatcgaggacttggacgctcctggtggcggcaagcgggtgaccttttacgatccggtcgacaacttccccttctaccttgtctacggccagagtgcgatccccgtgaccgcccacctcccagagcttgagtataactatccccagagcaagcaccgcgacgtcaacaagacactaggccactttggctgctgtgtcactgactttgccaaggcgctcgacttttacatgacgcgctttaacttcaagccgagcgatctgatctacgacgacaagggcagggacataacgacctttctctatctcgatcagggtatggaacgggttgatcactacacctttttcttctttaaggataacaactctagtaggaagaacctaggaaggcacaagtttacttatgaggcggccaccaatggctgcgagacaggggatataaccttgtctggggcgttggacggcacatccttggctcacaaatctttgactactggtacgactgcttgggatttatccttgagcactacgaaattgctctgcaatgtggttagacttatgtacgatctattatctacctctggataa

SEQ ID NO: 2689 - protein, 286 aa, Myceliophthora thermophilia
MASRQLQKIRLVRIAHVYYTYVDLDQARQFLLDFGFTVTEDRGDTVFFKGYSTEPFVYYAIKGAENAFGGAGFVVESMADLELVSKTLPKVTAIEDLDAPGGGKRVTFYDPVDNFPFYLVYGQSAIPVTAHLPELEYNYPQSKHRDVNKTLGHFGCCVTDFAKALDFYMTRFNFKPSDLIYDDKGRDITTFLYLDQGMERVDHYTFFFFKDNNSSRKNLGRHKFTYEAATNGCETGDITLSGALDGTSLAHKSLTTGTTAWDLSLSTTKLLCNVVRLMYDLLSTSG

SEQ ID NO: 2690 - DNA, 1200 bp, Myceliophthora thermophilia
atggcaccttctgcggttgagactgttcagcagacagtggaggacatcaaacaaaaggttgtccccgtcaagcctgcggagactgtcagtggtcccgaagaggttctcccagagagactggaaggtcaccgggagccactgaagctcagcggcgctctggaccaccttgaatacttcgatgtgactcctgtcattgcgcgggagtacgtgaacgtcgatctcgttgagctcctgcgagctcccaactcggatgaactgcttagggatctggccatcacgatctcgcaacgcggcgtggtgttcttccgcaagcaggacaacctgacggacgacctgcaaaaggagcttgtcgaccggcttggcaagctgtcgggcaagccgccaacgtcgggcctgcacatccaccccgtcagcaactcggcccgcgagcacggcaccaaggacgaccagattagcgtcatctcgtcggagcaggccaagaaactgtactccgaccgcttccagggcttcctcggcggcggcaagtaccgccagagtggcaagaaccagtggcattccgacatcacgttcgagcccgtccccagcgactacgccctgctgcggctgacccagctgcctaagactggcggtgacaccctctgggcttccggctacgagctgtacgaccgcatctcgccgacgctgcggcgcttcctcgacacgctgacggcgcactacgcgcagccgctcttcaacgagacggccaagcgcaacaacttctccatctacacggccgagcggggcgcgcccgagaacgtgggcgactcgctggacgcggtgcacccggtcgtgcggacgaacccggtgacgggctggaagtccgtcttcgccgtcggccaccacgtccagcgcatccacggcctgtccgaggaggagagccggcacttcctgcagtggttcgtccagctcgtcgtcgagaaccacgacctgcaggtccgctacaggtggaagcaggtcaacgacgtggccatctgggacaaccggagcgtctaccacgccgccacgcccgactacgccttcgaggacggcctcggcgagcgcaggggcagccgcgccgtcagcctgggcgagcgcccctactttgaccccgccagcaccagccggagggaggccctaaaggcggaggcggctgcggctgcggctgcggctgctcccgcatga

SEQ ID NO: 2691 - protein, 399 aa, Myceliophthora thermophilia
MAPSAVETVQQTVEDIKQKVVPVKPAETVSGPEEVLPERLEGHREPLKLSGALDHLEYFDVTPVIAREYVNVDLVELLRAPNSDELLRDLAITISQRGVVFFRKQDNLTDDLQKELVDRLGKLSGKPPTSGLHIHPVSNSAREHGTKDDQISVISSEQAKKLYSDRFQGFLGGGKYRQSGKNQWHSDITFEPVPSDYALLRLTQLPKTGGDTLWASGYELYDRISPTLRRFLDTLTAHYAQPLFNETAKRNNFSIYTAERGAPENVGDSLDAVHPVVRTNPVTGWKSVFAVGHHVQRIHGLSEEESRHFLQWFVQLVVENHDLQVRYRWKQVNDVAIWDNRSVYHAATPDYAFEDGLGERRGSRAVSLGERPYFDPASTSRREALKAEAAAAAAAAAPA

SEQ ID NO: 2692 - DNA, 882 bp, Myceliophthora thermophilia
atggcctctgataagccctcccaccggttcgaccccaacttcaccaaacaggtgattgagggtatgggccccaacaccagccctcgcgcccgcgtggtgcttggtgccctgatccgccacatccacgactttgctcgtgaggttgagcttaccatcgacgagtggatggagggcgtcaagttcatcaactccctgggcgaaatctacgtcaacagcaacaagacccgcaacgagacgcaccgcatctgcgatattctcggtctcgagtcactcgttgatgagatcgcccacaagatcgtctcggacaccggcttggaccccacctcgtcctcgatcctgggcccattctggctaggcggcgtcatctttcaggacggcgtgccgcccggtggccgtgtggtcaagatgcacggcgtgatccgcgacatcgtgacgggcaagcccatccccaatgccgtcttcgacatctggcaggcctcggccaacggcaagtacgacttccaggacccggagaaccagacgcccaacaacctgcgtggcaagttccgtgccaatgacgagggcaagtactggttctactgcctccacccgaccgcctactcgctcccgcgcgacgggccttcgtggcagctgctcaccttgatggaccgccaccccatgcgccccgctcatatccacatcatggtcacccacccagagtaccagggatgcaccacccagctctaccccagcgacgacccgtgggtcaagagcgacaccgtcttcgcggtcaaggatgacctcgtcgtcacgttcaagccccttgaaggtgacgagaaggcgacgctcgagctcgaatacaacgtcaacttggcccccaagggctacaagggccgcctctag

SEQ ID NO: 2693 - protein, 293 aa, Myceliophthora thermophilia
MASDKPSHRFDPNFTKQVIEGMGPNTSPRARVVLGALIRHIHDFAREVELTIDEWMEGVKFINSLGEIYVNSNKTRNETHRICDILGLESLVDEIAHKIVSDTGLDPTSSSILGPFWLGGVIFQDGVPPGGRVVKMHGVIRDIVTGKPIPNAVFDIWQASANGKYDFQDPENQTPNNLRGKFRANDEGKYWFYCLHPTAYSLPRDGPSWQLLTLMDRHPMRPAHIHIMVTHPEYQGCTTQLYPSDDPWVKSDTVFAVKDDLVVTFKPLEGDEKATLELEYNVNLAPKGYKGRL

SEQ ID NO: 2694 - DNA, 828 bp, Myceliophthora thermophilia
atggctgaacccaccggcctcgttgccaagtcgggcattgaactcttgacctttggcacccctaacggcttcaaagcttctatcctgttggaggagctgaaagaagcctacggcaaggagtacacctaccagtccatcaacatcagcaagaacacccagaaggagccctggtacacggcgctcaaccccaatgggcgcatcccgaccatcatcgaccacgatcgcaacggcttcgccgtctttgaggggttggccatcctgacctacctcacgcgccactatgacccggagtacaagttcagctttccggtcgactcggacgactactcggtcgccgagcagtggatctcctggcaacacggcgggataggtcccatgcaaggccaagcgggacacttcctccgcgcggctcctgagaagatcgcctggggcatcacgcgctacgttggcgagacagagcggctgtacggcatcctcaacgcgcggctcgccgatcgcgactacatcgttggcccgggcaggggcaagtacagtatcgccgacatcagcttgattgggtgggtcaatgccagcctgtacgcgggcatcgacctcgcgtcccagttccccaacgtgagggcttggctcgacaggctactggcgaggccggccgtgcagaagggcctcaccgtgcctagcgggcagccgtcgcgcttcagcgtccccaccgccgagagggctctgaagggcgagccggggctcgaggacgtcaaggattcgttggaggcgacgaagaagctggtcgccgacgcgaaggagaagtacaactacaagtattcttcgccttga

SEQ ID NO: 2695 - protein, 275 aa, Myceliophthora thermophilia
MAEPTGLVAKSGIELLTFGTPNGFKASILLEELKEAYGKEYTYQSINISKNTQKEPWYTALNPNGRIPTIIDHDRNGFAVFEGLAILTYLTRHYDPEYKFSFPVDSDDYSVAEQWISWQHGGIGPMQGQAGHFLRAAPEKIAWGITRYVGETERLYGILNARLADRDYIVGPGRGKYSIADISLIGWVNASLYAGIDLASQFPNVRAWLDRLLARPAVQKGLTVPSGQPSRFSVPTAERALKGEPGLEDVKDSLEATKKLVADAKEKYNYKYSSP

SEQ ID NO: 2696 - DNA, 675 bp, Myceliophthora thermophilia
atggccgacatattcaactacacctacccctcccccttggcgggctacgaagatgccccgcctcttcccgaggagcgggccgaggacggcaagagttaccggaatccgcagacgggtgtgctcagcagcgcgtacgagaggttccccgacccgctggacaacgggcggaggggaggattcgacgttcacgtctattacttccaaaacaacccggagcagacccaatacgcccgccagctctgggagcgcatccgccgcgagtttcccgagctgcgcatctacaccttctgggaccggcccatcggcccgcacccggtcgccatgtttgaggtgaacctgctctcgcccgcccagttcggcgccttcatcccctggctggccatctggcgcgggcccctctccgtcctcgtccaccccaacaccaccgaggccgacggcggcgccgagctgcccctggccgagcgcgagctgcgcaaccacacccagcgcgccatctggatgggcgagcgcctgcccctggacgtcgcccggtttcggaacctggggaagccggggccggctgccggggccggggccggggccggtgttactgaggctgcgggatcggcggcggcggcggcgtcgtcgacgacgacgacgacgacaagcacagtgactcctgctccatcgtcctga

SEQ ID NO: 2697 - protein, 224 aa, Myceliophthora thermophilia
MADIFNYTYPSPLAGYEDAPPLPEERAEDGKSYRNPQTGVLSSAYERFPDPLDNGRRGGFDVHVYYFQNNPEQTQYARQLWERIRREFPELRIYTFWDRPIGPHPVAMFEVNLLSPAQFGAFIPWLAIWRGPLSVLVHPNTTEADGGAELPLAERELRNHTQRAIWMGERLPLDVARFRNLGKPGPAAGAGAGAGVTEAAGSAAAAASSTTTTTTSTVTPAPSS

SEQ ID NO: 2698 - DNA, 999 bp, Myceliophthora thermophilia
atgacagctacccccgccgccgacatcatccacgacccgagccgcccgctgctgagcgccctccgcgcgcaggggttcgtggtgctgcgctcggtgctgacgccggcggagctggaggagctgcgcggggccgcggcccggctgacggcgacggcgcgcgccggcgggtggccgcacgtccgcaccgtcggcaagcagttccccccttgggactcctcgctggtgccggaccgcgccggcatctggggcgtccagcacctgctgcacccggacctgcccgtggcgcccgaagaccgcgccgcctttgcgcggctctacttccacgagcgcctcctcgccgtcgcgagggagctgctgtccatccctccttcttcagaagcagcagccgacgccgacgacgacggtgagaagctgacgatggagctgttcaacatgctcgtgcggccgtccggccccggcgtgagcgaggaccggccgttcgcgctgcgctggcaccgcgacgacataccggccagcgcgagcgccgacgaggagatggcgcggctcaagcggccgggggagccctacgtgcacgcgcagtggaacctgccgctctacgacgacgacagcctgatcgtcgtccccggcagccacgcgcgcgcgcgcaccgacgccgagagggccgccggcccgtacgaggaccacatccccggccaggtccgcgtcgagctggcccccggcgacgtcgtcttctacgacaacaacatcctgcaccgcggcgtgtacgacgtcaagaaggagcgcatgacgctgcacggatccgtcggccacgccgacggcagccgcgagcgggcgaggaacgtgctccagcacggggtcggcacgtgggttgaccggtgcgacttcgccgtcctgtcggaccccaagcagcggaagacggccgaggcgatgcggaggcggttggtccagctcgggagggagaacgaagggagggatgtcggttactcgctggagggttag

SEQ ID NO: 2699 - protein, 332 aa, Myceliophthora thermophilia
MTATPAADIIHDPSRPLLSALRAQGFVVLRSVLTPAELEELRGAAARLTATARAGGWPHVRTVGKQFPPWDSSLVPDRAGIWGVQHLLHPDLPVAPEDRAAFARLYFHERLLAVARELLSIPPSSEAAADADDDGEKLTMELFNMLVRPSGPGVSEDRPFALRWHRDDIPASASADEEMARLKRPGEPYVHAQWNLPLYDDDSLIVVPGSHARARTDAERAAGPYEDHIPGQVRVELAPGDVVFYDNNILHRGVYDVKKERMTLHGSVGHADGSRERARNVLQHGVGTWVDRCDFAVLSDPKQRKTAEAMRRRLVQLGRENEGRDVGYSLEG

SEQ ID NO: 2700 - DNA, 1383 bp, Myceliophthora thermophilia
atgccggttacaaattttgctctgaaggagaagtataagtaccagaatggcttcgattgttactttgaaaccgaagctgttcccggcgctctacccacaggccaaaactcgccgcagaagccaccgctagggctctacgccgagaagctctccggcaccgccttcaccgcgccgcgccgcgagaacaagcagtcgtggctctaccgcatcctgcccgcgtgctctcaccctcccttcacgcccgcgcccgcgcccaacgagtcgctcggtctcgggggcgagccgttccgcaagttgcatcacatcccgaaccagctgcgctgggacccgttcgaccacgatccggaggcggatttcgtgagcgggctgcacctgctcgcgggagcgggtgacccgaccgtcaagcaggggtgcgccatgtacgtgtacgcggcgggccggtcgatgggcgagagggaggcgttctactcggccgacggcgagctgctgctggtgccgcaggagggggcgctggacatccggaccgagatgggctggctgctcgtccggccgatggagatctgcgtgatcccccgcggggtcaggtaccaggtgcggctggccgaggagggcaagccggcgagggggtacgcgctggagctgttccagggccggttcgtgctgccggagctggggccgatcgggtccaacgggctggcgaacgcgagggacttccaggcgcccgtcgcgagcttcgatgaggactgcggggagacggcgtttgatgggcccaacgagtacgtggtgacgggcaagtttaacaacgcgttgtatcgggcggtgcagcggcacaccccgtttgacgtggtggcctggcacggcaactactacccgtacaagtacgatctcgggcggttcaacaccatcggcaccatctcgtacgaccatccggatccgagcatcttcaccgtcttgtcggcgccgtcagaccaccccggcacgtcggtcgcggactttgtcatcttcccgccgcggtggttggtcggcgaggacaccttccgtccgccgtggtaccaccgcaacacaatgagcgagttcatgggtctcattcagggcgcgtatgacgccaagaagggcggaaagggcgggttcgtgcccgggggtgccagcttgcacaacgtcatgagcgggcatgggccggacgtagacagctacgagggcgcgaggaacgcggagctgaagccggccaaggtgggagagggtagctgcgcattcatgtttgagagcagcctgatggtcggggtgacggactggggtctgaagacttgccagaaggtgcaagccgagtattcagagcacagctggggtggcgtcaaggtgcactggaagaagacgacttcttaa

SEQ ID NO: 2701 - protein, 460 aa, Myceliophthora thermophilia
MPVTNFALKEKYKYQNGFDCYFETEAVPGALPTGQNSPQKPPLGLYAEKLSGTAFTAPRRENKQSWLYRILPACSHPPFTPAPAPNESLGLGGEPFRKLHHIPNQLRWDPFDHDPEADFVSGLHLLAGAGDPTVKQGCAMYVYAAGRSMGEREAFYSADGELLLVPQEGALDIRTEMGWLLVRPMEICVIPRGVRYQVRLAEEGKPARGYALELFQGRFVLPELGPIGSNGLANARDFQAPVASFDEDCGETAFDGPNEYVVTGKFNNALYRAVQRHTPFDVVAWHGNYYPYKYDLGRFNTIGTISYDHPDPSIFTVLSAPSDHPGTSVADFVIFPPRWLVGEDTFRPPWYHRNTMSEFMGLIQGAYDAKKGGKGGFVPGGASLHNVMSGHGPDVDSYEGARNAELKPAKVGEGSCAFMFESSLMVGVTDWGLKTCQKVQAEYSEHSWGGVKVHWKKTTS

SEQ ID NO: 2702 - DNA, 273 bp, Myceliophthora thermophilia
atgcccaaaaagaaatcatcaggcatccggaagtgggacagcctggacacgctcgtgtacttggcaggtggatggccccatgataaggcccgggcttacgtgcaagacaaggccttaaagaagtcattttggggcaaggacaacacggatgccgcttattggaactcaagtacagccaacggattctcgagtgccaatagcaagaagaaggggaaagagaagaaggacagccggcctgccgttcacttcaccccgagcacgaagaaatcatga

SEQ ID NO: 2703 - protein, 90 aa, Myceliophthora thermophilia
MPKKKSSGIRKWDSLDTLVYLAGGWPHDKARAYVQDKALKKSFWGKDNTDAAYWNSSTANGFSSANSKKKGKEKKDSRPAVHFTPSTKKS

SEQ ID NO: 2704 - DNA, 2118 bp, Myceliophthora thermophilia
atgcaatctgttactcagcatggcgcagcatcgggcgcggcagggcgacccaacctgcctacgcctccgccacacgtggcagctgcccttccagatccgcacactattctcaaacacccttcggaggaggagtacttttcacagattgcgcccgaggcggtggaacatgcccctttgccgtcctttgacccgggcgtgttcaacaatgagctgttgaagcttagactgtaccccaccctcgatcccaaagatcccacgaaggtaaaggagcccgagggaaacatcgtggagggcacctacatgggcacacagcttgccctggcagaggcgtatgctcggatcgagcggagacggacgggacgccggcccccttacccgccacaccttgaacacattccctcagaccaggactacagcttgtttgccatattcaacaagataggcctgattgagacgcaggtgattttacagaagatcactccggacgaagatggctttcgcggacgaacaaaggagtggatactcgagaagctgcgggccgtagcgtacggtggcgagccggaaaaggggatcaatatccaggatgtggtggactacaataggcaccaccgcaaatgcggaaccgacctcgccagaggtggcaatatcggcttgctggacgactggtatagcgatcgccggtttgcagatcagcagttcaccggaaccaacccaacgaccatcaccagggcgtcaccatcctggatcgccggcttcaagaaggctgccgagattggcggctacggcaaatgggtcagcgccctctccaaggccgacccggcgtcgctctttgtacaagatggaagctatctacgcaaggcgatcggagtctctgatcccgaggccgttgtgcaatacaagccgccgggtgccgacgacaactgggccgtgggcgcagtgagcttgttccaactccacgaggacggcaagctgcatcccatcgctatctgcatcgactacaaggggtctatggagaagtccgtcaccattttcaaccggcgcatggcgccgagcgatccatccaacggcgaaaaggaggactggccctggcggtgtgcgaaaacatccgctcaggtgaccgactggatgcgccacgaactggccgtacacctcacgctctctcacttcgtcgaggaagccatcatcgtggcgaccaatcgcaccatccccatgacacacgcagtctataaaatcctgtcgccgcactggtacaagaccctctcgctcaacgccggggcgcgggtcactctcatcccgcaaatcatttccgatctcgtgggaatcagcctcgaccagtgctacagctacatacgccacgcctacgacacgtacgatttcgtgaagagctatgtgcccaacgatctcgaccgccgagggtttcccaacaccccggaaggcctggagcacccgcggtacaagaactacccgtacgccaagaacatactcgcgctctggtgtacgctacgcacctacgtgaaatcgaagctcctcctatcctttcccaccgacgctagcgttgccgccgacaagccgatccaagactgggtgcgagaggtcaagacggccgcgtccataccgtccttcccggagatcaagacgatcgaccagctagtagacgcggtcaccatgtgcatccacatcgcgtcccccttccacagcgccgtcaactacctgcagaacttctaccaggcgttcgtggtcgccaagccgccgtccctgtgccggcctccgccgaggacgctcgagcagctcagggcgtacaaggagccggatctcgtggcggcgctaccgatcaaccgccagcgccagtggctgcttgccgcacaggtgccctggctgctcagcttccgggtcgaggcggaccggagtctgctcaactacgcggcgagccagtggaatgtgtacaagtacaagacgtcgccggccgagcaggccgttagagaggccagccggaagctctacggcgatctgcaggcgctgcagaagaagttcttctacaatagcgctgctatggataaggggagcattccgtatatggtgctcgatccgggctttactgctgttcctatcttgatatga

SEQ ID NO: 2705 - protein, 705 aa, Myceliophthora thermophilia
MQSVTQHGAASGAAGRPNLPTPPPHVAAALPDPHTILKHPSEEEYFSQIAPEAVEHAPLPSFDPGVFNNELLKLRLYPTLDPKDPTKVKEPEGNIVEGTYMGTQLALAEAYARIERRRTGRRPPYPPHLEHIPSDQDYSLFAIFNKIGLIETQVILQKITPDEDGFRGRTKEWILEKLRAVAYGGEPEKGINIQDVVDYNRHHRKCGTDLARGGNIGLLDDWYSDRRFADQQFTGTNPTTITRASPSWIAGFKKAAEIGGYGKWVSALSKADPASLFVQDGSYLRKAIGVSDPEAVVQYKPPGADDNWAVGAVSLFQLHEDGKLHPIAICIDYKGSMEKSVTIFNRRMAPSDPSNGEKEDWPWRCAKTSAQVTDWMRHELAVHLTLSHFVEEAIIVATNRTIPMTHAVYKILSPHWYKTLSLNAGARVTLIPQIISDLVGISLDQCYSYIRHAYDTYDFVKSYVPNDLDRRGFPNTPEGLEHPRYKNYPYAKNILALWCTLRTYVKSKLLLSFPTDASVAADKPIQDWVREVKTAASIPSFPEIKTIDQLVDAVTMCIHIASPFHSAVNYLQNFYQAFVVAKPPSLCRPPPRTLEQLRAYKEPDLVAALPINRQRQWLLAAQVPWLLSFRVEADRSLLNYAASQWNVYKYKTSPAEQAVREASRKLYGDLQALQKKFFYNSAAMDKGSIPYMVLDPGFTAVPILI

SEQ ID NO: 2706 - DNA, 255 bp, Myceliophthora thermophilia
atgaaccttcaaagattaaagctatcaagaattggctacgaccgacgtcagtcacagaagtacaaagcttcatcggatttacaaacttctaccagatattcattaggaactttagagcgattgtacgacctttatacgaacttactaggaagaatgctaaattctaataggaagagcgatataaaccctaagaagctattcgaggtagaaacagacgctttagactacactatcggaggacaattaggacaataa

SEQ ID NO: 2707 - protein, 84 aa, Myceliophthora thermophilia
MNLQRLKLSRIGYDRRQSQKYKASSDLQTSTRYSLGTLERLYDLYTNLLGRMLNSNRKSDINPKKLFEVETDALDYTIGGQLGQ

SEQ ID NO: 2708 - DNA, 1446 bp, Myceliophthora thermophilia
atggcgtcacaagccgcggaggccgggcccaagaagaagttggtcctgaatgcattcgttgaaatgtgcagcggacaccaatcgcccggtttatggcgccacccagaagacaagtcgtgggagtttgacaagatcgagcactgggtcgagctagccaagcttctggaggatgccaagttccacgggatattcatcgccgacgtgttgggcggatacgacgtctacaagaagtcgctcgagcccgcgctcgtatccggggcacagtggccggtgacggagccgctcgcggtcgtgccggccatggccgcggcgaccaagagtatcgggttcggagtgaccatctcgacgacgtacgagcagccgtaccacctcgcccgccggttatccaccgtcgaccacctgacgaacggccgcgtgggttggaatatagtaactagctaccttgactccgccgcgcgtaacttgggtcgcgaggagcagcctgcgcacgacgaccgctacgcccaggcggaggagtacctcaaggtcatgtacaagctcttcaactcgtcctggcgcgacgacgcggtgcagctggacagggagcgcggggtgtacacggcgccggagctggtgcggcagatcaaccacaacggccgcttcttccgcgtgccggggccgcacatcgtccacccgagcccccagaggacgccgctgctgctgcaggcgggcacgtcgcgcgccggcaagcagttcgccgcccagcacgccgaggccatctttgtctcggcccactcgcccgccgtcgtcgcccgcaacatcgccgaggtccgccagatcgcccgcgactccttcggccgtgacccgacctccatcaaggtcctggccctcgtgaccccgatcctcggcgccaccgaggaagaggcccgcgccaagctcgccgactaccgccgctacgcctcccacgagggcgccctggccctctttggcggctggaccggcatcgatctgaaccagtacggagacgacgaggaactgcgccaggtcgagagcaacgcggtcaggtcgacggtcgaaggctacgcgcgcttctcgccgcacaactccaaatggaccaagcacacggtcgcggagcacgtcagcatcggcggcaacggtcccgtgatcgtgggcacgccagcccaggtggccgacggtctcgagacctgggtccgcgaggccgacgtcgacggcttcaactttgcgtacgcgctgttcccgcagtctttcaaggacatcatcgacctgctgctcccggagctgcgccggcggggactcttctgggacgactacgccgtccccgggggcacctacagggagaacttttacggcgtggccgggcagaagtacccgcccgataaccacgtcgccgccaagtacagatggcgtgccggcgtccccgcggccgaacatcagatcccggagtag

SEQ ID NO: 2709 - protein, 481 aa, Myceliophthora thermophilia
MASQAAEAGPKKKLVLNAFVEMCSGHQSPGLWRHPEDKSWEFDKIEHWVELAKLLEDAKFHGIFIADVLGGYDVYKKSLEPALVSGAQWPVTEPLAVVPAMAAATKSIGFGVTISTTYEQPYHLARRLSTVDHLTNGRVGWNIVTSYLDSAARNLGREEQPAHDDRYAQAEEYLKVMYKLFNSSWRDDAVQLDRERGVYTAPELVRQINHNGRFFRVPGPHIVHPSPQRTPLLLQAGTSRAGKQFAAQHAEAIFVSAHSPAVVARNIAEVRQIARDSFGRDPTSIKVLALVTPILGATEEEARAKLADYRRYASHEGALALFGGWTGIDLNQYGDDEELRQVESNAVRSTVEGYARFSPHNSKWTKHTVAEHVSIGGNGPVIVGTPAQVADGLETWVREADVDGFNFAYALFPQSFKDIIDLLLPELRRRGLFWDDYAVPGGTYRENFYGVAGQKYPPDNHVAAKYRWRAGVPAAEHQIPE

SEQ ID NO: 2710 - DNA, 1989 bp, Myceliophthora thermophilia
atgacgaccgggatcgccaacgggcacgccaacgggcacgccaacgggcacgcgaacggcgtcgccctgaaagagccggcgctggcagcagacgccaaggaggcccccgtccgggtcgccgaggccgccgaggccgagactcagggggtggcgcccgatgccaccccgaacggcaccagcactaacaccagcaccagcacggcggagaagtcgccgctgtaccccaagtccaggctcagcctggtcgaccgtttcatcgacgagcctcggtccctgagggtggccgtcatcggcgggggtctcgcgggggtcctggccgggatcctgttcccggccaaggtgcccaacatccagctgaccatctacgagaagaatcacgactttggcggcacatggctggagaacgtgtacccgggcgtccggtgcgatatcccatcccacgtgtaccaggccacattcgagccaaagcgggactggtccgaccagttctcgcccggcgcagagatccgggactactggcagggggtggcccgcaagcacgacgtctaccgcttcgccaagttccggcaccgggtcgaggccgccgactgggacgccgaccggggcgtgtggcggctggtggtgcgggacctcggcgcggacaaggagacggtcgacgaggtagacgtgctgttcacggccatcggccggttcaacgcctggaagctgccggactaccccgggatgagcgagtaccgcgggctgctgaggcacgcctccaactgggacccctccttcgacccgcggggcaagagggtcgcggtgatcgggaacggggccagcgggatccagctggtggccaacctgcagaaggtggtggcccggctcgaccactacgcccgcaaccggacctggatcgcggcgtcgtgggccggcgacgagcggacgctcgaggcccagccgatcccgccggagcagcaggagtcgttcagggacgaccggacctacctggccttccgcaaggagctcgaggacaagtactggcgccgcttcggcagcttcttccgcggctccgacctcaaccgggagctgcgcgaccgcttcgtcgacatcatgcgcaggcggctggccaggaagcccgagctgctcgcccacatgatcccggacttctctcccaactgccgccgcctgaccccggggccgggctacctcgaggccctgacggaagacaacgtcgactacatccgcaccccgatccgccgcctcaccgagaccggcatcgagaccgaagacggccgggtccgcgacgtcgacgccatcttctgcgccaccggcgccaacgtcgactcggtcccgcccttccccatccgggcccgcggccgggacctgcgcgacctgtggcggcccgacggcgctgctgctggcgagaaggagaaggagaagggggaggagagggaggagggcaaggagagcgagtcctacgggttcccctacacgtacctcggcctggccacgcccgggttccccaacctcttcttcgtccacggcccgcacgggacgggcccgtccgggacggtgccgcacagcgtcgagacgcagctgacgtactacgccaaggtgctgcgcaagatgggccgcgagggcatccggtcgctgcagccgtcgcggcgggcggcggacgacttcctcgagtacgccgacgccttcttcgccaccaccgtcctggccgacggctgcagctcctggtacaacggcggccgcccgggcgggcgcatccacggcgtctggcccggcagcgccggccacgtcaccgccgtccgccgcgagccccgctgggaggactgggagtacgagtacctctcggacacgggcaaccgcttcgcctggtactttggcaacggctggaccaagaaggagcaggatcccgcctccgacatgacctcgtacctcaagctgcccggcgagatcgacctcaggaacctgcacgagccctggtgggatcttccatga

SEQ ID NO: 2711 - protein, 662 aa, Myceliophthora thermophilia
MTTGIANGHANGHANGHANGVALKEPALAADAKEAPVRVAEAAEAETQGVAPDATPNGTSTNTSTSTAEKSPLYPKSRLSLVDRFIDEPRSLRVAVIGGGLAGVLAGILFPAKVPNIQLTIYEKNHDFGGTWLENVYPGVRCDIPSHVYQATFEPKRDWSDQFSPGAEIRDYWQGVARKHDVYRFAKFRHRVEAADWDADRGVWRLVVRDLGADKETVDEVDVLFTAIGRFNAWKLPDYPGMSEYRGLLRHASNWDPSFDPRGKRVAVIGNGASGIQLVANLQKVVARLDHYARNRTWIAASWAGDERTLEAQPIPPEQQESFRDDRTYLAFRKELEDKYWRRFGSFFRGSDLNRELRDRFVDIMRRRLARKPELLAHMIPDFSPNCRRLTPGPGYLEALTEDNVDYIRTPIRRLTETGIETEDGRVRDVDAIFCATGANVDSVPPFPIRARGRDLRDLWRPDGAAAGEKEKEKGEEREEGKESESYGFPYTYLGLATPGFPNLFFVHGPHGTGPSGTVPHSVETQLTYYAKVLRKMGREGIRSLQPSRRAADDFLEYADAFFATTVLADGCSSWYNGGRPGGRIHGVWPGSAGHVTAVRREPRWEDWEYEYLSDTGNRFAWYFGNGWTKKEQDPASDMTSYLKLPGEIDLRNLHEPWWDLP

SEQ ID NO: 2712 - DNA, 1554 bp, Myceliophthora thermophilia
atggctgaagaaaacggaaccaccacgccggcagcaaacggcacccaggatacgggcagcggaaagaggcaaatccttctcaacgcctttgacatgtccaccattgggcatctgtcgcccggccagtggaagaaccccgtggacaagtcagcgacgaaacgaaacctggaatattggatcgagctcgccaagctgctggaccgcggcggcatcaacgcccttttcctcgcagacacctacggcgggtacgacacgtacgaagggagcctggacaactgcatccggagggcggcacaatggcccgtgaccgatccgaccattcccatatccgccatggcggccgtgaccaagaatctcagcttcgccatcacggcttctacttcgttcgagcccccttttctcctggctaagcggttctccactctggaccacttcaccaagggccggatcggctggaacattgtgacctcatggaagaaagcggccttcaaagccatcggactggatagcccgatcgagcacgacgagcgctaccgccaggcggatgagtacctccgggtcctgtacaagctgtgggagggctcgtgggcggatgacgccatcgcgccggacccggagaacgacagctacgcggacccggacaagatccggaccatcaaccaccggggcaagtacttctcgctcagcagccggcacatcgtggacccgtcgccgcagcgaacgcccttcctcttccaggcgggcacgtcggaggccgggtccgagttcgcggcgacgcatgccgaggccgtcttcgtgtcgtcgcactcgcccgccatcctgcggccaaaggtggcgcgcatccgggcgctggcggcggccaggggccgggacccgcgctcgatcaagttcttcgccaccttcacgcccgtcctggggcggaccgacgccgaggccgaggccaagctggccgagctgcgccggtacgcgtcgacggtgggcgggctggtgctcttcagcggctggacgggcgtcgacatctcgcgcatcccgctcgaccagcccatcaccgcggccgactcgctcgaggcgcacaaggtccgcagcatcctggacgccttcaccaccaccagccgcgaggtgcccgagtggaccccgcgcgtcgtcgccgagcgcgcctccatcggcggtctcggccccgtcgccgtcggcagcccggccaccgtcgccgacgagatggagcgttgggtgcgcgaggccgacctggacggtttcaacatcgcctacgtcaccaccccgggctcgttcgaggacctggtcgacctgctcgtcccggagctgcgccgccgcggcctctacccggacccgcccgaggagcccctcaccgcgcgcgagaagatctacggcaagggccagaagggcctgcgggacgaccacccgggcagcgcctacaagtacgccgtctacaaggaggacccgccccatgttgacgaaccgcagccgcagcaggagcaggagcaggagcaggagcaggagcaggagcaacagcaacaacaggcggccgagacgaaatga

SEQ ID NO: 2713 - protein, 517 aa, Myceliophthora thermophilia
MAEENGTTTPAANGTQDTGSGKRQILLNAFDMSTIGHLSPGQWKNPVDKSATKRNLEYWIELAKLLDRGGINALFLADTYGGYDTYEGSLDNCIRRAAQWPVTDPTIPISAMAAVTKNLSFAITASTSFEPPFLLAKRFSTLDHFTKGRIGWNIVTSWKKAAFKAIGLDSPIEHDERYRQADEYLRVLYKLWEGSWADDAIAPDPENDSYADPDKIRTINHRGKYFSLSSRHIVDPSPQRTPFLFQAGTSEAGSEFAATHAEAVFVSSHSPAILRPKVARIRALAAARGRDPRSIKFFATFTPVLGRTDAEAEAKLAELRRYASTVGGLVLFSGWTGVDISRIPLDQPITAADSLEAHKVRSILDAFTTTSREVPEWTPRVVAERASIGGLGPVAVGSPATVADEMERWVREADLDGFNIAYVTTPGSFEDLVDLLVPELRRRGLYPDPPEEPLTAREKIYGKGQKGLRDDHPGSAYKYAVYKEDPPHVDEPQPQQEQEQEQEQEQEQQQQQAAETK

SEQ ID NO: 2714 - DNA, 1554 bp, Myceliophthora thermophilia
atgcttcccccgattcccgtcttggccgactatgggatctcgccaacccacggcttcctccctgacgttctgccgttgacgagactcccggatccctactataacaagtgggaggccatcgtcgccaaccttcagggcctgattctcagcaagcggttgcgcggtgtcatcgaccgccttcccgtgctctcgaccatcggtctggaacacgaagcagaatggcgcagagcttactcgattctgtgcttcatggcccacggctacatctggggtggtgatagccccagtgaccgcctacctccttccatctcgattccgctgctggagatatcggcccatctcgaggtgccacccgtcgccacctatgccgcggtgtgtctgtggaacttcaagccgctgttcatggacgagggcatcgataatctcgagaacctcgccactctcaccactcttaccggttccctggacgagtcatggttctatctggtctcagtagccatggaagcccggggagcccccatcatcccactgatgctgaccgccattgccgccgcccgggaagacgatgcgacgacggtgaccagctgcctcaacacctttgccgagcgcctggacgaccttaccgcgttgctccagcgcatgcacgagaactgcgacccgcatatcttttaccaccggattcggcccttcctcgccggcagcaagaacatggccgaggccggccttccccacggcgtcatctacgaggatggctccggcaaagagacttaccgccagtacgccggcggcagcaacgctcagagcagcctcatccaattcttcgatatagtcctgggcgtcgagcaccgcccgacgggcgagaagaagtctcgttcagtaacccaggataccgcggagcgagagggccgagccccgccgcccaagcacaacttcatcatggagatgcggaagtacatgccgggtccgcatgcgcgctttctcggggacgtgcaggctgtcgccaacctgcgcgactatgttgagagccacgcggataaccggcctctgtgcgttgcctacgatgcatgcctgtctatgctgcggaacctgcgcgacaagcacatcgccatcgtcacccgctacatcgtggtaccctcccgtgaggttcgcgcccggagccgcagccccgaggccacgcgccgcaagatcaacctggccaccgcttcccgccagcgcccgggcccgcagggcatcgcgtatcgtccggaggagccgaacgatgccgacggcaagaagggggcgagcctcaagggcaccggcggcaccgcgctcatctcctttttgaagcaggcgcgcgatgagacgggcgaaccggctattgaagagtggacgaagcggttcatgagtcgccagcttaggaccgagggccagggtgacttcttcgccggtaagcccgacgagggagccggcttgcaggtcagcgcggcggcgggcggggccgaagaggtgacaatgcacggactcgctggctcttggaccatggatgaggatgtgggcggaatctgtaactactaa

SEQ ID NO: 2715 - protein, 517 aa, Myceliophthora thermophilia
MLPPIPVLADYGISPTHGFLPDVLPLTRLPDPYYNKWEAIVANLQGLILSKRLRGVIDRLPVLSTIGLEHEAEWRRAYSILCFMAHGYIWGGDSPSDRLPPSISIPLLEISAHLEVPPVATYAAVCLWNFKPLFMDEGIDNLENLATLTTLTGSLDESWFYLVSVAMEARGAPIIPLMLTAIAAAREDDATTVTSCLNTFAERLDDLTALLQRMHENCDPHIFYHRIRPFLAGSKNMAEAGLPHGVIYEDGSGKETYRQYAGGSNAQSSLIQFFDIVLGVEHRPTGEKKSRSVTQDTAEREGRAPPPKHNFIMEMRKYMPGPHARFLGDVQAVANLRDYVESHADNRPLCVAYDACLSMLRNLRDKHIAIVTRYIVVPSREVRARSRSPEATRRKINLATASRQRPGPQGIAYRPEEPNDADGKKGASLKGTGGTALISFLKQARDETGEPAIEEWTKRFMSRQLRTEGQGDFFAGKPDEGAGLQVSAAAGGAEEVTMHGLAGSWTMDEDVGGICNY

SEQ ID NO: 2716 - DNA, 1917 bp, Myceliophthora thermophilia
atggctcccagcgcggaagcagtgcataataatggctcggggacgagtgtcgagtaccccgtcaagggtgacctgcgtaagatgatgtcgcagaatccgattccgaccattacaccgggaactatagacccggcatccatgggcgacgaagaagcaacgaagcaggcccgcgctgttctgcagacgctcaatgtttccttggccaccaatgacgctcaaacgctcgagagctgtttctatcccgggcaggcttactggaaagatttgctggccctgacctaccatacacgcaccttttccacccccggcgtgattgcagcgagccttttggagactgcaagtctcagacagcttacgacggggtttgagcttgagggagccgcattgttcgtcccggctacgccagttcttcaattcattgactgcagcctcaccttcaagactgggtcgcctgcggccaagtgtagcggaagaattttgctcctaccggtcaagacaggcgagagactcgaatggaagatttgggttttgagcaccacgctcgagagcctggacgtacagtctgaggacgaggctctgctccagactccgggaagaaagctggacagcgccagtgccgagccattggagacggatgtcttcattgtcgggggtggaaacgcggcggtggcgctggcggcgcggctgaaggccctcggtgtggacagcatcatggccgagcgcaatgccaacgtcggcgacaactgggctctccggcacgactcgctgaagttccacgttccgacatcgttctgtgagttgccctacatggcttacgacaaggagctacaaaccccccactgcctcaccagggacgaccttgccgagcaggtgcgccgctacgtcgaggccttccacctcaatgtcgtcaactctgcagagattacacggaccacccagatgccagacaagcggtggcatgtggagtgtcgtactccgaagggcgcctataccgtcactgccaagcatctggtccaggcgacgggcatcgggtcgcagaagccgtacaacccacccatggccgatgaagagctgtacaagggaatccggatccactctgcacagttcaagaacggcaaacagctcagagcccagggcgtcgactcggtgctcatcgtcggctctgccaacaccgggtttgacgtgctagaagattgctacgccgccgggctcaggccgaccatggtcgtgcggtcgccgacgtacattgtgcctatcgagtacatctacgacaaaatgagcctcggtgcctacgactttggcgtcgaagccgccgataggatgttcctgacgctgcccgccgttgtggacgcccagctcgcgcggaacctttttgcccacttcgcttcccaagagcctcaacgctacgaagcgctagcaaaggccggcttccccgtctatgacagtcgacatcccgacgcggcgctgatgcacaatctgatcgagcgcgctggcggccactatgtcgacgtcggcggcacggcgctcctgtccgagggcaaggccggagtcaaggccggcgttgaaccggtcggctacacagccacggggctgcgattctctgacgggagtacggtcgacgccgatgccgtggtttggtgcacgggattcgccgacgcagacgcgcgcaccgtagttgctgagatcctcaagacggacctgcctgtcgacgccacgtggggcgtcgatgaggagggcgagattcgcggcatgtggaagcgccacctgcgtgtcgataactactggatcatgggaggctacacccagcagcatcgtttccactcccggaccctggccctccagatcaaggccgctctcgagggaatcctgccgccagcgtaccgagatacccctcagccgaagacactcagcacatga

SEQ ID NO: 2717 - protein, 638 aa, Myceliophthora thermophilia
MAPSAEAVHNNGSGTSVEYPVKGDLRKMMSQNPIPTITPGTIDPASMGDEEATKQARAVLQTLNVSLATNDAQTLESCFYPGQAYWKDLLALTYHTRTFSTPGVIAASLLETASLRQLTTGFELEGAALFVPATPVLQFIDCSLTFKTGSPAAKCSGRILLLPVKTGERLEWKIWVLSTTLESLDVQSEDEALLQTPGRKLDSASAEPLETDVFIVGGGNAAVALAARLKALGVDSIMAERNANVGDNWALRHDSLKFHVPTSFCELPYMAYDKELQTPHCLTRDDLAEQVRRYVEAFHLNVVNSAEITRTTQMPDKRWHVECRTPKGAYTVTAKHLVQATGIGSQKPYNPPMADEELYKGIRIHSAQFKNGKQLRAQGVDSVLIVGSANTGFDVLEDCYAAGLRPTMVVRSPTYIVPIEYIYDKMSLGAYDFGVEAADRMFLTLPAVVDAQLARNLFAHFASQEPQRYEALAKAGFPVYDSRHPDAALMHNLIERAGGHYVDVGGTALLSEGKAGVKAGVEPVGYTATGLRFSDGSTVDADAVVWCTGFADADARTVVAEILKTDLPVDATWGVDEEGEIRGMWKRHLRVDNYWIMGGYTQQHRFHSRTLALQIKAALEGILPPAYRDTPQPKTLST

SEQ ID NO: 2718 - DNA, 1623 bp, Myceliophthora thermophilia
atggcgggtgatgaggtggtcaagacggatcttttgatcgtcggggccggcccggccggggcctcgcttgcctgttttctcgctgctcatgatctgtgtaacgagtgtccgccattcggattggaccctgaaggtgactacgaggcggctagtccttgcaaccacgtcgacctaccgcagaccctcctcgagcctatcctcacgaggagggcggtccacaagggctggtcgcttcggttcaacaccaggtttctccgtttcacccggccgactccagaaacggtaatctccgaggtcctcgacctaatcacccagaagacgtacaagattgagtctcggtacctcttcggctgcgatggtgctaggagccaagtcgtacgcgagctcggcatccccctcatcaagaagcccgggcaggggctggcattgaatgtgctcgtgcgggcggacctgtcgcatctcattgcgaaccgcatcggaaacctacactgggtcttccgtcccgaggagaccaccgcgcccccttggggatgggccgccattgtacgcatggtgcgaccgtgggacgagtggatgttcatctttcttccagcgccgggctctgaccttactgccgaagcgatggacgccagcgacgaagagtatatggctagggtgagggagtgtatcggcgatgactccgtcaaggccgaactgctccacgtcggaaagtggtggatcaacgagaccgtggccgagtactactcggatggtaacattttctgcctcggtgatgccacacatcgacacccccccttcaacggtctcggctccaacacgtgcatccaagatgcgttcaacctcgcgtggaagattgactacgtcatgtctggcaaggcggggcccaagctgctcgagtcgttcagcaaggagcgccagccggtcggcgtcgacatcatcacgcgcgcaaaccaggggctccgggaccacatccactggcagaggacgctcggcatgctcgagccggacctgaacaagcggctcgagatcctggccgagctggacgacccgggcgagaagggccgcaagcgccggcaggagttccaggcggccatcgagaccacgacgaccgagttccacggcctgggcatcgagatgaaccagcactacgtctcggacgccgtgtacctggctgacgaggccggcccgccgccggcgctgcccgaaggcgcctgcaaggtgaagacgcaccagatcacgacgtatcccggccgccgcctgccccatgtctgggtcaacacgcgggtccccggcaaaccaatctccaccatcgacctcgcaggacatggccgtttctgcctgctgaccggcccgggggggcaggcctggaaggatgccgcccgatccgtctcggaggcgctgggcgtggagatggccagttactcgatcggctggaagcaggattacgaggatatctactttgactgggccaagaagcgagaggtagccgaggacggctgcgtcctggttcgcccagacaggttcgtcgcatggaggtgtaacggtatgattgcaaacccggaagaaaagctgcggctggttatgagaagcgttctcggcttgggccacgttaatggccagtaa

SEQ ID NO: 2719 - protein, 540 aa, Myceliophthora thermophilia
MAGDEVVKTDLLIVGAGPAGASLACFLAAHDLCNECPPFGLDPEGDYEAASPCNHVDLPQTLLEPILTRRAVHKGWSLRFNTRFLRFTRPTPETVISEVLDLITQKTYKIESRYLFGCDGARSQVVRELGIPLIKKPGQGLALNVLVRADLSHLIANRIGNLHWVFRPEETTAPPWGWAAIVRMVRPWDEWMFIFLPAPGSDLTAEAMDASDEEYMARVRECIGDDSVKAELLHVGKWWINETVAEYYSDGNIFCLGDATHRHPPFNGLGSNTCIQDAFNLAWKIDYVMSGKAGPKLLESFSKERQPVGVDIITRANQGLRDHIHWQRTLGMLEPDLNKRLEILAELDDPGEKGRKRRQEFQAAIETTTTEFHGLGIEMNQHYVSDAVYLADEAGPPPALPEGACKVKTHQITTYPGRRLPHVWVNTRVPGKPISTIDLAGHGRFCLLTGPGGQAWKDAARSVSEALGVEMASYSIGWKQDYEDIYFDWAKKREVAEDGCVLVRPDRFVAWRCNGMIANPEEKLRLVMRSVLGLGHVNGQ

SEQ ID NO: 2720 - DNA, 1536 bp, Myceliophthora thermophilia
atggaaccggaattggtggatattgtcattgtgggggccggactcagcggcatcaacgcggcgtaccgggtgcagaccctgctgccgcaccacagctatgccatcctcgaggcccgggccgagatcggggggacctgggccttttggaagtacccgggcatccggaccgacagctccatgggcttgttcggcttcccctggcggccctggccccacgaggtgagcatggcgcccgggccggccatcaagtcgtacatggaggagtgcgcggctgccgagggcatcgacaagaagatccgcctcggccaccgcgtcatcgccatggcctggagcagcgacgagcagtgctggacgctgcaggttgaggtccggcacggtgacggtgacggcggcggcggcggcagcaataacagcggcgccggggagaaaaaggtgatcaaggcgtggtgggtcatcggcgccagcggctactacagctacgagcggccgttgcccgccgtgatcccgggaatcgagaggttcggcggccaggtggtgcacccgcagttctgggacgagagcgtggactacgcgggcaagaaggtggtcataatcgggtccggcgcgacggcggtgacgctgctgcccaacctggccaagacggccgcgagcgtgacgatgctgcagcgcactccttcgtacgtcttcggcctgccgggcgaggacaagatggtcagccggcttgcccgcttcatgccgctctcctgggcccagactctccactggtggcgctccatgctcctcgagaccgtcttcacctggctgctcaccaccttccccaactggggccgccgcttcatcacccaggagatgcggaagcaactaccggcccacgtcgacgtggacaagcacttcaacccgtggtacaacccgttcgagcagcggctctgcttctgccccaacaacgacttcttcaaggcgctgcaccggcccaacgcccgcgtcgtcaccgacaccatcgagaccgtcaccgagacgggcatccggctgcggtccggcggcgccgagctcgaggccgacatgatcgtcacggccacgggcctctacttcgagctgctctcgggcgtcgacgtcaccgtcgacggcgagtccgtcaccgcctccctcggccgccgctacatctggaacggcacgatgctcgagggcgtgcccaacgcggggctcatcaccggctacaccgccgcctcctggaccccgggcgccgacgtccgcatccgccagctgatcaaggtgatccgccacatggaccgcaccggcgccgccgccgccgcgccctacgtcgacccccgcgagcgcgcctccctgcccgtccggcccgccgtcggcctgagctcgacctacatggtctcggcccacgaccgcatgcccaaggtcgccggcaaggccccctgggtcaacggggccaactgggccaccgacgtgtggcgcctgttctggagcgacgtgaagcaggggatgaagtacacctttaaaggagacaaggagaagcgtgtctag

SEQ ID NO: 2721 - protein, 511 aa, Myceliophthora thermophilia
MEPELVDIVIVGAGLSGINAAYRVQTLLPHHSYAILEARAEIGGTWAFWKYPGIRTDSSMGLFGFPWRPWPHEVSMAPGPAIKSYMEECAAAEGIDKKIRLGHRVIAMAWSSDEQCWTLQVEVRHGDGDGGGGGSNNSGAGEKKVIKAWWVIGASGYYSYERPLPAVIPGIERFGGQVVHPQFWDESVDYAGKKVVIIGSGATAVTLLPNLAKTAASVTMLQRTPSYVFGLPGEDKMVSRLARFMPLSWAQTLHWWRSMLLETVFTWLLTTFPNWGRRFITQEMRKQLPAHVDVDKHFNPWYNPFEQRLCFCPNNDFFKALHRPNARVVTDTIETVTETGIRLRSGGAELEADMIVTATGLYFELLSGVDVTVDGESVTASLGRRYIWNGTMLEGVPNAGLITGYTAASWTPGADVRIRQLIKVIRHMDRTGAAAAAPYVDPRERASLPVRPAVGLSSTYMVSAHDRMPKVAGKAPWVNGANWATDVWRLFWSDVKQGMKYTFKGDKEKRV

SEQ ID NO: 2722 - DNA, 1131 bp, Myceliophthora thermophilia
atgtccgagaccagcgtgaccgccctcaccgggtatctcgacaacctgacggcggaggaggaggccaagttgcaggaggcgtgggcgcacctgctccggctgtgcggcgtcgaggggagcgacaagctgccgccggcggaccggacgggggagctgctggagcagcacctggacccggcgggcctcaagtcggccgccgtcttccgggagcggctgtggagcttcatcctgtgggacgtcgaccgggccgtggccatgctcgcgtcggccgtcggctggcgccacgagcgccggctcgaggccgacgtgatccgccgcggggacgccgtcgggccggacgccccggccgacgacgacgggagcttcctggcccagtaccgctccggcaaggcctacgtccgcggcagcgaccgcgagggccgccccgtcttcgtcatccgcgtccgcctgcacgaccccaagctgcagtctcccgaggccatggagcgcttcgtgctgcacaacatcgagaccatccgggccaccctccgccacccgcgcgagaaggcctgcctcctcttcgacctcaccggcttcggcctcaagaacatggacttccacgtcgtcaagttcctcgtccaggtcttcgaggccaggtacccggagtacctcggcgtcgtgctcgtgcacaacgcgccgttcatcttttggggtgtatggaaggtgatcaagccgtggctggacccggtcatcgcgtccaagatcaacttcacgagcggcggcgccgacctcgcccgcttcatcgcgcccgaggagctgcagacgtgcttcggcggcaaggacggctgggagtacaagtacatcgagcccgtcccgggggagaacgaccggctcgagtcggagaagaaggccgacgtcgaggccgagcgcgacgggctcatccgccggttcgagcgcctctcggtcgaatgggccaccctcgacgcccgctccgccgaggccaagcagaagtccgccgacaggcgggaggtggccaagcagctgagcgacgcctactggaagctagacccttacatccgagcccgcacctactatgacagggcgggcgtgctgagcagttccggggcagtggactacagggcggcgcaatga

SEQ ID NO: 2723 - protein, 376 aa, Myceliophthora thermophilia
MSETSVTALTGYLDNLTAEEEAKLQEAWAHLLRLCGVEGSDKLPPADRTGELLEQHLDPAGLKSAAVFRERLWSFILWDVDRAVAMLASAVGWRHERRLEADVIRRGDAVGPDAPADDDGSFLAQYRSGKAYVRGSDREGRPVFVIRVRLHDPKLQSPEAMERFVLHNIETIRATLRHPREKACLLFDLTGFGLKNMDFHVVKFLVQVFEARYPEYLGVVLVHNAPFIFWGVWKVIKPWLDPVIASKINFTSGGADLARFIAPEELQTCFGGKDGWEYKYIEPVPGENDRLESEKKADVEAERDGLIRRFERLSVEWATLDARSAEAKQKSADRREVAKQLSDAYWKLDPYIRARTYYDRAGVLSSSGAVDYRAAQ

SEQ ID NO: 2724 - DNA, 2376 bp, Myceliophthora thermophilia
atgaggaaagaaggctcgcttctctatccctctaacaatggggcccgctacgagctgacgagcccaacggccatgcccaaggccggcggcttcctgtggaaccaaaagatgatgatccaaatcacctgccgcggatatgccactgcacaattcatgcagccggagccggcaaagtatgcctacgcacccaacattgaagccaagaccttcatgcagccggagccgaactactatgcccaccacccgggccggttcgtctacatcaaggacctcgagacgggccagctcttctcggcgccatatgagccagtccgggcgacggcagaccgattcgtcttttccgtcggcaagaccgatgtcgcctgggtggtcgagcacatgggcatccgcgtcgagatggtcatgggcttgccgacacatgacgtcgccgagctgtggaccatcaaggtgaccaacatctccggccgctctcgcagaatcagtgtcacgccctacttccccatcggctacatgtcatggatgaaccagttcgccgaatggagcgaggacctggtcggcgtcgttgccagctgcattaccccgtaccagaaggccgccgactacttcaagaacaagtacttgaaggacaagacatacttcttgtgcgagacgccgccagactcgtgggatgccaatcaacaggcctttgagggcgagggcgggctccacaacccctccgctctgcaggagccgaagctgacttgcagggatgctcgatacgagacgcccacggccgccgtccaataccgcatcgagcttaatgccggcgaggagagcgagtaccgattcctgttcggtcctgcctacgacgaggccgagatccgcaccatgcgctcgcgctacctgagcaaggaggccttcctgcggacggccgacgagtatgccgcctacatggagcgggggcgcggttgcttgcgcatcgagacgcccgacaaggagctcgacaactttgtcaacaactggctgccccgccaggtctactaccacggcgacgtcaaccgtttgaccaccgatccccagacgcgaaactacctgcaggacaacatgggcatgaactacatcaggcccgaggtgtcgcgcagggccttgatcacggccctttcgcagcaggaggccagcggcgccatgccggacggcatcttgctcgccgagggcgccgagctcaagtacatcaaccagatccctcacaccgaccattgcgtgtggctgcctctgacgctcgaggtgtacctgtccgagacgggggactacgggctgctgaaggagcgcatccggaccgagaacggcgacaacttcaccgtctttgagcgcctgtgccgcgccatggacttcctcctgaagctgcgtgacgagcgagggctcagctacatcgcccagggcgactggtgcgaccccatgaacatggtcggctacaggggcaagggcgtgtcgggctggctgacgatcgccaccgccttcgcgctcaagctctgggccggcgtctgcgagcacgagggcgccaccgagctggcagagcgcttccgcgcgggcgccgacgagtgcaacgccgcagccaacaagtacctctgggacggcgactggttcgcgcgcggcatcaccgacgacaacgtcgtcttcggcattaagaaggacctcgagggccgcatctggctcaacccgcaatccttcgccatcctcagcggcgccgccagccgggagcaggtctcgagaatgttgccggagatcgacgcccagctcgacaccccctacggcgtcgtcatgttcgcgccacccttcaccaagatgcgcgaggacattggccgcgtgacgcagaaggcggtcgggtcggcggagaacggcgccgtgtacaaccacgccagcgtcttctatgtccacagcctgtaccggctcggggggcagcaggaccgcgcctataagcacctccgccagctgatccccggccccagcgaggccgactaccgccagcgcggccagctgcctatcttcctgcccaactactaccgcggcggctggcaccagttcccccggacggccggccggtccagccagctcttcaacacgggtacctcctcgtgggcctaccgctgcgtcatcgaggggttgtgcgggctccgcggcgaagccgacggtctggttgtccggccccagctgcccagcggctgggacgccatcaaggtgacacgcgagttccgcggcgccaccttccgcttggacgtccgccgcgccgacgtccaggacgttgtcgtcagcgtcggcggcaagaccctgccgcagcccaagatcaccgagttcaaggctggtgagacgtatcaagtttcggttctggtgcctcagtag

SEQ ID NO: 2725 - protein, 791 aa, Myceliophthora thermophilia
MRKEGSLLYPSNNGARYELTSPTAMPKAGGFLWNQKMMIQITCRGYATAQFMQPEPAKYAYAPNIEAKTFMQPEPNYYAHHPGRFVYIKDLETGQLFSAPYEPVRATADRFVFSVGKTDVAWVVEHMGIRVEMVMGLPTHDVAELWTIKVTNISGRSRRISVTPYFPIGYMSWMNQFAEWSEDLVGVVASCITPYQKAADYFKNKYLKDKTYFLCETPPDSWDANQQAFEGEGGLHNPSALQEPKLTCRDARYETPTAAVQYRIELNAGEESEYRFLFGPAYDEAEIRTMRSRYLSKEAFLRTADEYAAYMERGRGCLRIETPDKELDNFVNNWLPRQVYYHGDVNRLTTDPQTRNYLQDNMGMNYIRPEVSRRALITALSQQEASGAMPDGILLAEGAELKYINQIPHTDHCVWLPLTLEVYLSETGDYGLLKERIRTENGDNFTVFERLCRAMDFLLKLRDERGLSYIAQGDWCDPMNMVGYRGKGVSGWLTIATAFALKLWAGVCEHEGATELAERFRAGADECNAAANKYLWDGDWFARGITDDNVVFGIKKDLEGRIWLNPQSFAILSGAASREQVSRMLPEIDAQLDTPYGVVMFAPPFTKMREDIGRVTQKAVGSAENGAVYNHASVFYVHSLYRLGGQQDRAYKHLRQLIPGPSEADYRQRGQLPIFLPNYYRGGWHQFPRTAGRSSQLFNTGTSSWAYRCVIEGLCGLRGEADGLVVRPQLPSGWDAIKVTREFRGATFRLDVRRADVQDVVVSVGGKTLPQPKITEFKAGETYQVSVLVPQ

SEQ ID NO: 2726 - DNA, 813 bp, Myceliophthora thermophilia
atgtctgtcgtctcccttctcggggttaacgtgatcaacaaccccgccaagttcaccgacaagtacgagttcgaaatcacctttgagtgcttggagccactgcagaaggatctcgagtggaaactcacgtatgtcggctcggcgcagtcggaccactacgaccaggagctggattcgctgctggtcgggccgatccccgtgggcatcaacaagttcgtcttcgaggcggatccgcctgacacgaagcgcatcccgatcgatgagctgctcggcgtgacggtgatcctactgacgtgcgcctacgacggccgcgagtttgtacgcgtcggctactacgtcaacaacgaatacgaaagcgaggagctgcgcgacaacccgcccgctaagcccgagatcgacaagattcgccgcaacgtgctcgcgaacaaaccacgcgtcacgaggtttgctatcaagtgggattccgaagcttcggcgcctcccgagttccctccggagcagcctgaggctgatctcgtcgccgatgaagaggagtacggcgccgacgagcttgccgaagaagaagaggccgaggctctcgacggcaagggacccgacggtgttgtcgacgaagaggacctgtcggacgagggtagtgtcgacattgagggcgagagcgaggaagagatcttggaggaggacgatggcatcgaccaagagggcggcgagggcgctgagggcgctgaaggcgttgagggagatgagggtgatgagatggatgttgaccggcccgagcctgcggtacacaagcagccggaggctatggtgcattag

SEQ ID NO: 2727 - protein, 270 aa, Myceliophthora thermophilia
MSVVSLLGVNVINNPAKFTDKYEFEITFECLEPLQKDLEWKLTYVGSAQSDHYDQELDSLLVGPIPVGINKFVFEADPPDTKRIPIDELLGVTVILLTCAYDGREFVRVGYYVNNEYESEELRDNPPAKPEIDKIRRNVLANKPRVTRFAIKWDSEASAPPEFPPEQPEADLVADEEEYGADELAEEEEAEALDGKGPDGVVDEEDLSDEGSVDIEGESEEEILEEDDGIDQEGGEGAEGAEGVEGDEGDEMDVDRPEPAVHKQPEAMVH

SEQ ID NO: 2728 - DNA, 1899 bp, Myceliophthora thermophilia
atggagaccttcgattgcgtcgttgtgggtgccggatggtacgggctgggagcggccaagcaataccgcttcaccaacccggggagttcgctggtggtgtttgacgggcagtccacgctgggcggcacttgggccgcggagcgcctgtatccgggcctcaggagcaacaaccttttggggacttacgaatatcccgactttcccatgagtaccgccaggttcaaagtccccgtcggcagccatattcccggagaagccatccacgagtacctcaaggcatatgcagccgagttcggtatcgccgaccatattcggttgcgcacgagggtcctgtcggccgagcacgtggacgaggccggaggaggttggattttgaccgtcgcctccacgggcacaggcacgggcacgggcgacgaccaggggcagcaacagacgcgtgtcaaggcgcgccggctcattgtcgccacggggttgacttcggaggccttcctcccgcatttcgacgggcaggagaccttcggcggtcgcgtattccacggcaagcacttccagcaaaaccgcgacacgttgaagaccgccaagtcggccgtggtgtttggcggcaccaagtctgcctgggacgccgcttatgcctacgcaactgcaggcgtggagacgcacatggtcatccggtcatccggccacgggccctgttggatgtcgccgccgtacgtgacgccgctgaagcgatggatcgagaaacttgccaacatacgtgccctcacctggttcagtccctgcgtctggggcagcgcagacggctacgtccggatccgcaacttcctgcacggcaccacgctgggccggaagattgtcgacatcttctggagcatactcggcggcgacgtcaagtcgctgaaccgattcgactcgcaccccgagacggccaagctcaagccttggctcgacgccatgtttgcgggaaccagcttcagcatcctcaactacgagaccgacttcttccagctggtcagggacggcaagatccgcgtccacatcagcgaaatcacccgtctcagccctggaaaggtgcacctctcggacggcgtccagctggcagccgacgccttgctcgtcaacacgggctggaaacaagtccctcccatccggtttctccccgagggcatcgacaaggagctcggcctgccgcacatcccggacggctatgacaacagcaacagcaacggcaacagcgcccccggagtgacagacgacctcgcgggtgagcagggcgcgatccagcaggccgactcgcagatcctggagcgcttcccccggctccggaagcagccggtctggaaccgggcgtacacgccgctgacggagcgggcgggcgtcgggacggccgaggcggtgacgccgagcacgccgctggcccccttcgtgctgcaccgcttcatggtgccgccgtccgcgcgcttcctgcgcactcgcgacgtggccttcgtcgggatggtgtccaactttagcaacgtcatcacggcgcacctgcagggtctctgggtcggcgcgtactttcggggcttgttgccgcttgcgggcccggccgccggtctgaacggcgacggtggcgacggcgacggcggcgacggcggcggggatgatctcgaggctctccgccgcgaggcgctgctgcacaaccggttcgggcggtggcggtatcctgtggactggggcagcagccgcgcgccgagcttcatcttcgatgcggtgccgtacttcgatctgctgctgcgcgacctggggctcgagacgtaccggaaggggggcgtgctcgccgaggtgctcagcccttacgggccggaggattaccagaccgtgaacgaggagtgggcggcgaaggtgcaggctgctctgtga

SEQ ID NO: 2729 - protein, 632 aa, Myceliophthora thermophilia
METFDCVVVGAGWYGLGAAKQYRFTNPGSSLVVFDGQSTLGGTWAAERLYPGLRSNNLLGTYEYPDFPMSTARFKVPVGSHIPGEAIHEYLKAYAAEFGIADHIRLRTRVLSAEHVDEAGGGWILTVASTGTGTGTGDDQGQQQTRVKARRLIVATGLTSEAFLPHFDGQETFGGRVFHGKHFQQNRDTLKTAKSAVVFGGTKSAWDAAYAYATAGVETHMVIRSSGHGPCWMSPPYVTPLKRWIEKLANIRALTWFSPCVWGSADGYVRIRNFLHGTTLGRKIVDIFWSILGGDVKSLNRFDSHPETAKLKPWLDAMFAGTSFSILNYETDFFQLVRDGKIRVHISEITRLSPGKVHLSDGVQLAADALLVNTGWKQVPPIRFLPEGIDKELGLPHIPDGYDNSNSNGNSAPGVTDDLAGEQGAIQQADSQILERFPRLRKQPVWNRAYTPLTERAGVGTAEAVTPSTPLAPFVLHRFMVPPSARFLRTRDVAFVGMVSNFSNVITAHLQGLWVGAYFRGLLPLAGPAAGLNGDGGDGDGGDGGGDDLEALRREALLHNRFGRWRYPVDWGSSRAPSFIFDAVPYFDLLLRDLGLETYRKGGVLAEVLSPYGPEDYQTVNEEWAAKVQAAL

SEQ ID NO: 2730 - DNA, 1926 bp, Myceliophthora thermophilia
atgacaatccccccatcggaacgcgtcgtccccggctctgtcaacctggccccggccccctggcccgcctctgccaccactccagccgtctccgtcgacgccccgcgcgtcgcggctgacctggtggccgccctcaacaccgccctcgctggtggcaactacgccgctgctgccgacctgttcctgcccgaccctggcccggccaatggagatggcgcgtctccatcgtccttctggcgcgatcatctcgtgctctcgtggcggctgcgcacgctcaaggggcgcgacaagatccgggaattcttggaggctcagctcggcggccctgggggtggaaaggtggttcggttccaagtggattcgtcgagcgagttccgtcggccgcagacggccgagttccggccgctgggcggggtgacgggggtgcagttcttcgtcagggtcgagagggaggacggggtggccgggcgtgttggacggggagtggtccggatggtggaagcagagcccggggtctggaaggtatggaccttgttcaccacgctggaggaggtgaaggggtcggaggagaggaagggcgagaggagggaacggggcgtgcagcatggagcaataggagggaggcggaattgggcggagagaaggagggccgagagcgagtttgtcggcacggaacccgtggtcttgattattggtgctggccagggaggtttgaccgccgccgcgcggctcaagatgcttggaattccggccttgatcattgacaaaaacagcgctgttggagacaattggcgcaagcgttaccaccagctcgtgctgcacgaccctgtctggtatgaccacatgccatatgttccattccccgacttctggcccatcttcaccccgaaggacaagcttgcggactggttcgaagcgtacgtcaaggccctcgagctcaatgtgtggaccgagtcagagatggtgtcctcttcctggaatgacgccaaacagctttgggcggtacagatcaagcgcgctcgcgccagtggtcaagagattaggactttccacccgaagcacatcatcattgccacgggacactcgggaaggccgcacatgccgtccatccccggcatggagtcgttcaagggcgacctgctttgccactcgggcagttttcccggcgccaaggagggccgcaagggcaagaaggcggtggtcgtcggcgcatgcaattccagcatggacatctgccaggattacgtcgaaaagggctacgacgtgacgatggtgcagcgctcgtcgacctacgttatctcaagcgagaccgccctgaaggttaccctcgccgtgctctacgaggagaacggtccgccggtagaggacagcgacatcgcagtttggggctggcccagtgaggtgctcaaatctctccaggttgatctcgcagccatctcggtggcgcgcgacagggagatgctcgatgggctggacaaggctggtttcaagatcgacatgggcccgtcgggtggaggcctgttcatcaagtatctacaaagaggaggagggtactacatcgatgtgggtggggcaaagctaattatcgacggcaagatcaaggtcaagcatggccaggagatttcgcaggtgcttcccacagggctcaagttcgaggatgggagtgaggtgcaggcggatgagatcgtgttcgcgaccgggtacgacaatatgaggacaacggccaaggagattcttggggacgagctgcctgaccaggtgggagatgtctggggatgggatcaggagggcgaaatgcggactatttggacgcacagcggacacccaggtctttggttccacggcggaaacttggccttctgcaggtactactcgaggctcgtcgccctccaaatcctggccaggctgaaaggctttgagacttga

SEQ ID NO: 2731 - protein, 641 aa, Myceliophthora thermophilia
MTIPPSERVVPGSVNLAPAPWPASATTPAVSVDAPRVAADLVAALNTALAGGNYAAAADLFLPDPGPANGDGASPSSFWRDHLVLSWRLRTLKGRDKIREFLEAQLGGPGGGKVVRFQVDSSSEFRRPQTAEFRPLGGVTGVQFFVRVEREDGVAGRVGRGVVRMVEAEPGVWKVWTLFTTLEEVKGSEERKGERRERGVQHGAIGGRRNWAERRRAESEFVGTEPVVLIIGAGQGGLTAAARLKMLGIPALIIDKNSAVGDNWRKRYHQLVLHDPVWYDHMPYVPFPDFWPIFTPKDKLADWFEAYVKALELNVWTESEMVSSSWNDAKQLWAVQIKRARASGQEIRTFHPKHIIIATGHSGRPHMPSIPGMESFKGDLLCHSGSFPGAKEGRKGKKAVVVGACNSSMDICQDYVEKGYDVTMVQRSSTYVISSETALKVTLAVLYEENGPPVEDSDIAVWGWPSEVLKSLQVDLAAISVARDREMLDGLDKAGFKIDMGPSGGGLFIKYLQRGGGYYIDVGGAKLIIDGKIKVKHGQEISQVLPTGLKFEDGSEVQADEIVFATGYDNMRTTAKEILGDELPDQVGDVWGWDQEGEMRTIWTHSGHPGLWFHGGNLAFCRYYSRLVALQILARLKGFET

SEQ ID NO: 2732 - DNA, 516 bp, Myceliophthora thermophilia
atgatggacgacgttatcctatcggccaccagcatcccaaacaacaaggaaactcgccgacgcagctcctcactaacactcccctgcattgatcaccggcggcaagcagggggcgtaaacatcgtcctcgatccaaaaccaatacctacttgcatcataagcaaggccaacacttcggtcatattggcccttcctattgtgcacaatgatatgtcgactccgtcctggtcccccaaaggggaagcggtgtacgtcccggtaccagttgattgcgacagcagaggccggctcttgaccgaggcgctccccgcctcgaataactcacatccttctcatggttctgagccaggtggcttgtgggtacctagagatgtgtggcttgtcgaagccaccgcgaagttgcgatgcgccccatcggattgcactgatcctgacaaggttcctgcaagcgggaactggggaaactctgcacaaacaccatacgccgaactgcgtatgtacgcgctcgcaaggtag

SEQ ID NO: 2733 - protein, 171 aa, Myceliophthora thermophilia
MMDDVILSATSIPNNKETRRRSSSLTLPCIDHRRQAGGVNIVLDPKPIPTCIISKANTSVILALPIVHNDMSTPSWSPKGEAVYVPVPVDCDSRGRLLTEALPASNNSHPSHGSEPGGLWVPRDVWLVEATAKLRCAPSDCTDPDKVPASGNWGNSAQTPYAELRMYALAR

SEQ ID NO: 2734 - DNA, 2037 bp, Myceliophthora thermophilia
atggccacgaaacgccccgactacacgtgggtgaacggttaccagcagcttcccgagcatcccaagactaacggttcggctgtcgagaatgatgtgccagccgacgacgacccgacggcctatgtcacgcccccgtcggtcgaactggtcacgtcaccggcgcacaaccactttggagtcaatgtcatccggagctggccaacaatgtacgatgggactaacagtccccacgggattccggagtggtggaaaccgaagccccaggttgatgtcttgatcgtcggagctggtcccagcggattgggtcttgcagccactctggcgcggcaaggggtttccttccgcatcattgacaaggcggacgctccgctggccgccggacgggctgacggcgtgcagccgcgcttcctcgagacgattggcaaatggggcctggcgtcggaggtggccgaggagggacccatcatcgagcggacggccatgtacaaggatggcgagaagctcatcttcaaccggtcgcaccagtcggactcgcggtaccgcggcctgcacgtcatcacgcagggccagatcgagcgcatctacatccgcgacctgctgcggcacaaggccatcgtcgaacgcagccgcaccctctcggccttcgaggtgctgccgacggacgggagcgccaacgacgagccgtacccggtccgggcgaccgtgcggaaccaaaagacgggcgaggaggaggccatccaggccaagttcctcgtcggatccgacggcggcgccagcagcatccgcaagagcctgggcatcccctttgacggcggagaattacccaaccaaccccccgagtggccgaaatgccctgtaaccgaccttctgattgctcacactgactgccccgtgtctccctttaatagcttgtacacgcagctggacatctcgcacacgggacccatcagccaatcgagacaggcccgcgaccctacgtttgccgagtcgggaggcaaggtcgaggtccactcgatcacgcccgaagaggtcctcgagcaggccaacaaggtgtttgccccttacaagctcaagtttgtttcggaacgagtcgcccgaacctattcgtctcccgacatgcgggtgcatctggcaggagatgcagccgttttgggcgccttcggcctcaacgcctcgatcctggacgtgtgcaacctcgggtggaagctcggcctggcctccaaggggctggcggaccacaagacgctcctgccgacgtacacgagcgagcggcggaagcacgcatccaggatcatccgggtgtcgggcgagtacctccggttcatcagcggctccacgctgggcgtcccggacctggacgaaccggagaagctcgaggcggcacagatcgacggacagggacagggacccgtcagcggcagcaacggcgtgcactcgggccacaacttcctgctgggcgtcgactgcccctacgacgagtcggtcgtcgcgccgcgccggtccgtcgacggcagcagcggccgggcggcggccatcgaggtgcgcaacggcgtgcgggcgccgaacccgcgcgtgtgcttcgagacggagaagacgggctacctgtacgacgcgctctcgggcgcgggccgcttccacctcgtcgtcttcgcctcgtcgctgcagggggccgaggtccgccgccgggtcggcgagttcgcccggtcgctggtcgaccccgagggcttccaccggcgcttcggcggcgagaccctcttccaggtcgtcctcgtcgtcaagctgatgccgtgggagtttgagcagttcgaggcctccgacgccggccgcgagctgctggcccccctgcggcgcttcgcctcgaccgtcgtcgtctttgacgaccgctcccccgacgaggacgcgcacacgacctacggtgtcaaccaccgcacgggcgccgtggccgtcatccggccggatctgtgggtcggcgcgtccgcctatcccgacgagacggacaagattgcggcttactttgagggcttcttgactgcctga

SEQ ID NO: 2735 - protein, 678 aa, Myceliophthora thermophilia
MATKRPDYTWVNGYQQLPEHPKTNGSAVENDVPADDDPTAYVTPPSVELVTSPAHNHFGVNVIRSWPTMYDGTNSPHGIPEWWKPKPQVDVLIVGAGPSGLGLAATLARQGVSFRIIDKADAPLAAGRADGVQPRFLETIGKWGLASEVAEEGPIIERTAMYKDGEKLIFNRSHQSDSRYRGLHVITQGQIERIYIRDLLRHKAIVERSRTLSAFEVLPTDGSANDEPYPVRATVRNQKTGEEEAIQAKFLVGSDGGASSIRKSLGIPFDGGELPNQPPEWPKCPVTDLLIAHTDCPVSPFNSLYTQLDISHTGPISQSRQARDPTFAESGGKVEVHSITPEEVLEQANKVFAPYKLKFVSERVARTYSSPDMRVHLAGDAAVLGAFGLNASILDVCNLGWKLGLASKGLADHKTLLPTYTSERRKHASRIIRVSGEYLRFISGSTLGVPDLDEPEKLEAAQIDGQGQGPVSGSNGVHSGHNFLLGVDCPYDESVVAPRRSVDGSSGRAAAIEVRNGVRAPNPRVCFETEKTGYLYDALSGAGRFHLVVFASSLQGAEVRRRVGEFARSLVDPEGFHRRFGGETLFQVVLVVKLMPWEFEQFEASDAGRELLAPLRRFASTVVVFDDRSPDEDAHTTYGVNHRTGAVAVIRPDLWVGASAYPDETDKIAAYFEGFLTA

SEQ ID NO: 2736 - DNA, 198 bp, Myceliophthora thermophilia
atgctgggcgattcgtccaacatgcgcaatccggttaccggagcggacgtgacagtggccccgagaggcgctgtcctcctggcggacctccccagccccaagcgcatcccgcctttggaggctggcacatccctgctcgtgttaattctcgccctctcgatcagccggcatcccattatcgacgaccttccgccgtag

SEQ ID NO: 2737 - protein, 65 aa, Myceliophthora thermophilia
MLGDSSNMRNPVTGADVTVAPRGAVLLADLPSPKRIPPLEAGTSLLVLILALSISRHPIIDDLPP

SEQ ID NO: 2738 - DNA, 1872 bp, Myceliophthora thermophilia
atggcgcacatccacgacctcgcccccgaggtctccaactacagctccggccggctcaccccgccgaccccggtgcggttcccccgcacgcccgtgttcgcgtccatgaacaagccgtgccgcttcgagggcgatgtctttgacctcgaagtgagcggggcgatccctcctgatatcgacgggaccttcttccgggtgcagccggaccaccggttcccgccgctgttcgaggacgacatccacttcaacggcgacggctccgtgacggcgatccgcatctccgggggccacgcggacctccggcagcgctacgtgcgcacggagcgctacctgctcgagacgcgagcccgccgcagcctctttggccggtaccgcaacccgtggacggacaacgagagcgtgcgcggggtgatccgcaccgcgagcaacaccaacgtcgtcttctggcgcggcgccctgctggccatgaaggaggacggcccgcccttcgccatggacccggtcacgctcgagacgctggggcggtacgacttcgagggccagatcctcagcccgaccttcaccgcccaccccaagatcgacccggacacgggcgagatggtgtgcttcgcgtacgaggccggcggggacggctccgactgcagcgtcgacgtggccgtctggacggtggacgcggacggcaagaaggtcgaggagtgctggtacaaggcccccttcgcgggtatgatccacgactgcggcatcaccaagaattgggtcgtcctgcccctgacgcccatcaagatggacctcgagagaatgaaacggggcggcaacaagttcgcctgggaccccagcgaggaccagtggtacggcgtcgtgccgaggcggggggccaagagcgacgacatcatctggttccgggcggataacggtttccatggacatgttgccggctgctacgagctgccgtcaggggagatcgttttcgacctgaccgtggccgacggcaacgtcttcttcttcttcccgcccgacgacaacatcacgccccccgccgacggcgtggccaagcgcaaccggctctcgtcgcccacggtgcggtggatcttcgatcccaaggccaagaaatcggcgatccgcaccgaggccgcgggcgacgccgacatctgggtggcggacgagagggtcaagcccgcgctgacgtggcccaccaacggcgagttctcgcgcatcgacgaccgctacgtcaccaagccgtaccggcatttctggcaggccgtcgtcgatccgacgaggccctacgactttgaaaagtgcggtcccccggcaggcggcctgttcaactgtctgggccactacacctggtccgaccaaaactatcaccacggccacaacaccggcgacccgtccggagacgggcggagcaacggaagcgccgaggaagccaccgccggtaaattcgggctccaagacgtctacttcgccgggccgaccatgaccttccaggagccgaccttcatcccgcgccagggggccgccgagggcgaagggtatctgatcgcgctgctgaaccacctggacgagctgcgcaacgacgtcgtcatcttcgaggcccggaacctcggcaagggacccctggccgtcatccacctcccgctcaagctcaagctgggcctgcacgggaactgggtcgacagccgcgagatcgaggcgtggcggcggcgcagggcagagaacggcgacgtgggcccgcttcgggtggccaaggagccgttgccgtggcagaagaagtttgcggcggcggcccagaacggatcaaatggatcggggtctgctcggaggcgtgccgagacgggggacgaggtgtcgctgctggagggctcggcgtag

SEQ ID NO: 2739 - protein, 623 aa, Myceliophthora thermophilia
MAHIHDLAPEVSNYSSGRLTPPTPVRFPRTPVFASMNKPCRFEGDVFDLEVSGAIPPDIDGTFFRVQPDHRFPPLFEDDIHFNGDGSVTAIRISGGHADLRQRYVRTERYLLETRARRSLFGRYRNPWTDNESVRGVIRTASNTNVVFWRGALLAMKEDGPPFAMDPVTLETLGRYDFEGQILSPTFTAHPKIDPDTGEMVCFAYEAGGDGSDCSVDVAVWTVDADGKKVEECWYKAPFAGMIHDCGITKNWVVLPLTPIKMDLERMKRGGNKFAWDPSEDQWYGVVPRRGAKSDDIIWFRADNGFHGHVAGCYELPSGEIVFDLTVADGNVFFFFPPDDNITPPADGVAKRNRLSSPTVRWIFDPKAKKSAIRTEAAGDADIWVADERVKPALTWPTNGEFSRIDDRYVTKPYRHFWQAVVDPTRPYDFEKCGPPAGGLFNCLGHYTWSDQNYHHGHNTGDPSGDGRSNGSAEEATAGKFGLQDVYFAGPTMTFQEPTFIPRQGAAEGEGYLIALLNHLDELRNDVVIFEARNLGKGPLAVIHLPLKLKLGLHGNWVDSREIEAWRRRRAENGDVGPLRVAKEPLPWQKKFAAAAQNGSNGSGSARRRAETGDEVSLLEGSA

SEQ ID NO: 2740 - DNA, 1803 bp, Myceliophthora thermophilia
atgacctccccgagagataatagcgatgatatcaataccacatccacatccgccaacgacccggatgacgtccaccaggcggatcggccaagctacagcacctttgcctgcatcggcaccggcttctcgggcatctgcctgggcgcgacgctggcccgatggtactgtttgacggcgggggggcagggcggccaccaccacctccggctcttctcgcgcgacccggggcccggcggcacctggctggtcaacgactacccgggcgcggcctgcgacgtgcccagcgcgctctactccttctccttcgcgcccaacccggcctggacccgcgtgctgccgcccgccgccgagctgcgcgcctacctcgccgctgtcgccgaccgctaccgcgtcaccgacggcatggtcttcaacgccgacgtcttccgctgcgtctggatcgaggaccgcgccgtctggcgcctctgggtgcgcgtgcgggatccggagccggagcgggaggaaggggaaggggaaggtcagagggaagagagagggcgaggagggaaatggaaagtccgcgtgctggtgcacgagtgccgctacctgttctcggcgaccggcctgttcacgcagccgcgggagctggacgtgcccggactcgagcggttccgcgggcccgtgttccactcggcccggtggcggtccgacgtcgacctgacgggcaagcgggtcgtcctcttcggcaacgggtggtgcggtccaagcactgggtctacccgcccatcgaccgggcggatccccggcgccgtccgggccctgctggccgccgtcccgggcctgaccaggctgcagcgcttcctcgtctacgtactcgccgaggcgtcctggagagggttcaagctgaccgaggacggggcgcggtaccggcgcaagatgcgggaacgggcggaggagtacatgcgccggaccgccccggccgagtaccacgacatgctcatcccggacttcgaggtcggctgcaagcggcgcatcttcgactcgggctacctcgagaccctgcacgccgagaacgtcacgctgaccgacgagcccgtcgccgagatcctgccggacgggttgcgcatgcggagcggcacggtcgtcgaggcagacgtcatcatcatggccaacggcttcgccaccaaccagtacctccccggcgtcgaggtcgtcggccgcgacggcgagaccctcgcccaacactgggagtcctttggcgggcccgaagcgtacaactgtacctccctcagcgggttccccaacatgttttttcttctcggccccaacaccgccacgggacacacctcggccgtcatggcgatcgagaacgcggtcaactatgcgctgcgcgtgctgcggcccgccctggacggccgcgccggcgtcgtcgtcagcctcaagcggcccgccgaggaggcgttcgcgcgccgcatccagagcgccctgcgccgcaccgtctggtcgtccggctgcagcagctggtacgtccgcgggcccggcggcaaggcctggaacgccatgacctacccctggagccaggcccgctactggtacgagagcctgtttcccgtctggcgggactgggagtacacgggtaaattggatccggtcattcccaggaggtcttgctatggccgttggctcatgaccgtcaccgctattcttgcggcaggtttgcttttgctctctgggctggctggaaacaacccaaactcccgactggccaccttgatggcgtggtgggcggcagcgctgcccgggtggaagaatcgggcgctgtaa

SEQ ID NO: 2741 - protein, 600 aa, Myceliophthora thermophilia
MTSPRDNSDDINTTSTSANDPDDVHQADRPSYSTFACIGTGFSGICLGATLARWYCLTAGGQGGHHHLRLFSRDPGPGGTWLVNDYPGAACDVPSALYSFSFAPNPAWTRVLPPAAELRAYLAAVADRYRVTDGMVFNADVFRCVWIEDRAVWRLWVRVRDPEPEREEGEGEGQREERGRGGKWKVRVLVHECRYLFSATGLFTQPRELDVPGLERFRGPVFHSARWRSDVDLTGKRVVLFGNGWCGPSTGSTRPSTGRIPGAVRALLAAVPGLTRLQRFLVYVLAEASWRGFKLTEDGARYRRKMRERAEEYMRRTAPAEYHDMLIPDFEVGCKRRIFDSGYLETLHAENVTLTDEPVAEILPDGLRMRSGTVVEADVIIMANGFATNQYLPGVEVVGRDGETLAQHWESFGGPEAYNCTSLSGFPNMFFLLGPNTATGHTSAVMAIENAVNYALRVLRPALDGRAGVVVSLKRPAEEAFARRIQSALRRTVWSSGCSSWYVRGPGGKAWNAMTYPWSQARYWYESLFPVWRDWEYTGKLDPVIPRRSCYGRWLMTVTAILAAGLLLLSGLAGNNPNSRLATLMAWWAAALPGWKNRAL

SEQ ID NO: 2742 - DNA, 705 bp, Myceliophthora thermophilia
atggcgtcccaagacaagctcatcctctacaccaaccacatctgcccttgggcgcaccgggcacatatcgcgctggaggagctcaagatcccatacgaggaggtcatcatcgacctgaccaagccgcggacgcccgagtacctgcagatcaacccgcgcgggctggtgccggcgctgtcgtacaacggcgagatcatcaccgagtcagccattgtcgcgcagttcctggccgaccggtacccgtcccacttggtgccgccctcggacgcccccggcggcgccctccgccgcgcgcgcatcgccttcttcgtcgatgcctacttctccaaggtcttcaacgtcctgctcggtctcaactcggccaagaccgaggaggcccagaaagcggtcgccgaaaaggtggttgagggcctcctcaaggaggtcgaaccgctgctggctgacgccaaccccttctttggcggcagcgacaagctcaccctggccgaggttctgaccggctcgttcgtcatccgtctcaaggccgtgacgcaggccaacatctatcccaagtccatctgggcggccatcgaggagaaggcgcccaacttccgcaagtgggccgaggccgtgatcgcacaccccagcgtgacgtccatctggaatgaggagaaggtcttggagatcaccaagacccggcttgagaaggcccgagcaagcgcttaa

SEQ ID NO: 2743 - protein, 234 aa, Myceliophthora thermophilia
MASQDKLILYTNHICPWAHRAHIALEELKIPYEEVIIDLTKPRTPEYLQINPRGLVPALSYNGEIITESAIVAQFLADRYPSHLVPPSDAPGGALRRARIAFFVDAYFSKVFNVLLGLNSAKTEEAQKAVAEKVVEGLLKEVEPLLADANPFFGGSDKLTLAEVLTGSFVIRLKAVTQANIYPKSIWAAIEEKAPNFRKWAEAVIAHPSVTSIWNEEKVLEITKTRLEKARASA

SEQ ID NO: 2744 - DNA, 1560 bp, Myceliophthora thermophilia
atgttcaagagcggcatttccgcctttgcccggacagcccgtccgtcgttcgcggcggcgactcgtcgcgccgttcgcccggccagcctcaaccttcgggccccggccttcagcaggtttgccagcacggccggcgttggtgacggcaagattcaccaggttatcggtgccgtcgtcgatgtcaagttcgataccgacaagctccctcccattctcaacgcccttgagaccgacaacaatggccagaagcttgtcctcgaggtcgcgcaacatctcggcgagaacgtcgtgaggtgcattgccatggacggtactgagggtctcgtccgtggtgccaaggccaccgataccggtgctcccatcaccatccctgtcggccctgccactctcggccgtatcatgaacgtcaccggtgacccgatcgacgagcgtgggcccatcaagtccgacaagagggctcccattcacgctgatgctcccgagttcgtcgaccagtcgacgtctgctgagattctggtgacgggtatcaaggtggtggatctgctcgctccctacgctcgtggtggcaagatcggtctcttcggtggtgccggtgtcggcaagaccgtcttcatccaggagctcatcaacaacatcgccaaggcccacggtggttactctgtcttcactggtgtcggcgagcgtacccgtgagggtaacgatctgtaccacgaaatgcagcagacctccgtcattcagcttgatggcgagtccaaggtcgccctcgtcttcggccagatgaacgagccccccggagctcgtgcccgtgtcgcccttaccggtctgacgattgccgagtacttccgtgaccaggagggccaggatgtgcttctcttcatcgacaacatcttccgtttcacccaggccggttccgaggtgtctgcccttctgggtcgtatcccctctgccgtcggttaccaacccactctcgccgtcgacatgggtggcatgcaggagcgtatcaccaccaccaagaagggttccattacctccgtccaggccgtctacgtgcctgctgacgatctgacggatcccgctcccgccaccaccttcgctcacttggacgccaccactgtcttgtctcgtggtatctcggagctgggtatctaccccgccgtcgaccctctcgactccaagtcccgtatgctcgacccccgcattgttggccaggagcactacgaggttgccacccgcgtccagcagatcctccaggagtacaagtcgctgcaggatatcattgccattcttggtatggacgaactctcggaagccgacaagcttaccgtcgagcgcgcccgtaagatccagcgtttcctgagccagcctttcacggtcgcccaggtcttcactggtatcgagggcaagctcgtcgacctcaaggacaccatcgcctcgttcaaggccatcctgaacggtgagggtgacgacctgcccgagggtgccttctacatggttggtgactttgcgtcggcgcgggagaagggtgagaagattctggctgagctcgagaagagcgcttaa

SEQ ID NO: 2745 - protein, 519 aa, Myceliophthora thermophilia
MFKSGISAFARTARPSFAAATRRAVRPASLNLRAPAFSRFASTAGVGDGKIHQVIGAVVDVKFDTDKLPPILNALETDNNGQKLVLEVAQHLGENVVRCIAMDGTEGLVRGAKATDTGAPITIPVGPATLGRIMNVTGDPIDERGPIKSDKRAPIHADAPEFVDQSTSAEILVTGIKVVDLLAPYARGGKIGLFGGAGVGKTVFIQELINNIAKAHGGYSVFTGVGERTREGNDLYHEMQQTSVIQLDGESKVALVFGQMNEPPGARARVALTGLTIAEYFRDQEGQDVLLFIDNIFRFTQAGSEVSALLGRIPSAVGYQPTLAVDMGGMQERITTTKKGSITSVQAVYVPADDLTDPAPATTFAHLDATTVLSRGISELGIYPAVDPLDSKSRMLDPRIVGQEHYEVATRVQQILQEYKSLQDIIAILGMDELSEADKLTVERARKIQRFLSQPFTVAQVFTGIEGKLVDLKDTIASFKAILNGEGDDLPEGAFYMVGDFASAREKGEKILAELEKSA

SEQ ID NO: 2746 - DNA, 2349 bp, Myceliophthora thermophilia
atgacgaatgccgcgggttctgtacccgctcaattggcagcgacaacgcgcaatttacggccacgccaagcatccggcgctccgggctcttcagtgggtggtgccgctcggaaagcgggtggccgggtaaccaggagctcggctaccctgctccggacgtcgtcaaccaacgagaactcagcggcgccgcagcctcaggttttggaaaacccagcaaagtcgcacaagcgctcccaatcgtccgtcgggaatgcgagacagcaggccaagcggacccgtctgacccctcacgaaccggggttttatggagaaagtagcgatagcgggggcgactacgacagtcttcatgagccccccggccccgatgtggagcagaaggccggcggccaccaacggcgcaaacctcccaagaacagtacccccaaaaagtcgtcgaagcctgctcgggcaacgataaggagcccgcgaaaactcgcttcagagaagttccctgcgtccgaaggcgacgagagcgctggcgagaatggcatcataccagattggggcagtctgccctaccatattctagtccagatttttcgatatgcagccgcaccgctgaatcaagtccagcaagccaaatggctgaccgccaccagcggtgtctgccgcgcattcgcggagccagccctgacggccttgtacagggcccctcctctgctaacccggccaatggcacatggcctggtgtcgctgttgtgcaaagacccttccaccacgctgtttaattacaggcagaaagtggaagagctctggatcgacgtcgagcatattgcttcaaaaacgttcaagggtcagcctctcgacctcccggctctggtcggcaacctgccccgcttgaagtccattcaattctttcaccagaaggatggccctccgtatcgctcgctggatggtagtctgcgctggcactaccctcccgcccttttcaaggccctcaatgggactcgccactcggcggaggaaggaggaactatcaatcatgcgaagctcctcggctggcagtggaacaggcggctcatggggccagatcttgacctcgccgccatcaaggtgctccatgaaaccccgccgtttctgagcctggaaaaggtttcgtttgtcaactaccaggttccttcgcttcacgcgggggccagtgtagatgacaaagagctagccgcaagcgatgaagcattcatccaaggcatggcagatgcgatcaccgctttaccagccctcaagcatctcgcgatcgagtcatctaccgtcgcaaacagccagctgcttctccgactgcccgatcgtctcgaaacattggagctcgtcaattgttgggaagttgatggcgacgactttgcagactatctcctatcacgcgggcaccacctgaagcagctcacccttcggcacaaccagtctctaagcctgtcgttcgtcacggttttggggacggcttgccctaacttggaagtcctctcgatggatttcaagacgttcaagcatcatgagttttatcatgattcagacccgagctatgacgacttgctcacagcaagtcaggttccagactggccgcagagtcttgagacgctccagctcttgaatatgaagaagtggacggcagaagcggccgagacgctgtttcaatcgctggtcgacagcgccccaaggctgctcaagctccgctggttagagttgaaagctatgttgagcattccgatccaggagcgatccaggatgcgcaacaagtggggctgtaaactgagacaagtcttcctgcgagagaaagaggagcccaaaccgctcttctccctgcgagagaagcctcggccgccggatgccgaaaaaataacaaaaagaacaccgaaaaagtcgcgcaaactcggtggcgttctgcccgccgaaagcccttcgcggcgaagcagccgtattgcggggcagtcgtcgaattcgtcctctcgtgccggtagtatcggccgggggttgcgccatagcctgagccggccatcgtatgccgaaccagatacggacgaagatgaggaggaagaggaggaggacgacgacgagaaatacgctgaactcggcggtgcacaaactaccgacgggttaggcacgggtaaccaacctgagcccgtgacatctccagcggacgcggaagcgctctttcgccatgggatgtgcgaaaaggtcgagattcagctggataaccagaagtcggccgagaccacattgaccatggatgattttctggatagcggaaatgacgacctgtcggacgacgactgggtcggccaggacgatgagtctgacaatgggtatgcctggtga

SEQ ID NO: 2747 - protein, 782 aa, Myceliophthora thermophilia
MTNAAGSVPAQLAATTRNLRPRQASGAPGSSVGGAARKAGGRVTRSSATLLRTSSTNENSAAPQPQVLENPAKSHKRSQSSVGNARQQAKRTRLTPHEPGFYGESSDSGGDYDSLHEPPGPDVEQKAGGHQRRKPPKNSTPKKSSKPARATIRSPRKLASEKFPASEGDESAGENGIIPDWGSLPYHILVQIFRYAAAPLNQVQQAKWLTATSGVCRAFAEPALTALYRAPPLLTRPMAHGLVSLLCKDPSTTLFNYRQKVEELWIDVEHIASKTFKGQPLDLPALVGNLPRLKSIQFFHQKDGPPYRSLDGSLRWHYPPALFKALNGTRHSAEEGGTINHAKLLGWQWNRRLMGPDLDLAAIKVLHETPPFLSLEKVSFVNYQVPSLHAGASVDDKELAASDEAFIQGMADAITALPALKHLAIESSTVANSQLLLRLPDRLETLELVNCWEVDGDDFADYLLSRGHHLKQLTLRHNQSLSLSFVTVLGTACPNLEVLSMDFKTFKHHEFYHDSDPSYDDLLTASQVPDWPQSLETLQLLNMKKWTAEAAETLFQSLVDSAPRLLKLRWLELKAMLSIPIQERSRMRNKWGCKLRQVFLREKEEPKPLFSLREKPRPPDAEKITKRTPKKSRKLGGVLPAESPSRRSSRIAGQSSNSSSRAGSIGRGLRHSLSRPSYAEPDTDEDEEEEEEDDDEKYAELGGAQTTDGLGTGNQPEPVTSPADAEALFRHGMCEKVEIQLDNQKSAETTLTMDDFLDSGNDDLSDDDWVGQDDESDNGYAW

SEQ ID NO: 2748 - DNA, 354 bp, Myceliophthora thermophilia
atgagggcctggaaggaacgttgtgctcgactggcagcttccacctcgccatacagcaactgcccggacgcggacatcgcctgcgaagaatacgacgccctcgtccaagtgggacccagcatcatcgcccacgtcatgctcgagtacagcaaagaccagtccgggccgtggtacaagctcatgtatcaactggtgcgtgagaaggccatgacgagcgcagcgcgggaagaccgctgggcggaggcaaattcatatagcctgtggcgggactggttcgagcacaggaaacaccacgaagcgtgcgagaacggatttacgccgtcgtacttgaccaatgctgtgcagctgcgctag

SEQ ID NO: 2749 - protein, 117 aa, Myceliophthora thermophilia
MRAWKERCARLAASTSPYSNCPDADIACEEYDALVQVGPSIIAHVMLEYSKDQSGPWYKLMYQLVREKAMTSAAREDRWAEANSYSLWRDWFEHRKHHEACENGFTPSYLTNAVQLR

SEQ ID NO: 2750 - DNA, 1239 bp, Myceliophthora thermophilia
atgtcaccgtctgccatcttggacaatcacagttcctcgggggcctcggactacgccgtccagagcccctctcccaacttcagcggttacgaccacgtcacttggtgggtgggcaacgcgaagcaggccgcgggcttctataacaccttctttgggttcaagacaatcgcctaccgcggactcgagacgggcagccggtactttgcctcgtatgttgtcaccaacaacgatgtccgcttcgtcttcacgtcgccgatccgctcggccaagtacctgcccgaggacgagccgatctcgcccgaggacaggcgcctgctgcaagagatgcacgagcaccaggagaagcacggcgacgccgtcaaggacgtcgccttcgaggtggacaacgtcgacggcgtctacgagaaggcggtcgctgagggcgccgtgtcggtccagccgcccctgacgacgggcgacaaggagcacggctacgtgcgcacggccgtgatccgcacctacggcgacacgacgcacacgctgatcgcacgccagaacttccgcggcgccttcctgccgggcttccgcgcagtcaagggcggggcgggcgcggcgccggacgcgctgcccgaggtgcccctcgcgcgcatcgaccactgcgtcggcaaccaggactggaaccagatggtgtcggcctgcgccttctacgagcagtgcctctcattccaccggttctggtcggtggacgacagccagatctgcaccgagttcagcgcgctcagcagcatcgtcatggccagccccaacaacgtggtcaagatgcccatcaacgagccggcgccgggcaagaagaagtcgcagatcgaggagtacgtcctgttcaacagcgggccgggcgtccagcacattgcccttctcaccccggatatcatatccgccgtcagcgccctgcgcgcccgcggcgtccagttcatcgacgtgcccaagacctactacgacaccatgcgcgtccgcctcaagacggagaggcgcgactgggagctcaaggaggacctggacaccatcgagcgcctcaacatcctcatcgactacgacgagcgcggctacctgctccagctcttcaccaagccgctcatggaccgccccaccgtgtttatcgagatcattcagcgcaacgactttgacggcttcggcgcgggcaacttcaagagcctgtttgaggccatcgagcgggagcaggcggaacgggggaacctgtag

SEQ ID NO: 2751 - protein, 412 aa, Myceliophthora thermophilia
MSPSAILDNHSSSGASDYAVQSPSPNFSGYDHVTWWVGNAKQAAGFYNTFFGFKTIAYRGLETGSRYFASYVVTNNDVRFVFTSPIRSAKYLPEDEPISPEDRRLLQEMHEHQEKHGDAVKDVAFEVDNVDGVYEKAVAEGAVSVQPPLTTGDKEHGYVRTAVIRTYGDTTHTLIARQNFRGAFLPGFRAVKGGAGAAPDALPEVPLARIDHCVGNQDWNQMVSACAFYEQCLSFHRFWSVDDSQICTEFSALSSIVMASPNNVVKMPINEPAPGKKKSQIEEYVLFNSGPGVQHIALLTPDIISAVSALRARGVQFIDVPKTYYDTMRVRLKTERRDWELKEDLDTIERLNILIDYDERGYLLQLFTKPLMDRPTVFIEIIQRNDFDGFGAGNFKSLFEAIEREQAERGNL

SEQ ID NO: 2752 - DNA, 267 bp, Myceliophthora thermophilia
atggcgaaactaaccgctcccaatccacagtccccgtccgcctcggtccccgagttcgtcctctcacccaccctcatccgtctccgccagaacatcagcttgttcggtacggctcgtacggccggccatccatacatacaacccaagcatgggaaagctgccgatcaaggtgcggggctcctgtctaagccgcgccactggatgcccgacgagagcctgatcttgtgcctcccagggaccgaggaggatccaatactttccatgtaa

SEQ ID NO: 2753 - protein, 88 aa, Myceliophthora thermophilia
MAKLTAPNPQSPSASVPEFVLSPTLIRLRQNISLFGTARTAGHPYIQPKHGKAADQGAGLLSKPRHWMPDESLILCLPGTEEDPILSM

SEQ ID NO: 2754 - DNA, 417 bp, Myceliophthora thermophilia
atgggaggtcgaggggatcctcgcgagccggagccactattaattacgggaagcatccaatatcaggcgcagtggcgaggacaggaccatgatctaacctggtatccggcctcggatttccggaacgcgtccgcggcactcaagcgttttgacgacgagtacccggaccaggccggacctccaaaacggttggacgactggttgctagcggcagccgaggatcggcttgccgagccgcatcccaacgacgactacttaaccgacggctgtaggccgagcactgcggaggtcaacccgaaagaaatgaagccccggtgccggattcgaaacaaaatcgaggaacctgcgtttctgaaggaattggaccctggttggcaagctcgaggcgagcatcttttgggaaggggggggttgtga

SEQ ID NO: 2755 - protein, 138 aa, Myceliophthora thermophilia
MGGRGDPREPEPLLITGSIQYQAQWRGQDHDLTWYPASDFRNASAALKRFDDEYPDQAGPPKRLDDWLLAAAEDRLAEPHPNDDYLTDGCRPSTAEVNPKEMKPRCRIRNKIEEPAFLKELDPGWQARGEHLLGRGGL

SEQ ID NO: 2756 - DNA, 1146 bp, Myceliophthora thermophilia
atgggcgtggaagccgttcttctcgggcagcaagggcaagcctggcccgacctggcgatcaagtcgagctgcgctcctcgctactttccagtttcacacgcatggccggccgcgatggagggagatatggcatggggcccggcatcgtttaactccgaggacgattacacccttacgctgaccgaggacgaggtcttggaggtcaagtctggtcttgaacactttaatgaacttgggctatacggaagcgaagtcacccccagcactttccctctgcctactcttgggccgaagcttcggcagcttgcagccgatatccactgtggccgggggtttgcggtggtccacggactgaacccaaacgagttctccccagaggaaaacgtcctggttttcctcggcatatcaagttacattggcgtccagcgcggccggcaggacgaggatggcaacatgctgagcaaataccccgggactttatttggtggcaacactaagtgcctgacaatcctttcacagaccttccacacagacacgttctgtgacattcttgctctacaaactcgcaacaatgccgccgttggcggtaagaacctgttggcctcttcctggacgatttacaacgagctgataaagacgcacccacacctgcgcgagctcctttcccagcccatctggccctttgacagccgcggcaggttccttccgtcaaacatacgcccgatcctctgctaccatgatgggcggatcattctcaactttgcccgcgagcctctgctcggcctgaacggcgtccgccgcgccgccggcgtcgcgtccctgacggaggagcagcgccgcgccctggacgtgatcgaggagattgcggagcggaaccaggtcgtcctggaggcgcagccgggagacatgctcttcatcaacaaccacggggtcctccactcgcgggaggcgtttgaggactcgcaggaggcgccgcgatacctggtccggatgtggctcaagaacccggagctcgcgtggaagctcccgcgcgcgctgcaggcgggcaacgcgcggatctacgaggagaacgagctgggcgagcagtggaatattgtcgatgcgcccaggatcatgttccggttgagcgagcggctcagttcgtga

SEQ ID NO: 2757 - protein, 381 aa, Myceliophthora thermophilia
MGVEAVLLGQQGQAWPDLAIKSSCAPRYFPVSHAWPAAMEGDMAWGPASFNSEDDYTLTLTEDEVLEVKSGLEHFNELGLYGSEVTPSTFPLPTLGPKLRQLAADIHCGRGFAVVHGLNPNEFSPEENVLVFLGISSYIGVQRGRQDEDGNMLSKYPGTLFGGNTKCLTILSQTFHTDTFCDILALQTRNNAAVGGKNLLASSWTIYNELIKTHPHLRELLSQPIWPFDSRGRFLPSNIRPILCYHDGRIILNFAREPLLGLNGVRRAAGVASLTEEQRRALDVIEEIAERNQVVLEAQPGDMLFINNHGVLHSREAFEDSQEAPRYLVRMWLKNPELAWKLPRALQAGNARIYEENELGEQWNIVDAPRIMFRLSERLSS

SEQ ID NO: 2758 - DNA, 453 bp, Myceliophthora thermophilia
atgtcacaaagggtgacttacccaaaatcgtccaatcagaatcccaattgcgaggcggcagccctgcaaccctcagggcacggcccaagtctggcctccagagacccaccggagcactgcatcgaagctccgttcaaccgcgccgaagccattaagctcggctatggcgctgtgctgtgggtctcccgctcgccatttcgccgaagcgcgaatctcgagacatctccgcgagctgtctacgtgcatcaactcagtacagagattcgatggaatctgtcagggttcattgggatgctctgtcgtgactatttcgggggaagacgccctcgcgaagacctcagcggtcgagctcaacgggggaacgagatgggaatcgtgagcacaagacggatcgttaccgacaccaaggagctaaaacgcggccttcatgtaacacaaccgcgccgattatga

SEQ ID NO: 2759 - protein, 150 aa, Myceliophthora thermophilia
MSQRVTYPKSSNQNPNCEAAALQPSGHGPSLASRDPPEHCIEAPFNRAEAIKLGYGAVLWVSRSPFRRSANLETSPRAVYVHQLSTEIRWNLSGFIGMLCRDYFGGRRPREDLSGRAQRGNEMGIVSTRRIVTDTKELKRGLHVTQPRRL

SEQ ID NO: 2760 - DNA, 216 bp, Myceliophthora thermophilia
atgtatgcagatgctgcctgggccaccgacacaaatgggccaatcaagccgaagaatgatagactaatcaggacaggatcacacttggcaagaaacgatcccagcagaggatcactggctcacgacgtgagccagatagtcactcgttatggtggactctgggagttcaccagtggtaacaattacaaccacagtacttatactaagcattgctga

SEQ ID NO: 2761 - protein, 71 aa, Myceliophthora thermophilia
MYADAAWATDTNGPIKPKNDRLIRTGSHLARNDPSRGSLAHDVSQIVTRYGGLWEFTSGNNYNHSTYTKHC

SEQ ID NO: 2762 - DNA, 624 bp, Myceliophthora thermophilia
atggcgcgctcgactgcttcgaagcttgcccgagtcgcctgccgaggcctgcagagcacgcgcacagcacacacagcgcttccgagcatctcggcggcgccatcgcttttgcactatgcgcctaagccggccggtcctctcacagctcgtcgacctatctcgagcagttccggcctcaatggcatcacgccagacgacaaaccggccaagcccgtcgacaccccgcctgttccgagaacgccggccaacatcagctttagcgagtaccacaatatcgcggacgagtacctcgagagactacttacccgcctggaagagctacaagacgagcgggaggacgtcgatgtcgagttctcgtccggcgtcctgaccctctctctcgggcccgatgtcggcacctacgtcatcaacaaacagccgcccaacaagcagatctggttgtcgtcgcccaagacgggcccgaagcgctacgactacgtcgtgttaggggaagggcagcacgagaagcaggacacggcgacgggcgactgggtgtatcttcgggacgggtccaccctgaatgagctccttaagaacgagatcggtattgactttagcctgtcggacgccgagcttggcagctag

SEQ ID NO: 2763 - protein, 207 aa, Myceliophthora thermophilia
MARSTASKLARVACRGLQSTRTAHTALPSISAAPSLLHYAPKPAGPLTARRPISSSSGLNGITPDDKPAKPVDTPPVPRTPANISFSEYHNIADEYLERLLTRLEELQDEREDVDVEFSSGVLTLSLGPDVGTYVINKQPPNKQIWLSSPKTGPKRYDYVVLGEGQHEKQDTATGDWVYLRDGSTLNELLKNEIGIDFSLSDAELGS

SEQ ID NO: 2764 - DNA, 765 bp, Myceliophthora thermophilia
atgctgtgccggcggttgaaggagatctggatctacttgtggaacttccgctacctgcctctcaagtaccgatggccgctcatcaagctgcggcgccgcctcctcccgacgcggacgggccttggtctccgcaacgcgctccgtcatgcccgctcgctccggcacccgcccgagcccaacgcgtacctgttcgtcctgcggctcctgtggccgttcccctcctggcgcttccccgccgtgctcccgccgccgccgcgcgagatcatggccgacccggcccgggtccgctgccgggtccgcgacctcatgtacctccggtccatgccgctctggcgcgcccgcgacacgccgcagcggtccttctaccgcatctacgaggccttctgcgccgccgacgggcgcatgatcacgtacgagaccgagtacttctggcgccggtccggcccggactgggccaccgctaacatccccgacccggagtgcggggacccggagcagtacgccgtcatggcctccctggccgaggtcctggccgactcgttcgtctggcgcctggagctcggcatgcgccggaccgaccggcccatcgtcagccgctccgaggaccccccgccctgcccgcccgaggtcgcccccgcgtggacggcccgggtgggccccttgaaggagaagctggtcctggaccccgacgaggacgagtactttgacagccccttccaccgccgcaacatatacatggccaccgggtggttctacacggtctga

SEQ ID NO: 2765 - protein, 254 aa, Myceliophthora thermophilia
MLCRRLKEIWIYLWNFRYLPLKYRWPLIKLRRRLLPTRTGLGLRNALRHARSLRHPPEPNAYLFVLRLLWPFPSWRFPAVLPPPPREIMADPARVRCRVRDLMYLRSMPLWRARDTPQRSFYRIYEAFCAADGRMITYETEYFWRRSGPDWATANIPDPECGDPEQYAVMASLAEVLADSFVWRLELGMRRTDRPIVSRSEDPPPCPPEVAPAWTARVGPLKEKLVLDPDEDEYFDSPFHRRNIYMATGWFYTV

SEQ ID NO: 2766 - DNA, 2940 bp, Myceliophthora thermophilia
atgccagatctgaagactggcacaagcgcgagccccgtggaaaggaatgatggcgagcagcgggaacgagtcggctggacgagtaaggccgccccacggcaggcagggtttgtcgaccaggaggacgccaccgcgagaacgtccgttttgcgttccagcacgacagccacgtcaaagcgaccgcatgaagctggcaacggttgggaacgagatggcaagccgcagggttctgttgcaactcccagacgtcccgaggtgccgcggaacagttcgttttcagaggacagccgaagcacgaataaccgctcacccgtccaacttgaacgccaccgtgtgccgtactttcgatactttggccccactgccatcgttcccggttttaagcagatggtggtaaatgtgtatcgcgacagcagacggaagagccgaggtagctccttctcgacggcctctccgggatcacttttgggctacgggatccatcacagtcacacctcgaagctcgaaacccctctcgaaacgcttgacgacttgcccgtctacgatgtgaacagttccgaaccagttcacggtctcatcatatcccttgtcgagaccttctttctttaccttgggtgcaattaccgcttcctgcataaggatcggttcctgccgatgctgaaggagaagcggatcgaggcaatccttgttgatgccgtctgctccctggctgcccgcttctccgagcagcccatctttacaaaacaccatgacggaaagctgaagcggtccgaatacggtcatgtgtttgcccaacgagcaaaggccgcgattgtcgacaccttcccctgcccctcggtcgctgctgtccaagcctgcctgctgatggcgtacgaggggttcggcgccgaccaggacagcgctttgtggatgtatctcggcattgccatcaggatggccgttgatctcgggctccaaaagattgagggtgttaaatatcaaggggagcgcgatccctggtatacgaggtactggagccgcaaagatcccgatggggaggatggcccggacaacaagcacaccgaggatgagaatcttggggccgaggaacaacagcaggtggaacaggagcgtatcgacacgttttggtctgtcttcatcttggaccgcgtcatctcgtcaggcacgggcaggcctgtaacattccgcgacggcgattacgagctctcgctcccacccccaacagttgatcccgtcacccagtggcctgacccgttccccccctttgtcgaaatcatccacctgtacggccgtgcctccgacgtcctcaataatatccggaatgccaacgacctcaccgaggaaaagatgcataaacttaggattatggagcacgacctgacagcgatctaccaaaaacaggatcaacgtcttcacttcaacgcgctcaacttccgcgaatacgtcaatgcgaaccaaggaactaccttcatcttgctgcatttctggttccatgccttggtcatcatccttcaccagccgaccttgctcactcccttccataacctgagcccggcccagctgctggccaatagtcccgacctgccaaacagccgcgagctgtccatgtcgagcgccaaaacgattgccgatatccttgcctttgccgagctaattgatccaaagagcttgattgccaacccgttcacaacccaacccatatatatcgcggcatgcgccttcctcatggagtcggtagcctatacgtcgcaggctccgtcgcgcgagacgtcggagacaccggatctcagagccgaccaattcaagtcgccggctgcgaggtctggattgggccacgatgcacgcccaatgaaacatcaattgcttgcatctgctgccaaccagaactaccagcgctgctacaagagtctccagcaattagagcaatactggggtggcgttaggtacatcctagcggctctcgatcaaaagtccaagggcatctgggattgtgaaaccttcatcaacgaggatctggaggcaatgaggatggcaaggcgaggacctctaagtcgcctgccccgatttgagcaccccgcctctccaaacgtcccgcccatcgcgtattcgctcactggcaccacgaactcgcccaattccaaccttactgtcctcttccaaggtaatttcccagttcagcctgggccgcccggccctgctttcaccgctccagtgccaccacagccacagtccgtttcggggtctgcggcaacccctccgggcaatatgatttacgaccctatccggcagagtcttccagaaacgcccccggcgtttcccgccgcttatttgcagcccaatgtctcggccgtccgctatcaacctgctcagcctaagacacgccggattcccgactcgccggccctgggcaaaccggggttgaaatacgagtcgtcttcgcccaccgacgtgaaccagagcagttcgagccacgatgtcaagcctcacatgtatgggtcgccggccagcaacggcccgctacaccactcatcctacaatcactctgcgtcgatccaggcggcattcgacgccatgccccacaatcgttccccttccagcacgcccacagattctgcaatggcccagcagcatgcaacacacggccacagtcataatcagaatcagaaccctacccacaaccaggggaacggggttgacccagtgaacaataatagctacgaggcagattttgcccagagtggcctagtgtccggatcatacccatacctgggcctgaatccgatcaacgacaccatcactttcaacagccaggaagtcaactttgacatgcttggtttacagggagagatgatgcctccttggctggaaatcctaccgggggatgtcctcgggggattattcgaaggcggaatcatgggaggaaatcagcaaatggggtag

SEQ ID NO: 2767 - protein, 979 aa, Myceliophthora thermophilia
MPDLKTGTSASPVERNDGEQRERVGWTSKAAPRQAGFVDQEDATARTSVLRSSTTATSKRPHEAGNGWERDGKPQGSVATPRRPEVPRNSSFSEDSRSTNNRSPVQLERHRVPYFRYFGPTAIVPGFKQMVVNVYRDSRRKSRGSSFSTASPGSLLGYGIHHSHTSKLETPLETLDDLPVYDVNSSEPVHGLIISLVETFFLYLGCNYRFLHKDRFLPMLKEKRIEAILVDAVCSLAARFSEQPIFTKHHDGKLKRSEYGHVFAQRAKAAIVDTFPCPSVAAVQACLLMAYEGFGADQDSALWMYLGIAIRMAVDLGLQKIEGVKYQGERDPWYTRYWSRKDPDGEDGPDNKHTEDENLGAEEQQQVEQERIDTFWSVFILDRVISSGTGRPVTFRDGDYELSLPPPTVDPVTQWPDPFPPFVEIIHLYGRASDVLNNIRNANDLTEEKMHKLRIMEHDLTAIYQKQDQRLHFNALNFREYVNANQGTTFILLHFWFHALVIILHQPTLLTPFHNLSPAQLLANSPDLPNSRELSMSSAKTIADILAFAELIDPKSLIANPFTTQPIYIAACAFLMESVAYTSQAPSRETSETPDLRADQFKSPAARSGLGHDARPMKHQLLASAANQNYQRCYKSLQQLEQYWGGVRYILAALDQKSKGIWDCETFINEDLEAMRMARRGPLSRLPRFEHPASPNVPPIAYSLTGTTNSPNSNLTVLFQGNFPVQPGPPGPAFTAPVPPQPQSVSGSAATPPGNMIYDPIRQSLPETPPAFPAAYLQPNVSAVRYQPAQPKTRRIPDSPALGKPGLKYESSSPTDVNQSSSSHDVKPHMYGSPASNGPLHHSSYNHSASIQAAFDAMPHNRSPSSTPTDSAMAQQHATHGHSHNQNQNPTHNQGNGVDPVNNNSYEADFAQSGLVSGSYPYLGLNPINDTITFNSQEVNFDMLGLQGEMMPPWLEILPGDVLGGLFEGGIMGGNQQMG

SEQ ID NO: 2768 - DNA, 767 bp, Myceliophthora thermophilia
atggcgactgtcgcagcccagcagccagtggcgcccgcagggcccccgggccagccggatatcggataccttccggaccatgacaagtacctcgcgagagccaagcggcggcaggaaaccgagaagctggccaagacgctgccccacggcttcccccagcagctggagtcggatctggtctgggatggcaacacgctcgccgaaacttacgactggaactaccatctgacccaggacgacttggccgagatcgactctgccctgcagcatttcaagagcaagggcaaagatgggttgaaagaggtgagcgctgacggcgcaggcctgaacaagccgcttggcttaatcgaccaggagaccttcccgctgccgcagctgcaccagacgctgcgcgaggtctcgcgtgagctccaccatggccacggcttcaaggtggtccgcggggtgccggtcaccaagtacacgcgcgaggagaacatcatcatcttcgcgggcatctcggcgcacgtcgcccccgtgcgcgcccggcaggacagccagtaccagggacggccggccgacgtggtgctggcccacatcaaggatgtgagctcccaggtcgacgccagcgtcatcggggcgccctcgcacaccaacgagaagcaggtcttccacaccgactcgggcgacgtcatcggcctgttcgcgctcggcgaggcggccgagggcggccagagctacctgtcgagcttcggggaaagtctacaacgagatcgccgccaccccgg

SEQ ID NO: 2769 - protein, 255 aa, Myceliophthora thermophilia
MATVAAQQPVAPAGPPGQPDIGYLPDHDKYLARAKRRQETEKLAKTLPHGFPQQLESDLVWDGNTLAETYDWNYHLTQDDLAEIDSALQHFKSKGKDGLKEVSADGAGLNKPLGLIDQETFPLPQLHQTLREVSRELHHGHGFKVVRGVPVTKYTREENIIIFAGISAHVAPVRARQDSQYQGRPADVVLAHIKDVSSQVDASVIGAPSHTNEKQVFHTDSGDVIGLFALGEAAEGGQSYLSSFGESLQRDRRHP

SEQ ID NO: 2770 - DNA, 426 bp, Myceliophthora thermophilia
atgccaccgaagctgggccacatcgtcgagaccgtcctgtacacctcggatttgggcaagctcgcagcctggtacaaggacgtgctgggcctcgtgccttttatcgagcttcccgccgtcgtcggattctcgctgccaaacgatacgatcctgctcctcttcgaccgggccacgaccacaaacgacaaggtgtccgaggccggcgtcatacccaagcacggcgccgacacgggcctcggtcagcacatcgcatttgcctgcgccgacgccaacgagctcggcgagtgggaaaggcattttcaggaaaagggcgtcgagatcgccggcaggatgcagtgggagaaaggtggcaagtcggtgtacgtccgagactgcgaggggcatctcgtcgagatcatgacaaggggcgtatgggttgtgtactga

SEQ ID NO: 2771 - protein, 141 aa, Myceliophthora thermophilia
MPPKLGHIVETVLYTSDLGKLAAWYKDVLGLVPFIELPAVVGFSLPNDTILLLFDRATTTNDKVSEAGVIPKHGADTGLGQHIAFACADANELGEWERHFQEKGVEIAGRMQWEKGGKSVYVRDCEGHLVEIMTRGVWVVY

SEQ ID NO: 2772 - DNA, 1038 bp, Myceliophthora thermophilia
atgagcgacggcaaagcgctcgacatagtggtgcctgaggtcggcactcgtgccccgagggtcaacggagacatagccgacttcctggccaaccatccggacctcgaactcggcggcgcccaagggtacaccatagaacgccggaagcacatggaggtatttgccctccacaggctcccaaagttcaaggttaatcccatccgcgctgtcgagttcaccgccatccgagggccccacgggaccatcccgatccgggtcctgtatcccgacaacggggagcccaggaggggagagggcaagatggggggcatcatctactttcacggcggcggctattgcaccgggagcgtggacgagttcgagaacggcttgaggctcctcgccgaggagtcggcctgcatcatcttcgcccccgactaccggctggcacccgagttcccctatcccacgcagctggacgagttcgacgccgtgatcgactgggtgctggacggggcggcccagcagaggggggttgaccgtacgcgcctggtcgcggccggggacggcgccggcgggagcctggcgacggccgtctgcatgcgccggcgcgacgagggcaagcacccggtggccgcccaggtgctgctgtatccggcgaccagcctgccgaccgacacccccgccgccgaggagaaccgggcgggcttctacctgcagttcaacggcatctttggcttcgccgaccactacctaccccataccatcagcggcccctcgccgaccttcatgtacgtcgcccccgggaagcagccgtgcgcggctctggcgtccctgccgccggcggccgtcgtgaccaacgggtacgacccgctgcgggacgtcgggctcgcctacgcgggcaagctgcgcgccgtcggcgggctcgcccgctggcgccactatgccgacctcacccacgcctggctgcagatgacggcctggtccgccgccgcccgcgacgccgcccgagacgtcggtctcatcgtcagggacatgctgtacgggcagtctgattga

SEQ ID NO: 2773 - protein, 345 aa, Myceliophthora thermophilia
MSDGKALDIVVPEVGTRAPRVNGDIADFLANHPDLELGGAQGYTIERRKHMEVFALHRLPKFKVNPIRAVEFTAIRGPHGTIPIRVLYPDNGEPRRGEGKMGGIIYFHGGGYCTGSVDEFENGLRLLAEESACIIFAPDYRLAPEFPYPTQLDEFDAVIDWVLDGAAQQRGVDRTRLVAAGDGAGGSLATAVCMRRRDEGKHPVAAQVLLYPATSLPTDTPAAEENRAGFYLQFNGIFGFADHYLPHTISGPSPTFMYVAPGKQPCAALASLPPAAVVTNGYDPLRDVGLAYAGKLRAVGGLARWRHYADLTHAWLQMTAWSAAARDAARDVGLIVRDMLYGQSD

SEQ ID NO: 2774 - DNA, 1467 bp, Myceliophthora thermophilia
atgactccagattccgtgcgcgaaggccagcagcggccggtgtacgaaagagttcgttcgcagccggagaatccgtttgcggagctcattccgcaccaggagatagccatcatcccatctttcacgctcgagtcgggcgtgacgctttacaatgtccctgtggcatacaccaccaggggcaccctctcgcccaacgccgacaatgtcatggtcatctgccacgcgctcaccggcagcgccgacgtgggcgactggtggggtcctctcctcggtggtcctggccgggcgttcgacacatcgcgcttctttgtcgtgtgcatgaacagcttgggaagcccctacggcactgccagtccggttaccgccaaggacggagacccctccaaaggccggtatggtccagagtttcctcttaccaccattagggatgatgtccggttgcacaaactacttctcgacgacctaggcgtcaaacagattgctgccgtaattggcgggtcgcttggtggtatgttcgtcctcgaatgggcgtactttggaaaggactatgtgcggtgcattgtgcccatcgccacctcgagcaggcacagtgcctggggtatcagctggggcgaggcccagcggcaatccatctatgccgaccccaagtacgaagacggctactactcgttctccgaccctccctcgacagggctcggtgcggcgcgcatggccgcactcctgacatacaggagccgaaactcgttcgagtcccgcttcggccgtaacattcccgatccctcacgccggcagacgatccgcgaacggcccgcgccctccactccctccgaggcccatttccacatccataacgacggacacaagtggacgaaaagcccatctcgcagggccagcgaggcacagcaagctcccaagaatgagggctcgggaagtgcgtccccggatccgcagttccacgggtcaaagaacggcagccttacgggcggcgaggtcatcccgccgacttcgacctatttctcggcccagtcatatctacgctaccagggtaacaagttcgtcaagcgcttcgacagcaactgctacatcgcgatgactcggaaactggatacgcacgacgtgagccggggccgtgctgggacgatagccgaggcgctggccatgattgagcagccaaccttggttctcggcatcgagagcgatgggttgttcacttttgcggagcaggaagaattggcagagcacatcaagaacgcgcggctagagcggattgacagtcccgagggtcacgatgccttcctactgcagtttgagcaagtcaaccactacatcctggacttcttgagggaggtccttccggatatcatgaacaaggacaccgacggtgcggtggtggagagctcggttggagagttgaccaagagcagcacgtttggcgaagccgaggttgaggatatcacggcatggtag

SEQ ID NO: 2775 - protein, 488 aa, Myceliophthora thermophilia
MTPDSVREGQQRPVYERVRSQPENPFAELIPHQEIAIIPSFTLESGVTLYNVPVAYTTRGTLSPNADNVMVICHALTGSADVGDWWGPLLGGPGRAFDTSRFFVVCMNSLGSPYGTASPVTAKDGDPSKGRYGPEFPLTTIRDDVRLHKLLLDDLGVKQIAAVIGGSLGGMFVLEWAYFGKDYVRCIVPIATSSRHSAWGISWGEAQRQSIYADPKYEDGYYSFSDPPSTGLGAARMAALLTYRSRNSFESRFGRNIPDPSRRQTIRERPAPSTPSEAHFHIHNDGHKWTKSPSRRASEAQQAPKNEGSGSASPDPQFHGSKNGSLTGGEVIPPTSTYFSAQSYLRYQGNKFVKRFDSNCYIAMTRKLDTHDVSRGRAGTIAEALAMIEQPTLVLGIESDGLFTFAEQEELAEHIKNARLERIDSPEGHDAFLLQFEQVNHYILDFLREVLPDIMNKDTDGAVVESSVGELTKSSTFGEAEVEDITAW

SEQ ID NO: 2776 - DNA, 1305 bp, Myceliophthora thermophilia
atggcgactgtcgcagcccagcagccagtggcgcccgcagggcccccgggccagccggatatcggataccttccggaccatgacaagtacctcgcgagagccaagcggcggcaggaaaccgagaagctggccaagacgctgccccacggcttcccccagcagctggagtcggatctggtctgggatggcaacacgctcgccgaaacttacgactggaactaccatctgacccaggacgacttggccgagatcgactctgccctgcagcatttcaagagcaagggcaaagatgggttgaaagaggtgagcgctgacggcgcaggcctgaacaagccgcttggcttaatcgaccaggagaccttcccgctgccgcagctgcaccagacgctgcgcgaggtctcgcgtgagctccaccatggccacggcttcaaggtggtccgcggggtgccggtcaccaagtacacgcgcgaggagaacatcatcatcttcgcgggcatctcggcgcacgtcgcccccgtgcgcgcccggcaggacagccagtaccagggacggccggccgacgtggtgctggcccacatcaaggatgtgagctcccaggtcgacgccagcgtcatcggggcgccctcgcacaccaacgagaagcaggtcttccacaccgactcgggcgacgtcatcggcctgttcgcgctcggcgaggcggccgagggcggccagagctacctgtcgagcttcgggaaagtctacaacgagatcgccgccacccggccggacctgatctggaccctttcggagccttgggctgctgacacgttcggaaagcaagccaagccgtacaacttggcgcccgtgatccacttacagccggccaccgagaaggacccggtccgggtgatcatccaatacgcccgccggaccttcacgggctactggggcctcccgcggtcggccgacatcccgcccatcacggaggcacaggcggaggcgctcgacgcgctgcacttcacggccgagaagtacgccgtctcgctcgacttccaccagggcgacatccagtacgccaacaacctgaccatcctgcacgcccgggccgagttccgcgactcggccgagaagcagcgccacctcgtccgcctctggctccgcgatccggagtacgcgtggaagacgcccgaggtgctgcagccgcgctgggaccgcatctataagggcgtcacgcccgagaacagcgtgttcccgctcgagcagtacctccggactgccagcagtagcaccaacgccagtgcgccaccgcctgtcaaggcttaa

SEQ ID NO: 2777 - protein, 434 aa, Myceliophthora thermophilia
MATVAAQQPVAPAGPPGQPDIGYLPDHDKYLARAKRRQETEKLAKTLPHGFPQQLESDLVWDGNTLAETYDWNYHLTQDDLAEIDSALQHFKSKGKDGLKEVSADGAGLNKPLGLIDQETFPLPQLHQTLREVSRELHHGHGFKVVRGVPVTKYTREENIIIFAGISAHVAPVRARQDSQYQGRPADVVLAHIKDVSSQVDASVIGAPSHTNEKQVFHTDSGDVIGLFALGEAAEGGQSYLSSFGKVYNEIAATRPDLIWTLSEPWAADTFGKQAKPYNLAPVIHLQPATEKDPVRVIIQYARRTFTGYWGLPRSADIPPITEAQAEALDALHFTAEKYAVSLDFHQGDIQYANNLTILHARAEFRDSAEKQRHLVRLWLRDPEYAWKTPEVLQPRWDRIYKGVTPENSVFPLEQYLRTASSSTNASAPPPVKA

SEQ ID NO: 2778 - DNA, 1326 bp, Myceliophthora thermophilia
atgagtcggactttaagcattctccgccgcgtttcacaggcccggttgccagcgttaccggagcggatcccgggccgtaatcggcgcttctccgtctcggccgcggcctcggcatccgagtcgcttccgctcgaaggttaccgtgtgctggacatgaccagagtgctggcggggctgacaagcagcagcgcagaggtgatcaagatagagcaccccgtcaggggcgacgacacccgagcttggggtccaccttatgccacatataagcccggttcctcgcaggaaggccccggcgagtctgcatacttcctgggagtcaatcgcaacaaaaagtcgctggcactctctttccaggatcccgctggagtcgacgtcctccacaagctggctgccaagtgcgacattctggtcgagaactatattccaggatctctcaagaagtacggcctggactacgagaccatccacaagatcaaccctgcgctcatctatgcgtccataacgggctatggtcagacggggccgtactctcaacggccgggctatgacgtgatggtggaggccgagttcgggttgatgcacatcaccggcagccgagacgggccgccggtcaaggtgggtgtagcagtgactgacttgactaccgggctgtacacgagcaacagcatcatggctgcactgctcgcccgcgcgaggactggcaagggtcagcacatcgacgccgccctgagcgactgccagacggtcaccctggccaatatcgcaagcagctgtctgattagcggggagaaggacactggccgatgggggacggctcacccttccatcgtgccatacaggtccttcaagaccaaggatggagacgtcctctttggcggaggaaacgacaagctgtttggtatcctgtgtgacggactagggcgacccgagtggaaggacgatcccaagttcaagatcaatgcctcccgagtcgccaaccgcgacgagcttgaggccatgatcgaagcgatcacggtgaccaagaccacacaagaatggctagatatattcgagggcaagggcatgccctacgctgccgtcaacgacatccaggggacgctgacgcacgagcacaccaaggcgaggaacatggtggtcgaggtggaccacgaggaatgcggcactatcaagctgctcaacacgcccatcaagtactcggagagtaagccgagaattcggagtcccccgccgaccttgggacagcacacggatgagattctgcgggaacacctgggaatggacgatgctcaaatacaagaattgagggaaaagggggtgattaggtag

SEQ ID NO: 2779 - protein, 441 aa, Myceliophthora thermophilia
MSRTLSILRRVSQARLPALPERIPGRNRRFSVSAAASASESLPLEGYRVLDMTRVLAGLTSSSAEVIKIEHPVRGDDTRAWGPPYATYKPGSSQEGPGESAYFLGVNRNKKSLALSFQDPAGVDVLHKLAAKCDILVENYIPGSLKKYGLDYETIHKINPALIYASITGYGQTGPYSQRPGYDVMVEAEFGLMHITGSRDGPPVKVGVAVTDLTTGLYTSNSIMAALLARARTGKGQHIDAALSDCQTVTLANIASSCLISGEKDTGRWGTAHPSIVPYRSFKTKDGDVLFGGGNDKLFGILCDGLGRPEWKDDPKFKINASRVANRDELEAMIEAITVTKTTQEWLDIFEGKGMPYAAVNDIQGTLTHEHTKARNMVVEVDHEECGTIKLLNTPIKYSESKPRIRSPPPTLGQHTDEILREHLGMDDAQIQELREKGVIR

SEQ ID NO: 2780 - DNA, 3447 bp, Myceliophthora thermophilia
atgaggaggcactcgtcgggatcgtcagaagacgatgacgcctccccggtcgacaatccgcatgccaattcctctcgtttcagcaccaacgacctgagaccggccgcgcgtcccgcaagcaagctcgaccgtcgccgcagcgccgaccgccgaccctccctctcgataagccgacgatctagtagcatcaattggcggctgcccgagccgcgcgttgggaatgggacgatagagaaacggtcgccgcccgatcgcgcattgccctcttctcctctgggcttgatcatgacggcgaatggccgattgcggccaaaggaggcggagaaggcgccggaaaccgaggccgtcgggcggcgcccgccatggaggagcccttgggccatcaacctcctcgcgcttatcacgtcgcttgtcggcatcgggttcctgatcgcagtcctccattcttccgtgacccgacaggtcgacccgaagggctgccgtatgtcttatatgcgcccgtcctatgccaagctcaacgactttgacacggagcacacgcgtctggcgagcaaatactcgttgtacctgtaccgcgaacagggcatcgagcacgacacaaaggtccgaggagttcctgtcctcttcatccccggcaatgccgggagctacaagcaggtccggcccatcgcggcggaagccgccaattacttccacgatgtcctgcagcacgacgagtccgcaatcaaggccggcgcccggagcctagacttcttcacggtagacttcaacgaggatatcagcgctttccacggtcagacgctcctcgaccaggccgagtatctcaacgaggcgattcgattcattctttctctctacctcgacccgcggatctccgagcgtgaccccgaccttcccgacccgacatcggtcatagtgctgggacattccatgggaggcatcgtcgcgcgtacgatgctgaccatgcccaattatcagtcaaattcgatcaacaccatcatcaccatgtcggctccgcatgtccgcccgccggtgtctttcgacagacagagcgtccagacgtacaaggccatcaacgactactggagacgcgcctactcacaacaatgggccaacgacaaccctctctggcatgtcactctggtttccatcgccgggggcgggctggacaccgttgttccctcagactatgcgagcgtcgagtccctggttccggacacgcacgggttcaccgtatttacctcgacagtcccgaacgtgtggacgagcatggaccatcaggcgatcctctggtgcgaccagtttcggaaggttgtcgtgcaggcgctcttcgacgtgattgatgttcatcgggccactcagacgaggccgagggcagagcggatgagggtgttcaagaagtggttcctcacgggcatggaggcggtggcggagaaaacggcgccgcactcggacccctcaaccttgctcaccgtcgacgataactcagactccatcatcgccgagggggagcgcctggttctacaaagcctgggctcggccggcaccgtgcgcgctcatcttatgcccatccccccttccggttcgcccggcgcgaagcgcttcaccctcttgaccgatgccaggcttgacaagccgggagagcacgggagactcgaggtcctgttttgcagcgttattccgtcgcaacccagccaatcctggaccggatttccaagtcacatcgatctgtccagaggagacaccgggtccacgcggttggcttgcagaaacgctgcgccagatgtcgtgccccttccggcgtcgactcgctcgacacgcttcccgttctacaccgacggggagcgggaagttactgccttttcttatctcgagtacggggtggacgacattgcggagcatcagtttgtggcggttgtggagaaagcgaccagtcttacccccggtttcgtaattgcagagttcagcgactctgctcagtcacataggacgcgccacatcagcctctgggctctgttcacttccggcttgaagtttcggctgcccgccgacaggccgatggtctcggaggtcaaagtgcccaagctgcggtcgagcctgctcgcttacaacctccgaatcagtcaccagaactgcgatgggaagaatgagctctttgctcccttgatgcggcaatacctagcggaaccgtacgagtcgaaatatttcgtcaacgctcgcgaagccgccgtcagcctccacggcgttgccccctatgttcctccgcctcttacgggcaagtcagaggaggacggactgagtttccagttttggacggacccgacctgcaactcgagcatccgtgtcgagctaaccgtcgatttccttggcagcctcggaaagctctacatgcggtatcgaaccgtgtttgccgcgttccccctgttcatcgtggccctcgtcctgaggaaacagtttcgcgtctacgacaacacgggggtgttcatcaccttcctcgaaggtctcgatctgtgcctaagacggtccattccgctgatgctgacgtcgctcaccttcctgacgctctccactcggaacacaacctcggctagcaatgcgaagttttggcactggaggaacggcacagccgcgatcatggacttggaccagaacgaccttcttatcgggaccgatgaccccctgttcctcttcctgattcccctgatcgcggttatctgcgtcggtgtctgcgccgtacttcactacatggcgctcatactgacgcacttgctaagtgcggttgtgagcattgtcatcaccttccgatctggatggactcggaatgaggacaagagcaaggccgtttccgcttccttgttctctccgtcgccgcggcggcgcatggtcacggccgcagttctactgttgctggtcaccacggtcgtcccatatcagtttgcctacctggtggcttgtctggtccagctgatgacgacgatccgagcccaacgccttgcctttgaactacgatcggcctcgaactcgaatttctacaattatgtccattcggtcctcatcctcatgctctggattctcccgatcaatctgccgacgatcgtggtctgggtgcacaacttggcggtgcactggctcactccgttcacctcgcatcacaatgtcctatcggtcatgcccttcatcatcctggtcgagacgcttactaccggcaaaatgataccacgcatgggcaaccggcttaagcatgttaccagcatcctgctctttggcattgctgtttacgcggccgtgtatggtgtcacgtacgcttacacgctgcatcatctggcaaacctcctcgcgttctggttattggtggttcactcgacatccgattcctggtccttgacggggctcagccaactctactcagggagtcttgagacccgaaagagggggaaggaaccatga

SEQ ID NO: 2781 - protein, 1148 aa, Myceliophthora thermophilia
MRRHSSGSSEDDDASPVDNPHANSSRFSTNDLRPAARPASKLDRRRSADRRPSLSISRRSSSINWRLPEPRVGNGTIEKRSPPDRALPSSPLGLIMTANGRLRPKEAEKAPETEAVGRRPPWRSPWAINLLALITSLVGIGFLIAVLHSSVTRQVDPKGCRMSYMRPSYAKLNDFDTEHTRLASKYSLYLYREQGIEHDTKVRGVPVLFIPGNAGSYKQVRPIAAEAANYFHDVLQHDESAIKAGARSLDFFTVDFNEDISAFHGQTLLDQAEYLNEAIRFILSLYLDPRISERDPDLPDPTSVIVLGHSMGGIVARTMLTMPNYQSNSINTIITMSAPHVRPPVSFDRQSVQTYKAINDYWRRAYSQQWANDNPLWHVTLVSIAGGGLDTVVPSDYASVESLVPDTHGFTVFTSTVPNVWTSMDHQAILWCDQFRKVVVQALFDVIDVHRATQTRPRAERMRVFKKWFLTGMEAVAEKTAPHSDPSTLLTVDDNSDSIIAEGERLVLQSLGSAGTVRAHLMPIPPSGSPGAKRFTLLTDARLDKPGEHGRLEVLFCSVIPSQPSQSWTGFPSHIDLSRGDTGSTRLACRNAAPDVVPLPASTRSTRFPFYTDGEREVTAFSYLEYGVDDIAEHQFVAVVEKATSLTPGFVIAEFSDSAQSHRTRHISLWALFTSGLKFRLPADRPMVSEVKVPKLRSSLLAYNLRISHQNCDGKNELFAPLMRQYLAEPYESKYFVNAREAAVSLHGVAPYVPPPLTGKSEEDGLSFQFWTDPTCNSSIRVELTVDFLGSLGKLYMRYRTVFAAFPLFIVALVLRKQFRVYDNTGVFITFLEGLDLCLRRSIPLMLTSLTFLTLSTRNTTSASNAKFWHWRNGTAAIMDLDQNDLLIGTDDPLFLFLIPLIAVICVGVCAVLHYMALILTHLLSAVVSIVITFRSGWTRNEDKSKAVSASLFSPSPRRRMVTAAVLLLLVTTVVPYQFAYLVACLVQLMTTIRAQRLAFELRSASNSNFYNYVHSVLILMLWILPINLPTIVVWVHNLAVHWLTPFTSHHNVLSVMPFIILVETLTTGKMIPRMGNRLKHVTSILLFGIAVYAAVYGVTYAYTLHHLANLLAFWLLVVHSTSDSWSLTGLSQLYSGSLETRKRGKEP

SEQ ID NO: 2782 - DNA, 1140 bp, Myceliophthora thermophilia
atggctccctccgcagtcgaaaccgaaacggtcacggtcccggacgtatccacgctgaagctccaagcagtcgccgggccgtacaaggagcttgcagcgaccaggtatgacgctgaggccgaggctggattgaagggccacaaggcagccaagtacccccactacctcccgacctggaaccacaacgagaagtacccggccctcgagccgttcgagcactacgagcacggcaaggatgccgacacttcctatccgaatctgcttcccgagggaaccgtcaaggtgacgcatctgaccccgaccatcggcaccgaggtcaggggtatccagctgtctcagctgagcaacgccggcaaggacgagctggctcggttcgtcgccgagcgcaaggtggtcgccttccgtgaccaagactttgccgacctgccgatcgagaaggcgctcgagttcgggtcgtactttggccgccaccacatccacccgacgtcgggtgccccggcgggccacccggaggtccacatcgtgcaccgcggggcgggcgacacgggggtgcacgatttcttcgccaagcggacgtcgtcggtggcgtggcactcggacgtgtcgtacgagcagcagccgcccggaacgacgttcctgtacgtgctggacctgccgtcgacgggcggcgacacgctcttcgccgacacggccgaggcgtaccgccgcctcagcccgctcttccaggagcgtctgcacggcctgcgcgccacgcactcggccgtcgagcaggctaatgcaagcctcgcgcgcggcggcgtcaagcggcgcgagcccgtcatcaacgagcaccctatcgtccgcacccaccctgtcacgggcgagaaggcgctctatgtcaaccctcagttcacccgcgagatcgtcggcctgaagaaggaagagtcggatgccatcctgaaattcctgtacgaccacatcgccttcggggccgacttccatgtacgtgtcaagtgggaggagaagacggtcgtggtgtgggataaccgggtcacgcagcactcggcgctggtggactggaaggatgggcagaggcgccacttggcgcggatcacgccgcaggcggagaggccttatgaaacgccgtttgagcgcaactaa

SEQ ID NO: 2783 - protein, 379 aa, Myceliophthora thermophilia
MAPSAVETETVTVPDVSTLKLQAVAGPYKELAATRYDAEAEAGLKGHKAAKYPHYLPTWNHNEKYPALEPFEHYEHGKDADTSYPNLLPEGTVKVTHLTPTIGTEVRGIQLSQLSNAGKDELARFVAERKVVAFRDQDFADLPIEKALEFGSYFGRHHIHPTSGAPAGHPEVHIVHRGAGDTGVHDFFAKRTSSVAWHSDVSYEQQPPGTTFLYVLDLPSTGGDTLFADTAEAYRRLSPLFQERLHGLRATHSAVEQANASLARGGVKRREPVINEHPIVRTHPVTGEKALYVNPQFTREIVGLKKEESDAILKFLYDHIAFGADFHVRVKWEEKTVVVWDNRVTQHSALVDWKDGQRRHLARITPQAERPYETPFERN

SEQ ID NO: 2784 - DNA, 333 bp, Myceliophthora thermophilia
atgcagacccgactcagccagagaccaatctccgcggcctctgggtatgcaatgcacccgaatggtacgggctttgccgtagaatcggggaccgtcctctcgtttccgtcattgcggtcgaactgttgttgtggaaaggacaacaagatacggccacgcggcggacaggtcgtcacagacacttccttgccacaacacgggagaagacgtcagaaaaccgaagagaagtttgtcagcgcttcctgccgttcctcccttgtttggagtaggcccttcgcaggaccagaaccaccagagcacgatctcgtcgtcggtggtcgactgcgtccatga

SEQ ID NO: 2785 - protein, 110 aa, Myceliophthora thermophilia
MQTRLSQRPISAASGYAMHPNGTGFAVESGTVLSFPSLRSNCCCGKDNKIRPRGGQVVTDTSLPQHGRRRQKTEEKFVSASCRSSLVWSRPFAGPEPPEHDLVVGGRLRP

SEQ ID NO: 2786 - DNA, 1428 bp, Myceliophthora thermophilia
atggctactgttcaggctgccaggctgctgagaagcaggtcccatgttctccctggtcaattgcacgtcaccgaacttttcttcgaggtgcccaagaaccatgcccggcccgatgctggcaccctgacgctgttcggccggagcgtcaggaaacatgagcggcccatcgtgcccctctccgcttcggacctcgccagcaaggagaagctgccctatatcgtctacctccagggtggcccaggttttggcaatcgcgagccgcagaacatgcccttgacccaggtggccctcagccgtggctatcaggtcctgtacctcgactaccgcggcaccgggctcagcaccccaatcaatgccgactccgtcctcgcacagggcgatcccccgcagcaagccgagtacctgaagctgtttcgcgccaacagcattgtgcgcgatctcgaggccgtgcggctgtgtctgacgcaggattttgacgaggaacgcaaggcgtggtcccttttcggccagtccttcggcggttttgtcgccttgacctacctctccaagtaccctcggggcctccgagaggtctttatgaccggcggcctcgccccggtaaagcgcaccgccgacgacgtctaccgcgccacctacaggaagctcatggagcgcaacgcggcctactaccgcaagtactccgaggatatggtcacggtccgccgtcttgccgagtacatccaggacagaggcgggatccccctcccatcgggcggtaaactgaccgtccaacttttcctcacactgggcctcgcctttggaagccacggcggtctggatgatatccactcgcttgtgctccgcctcggcgccgacatcgaacaattcggcttcttcacgcgagcctcgctggccgccttcgagtcccatatcccctacgacaacaaccccatctatgccatcctccacgaggccatctacaacaccaagcaaaggggctccccaccctcaaattgggctgccgaccgcataggacgggagctccaacctttctcctggctcgccgaccccgcaaacttcctcaaatctaccccgtcccacgagcctttgtacttttcgggcgagatggtttaccctttttactttgagggtacgaccgggccggagctggcgcgcatggctaccgcggctgacatcttggccaagacggaggagtgggacgaagacttgtatgacgaggatcagctgcgccggaatcaggtgcccgtgtacgccatctcttacgtggacgacatgtacgtcgactttgagctggcccgagagaccgcggcattggtgaaggggatcaaggtccacgagaccaacggatggtatcacgatgcggtcaggtccaagtcggaggaggtgtttgccgccctgttcaagctgagggatgataatatcgactga

SEQ ID NO: 2787 - protein, 475 aa, Myceliophthora thermophilia
MATVQAARLLRSRSHVLPGQLHVTELFFEVPKNHARPDAGTLTLFGRSVRKHERPIVPLSASDLASKEKLPYIVYLQGGPGFGNREPQNMPLTQVALSRGYQVLYLDYRGTGLSTPINADSVLAQGDPPQQAEYLKLFRANSIVRDLEAVRLCLTQDFDEERKAWSLFGQSFGGFVALTYLSKYPRGLREVFMTGGLAPVKRTADDVYRATYRKLMERNAAYYRKYSEDMVTVRRLAEYIQDRGGIPLPSGGKLTVQLFLTLGLAFGSHGGLDDIHSLVLRLGADIEQFGFFTRASLAAFESHIPYDNNPIYAILHEAIYNTKQRGSPPSNWAADRIGRELQPFSWLADPANFLKSTPSHEPLYFSGEMVYPFYFEGTTGPELARMATAADILAKTEEWDEDLYDEDQLRRNQVPVYAISYVDDMYVDFELARETAALVKGIKVHETNGWYHDAVRSKSEEVFAALFKLRDDNID

SEQ ID NO: 2788 - DNA, 681 bp, Myceliophthora thermophilia
atgggatcccaaagcgacctcaagcccatcaaggcgtacggcaagggcagcccgaacaccgacaaagtggtcattatcctcgaagagctgggccttccccacgagatcgagaccgttccctacagcgacgtaaagaagcccgagtacctcgccatcaaccccaacggccgcctgccatccatccgggaccctaacaccggcctcacgctgtgggaatcaggtgccatcctccagtacctggtagacaagtacgacaccgaccacaagctcagcttcccggccggctccaacgaggactacctggccaagcagtggctcttcttccagaccaccggccagggtccctactatggccaggctgtatggtttaccacgtaccaccaggagaagctgccgagcgcgatcgaccggtacatcaacgagatcaagcgggttacgggcgtgatcgaggggcacctggccaggcagaaggaggagcatggggccaaggaagggtttgatggcccgtggctggtcgggaacaagctgtcgtacgtcgacttttcctttgcgccctggcaggcgatcgccaagagactgtttggagaaactggccagtacaacgaggacgactacccgtttgtgaaggagtggctggggaagctgctcgcacgggagtcggtgaggaaggctttggagtag

SEQ ID NO: 2789 - protein, 226 aa, Myceliophthora thermophilia
MGSQSDLKPIKAYGKGSPNTDKVVIILEELGLPHEIETVPYSDVKKPEYLAINPNGRLPSIRDPNTGLTLWESGAILQYLVDKYDTDHKLSFPAGSNEDYLAKQWLFFQTTGQGPYYGQAVWFTTYHQEKLPSAIDRYINEIKRVTGVIEGHLARQKEEHGAKEGFDGPWLVGNKLSYVDFSFAPWQAIAKRLFGETGQYNEDDYPFVKEWLGKLLARESVRKALE

SEQ ID NO: 2790 - DNA, 648 bp, Myceliophthora thermophilia
atgccgcctaaacgctccaagccccaacaccaaaagagcaaacgaattcgagtggcccgccccgagactggccctccggcagaatcccagtccccaacagccaagagcgaggcagactctccagtctacttttggcgcatatcagatcctgcgggctacctttcccaatggtacccgtgcgccttcagcgacgacaaggacccctccatcatctacccaaccgctgagcactacatgatgtaccaaaaagccgtcctcttctccgacttggacgtgggcgcggagatcctggccacccccgacccgcgagaggtcaaggccctggggcggaaggtatccaacttctcggacgcagtgtggaacgcgcggcgcgaggggattgtgcgccgcggcaacctgctcaagttcacgcggcccgtcgatcccgaggacggatggtggatggtgcacttggacggcgagggcggcgagagcgtcagcatccgggagctgctgctccggaccggggacagggagatcgtcgaggcgagcccgctggaccggatctgggggatcgggtttagcgcggccaaggcggagagcatgaggaagaggtgggggctgaatctgctgggcaaggcgttgatggctgttagggaagagttgtga

SEQ ID NO: 2791 - protein, 215 aa, Myceliophthora thermophilia
MPPKRSKPQHQKSKRIRVARPETGPPAESQSPTAKSEADSPVYFWRISDPAGYLSQWYPCAFSDDKDPSIIYPTAEHYMMYQKAVLFSDLDVGAEILATPDPREVKALGRKVSNFSDAVWNARREGIVRRGNLLKFTRPVDPEDGWWMVHLDGEGGESVSIRELLLRTGDREIVEASPLDRIWGIGFSAAKAESMRKRWGLNLLGKALMAVREEL

SEQ ID NO: 2792 - DNA, 963 bp, Myceliophthora thermophilia
atggctgcgccaccaaccgcgccgactgattcagggggcaagttcagcgaccctcttgttttccgcggcgtcggctcgcaccctgccgcttcccccgtggcgaccgcttccgcgcttccgcctggtccccctttcactaacgccaatcttatccacagagcgctgatttacccttctaatgtcccgcccaatgcccgcaccgacgttccccgcccgagccagtacaacttcagagactacgaagagctgatcattccgaccaacgatggcgagaagctgtcggccttttatatccggggtccccgcggagggcccaattccaaactgacggttctcatgttccacggcaacgcaggcaacattggccaccgcctgcccattgcacgcatgttgatagccgcttccggctgcaacgtcttcatgctcgagtaccgcgggtacggcatctccacgggcgagcccgacgaggccggcctgaacattgatgcccagacggcgctcgactatctccgtgaccgtgccgagacgcgggaccacaagattgtcgtgtacggacagagcctgggcggcgccgtggccatccgtctcgttgccaagaaccagagcaccgcaaacatcagtggcctgatcctcgagaacaccttcctcagcatgcgcaagctgataccctccatcatgccccccgccaagtacctcgcctacctttgccatcaggtctggccaagcgacagcctgatcccgagcatcaaggtgcccacgctcttcctaagtgggctccaggacgaaatcataccgcccattcacatgaagcgcctccacgacctgtcaagagcccccataaaggtgtggaaacctctccccggaggcgaccacaactcgagtgttgtggaggagggctattttgaggcgattgccgagttcttggaaaggctcatggatgaggagaagaaagagaaggaatga

SEQ ID NO: 2793 - protein, 320 aa, Myceliophthora thermophilia
MAAPPTAPTDSGGKFSDPLVFRGVGSHPAASPVATASALPPGPPFTNANLIHRALIYPSNVPPNARTDVPRPSQYNFRDYEELIIPTNDGEKLSAFYIRGPRGGPNSKLTVLMFHGNAGNIGHRLPIARMLIAASGCNVFMLEYRGYGISTGEPDEAGLNIDAQTALDYLRDRAETRDHKIVVYGQSLGGAVAIRLVAKNQSTANISGLILENTFLSMRKLIPSIMPPAKYLAYLCHQVWPSDSLIPSIKVPTLFLSGLQDEIIPPIHMKRLHDLSRAPIKVWKPLPGGDHNSSVVEEGYFEAIAEFLERLMDEEKKEKE

SEQ ID NO: 2794 - DNA, 1341 bp, Myceliophthora thermophilia
atgagactcctgcaagcagtgcggccagttctcgctcggcgcggggccgtgacaagacaactgctcggccagtcggtggtccgcagcccggtggttctcccaaagcgatacaatagcggagctgagtacagggagcccacggactggaagagagccatcgaggtcaaccgctttgggctctggatagaactccctccgtacctggagttttccggccagaacgttcgtcgcaacaactttccaaacatctggcttcgagacaactgccgctgcaccgactgcgtcaaccaagacacgaagcaacgcaactttgacactttcaagatcccgccagacatccgtatcatcaaagtcaaagcggattacacccatgtctggctggaatggtctgacggccacaggagcgtctatcgttgggacttcctccggcactacatgtattacgatcaccgcgccgacaagcccatgcgggaatactggggagacgaaattcagatgaggcctccggaggttgattatgacgtggtcatggaggatgataatgacgaccatggcgtcgccctcttgaccgataagatcgcaagtaggacatacggcttctgcttcgtcagacacactccttacgaggacccggacgacacccggaagctgctcgagcgcatcgccttcatccggcagacacactacggcggcttctacgacttcaagcccgacctcgccatggccgacacggcctacaccaatcaggcactgccgccgcacaccgataccacctactttaccgaccccgcagggctgcaggccttccacatgctctcgcacgagcgcggcccggatggcgagaggccctacggcggcgcgtcggtgctggtggacgggttcaaggcagcgcgggtcctccatgacgaagatcgggaagcgtacaatgtcctgaagaaggtcagactgccgtggcacgcgagcggcaacaagggcatcaccatccggcccgacgtcaactacccggtgttcgagacgcactcgtccttgggactgtatcggatccggtggaacaacgatgacagaggagtggtcccctttgacaaggtccggcccgaggtgtggtacagggcggccgccaaatggaacgagatcatcaaccggccgcggctgcagtattggttccagctgacccccggcacggtagtcatctttgacaactggcgtgtcctccatggccgaaacgcgttcaagggtatcaggaggatctgcggagcatatatcaacagggacgattgggtctcccgatggggaaacctcaacctcaccgagcgggagaatctctacagagtaattgggtag

SEQ ID NO: 2795 - protein, 446 aa, Myceliophthora thermophilia
MRLLQAVRPVLARRGAVTRQLLGQSVVRSPVVLPKRYNSGAEYREPTDWKRAIEVNRFGLWIELPPYLEFSGQNVRRNNFPNIWLRDNCRCTDCVNQDTKQRNFDTFKIPPDIRIIKVKADYTHVWLEWSDGHRSVYRWDFLRHYMYYDHRADKPMREYWGDEIQMRPPEVDYDVVMEDDNDDHGVALLTDKIASRTYGFCFVRHTPYEDPDDTRKLLERIAFIRQTHYGGFYDFKPDLAMADTAYTNQALPPHTDTTYFTDPAGLQAFHMLSHERGPDGERPYGGASVLVDGFKAARVLHDEDREAYNVLKKVRLPWHASGNKGITIRPDVNYPVFETHSSLGLYRIRWNNDDRGVVPFDKVRPEVWYRAAAKWNEIINRPRLQYWFQLTPGTVVIFDNWRVLHGRNAFKGIRRICGAYINRDDWVSRWGNLNLTERENLYRVIG

SEQ ID NO: 2796 - DNA, 765 bp, Myceliophthora thermophilia
atggccgacaccaccaagaccgatatccacctctacacggcccagacgccgaacggcatcaagatctcgatgctgctcgaggagctcggtctgccgtacaaggtcacagccatcgacttcagcaagaacgagcagaaggagccctggttcctcgagatcaaccccaacggccgcatccccgccctgaccgatgtcctcccggacggctcgcccatccgcctcttcgagagcggctccatcatgcagtacctggtcgaacgctacgaccccgagcacaaggtctcgtacccgcggggcacgcgcgagtactacgaggtgaacagctggctgttttggcaagttgctggtctcgggccgatgcaaggccaagcgaaccatttctcaagatatgcccccgagaagatccagtacggcatcgacagataccgaaatgagacacgccgcctgtacggcgtcctggacaagcagctgagccagtctacctcgggttacattgtgggcgaccggtgcaccatcgccgacattgcttgctggggctgggtggctgctggatattgggccggtatcccggtgcacgagttcccccacctcaacgcctgggtcgacaagatcctgtcccgccccgcttgcgagaaaggtaggcacgtcccgagcccgcacaaggtcctggagagccggcacaagaccgaggaggagctcgacgcggcggcggctcagactagggattgggtgcagcgaggcatgcaggaggattcgaagaagtga

SEQ ID NO: 2797 - protein, 254 aa, Myceliophthora thermophilia
MADTTKTDIHLYTAQTPNGIKISMLLEELGLPYKVTAIDFSKNEQKEPWFLEINPNGRIPALTDVLPDGSPIRLFESGSIMQYLVERYDPEHKVSYPRGTREYYEVNSWLFWQVAGLGPMQGQANHFSRYAPEKIQYGIDRYRNETRRLYGVLDKQLSQSTSGYIVGDRCTIADIACWGWVAAGYWAGIPVHEFPHLNAWVDKILSRPACEKGRHVPSPHKVLESRHKTEEELDAAAAQTRDWVQRGMQEDSKK

SEQ ID NO: 2798 - DNA, 1164 bp, Myceliophthora thermophilia
atggataaagcacttcgattcaccgaaggtcacccgatgttctggacgtctaacgccttcgccaccgtcgaggggtctagtgacgcaccagggcacgtctatcaagtcggaaagcaaggcgcggatgaggtcgacgcggccttgggaccattcaggaagtgtacattcgacgccgaacgcgtgacacgcgagaccttcgttctcccgacgattcaagcccaacttgctcgtgcttcgctcgacgtccacgaaggccggggctttgtcattgttaggggtctcgacccgcaacggtacacagccgaagagaacttgacaatatttctgggcatatccaactacattggagaacagaggggcgtgcaggacaagatgggttccatgctgacccatgtcacggattccaaggtctggaccacgccaccggaaatgcgtcatggtatacacacgaccaccggtttggcttggcactgtgacatgggagccgatgttctcgcattgcatgtgcgatctcttcccaaatccggcggcagcacctttgtggcatcgtcgtggaccatctacagggagctggcagagtcgtatccaacagttcttgaggcactgtgcgacgcgaactggccgatccaggtgtcggggaacccgccgcgatacattgtcgcgccgctcctgcatgtttccgatgataagattctgatcagtgtcgacccaggacgactgggccttcatcctgcaacagccaagatcggaaccgagccccctgtccctgccttgagccagcagcaactcgaggctctcggagttctttccgccctggcaaccaagcaccgattttgcctggacctgaagttgggcgacattgtcttcattaacaacctcggtctcctgcatgctcgtgacccctacgtcgaccccgcgaacggccccggccgtcatctcgtccgcctgtggctgcggaacccaaagctggcttggaccataccacaggcgatgcgtcctccctgggaagctgcattcggccctaacggtaaaggcttcccggggctcgagaagcggtatcctgttgaaccgagcctggtgtacaagccaccaaagtacacggcgggttcggccgctttcgtccttgaggacggcgaagacgtcaacgccgaaggatatatttga

SEQ ID NO: 2799 - protein, 387 aa, Myceliophthora thermophilia
MDKALRFTEGHPMFWTSNAFATVEGSSDAPGHVYQVGKQGADEVDAALGPFRKCTFDAERVTRETFVLPTIQAQLARASLDVHEGRGFVIVRGLDPQRYTAEENLTIFLGISNYIGEQRGVQDKMGSMLTHVTDSKVWTTPPEMRHGIHTTTGLAWHCDMGADVLALHVRSLPKSGGSTFVASSWTIYRELAESYPTVLEALCDANWPIQVSGNPPRYIVAPLLHVSDDKILISVDPGRLGLHPATAKIGTEPPVPALSQQQLEALGVLSALATKHRFCLDLKLGDIVFINNLGLLHARDPYVDPANGPGRHLVRLWLRNPKLAWTIPQAMRPPWEAAFGPNGKGFPGLEKRYPVEPSLVYKPPKYTAGSAAFVLEDGEDVNAEGYI

SEQ ID NO: 2800 - DNA, 921 bp, Myceliophthora thermophilia
atggctatcgaaaaggaaggcacttttgaggtcgatgggcacagtctctacaccaagtcttggcttcccgacggcccaaccaaggccaaactgatcttcttccacggcttcagcgaccacgtcaaccgctaccaggccttcttctcggcgctcgcggcccgcggcatcgccgtgtacggcgtcgaccagcgcggctggggtcgctcggtcaagaagccgtccgaacgaggtcttacggggccgacgagccgggtgctcgccgacatggccgccttcattaggccgcacctcccttcctcgccggcggacgtgcccgcgttcgtcatgggccactcgatgggcggcgggcaggtgctcactcttgcatgccacccggactaccaggagagcgtggtgcggcccgtgcgcgggtggctgctcgagagccccttcatcagcttctcgcccgaggaggagccgtcggcggtcaaggtgtttgccggccggctcgccagccggctgctgccccacttccagctcaagcacgagatcgtgccggagcacctgtcgcgcgatccggaggtgagggagcgcctggtgcaggacccgctgatgcacaacacgggcacgctcgagggcctggccgggctgctggaccggacgggggccctggcccggggcgaggtcaggccgcagccgggaggggcgctcaggagtctgtggataggccacggcaccgaggacaagacgacctggttccccgccagtcgcaagtattttgatgagtgcacgaaggaggtcaaggaccgcgagttcaaggcgtacgaggggtggtatcacatgctgcacgcggacggacccgaaagcgagcagttcttcaaggacgtgggagattggatcctcgcaagatgcgacggggagaaaccagaggccaagctctag

SEQ ID NO: 2801 - protein, 306 aa, Myceliophthora thermophilia
MAIEKEGTFEVDGHSLYTKSWLPDGPTKAKLIFFHGFSDHVNRYQAFFSALAARGIAVYGVDQRGWGRSVKKPSERGLTGPTSRVLADMAAFIRPHLPSSPADVPAFVMGHSMGGGQVLTLACHPDYQESVVRPVRGWLLESPFISFSPEEEPSAVKVFAGRLASRLLPHFQLKHEIVPEHLSRDPEVRERLVQDPLMHNTGTLEGLAGLLDRTGALARGEVRPQPGGALRSLWIGHGTEDKTTWFPASRKYFDECTKEVKDREFKAYEGWYHMLHADGPESEQFFKDVGDWILARCDGEKPEAKL

SEQ ID NO: 2802 - DNA, 1026 bp, Myceliophthora thermophilia
atgaccaactccgagctggccactcggggccccgaaagcgatgcgcaagagaccgacaccccgtctcccagcgactctcccgccttggcggatgctcctgcacacccagccatgactgagcattgcacatccgatcggccactccccgcgggccagacttccacaggcgaattgaccaaattgaacgacgtcgatgtctacatctccaaaccagccgactacccgcacaccccgtctcggctcctcctccttttaacaggcgggactggcctgcacagtgtcaacaaccagatccaggcggaccgctttgcgagcgaggggtacgtggtggtgatgccggacctgttcgcgggcgacccggcgcccaacagcagcctgaccgcggccgatttagccggtgtcagtacaacggcggcccagtcttcgtcgtcatcgtcatcgtcgctgctcgacgtgttcaaggtcaaggcgctcgagacggccaagagcttcctgatcgacatgtggttggcgcggcacacggaagagaaggtgatgcccatcctggaaaaggtgctcgagggggcgagggacgagttcgcggacgccgtgtctgacgggggcggggtgtacgcggtggggtactgcttcggggcgaggtatgtcctgctgctggccgcggaacggccggccaggcggcaggggcagcgccgcggggatgacgaggaggcgaaccggccggcgacggtgccgccgcagatcaaggcgggtgcgctggcgcacgcgacgctggtgtcgaagcaggactttgtcggactcaaggcgcccttgagcgtggtttgcgtcgaggatgatcccgtgttcccggacgaggtgaggatcgctggggagcagtacatgactgagaatggggtcgagcacgaggtgcaggtctatcccggagtgccgcatggcttcgcggtcgtgggggactatgacgacccaaacatcaagatggcgcaggcaactgcgtttgagcagatgctgaaatggatcaaggagcattaa

SEQ ID NO: 2803 - protein, 341 aa, Myceliophthora thermophilia
MTNSELATRGPESDAQETDTPSPSDSPALADAPAHPAMTEHCTSDRPLPAGQTSTGELTKLNDVDVYISKPADYPHTPSRLLLLLTGGTGLHSVNNQIQADRFASEGYVVVMPDLFAGDPAPNSSLTAADLAGVSTTAAQSSSSSSSSLLDVFKVKALETAKSFLIDMWLARHTEEKVMPILEKVLEGARDEFADAVSDGGGVYAVGYCFGARYVLLLAAERPARRQGQRRGDDEEANRPATVPPQIKAGALAHATLVSKQDFVGLKAPLSVVCVEDDPVFPDEVRIAGEQYMTENGVEHEVQVYPGVPHGFAVVGDYDDPNIKMAQATAFEQMLKWIKEH

SEQ ID NO: 2804 - DNA, 1533 bp, Myceliophthora thermophilia
atgaagaacggacaaaagaacggacacacgttcatcgtcgagggcgacaagcatgagtttgaccctgagaaatgggtcggcaccagccccgatggcctccctaaacggcacccagagacgcacgtcaatgtgctgatcgtgggcgccggggttggcggcctgatgacggcactggagtgctggcgaaagggacacaacgtggtgggcatcctcgagcgcagcgccggtcccaactacagcggcgacttgatcatcatccagccgtccgccgtggccgtgttccgccactggcccgacatgtaccgcgagatcgaggccgacaaggtggacgcgcccatgtactacgtacggcacacgggcgaggtcatctacgggccgtcgaagccgacgtacaacgacccggagcacgcggcggagcgcaagaagcacccgttcgtggggccggtgcagatccgcaagaagttctaccggatgctgctgcggcaggtggcgcggctggggctgcgggtcgagtacggccagcgggtggagcgctacttcgaggacgagaaggccggggtcgccggcgtcgtggtggcggacggcagcgtgcgggcggcccacgtcgtcgtggccgcggacgcgttccggtccgagtcggagctgcttcgtcgccggcgagcacatgccgacgcggtcgtcgggcatctggcggcgggcgacccggcggtggaggcgcggtggccgcgcgggtccggccagaccaaggagtactggctcggcccggggatgcacatgggcctcttcgtgtcggacgacctggtcgccttcgggctgacgccgcgcaacagcttcctgtccgagggcagcagcgagccggccgagtcgtgggacccggacgtcgacccggacgaggtgctgcaggtgctccatcgggtgcccggctgggacccggccatcgccggcctgatccggtcggccccgcccggctccatcgtccactggccgctgctctggcgcaacctgcggcccgagtggacctccaaggccggccgcgtcgtccagctgggcgactgcgcccactcgagcgtgcccgcctcggccgccggcgccacgctcgcgctcgaggacgccgtcaccctggccgcctgtctgcagctcgccgccgccgccggcgccgggggtgcccgggccgcgccgctcggcaccaaggtgtacaacctgctgcgctatcagcgtgtcagctgcgtccagaagatggcctttgtcaactcgcagctcctcaacgcctcgaccgccaactgggacgccatcgagcaggaccccaagcaggtccgcatccgcttccccaagtgggtcttccgccacgacccggaggcctacgcgtacgagaagtacggccaggcgtttgcccacctcgtcgccggcgaggagttcgtcaacacaaacttcccgccgggccacaagttcaccccctggaccctcgaggaaatacagcagctgatccgggagggcaagcgtgtggaggatctcttggacggagactggtcgtag

SEQ ID NO: 2805 - protein, 510 aa, Myceliophthora thermophilia
MKNGQKNGHTFIVEGDKHEFDPEKWVGTSPDGLPKRHPETHVNVLIVGAGVGGLMTALECWRKGHNVVGILERSAGPNYSGDLIIIQPSAVAVFRHWPDMYREIEADKVDAPMYYVRHTGEVIYGPSKPTYNDPEHAAERKKHPFVGPVQIRKKFYRMLLRQVARLGLRVEYGQRVERYFEDEKAGVAGVVVADGSVRAAHVVVAADAFRSESELLRRRRAHADAVVGHLAAGDPAVEARWPRGSGQTKEYWLGPGMHMGLFVSDDLVAFGLTPRNSFLSEGSSEPAESWDPDVDPDEVLQVLHRVPGWDPAIAGLIRSAPPGSIVHWPLLWRNLRPEWTSKAGRVVQLGDCAHSSVPASAAGATLALEDAVTLAACLQLAAAAGAGGARAAPLGTKVYNLLRYQRVSCVQKMAFVNSQLLNASTANWDAIEQDPKQVRIRFPKWVFRHDPEAYAYEKYGQAFAHLVAGEEFVNTNFPPGHKFTPWTLEEIQQLIREGKRVEDLLDGDWS

SEQ ID NO: 2806 - DNA, 1401 bp, Myceliophthora thermophilia
atgcctacctccaccgacgccctcgtcgagctcctcgagaccgtcatcgaggaccaccgcgacgtggcggccgggcagggggtggtcctgatcggccatagcatgggcgcctccctcgccgccctgcttgccaacccgcggaagccgacgacggcgctccacgagcacgtcgtcgggttggttgccgtgtgccccacggcggggcagttcactccggggctcgtccgcttgctgcgggcagcgctctacatccccgacttcatctttgacctctggagggcctgggacaggcggggagggctcgagagccccagcgtgcaccggttcgtcggggcgggcgccgacaccgagaccaagcggctccagtacatgtacaacttccagagcaaaacccccgtctggcggcgcatggcgtggggcgcgctccccgtctacaccaacggcgtgccttcggacggcatcgcggggctggacgtctgggccggcctgaacctgcccgtgttcctggtcgccgggtccgacgatcaggtggtgcccccgggggaggccgaaaagatcgcggcggtcctcggcgatgacaagtcagagtccagcctggagaccaacgggtctgcgaagcgcggcggaggagggagcgcgccggccaatggggcggcggcgctcccagatctgccacggcacccaaagaaggtggtcatcagcaccaggctgccgagcccggccgggcacggcctgctgtacgcgcccgcgacggtacccgtcctggcgggcctcgtgtcggacttcctctcgacgcgcgtcacgggccgcctgtcgctgggctggcagctgcagcacctctgccgcggcgggaagtgggacgtcaagaatctcgagaagtggcgcaacgtggcgcccgtgtcggggccgatcggcggcatgttccgggccatcaagacgctccgggaggtggacgatgagcactgcccgcgcgtgttcgtccggaagtggggacacatcatcaaggacgtcatcgacatctcgcacgacaacccggtctacaacccgtcgggcctcgagcagggcggcatccggtaccacaagtacgcgacgctgtccaaggtgccgcccaacgagagcgagatccgcggcttcatcgacctggtcgacaagatccgggcccgccagcgggaccaggccaggaccgacggttgggccgacggttacgccatcggcgtccactgccactacggcttcaaccggaccggcttcctcatcgcctgctacctggtcgagcggtgcgggttcaccgccaaggaggccattgaggcctttgccaaggccaggccgaacgggatcaggcacgagcatttcagggaccggctctatgtccggtactctggcgtcaagagtgagacatag

SEQ ID NO: 2807 - protein, 466 aa, Myceliophthora thermophilia
MPTSTDALVELLETVIEDHRDVAAGQGVVLIGHSMGASLAALLANPRKPTTALHEHVVGLVAVCPTAGQFTPGLVRLLRAALYIPDFIFDLWRAWDRRGGLESPSVHRFVGAGADTETKRLQYMYNFQSKTPVWRRMAWGALPVYTNGVPSDGIAGLDVWAGLNLPVFLVAGSDDQVVPPGEAEKIAAVLGDDKSESSLETNGSAKRGGGGSAPANGAAALPDLPRHPKKVVISTRLPSPAGHGLLYAPATVPVLAGLVSDFLSTRVTGRLSLGWQLQHLCRGGKWDVKNLEKWRNVAPVSGPIGGMFRAIKTLREVDDEHCPRVFVRKWGHIIKDVIDISHDNPVYNPSGLEQGGIRYHKYATLSKVPPNESEIRGFIDLVDKIRARQRDQARTDGWADGYAIGVHCHYGFNRTGFLIACYLVERCGFTAKEAIEAFAKARPNGIRHEHFRDRLYVRYSGVKSET

SEQ ID NO: 2808 - DNA, 1092 bp, Myceliophthora thermophilia
atggccaccaacaaggtcgacaagctcgcaccgaccgactcccgggtccagcaccacacctacactatcccaggctcccctcacaacacaacctaccactacttggtcgccgagccctcgtcgggtgctgcccccgtcgcgaccgccctcctgatccacgggttcccggacctcgcgtttggctggcgctaccaggtgccctacctggcctcgctcggcctgcgcgtcatcgtgccggacctgccggggtacgggcgcaccgacgcccccgccgagctgagcgcgtactcgtacaagcgggtgatcgacgacctcgtggcgatcgtgcggcgggtgcagggcaagaacgaacccttaaaggagggggaggtaccggcggaggaggacaagatcgtgctgggcgggcacgactggggcggcgcggtggcgtggcgcttcgccctctggtacccgcagctgctgcgctgcgtcttcagcgtgtgcacgcccttctggacggtgggcgacacgttccacaccaaggagcagatcgtccagcggctgcccaactttggataccagctgcagttcgagcggaccgaggtcgaggacgcggtgcagggccgcgacaagatcaggacctttctgagagtcatgtacgggggccggagggcggacgggcagcccgtctttggcgtggccaagggagtgaacctggacctgctggaggaggacaacaagatcggggagagtccgctgatgagcagggaggagttggacttctacgcggacgagtacgtcaagaacgggatgaggggcccgctgtgctggtacaagaccgccaaggtcaactttgacgaggagcggccgctgttccgggagggcaggaccaagatcacggtcccgtcgatgatggtgacggcgacgagggacgctgccctgcccccggccatgtcggcggacatggacaagcacttcaccgctcctctggtcaggcgggaggtgaacgcgtcgcactgggcgctttgggagacgccggccgagacaaacaagcatatcggcgactttttggaggggatcctgaagaaccagccccttaaggcttctatctaa

SEQ ID NO: 2809 - protein, 363 aa, Myceliophthora thermophilia
MATNKVDKLAPTDSRVQHHTYTIPGSPHNTTYHYLVAEPSSGAAPVATALLIHGFPDLAFGWRYQVPYLASLGLRVIVPDLPGYGRTDAPAELSAYSYKRVIDDLVAIVRRVQGKNEPLKEGEVPAEEDKIVLGGHDWGGAVAWRFALWYPQLLRCVFSVCTPFWTVGDTFHTKEQIVQRLPNFGYQLQFERTEVEDAVQGRDKIRTFLRVMYGGRRADGQPVFGVAKGVNLDLLEEDNKIGESPLMSREELDFYADEYVKNGMRGPLCWYKTAKVNFDEERPLFREGRTKITVPSMMVTATRDAALPPAMSADMDKHFTAPLVRREVNASHWALWETPAETNKHIGDFLEGILKNQPLKASI

SEQ ID NO: 2810 - DNA, 954 bp, Myceliophthora thermophilia
atggaggataagtgcgttacgctaaacagcaagcctggtgcctcccttcatgtttcgttttcccatcccaaaccgcggcagagcccgctgtccaacacgctagtagtgttcctgaacggcctcatgatgccttcggcagcctgggttgagtcagttaaccacctgctcaacctccggaaggactcgggccaaccaacccctgctctgctcctgtatgatcgttacggccaaggcaaatctgactcagacccgtccgacgcctgggactcaccatacgggcacgatgcccgcacagtcatcagcgaccttcaccagctcctcacccaagtatctcacgaagagctcggccgccgactggaagacctccgcctggtcctcgtatgtaattccatcgggtgtgcccttgcccgcctctacgcagccgaacaccccggccgggtcgcggcgtatcttttcctggattcgatgatggccaacacggacttcggctccatcttccctgacccagacgacccgggatttgacgagggtcggctccccgaggacatcacgaccgacgacctgcggcacgcacgggcaaagttccaggaactcttccacccaacagtgccaaacccagagcgcctggacagaaggaacctgcgagaactgctgccacacgcggaccggcctggtttgccaaacgttacgaaggataaacctccgttgctgactgtagtgggacacgattgggacgagtttgccgcccagtgcgagcaaggttcgctatcagttccaagggccgtgatcaacacgtacttgaaccctgcatgggctgtgtacaatgagggcttgacccgcctggtcccggcagagaccaaggtgaagatcgccagggggtgcggccacttcatccagaaagacgacccggccttcgtggcggccgagttgagcggcatcttgaatgagctatag

SEQ ID NO: 2811 - protein, 317 aa, Myceliophthora thermophilia
MEDKCVTLNSKPGASLHVSFSHPKPRQSPLSNTLVVFLNGLMMPSAAWVESVNHLLNLRKDSGQPTPALLLYDRYGQGKSDSDPSDAWDSPYGHDARTVISDLHQLLTQVSHEELGRRLEDLRLVLVCNSIGCALARLYAAEHPGRVAAYLFLDSMMANTDFGSIFPDPDDPGFDEGRLPEDITTDDLRHARAKFQELFHPTVPNPERLDRRNLRELLPHADRPGLPNVTKDKPPLLTVVGHDWDEFAAQCEQGSLSVPRAVINTYLNPAWAVYNEGLTRLVPAETKVKIARGCGHFIQKDDPAFVAAELSGILNEL

SEQ ID NO: 2812 - DNA, 993 bp, Myceliophthora thermophilia
atgatcgattcccctaggggtttcttgaagcaggaaaacacgatcgatatggccatcttccacgccgagacggatggcgcgagcctcttttaccgctactatactccttcccgttcttcgccccacagactggcgaccaccgtcgagcggcagccgctgacgctcgtcttcctccacggctggcccatgtcgtcccgcatgttcgaccagctcatcgtgccgctggttgaatcccaccggttccccgtcatcgcgcccgaccgccgtgggttcggcaacagcgagtgggccaacccggccacgggtgaggtgacgttcgacaccttcgtcagcgacgccgtcggcctcctggagcacgtcatgcaaaagaacccgggcccgtttgttttcgtggccgcgagcatgggctgcagcgagtcggtcctgacctgcatcgccagcccgtttttgcacacccactgcaagggattcgtgtggatcgggcccaacatgcccaacagcgtgagcagcgatgaatgtcccagcgcccccggcaaggaggtctgggacgggctggtgcagagcttccggggcgccggcggcaaggacttcatccgagacgcgatcccgggtgtcttccgcgtcgatctcggcaacgacgtcagcaaggacaccctgcagttcttcgagcggctcgtccaacaggcagacccggtggcagtcgagcgaacggccatcatactgcagaagccgatggcccgggagctgagggagtgggccgagtcggcggcggccgacgagcgggagaaagtgccggttctcatcctccacggagattccgacagcggaatgcctctcgagacgagcgcggcgttggtccacaagatgcttccctggtctcggcttcgtgtgtatcagaaagcaggacatgggctttacctgacacatgcgcaacaagtgctgcatgacatgcttgcgtttcttgaacccattgtttctcagcagcgtttgtaa

SEQ ID NO: 2813 - protein, 330 aa, Myceliophthora thermophilia
MIDSPRGFLKQENTIDMAIFHAETDGASLFYRYYTPSRSSPHRLATTVERQPLTLVFLHGWPMSSRMFDQLIVPLVESHRFPVIAPDRRGFGNSEWANPATGEVTFDTFVSDAVGLLEHVMQKNPGPFVFVAASMGCSESVLTCIASPFLHTHCKGFVWIGPNMPNSVSSDECPSAPGKEVWDGLVQSFRGAGGKDFIRDAIPGVFRVDLGNDVSKDTLQFFERLVQQADPVAVERTAIILQKPMARELREWAESAAADEREKVPVLILHGDSDSGMPLETSAALVHKMLPWSRLRVYQKAGHGLYLTHAQQVLHDMLAFLEPIVSQQRL

SEQ ID NO: 2814 - DNA, 1143 bp, Myceliophthora thermophilia
atggccgccaggctcgtctcccatccggccccgaagccgcactcgatctacgagtacgccgggctcgcgagaccgccccatctcggccgtctcgagagggccacgcacaagagcggcgtggtcgagtcgctcagcatcggcgtcgacgacgaggacgacgggtacgtccctggcttcttgcacctcccgcccgacattttcaccaccgacgctccgccgccctccgccgctgctgtttcgaccaagtcatccgaccaagaagaagaaggaggaggaggaggaggaggaccgggagccccgacggccgagcagacgagccaacaacaagaacaacaacaacaggaacagcagcagcagcagcattatcagcggccggccaccgcgcagccgccgcaccaccaccgcacggccgcgatcctgctgtcgggggcgggaggcggggtgacggggccgagctcgatgtacctgtcgctggcgtgcaagctggcgacgctggggcgggggatcccgacgctgcggctggactaccgggcggccgggcggcgggaatcgtgcgcggccgacgcgcgcgccggcatggcctacctgcgggacctgtacgggctcgaccggttcgtgctggtgggctggtcgctcgggggcgccgtcgccctctcggccgccgccgacgacccgcgcgtggtcggttgcgccgccgtggccagccagatgccgctgccggtgccgctgcccggtaccgagggcgagggtaccctcgccctcgacctcgccctcaccgacgccgacgccgatgccgtcgccgcctgcctgccgccccgaccgctgctgttgctgcacggcagcgacgacagcacggtcggggtcgagtgctcgcggcgcctattcgacgcatacgggacccgagacggggccggggcgggcgaccgggcgctcgagatcttcgagggcgacaaccacgcgctgagtggcaacgcggagcgcgccgaggagctgctgtgcgagttcgtcgcccggtgcgccggcgtccgcgtcggcccgcgcgagagggaggacgtggtggcggccgagctggtcgagggcggggagcgccacgcgctcatggagcggggaggggatctccggcagccggagcgcgaggactaa

SEQ ID NO: 2815 - protein, 380 aa, Myceliophthora thermophilia
MAARLVSHPAPKPHSIYEYAGLARPPHLGRLERATHKSGVVESLSIGVDDEDDGYVPGFLHLPPDIFTTDAPPPSAAAVSTKSSDQEEEGGGGGGGPGAPTAEQTSQQQEQQQQEQQQQQHYQRPATAQPPHHHRTAAILLSGAGGGVTGPSSMYLSLACKLATLGRGIPTLRLDYRAAGRRESCAADARAGMAYLRDLYGLDRFVLVGWSLGGAVALSAAADDPRVVGCAAVASQMPLPVPLPGTEGEGTLALDLALTDADADAVAACLPPRPLLLLHGSDDSTVGVECSRRLFDAYGTRDGAGAGDRALEIFEGDNHALSGNAERAEELLCEFVARCAGVRVGPREREDVVAAELVEGGERHALMERGGDLRQPERED

SEQ ID NO: 2816 - DNA, 900 bp, Myceliophthora thermophilia
atggcggcgaagacgacgattcgagtgccgcacctgggcggcatcgaggccggctacgccttctcgggcgggggctacgacccggccaagccgacgtgcgtgctcatcaactcgatgtgcacgaccgtgtcgctgtaccgggaccagtttgcggacgaggcgctcacgtcggccgtcaacctgctcgccatcgagccgctcggccacggcgccacccgctgcccgaccgagcacttcacctactgggactcggccgtcatggccctgcaggtcctggaccagctcggcatcgaccgcgccttcgccctcggcaccagccagggcggctggatcgtcacccgcatggccctgctggccccggaccgcatccgcggcctggtcctgctcggcacctcgatggactacgagtcagccgactcgcgcgccaagggctgctgggaccccaagaccctgctggtttccttctacgacaagtgggccgccccctcgggcccgaacccggacgacttcgtcgtcgacgacgtctggtgcggcatggtcgcctccctcggcttcggcgccgccggcacccccgacctcgtctccttctggaccagcaccctcaaggacgtctacaggggtgacgaggggaggcgcaagctcaagatggccctcgcctgcctgctcgaccgcgacggcctctgccgcagggtcagggacatcacttgtcccgtctactggcttcagggatccgacgacgcgccctttgggaccacggtgccagccgagcagatcaagctgttcacctcgtccaaggaggccactctcaccatcatccccgggggcaatcactacctgaacgccacaaaccccaaggaggtcagcgaggccttgctcaagctggtcaacaagtacaagtga

SEQ ID NO: 2817 - protein, 299 aa, Myceliophthora thermophilia
MAAKTTIRVPHLGGIEAGYAFSGGGYDPAKPTCVLINSMCTTVSLYRDQFADEALTSAVNLLAIEPLGHGATRCPTEHFTYWDSAVMALQVLDQLGIDRAFALGTSQGGWIVTRMALLAPDRIRGLVLLGTSMDYESADSRAKGCWDPKTLLVSFYDKWAAPSGPNPDDFVVDDVWCGMVASLGFGAAGTPDLVSFWTSTLKDVYRGDEGRRKLKMALACLLDRDGLCRRVRDITCPVYWLQGSDDAPFGTTVPAEQIKLFTSSKEATLTIIPGGNHYLNATNPKEVSEALLKLVNKYK

SEQ ID NO: 2818 - DNA, 333 bp, Myceliophthora thermophilia
atggttggcccttgccagaccgtcaacgtcacttccgcctgtaccgagccgcgtgtcacctgggcccacatcctggagggattccgcacactacgccgatcgatcaagatcggggattcggccggcagcctgcggcggcgaagtatcctccgcgcccctcgagctgccgataaccactacatcattgcgaccgacgatacgaggtacacatgcaccatgcaccagcacagcacaccccaagtcaccctgcgagggaagctcccagcgggccggcaccgccagatctgtatcgacgccgagctatcatccttcactcctccggccgtctactag

SEQ ID NO: 2819 - protein, 110 aa, Myceliophthora thermophilia
MVGPCQTVNVTSACTEPRVTWAHILEGFRTLRRSIKIGDSAGSLRRRSILRAPRAADNHYIIATDDTRYTCTMHQHSTPQVTLRGKLPAGRHRQICIDAELSSFTPPAVY

SEQ ID NO: 2820 - DNA, 2160 bp, Myceliophthora thermophilia
atgggagagaattcgaaagagtttggtcacctatggcagccgcaaccacattctcaggcggcgggttcgagtcgccgacaaggctcgagatggcgctccccactcggcggcatattggcgagcctcatcgtcctaggctgccttgccaacttccgatacttcgccgctatcaagacgccaggagttaccgtcgatgagccggctccctccctcaaggatcccatgaacccatgggaatcgatcaccccgagccctgacttggcctggcacccctgctacaccgcaatcaacccttcctttctctgcgcgcgcctgaccgtgcccatggattacgcgcacgagaacgatgacccggacgggaccaaggtccacctcgccctggtccttctcccgccagcgtcccagggccaaaccccgtcggaccacaccaccacggatccgcccaagaaggcaccactcctgatcaacccgggcgggcccggcggctcgggagccctcctcgccctcctcatgggcccttccctgcagcgcgccctcggcactgatcaacccatcctcggcttcgacccccgcggcgtcggtttcaccacgcccgtggccgactgctgggcggctcccgcaccccctgacgcgtgcgacgacgaggacggcggcggcggcggcggcggcgcaggaccggcgtgcgaggacgacgcggccaagggcctgctgcgccgggtcgagtgggagcaggtcaacaccgcgtacgggctggtcggggagagcgaggcggcgacgcggtacctcgaggccgggcaccgcggcgtcaacgcgctgtgccgcagccgtgacgaccggcacggcggcgccagcggcctggcgtggtcgggaacgggggaggtcgcgcgggacatggcgaggatcgtcgacaagtgggacgagtgggtcgacctggaggaggaagaggcgggcgcggcggcggagcgggagatgaggggcaagctggtctactggggcttctcgtacgggacctacctcggcgccacctttgcgagaatgttcccccaccgggtcgggaggctgctgctggacggggtagtcgacgccgagctgtatgagagaccggtgtggaaggagagcctggtggacgcggacaaggtgctggacgagttcttccgctactgcgccgcggccgggcgggactgcgccctctaccgggacggggaccaggcagacgacgtgcggaggaagtacgagacggtcatggagaggctgcggaccagccccgtcaccttcacccacccggactacttctacccggtcatcctccgggagagccttgtcaagcagctggccttcaccgtcctgtactcaccgatccaggggtttcccggcctcgcctggatcctcgactgcatctacgagggcaggtacgagcagctcagcgccatgttccaggattccgagctgatgtgctcggttcccggaaacaacttgctcatgggtctcaagacggacgcccagcgcgccgtcatgtgcagcgacaagcgacagcccgtgaacatgaccgtgcccgattgggaggcagagcacaagaacatggccgagctctcccagttcgccggcatctggatgggcatcatgatgcagtgcagcggctgggacgtctctcctccgcacagggctcccatggggccctggacctcctcgtggggccagttcgagacggccaacccgatcctcttcctctccaacacgcacgacccggtcaccccgctccgcgcggccgtcaagatggcgctcaagttcaagggcgccgggctgctggagcagaagtcgctcgggcactgcaccgtctcgaccgtgtcgaggtgcacgaccagggtagtgagggagtacctcgcgaccggcaaggtgccgccgccgcccgcggcggtggacggcaattacaccggcgagtggatgcgttgcgacgtggacgaggtgccctggaggccggcgggcccgaagctggctgcatctctggaagacgaggagcgcgacatgatcgacgcgtggcggcagctgcgcaggacgttggatagcatggagaggtggaacgtggggaggtggcggaaggggatggacggagaggccgtcatggagttgttcagagaggttaaaaatgtactggccgagtaa

SEQ ID NO: 2821 - protein, 719 aa, Myceliophthora thermophilia
MGENSKEFGHLWQPQPHSQAAGSSRRQGSRWRSPLGGILASLIVLGCLANFRYFAAIKTPGVTVDEPAPSLKDPMNPWESITPSPDLAWHPCYTAINPSFLCARLTVPMDYAHENDDPDGTKVHLALVLLPPASQGQTPSDHTTTDPPKKAPLLINPGGPGGSGALLALLMGPSLQRALGTDQPILGFDPRGVGFTTPVADCWAAPAPPDACDDEDGGGGGGGAGPACEDDAAKGLLRRVEWEQVNTAYGLVGESEAATRYLEAGHRGVNALCRSRDDRHGGASGLAWSGTGEVARDMARIVDKWDEWVDLEEEEAGAAAEREMRGKLVYWGFSYGTYLGATFARMFPHRVGRLLLDGVVDAELYERPVWKESLVDADKVLDEFFRYCAAAGRDCALYRDGDQADDVRRKYETVMERLRTSPVTFTHPDYFYPVILRESLVKQLAFTVLYSPIQGFPGLAWILDCIYEGRYEQLSAMFQDSELMCSVPGNNLLMGLKTDAQRAVMCSDKRQPVNMTVPDWEAEHKNMAELSQFAGIWMGIMMQCSGWDVSPPHRAPMGPWTSSWGQFETANPILFLSNTHDPVTPLRAAVKMALKFKGAGLLEQKSLGHCTVSTVSRCTTRVVREYLATGKVPPPPAAVDGNYTGEWMRCDVDEVPWRPAGPKLAASLEDEERDMIDAWRQLRRTLDSMERWNVGRWRKGMDGEAVMELFREVKNVLAE

SEQ ID NO: 2822 - DNA, 1383 bp, Myceliophthora thermophilia
atgtccatcaactgggacaagatcaaggcagccaagagattggagctcgagtcaagcgaactgagtggcttcaaaactttgagacttcgttttgaagtaccattatcacacagtgacccggcaggcagcgtggccatcacgattcacgcagacctggtatacggcgcaggtccggatgccaatgataccaacagcatcggtcattccacagccgagaccattctggagtccatactgtgcccaagcagagccagtctctgtctatacctttgcggtgggccaggcgacgagaacccggcgtccaagaacccggatctgaccagggagctgctcggccggtttggcccagtcctatacgtcgactacagggggacgggcaagagcagtgccatcacgaaggacactctggcgaccaagacggccgaggaggcggcctggtacttgagccaattccgacaggactcgattgctgcggacctcgagggcatccggaagtctctcggcggccgtgttaggtttgtgctcgtcgggcagtcgtttggcggctggatcgccatgacctacctgtcgtacttgccggagagtctggcagaggtgtggctgtttggcgggatgccgccgatgggcaacacgcccgagcaagtctatcgggcgctgtaccggcgcctggtccgcgttaaccaagagtactacagccgttaccccgaggacaaggcgcgggtgatgcgcatcgtcgagcgcctctcgagcaccgacaacggccgcggtcttttgatctcggaagagaccggggagcggctcagttgccgcgggttcctgaccatggggcggcacttggggggagaggaggggttcaagacgggcactcgctggtcgagctgttcactgccccagcggccactgtacggcgcggtgcatgaggcaatctactgcttcggcccgggagtggcatccaactgggcggcccagagggtcgggcgcgaccaggcgggcgggaactttgcgtggcttggaagaaactttcggttcgagttcccgttccctgatcaggtcgagcccttctctttctcggccgagatgattttcgactttatgctgcacgatgccgggtccgagctgggccccttcatcaaagctgcggagatccttgcccggaaggaggactggcctgcgctgtacaatttagacgctctcggaagaaacacggttcccgtgcgagctctgatgtatccagccgatttatacgtggactttgagctgtccaagattgcggctgcgggggtgagaaactgcagagccattcccgcgccggagcgctggctgcatgcctcggtcaagacaaatcccaaggaagtattcgagttcttagcaaccatggcttga

SEQ ID NO: 2823 - protein, 460 aa, Myceliophthora thermophilia
MSINWDKIKAAKRLELESSELSGFKTLRLRFEVPLSHSDPAGSVAITIHADLVYGAGPDANDTNSIGHSTAETILESILCPSRASLCLYLCGGPGDENPASKNPDLTRELLGRFGPVLYVDYRGTGKSSAITKDTLATKTAEEAAWYLSQFRQDSIAADLEGIRKSLGGRVRFVLVGQSFGGWIAMTYLSYLPESLAEVWLFGGMPPMGNTPEQVYRALYRRLVRVNQEYYSRYPEDKARVMRIVERLSSTDNGRGLLISEETGERLSCRGFLTMGRHLGGEEGFKTGTRWSSCSLPQRPLYGAVHEAIYCFGPGVASNWAAQRVGRDQAGGNFAWLGRNFRFEFPFPDQVEPFSFSAEMIFDFMLHDAGSELGPFIKAAEILARKEDWPALYNLDALGRNTVPVRALMYPADLYVDFELSKIAAAGVRNCRAIPAPERWLHASVKTNPKEVFEFLATMA

SEQ ID NO: 2824 - DNA, 1434 bp, Myceliophthora thermophilia
atgacggcagacgtagctcccggtcgccccggcaacctgactcctgagcaggaggagaagctccggcggttatggcagctcatcttgcaagtatgtgctgtcggccaggaaaacgacgagaacaactcgactgccgcgaacgagaaggcccaggatgaggatggcaagaaggagaagaaaggccgcatgtcgttcttctcccggaagagcaagaaggactcgggggcagactcgacacccgggactccggcaaacgcacccgtccttaacctggggaaagacggcgaggcggataagtacggccaaaccaaggctttctacgagactctcgccagccagtcgccgcagtcgatacgcaacaccatctggagcatggtgaagcatgatcacccggacgcgcttgtccttcgctttctcagggcgcgcaagtgggacgtcgagagggcgctcatcatgttcgtctccaccatgcgctggcgggcgcaggaaatgaaggttgacgacgacatcatgcgcaacggcgaggctgctgcgctggctaccgccgagacatccagcgatccggccgagaaaaagcttgcgcacgacttcatggcccagatcaggaagggcatcagctatgtgcatggccaggacaagcagggcaggccgctctgtttcgtcaatgtcaggctccacagacaaggcgaggaggccgaggaggccctggaaaggtacacggtgtatcttatcgagacatgccgcatgctgctgcagcccccggttgacactgctacaattgtattcaacatgaccgacttctccatggccaatatggactatgctccggtcaagttcatgatcaagtgcttcgaagccaactacccagagtgcctgggcgcggtcctcgtccacaaggctccttggatctttcaaggaatctggaaagtcatccgcagctggctcgaccccgtcgtcgccaacaaggtgcacttcaccaacagcgccaaggagatggaagagttcatcccaattaagcacattcccaaggacctcgagggtgaggaggattggacgtaccagtacgtcgagcctaccgagggcgagaacgccaagctcgccgacagcgagacgcgcgaccggctgctggcggcgcgcgagaagctgtacagggagtacgaggaggccacgctcgagtggatccgcagcggcgagagcggcgacggcaacgcggccgagatcaaggcgaggcgcaacgcgattgccgagaagctccgcgtggattactggaacgtcgatccctacttgcgcgcgaggtcgtactacgaccgaaccggcgttctgttgccgggcggaaagctaaattggtatcctgatgcgaaagctgacgaggtaaaggatgctgccgccgctccggcgcctgccgtcgagacgacgagcgacgatgttgattag

SEQ ID NO: 2825 - protein, 477 aa, Myceliophthora thermophilia
MTADVAPGRPGNLTPEQEEKLRRLWQLILQVCAVGQENDENNSTAANEKAQDEDGKKEKKGRMSFFSRKSKKDSGADSTPGTPANAPVLNLGKDGEADKYGQTKAFYETLASQSPQSIRNTIWSMVKHDHPDALVLRFLRARKWDVERALIMFVSTMRWRAQEMKVDDDIMRNGEAAALATAETSSDPAEKKLAHDFMAQIRKGISYVHGQDKQGRPLCFVNVRLHRQGEEAEEALERYTVYLIETCRMLLQPPVDTATIVFNMTDFSMANMDYAPVKFMIKCFEANYPECLGAVLVHKAPWIFQGIWKVIRSWLDPVVANKVHFTNSAKEMEEFIPIKHIPKDLEGEEDWTYQYVEPTEGENAKLADSETRDRLLAAREKLYREYEEATLEWIRSGESGDGNAAEIKARRNAIAEKLRVDYWNVDPYLRARSYYDRTGVLLPGGKLNWYPDAKADEVKDAAAAPAPAVETTSDDVD

SEQ ID NO: 2826 - DNA, 1392 bp, Myceliophthora thermophilia
atgccagaattcttccgtgtcgtcgagcacacggtcagttgctctcattcgcgcgagtatgtcggagcgaccgcgaatggagacgccgacaggccccaactcgccgtcaaacaatacatcccgctcgacaacccgaacccgcaaccaggcgatgtgaccatcattgccgcacatgccaacgcattccccaaggagctatacgagccgctgtgggatgaaatccacaagaggataacaaagagcggtatccgcatccggtccatctggattgccgacatgtggaatcaagggcagtccggggtgctgaacgagaagattctcggaaacgatcgtatgtactcaccaatgactccccggtgggcgtggggatgggaaccacaaggaacagcagcgaagctaatttactccgcagctagctggttggatcacaccagggacctggccaacctgatcaacctgaagcgcgatgagatgccgcaccccctggtcggcatcggccacagcatgggcgccgcacaactcacccatctcgccctgcaaaacccgcgcttgctgcactcgctcatcctgatcgacccggtcatcgagacgggcaccacgggcctggggccggcccgggcatccacgtggcggcgcgacctgtgggactcgcgcgccgccgcggccgccaagttcgcccagtcccccttctaccaggcctgggaccggcgcgtgttcgacctgtgggtgcgctacggcctgcgcgacctcccgaccgagctgtatccttcttctcccccttcgtcttccgggaatgcagcaagcggcggcggcggcggcggaggcccgcccgtcacgctgacaacgaccaagcaccaagagctcttcaccttcctacggccgacctaccgcgcggggagcgacttgcgtgattgggcaggccacgacggcaacgactccgactcctcctcccagaagagccggtacccgttctaccgggcggagccgcgacaggcgttcgagcggcttccggagctgcggcccggggtgctgtacgtgttcggggcacggtcggacatgtctgggcccgaggcgaggcgggccaagatggcccggacggggaccggggtcgggggcagcggcggggcggcgcggggccgggtgcgggaggcggtgctggactgcggccacctggtggccatggagaaggtggccgagtgcgccgacgccgtcgccgagttcctgcccggcgagctggcgctgtggcggcgggagcacgaagcggcggaggcggagcgagaggaggagaagagaggccgcggcagcggctggcggcgggaggggggggggggtggtggatcttggagcacacagtacagcgcaacggacagaggacgcagttcgggggcctag

SEQ ID NO: 2827 - protein, 463 aa, Myceliophthora thermophilia
MPEFFRVVEHTVSCSHSREYVGATANGDADRPQLAVKQYIPLDNPNPQPGDVTIIAAHANAFPKELYEPLWDEIHKRITKSGIRIRSIWIADMWNQGQSGVLNEKILGNDRMYSPMTPRWAWGWEPQGTAAKLIYSAASWLDHTRDLANLINLKRDEMPHPLVGIGHSMGAAQLTHLALQNPRLLHSLILIDPVIETGTTGLGPARASTWRRDLWDSRAAAAAKFAQSPFYQAWDRRVFDLWVRYGLRDLPTELYPSSPPSSSGNAASGGGGGGGPPVTLTTTKHQELFTFLRPTYRAGSDLRDWAGHDGNDSDSSSQKSRYPFYRAEPRQAFERLPELRPGVLYVFGARSDMSGPEARRAKMARTGTGVGGSGGAARGRVREAVLDCGHLVAMEKVAECADAVAEFLPGELALWRREHEAAEAEREEEKRGRGSGWRREGGGGGGSWSTQYSATDRGRSSGA

SEQ ID NO: 2828 - DNA, 2193 bp, Myceliophthora thermophilia
atgtactgtaccccgtcagccatccgccgtctggctggcggcgggacgccaagactcggccccggcactcgactcctgcccagcctcgttcgtttctccctcggcatcgacaacaacaatagcaaaacaatagcaacaatggggaaagtttcagagctagtcaaatatacggggcggtcaacgcccaggaataggcacgtgcattggcttctcgcgggagccgctttcttggctctcattgtgctcaccgttttcccccagctccgccccggcttgctcagtcctagcttgacttccagctcggccgatccgtttgtctctcactttgagcagtcgggagacaatggttcgccgtacggccattttcctgtgaaaggcgacccgttccggttcctgccttgcaccccggcgactctgccgccaccactggaggacagcaacgccgaacaaacctgggcttcccgatttgaccccaaccccgatcactggagctggggcgccgctcgagggcgggagaatggcacctccggagacaatccgtacgccggacgcgggattttcctgtgcggctatctcgacgttccgctggattacaccaacaggtcggacagccgaatggcccgcctggccgtgaccaaattccaggtctcaggcctcgctcgagtgggtgagccagccgactcgccatccggcaagaagagcgagaggacaattgttatcgagcccggcggacctggggggagcgggacttcgtacgcatggcgtgccgccgagaacatcacggcgcgcttcagcgacagcacctttgacgtcctgggctgggacccacggggagtgaatgcctcgctccccagcatcgcatgctttccccacgacgccagccgagatcgctggagcctcttgtctaacctccactatgcagtatccgcgtctcctagacagcagctcgaatttgccgacgccatgaacgccgctatcatgcgtgcttgctgggaagagcatggagacctcggccgctttctcggcacgggcctggttgcccgtgatcttgaacagattcggatagcgctcggggaagatgagctgacggggtatctcgtcagctatggtacgggcattgggcagacgtatgctgcgttgtttccggggagcgtcggccgcgtgattctggacggcaccgaatacgtccgcgaccatcgcctgcgaggcggctttggatggaccgcgctggataacgctacggacgcctggcgtgacggttttctaggcgagtgtgtcaacgccggacccgagtattgcgcgcttgcgaggccgaaagacggtaagccggtcacgctgccgggtctatcgacccgcatggacgccctaatggagtccctcgccgaccgcccgatcccggcatatctcccgactagcggcccgacccttgtcacctattctgccattgtcgacaacatttacggagcgctgtataacgcgagaagctggcccgcattagctcggcttctttttgagttggaagacggcaacgcgaccctggcagcctccgctctcgaagcctcggcatggttttatgacccggaggccccctgttcgcctgttcccgccacaggttcggatatagagctgggcaccctggtcatctgcgcggattcatatgacgctaaggagcccgatgacctggattggtggctctcgctctggggaaacatgacgaccaaatcctggatctccggcaattcaaggttctatactgtccttccttgccgacactttttacaatactggcccgaaccggtcggtgtgtatcgcggcgacctgaaccacactctcaatcaccccgtgctgctcatcgctgagacgtacgaccctgccactccacttcggaatgggagacggctgctgcaggaaatgggaaagaacgcgcgcctgatcgtgcaccacgggtacggacactcgtcgagagacacttcgcagtgcaccgagaggattgcgagggcctacattctcaacggcactctgcctgatgagcaagaaacggagtgctatgcagatgagaaaccatacctttacgacgttgaaaagaaggcggccgcgctgggcgttggccaggccaaagaccccctcgaggtgtggaaagagcacctcgcggagctctcctttgtaaacccgaggttaaagcctgttgtgtag

SEQ ID NO: 2829 - protein, 730 aa, Myceliophthora thermophilia
MYCTPSAIRRLAGGGTPRLGPGTRLLPSLVRFSLGIDNNNSKTIATMGKVSELVKYTGRSTPRNRHVHWLLAGAAFLALIVLTVFPQLRPGLLSPSLTSSSADPFVSHFEQSGDNGSPYGHFPVKGDPFRFLPCTPATLPPPLEDSNAEQTWASRFDPNPDHWSWGAARGRENGTSGDNPYAGRGIFLCGYLDVPLDYTNRSDSRMARLAVTKFQVSGLARVGEPADSPSGKKSERTIVIEPGGPGGSGTSYAWRAAENITARFSDSTFDVLGWDPRGVNASLPSIACFPHDASRDRWSLLSNLHYAVSASPRQQLEFADAMNAAIMRACWEEHGDLGRFLGTGLVARDLEQIRIALGEDELTGYLVSYGTGIGQTYAALFPGSVGRVILDGTEYVRDHRLRGGFGWTALDNATDAWRDGFLGECVNAGPEYCALARPKDGKPVTLPGLSTRMDALMESLADRPIPAYLPTSGPTLVTYSAIVDNIYGALYNARSWPALARLLFELEDGNATLAASALEASAWFYDPEAPCSPVPATGSDIELGTLVICADSYDAKEPDDLDWWLSLWGNMTTKSWISGNSRFYTVLPCRHFLQYWPEPVGVYRGDLNHTLNHPVLLIAETYDPATPLRNGRRLLQEMGKNARLIVHHGYGHSSRDTSQCTERIARAYILNGTLPDEQETECYADEKPYLYDVEKKAAALGVGQAKDPLEVWKEHLAELSFVNPRLKPVV

SEQ ID NO: 2830 - DNA, 885 bp, Myceliophthora thermophilia
atggcaaccggtcaggtgaccaaggtagcaaccgtcgaggctgacggcgtagaagtattttaccggtctgctgggccggttgacgcgcccacggtagtacttttgcacggtttcccttcctcgtcacacatgtttcgcaatctcatcccgctcctcgcgacccgctaccgcgtcgtggcccccgatctccctggattcggcttcaccaaggtcccggccgagcgcgactataggttcaccttcgcaagcctcgcgcggaccttcgcgtcctttgtggacgtcatctccttggaccggttcgcaatctacgtcttcgactacggcgccccaaccggtttccgtttcgccctggacaggcccgacgccatagcggccatcgtctcccagaatggcaacgcctacgccgagggcctaggccagcctttctggtctcagcttcaaaagctctgggccagcggtgccgaggcggaccgcgaagctctccgtccgcagctcgagctcaccgcgacccagtggcagtacctgaacgggtctccgcacccggaggctatccaacccgaggctatctacctcgaccagatgctgctggattgtcccggaatcaaggagatccagcttgacttgttccaggattatggctcaaacgtgaagctatatcctcagttccaggagtacctgcgctcatcgggggtaccagtcctgacggcgtgggggggaaaggacgagatttttgttgctgctggcgccgaggcttatggaagagacgtccagaagcttgagacgcactggctagatgccggtcattttgccctcgaaaccaacgagcagcaggtggcggattggatgattgcattctttgacagattcgacgtgtttcgggcctaa

SEQ ID NO: 2831 - protein, 294 aa, Myceliophthora thermophilia
MATGQVTKVATVEADGVEVFYRSAGPVDAPTVVLLHGFPSSSHMFRNLIPLLATRYRVVAPDLPGFGFTKVPAERDYRFTFASLARTFASFVDVISLDRFAIYVFDYGAPTGFRFALDRPDAIAAIVSQNGNAYAEGLGQPFWSQLQKLWASGAEADREALRPQLELTATQWQYLNGSPHPEAIQPEAIYLDQMLLDCPGIKEIQLDLFQDYGSNVKLYPQFQEYLRSSGVPVLTAWGGKDEIFVAAGAEAYGRDVQKLETHWLDAGHFALETNEQQVADWMIAFFDRFDVFRA

SEQ ID NO: 2832 - DNA, 1269 bp, Myceliophthora thermophilia
atgctggatgaagactacgaggtttaccgcaactcgtggaaggagggagttaggtgtggcgaaatgacggtcaagttggatctgtgttctgctacccaggtgtttcaacggaagactacttgtgccgagtgggccgaggctaccagcggccgaaaggaatcttgctgcagctccgttgctgctcgcaccatcacttttcccttttcggtcatgatggctactacgaggcccaaacgaccaccttctccgcttcgagagctccatcagttcatgcttgcacgggacggagagtcgcatctctccaccctctccaccgtctccacgcctcatctggacgtttctgccctggtggagaaatatgtgtccgatcggactacagaaaagtcagggtggtacaccattgcccgcgtctctcgccacgccgataatgtctttatcattatagacccggtgctccacaaggaacgaaaaaaatacattatgccaggctattcagggaaaggagttgcgcagttcgaggagggtaccgacagagcactcgcggcgtggatagacctcattgagagaaagtatatttcgacccctgacaaagtgaacttcatgaaccttgacgagaagacacatttctacgcgctcgacgccatcggcgagattgcctggaacgatcctcggacgatccgaaagtggccgttctactacctgctcccaaatgacggatcggagaccggatttggggccatcgtctgcaacgcgaagaagatcgtcgccaaacgcttgagacccaacgccgatcccaagcgtgacatgctggagtcattcatggaccaaggcctacgaggcgaagagctcgtccaagaactcgacgccgttaccgtcgccgccgccgcttccgatagcggcccaacggccgcgtcccccgtccccctcctccgcgacgcccaggcgcgcccccttccctacctgcaggccgtgatccgcgaggtcctccggctctttccgcccctctgcgcgcccccggtctacaaggagatgccccggggcggggacacgctgtgcgggcaggccctgccggggggcaccctcgtggccacgggcaaccagcagtggcaggccgggcgcgccatcgcgctcgtggaggcgagaaaggtcattggcgagctggtgagacgatacaactggtcgctggccaacccgctcgatcctccaagaatctataataatgtggtttgggtggtgcgtgatctctgggtcaaggctgagcggaggtaa

SEQ ID NO: 2833 - protein, 422 aa, Myceliophthora thermophilia
MLDEDYEVYRNSWKEGVRCGEMTVKLDLCSATQVFQRKTTCAEWAEATSGRKESCCSSVAARTITFPFSVMMATTRPKRPPSPLRELHQFMLARDGESHLSTLSTVSTPHLDVSALVEKYVSDRTTEKSGWYTIARVSRHADNVFIIIDPVLHKERKKYIMPGYSGKGVAQFEEGTDRALAAWIDLIERKYISTPDKVNFMNLDEKTHFYALDAIGEIAWNDPRTIRKWPFYYLLPNDGSETGFGAIVCNAKKIVAKRLRPNADPKRDMLESFMDQGLRGEELVQELDAVTVAAAASDSGPTAASPVPLLRDAQARPLPYLQAVIREVLRLFPPLCAPPVYKEMPRGGDTLCGQALPGGTLVATGNQQWQAGRAIALVEARKVIGELVRRYNWSLANPLDPPRIYNNVVWVVRDLWVKAERR

SEQ ID NO: 2834 - DNA, 1341 bp, Myceliophthora thermophilia
atggttgacgccgggttcggaatcgtgcctcggtgcatcccgggcacaccaaccccgttctctctgcacgtcccagatgccgacctgaaccaactatccagcctcgtcaagacggccgtcgtaggaagcccctcgttctacaacacgcacggcgcagacgacgggcccgactacgcgttcggaatgacgcgagactggttcactgcggcggcggacgaatgggtcaacaagtttgactggcgcttgcacgagaagcactggaactcgttcccccagttcaccatcaacgtgaccgctccgtcggatggccaggtctttaacctccacttcgcggccctgttttcacgcaggcgcgaagcaactccgatactcttctcgcacggctggccgagttcgtggattgatttcgtccctatgctcgagctcttgacaacaaagtacacccccaggacgctgccgtaccatgtcatcgttccctccatcccggattatggactctccacccgcagcaatctcacccggacggagctcgactttcgcaaggctgccgaggcactcaatgagctaatgaaggcgctggggttcaacgcgtacatcgcccagggcggggatgtcgggtcgggcctgacggcaacgctcgggacgttccaccaggagtgcaaggccgtccactttaataacctcattctcacaccctcggagatgtcggcagttgaaaacctcccggtcacttcagaagagggcgccacgctcgctcgtgctgcccagtttggcgaccgcgagaccgggtacatcctggaacagggaacaaagccggggtccctctctctggccctgatgtcgaatccaatggcgttgttggcatggattggatccatgtacgtcgagcacaccaactactctgtcgacacaattctgcaacaggtctcctggtactggctcacaaagtcgtacgggcgtgccctctggtcgtaccggtccgtctgggccgctgttctccgggacgatggcgggaacctgccgtcgcctcttgccatcaccacaaagccgctgggatattcttggtacccagacgaggtgctgagcgttgccaagtcctggctagagtattggttcccaaacaatctggccttcctcaaggcgcacgagagtggaggccacctcgcggcgttcgacgatccggagggctttttgcaggacatggaggcttttgtggccattgtaaagaccaagctacctctcgccaagcagtaccaccattgctgcaccagcgtgcgcgcgctatgctcgagttcagtgccctctctgccggggtaccaggcattctcattaagaacatag

SEQ ID NO: 2835 - protein, 446 aa, Myceliophthora thermophilia
MVDAGFGIVPRCIPGTPTPFSLHVPDADLNQLSSLVKTAVVGSPSFYNTHGADDGPDYAFGMTRDWFTAAADEWVNKFDWRLHEKHWNSFPQFTINVTAPSDGQVFNLHFAALFSRRREATPILFSHGWPSSWIDFVPMLELLTTKYTPRTLPYHVIVPSIPDYGLSTRSNLTRTELDFRKAAEALNELMKALGFNAYIAQGGDVGSGLTATLGTFHQECKAVHFNNLILTPSEMSAVENLPVTSEEGATLARAAQFGDRETGYILEQGTKPGSLSLALMSNPMALLAWIGSMYVEHTNYSVDTILQQVSWYWLTKSYGRALWSYRSVWAAVLRDDGGNLPSPLAITTKPLGYSWYPDEVLSVAKSWLEYWFPNNLAFLKAHESGGHLAAFDDPEGFLQDMEAFVAIVKTKLPLAKQYHHCCTSVRALCSSSVPSLPGYQAFSLRT

SEQ ID NO: 2836 - DNA, 285 bp, Myceliophthora thermophilia
atgaccggcgtggggcgtgttccccagacaggacctggtctggagccttacatgccctggtatttcgaccttcctgttcgagcggctgacaacgcgccagatatgattggccagcacaagatgttgttcgaattgcaatgtgtggtggaccgggcccaactagggttcccggccccaccagggttgcagccacccacatcttccctgcagggtggccctggtcagcctcttccttcttcctcctccatcaccgaaccatatagcagatattacgaagatccttga

SEQ ID NO: 2837 - protein, 94 aa, Myceliophthora thermophilia
MTGVGRVPQTGPGLEPYMPWYFDLPVRAADNAPDMIGQHKMLFELQCVVDRAQLGFPAPPGLQPPTSSLQGGPGQPLPSSSSITEPYSRYYEDP

SEQ ID NO: 2838 - DNA, 534 bp, Myceliophthora thermophilia
atgaccgtcaacgtcggcccaatcgcgccgacgctgaacgtgcagcgcaacccgcgggcggacgggctggggtacaacccacggtgcctgcggcgcgacatcaacaagcactccgcggcggtgacgacggccaactacacgtacgacctcatcaccaacaaccacgagatctactggttccagacggtcatggagggccagttcccgcaaggcaagtggggagtgcacgcgggagggcactacaccgtctcgggcgaccccgcaggcgacttctacgtcagccccggcgaccccgtcttctggctgcaccacgccatgatcgaccgcgtctggtggatctggcagctccaggacctcgacagccgcctgacccaggtgagcatgaccaagaccatgaacaacttcccccccagcgagaacggcaccctcgacgacctcagcggcctcggcgtgctcgccccggacgtcaccgtccgggagctcatgaacaccatgggagggatcggcggtaagttttgctacatctacgagtaa

SEQ ID NO: 2839 - protein, 177 aa, Myceliophthora thermophilia
MTVNVGPIAPTLNVQRNPRADGLGYNPRCLRRDINKHSAAVTTANYTYDLITNNHEIYWFQTVMEGQFPQGKWGVHAGGHYTVSGDPAGDFYVSPGDPVFWLHHAMIDRVWWIWQLQDLDSRLTQVSMTKTMNNFPPSENGTLDDLSGLGVLAPDVTVRELMNTMGGIGGKFCYIYE

SEQ ID NO: 2840 - DNA, 1917 bp, Myceliophthora thermophilia
atggactgcgagcgcgcgcccttaattgagggtaagctgcttgcggttgatgggtcatcgccgccgccggcgccgtggaagaaccctttgaagaacaatcaggccaccaagcggcgtcatcctctccgcggattcctgaaggccatcctaacaatcagccctctcttgctcgtcacaggttacgcgttcttccagccaaaacttccctttcgccacccagtccagcccccggaccctccccagcccgtcaggtatcccggcgagcacatctcctggacaccctgcggtaccatcgacaaccgtgcactcgagtgcgccaatctgacggtccccgtggaccagttcgacaccaactccagcgtcgaggccagcagccacgacgacgacgatgacaccgacaacgacaaccaccacaaacatcaccagccgggggacaccttcaccatccccctcctccgcctgcgcagcgctaacgcgaccccgtcgacgcgcaacctgctcctgaacccgggcgggccggggggctcgggcgccgccttcctgtaccagcgcggggcgcagctggcgacgctggtcggcgatggcttccacctgctctcgttcgacccgcgcggggtcaacgggtcgacgccgctggcgacctgctaccggagcgaggaggaccggcgggcgctgtcgtcgcgcgcgcggacggcccggcggccggtcgaggacagcggcgagctgtgggcgtggacgggcagcttcgtgcgcgcctgcgacgacgtcatgggcggcgccggcgccggcgcccacgtcaacacgccccagacggccgccgacatgaactcaatcctcgacgccgtcggccagcgcgcgctctactactggggcttcagctacggcaccatcctggggcagacgtacgccaccctgttccccgaccgcgccgagcgggtcatcatcgacggcgtggccaaccagttcgactggtacgagtcccgcctcgacgccgagatgatagccgacacggaccgcgtgctcgaggggttcgtggacgagtgcgttcgggccggcgaggagcgctgcgcgctggcggccatggctacatccaaggaggagctgctggacctgctgctggagcgggtcgcgcggctgagggacgacccggtcggggtgtacgtcaacgagacccagtggggtgtcctggactactggacgctctggtacaacggcgtgttccccgcgctgtataagccggcggtctggggggagctcgcggaccggctggccgcgctgttccgcggcaacgcgaccgccgcctggctggcctacggcaccaagccggcctgggacagcctcggagacgcgttcaagttcatctcgatcaacgacggggtctcgggccccgacaagtggccgatggaccgcctcgagctgctcgactacctgctgcccttcttcaaccagtccctcttcggcgaggcccagctcgactactacttctccaaacaggcctggaccatcccccatgcacacagctacgtcccccggcgcagggtccggacggcgcacccgctgctgatcctgtcgaccacgtacgaccccgtctgtccgctcgtctcggccaagggggccgccgacgtgtttgagcggtcccgcctggtagaggtcaagggctacggccactgcaccctggccgtgccgtcccggtgtgttgcccgccatgtgcgcgacttcctctacgatggcaaactgccggatgacggccacgtgcggtgcgagccggacgccaacccggcctttgccaagccggaggaggcagacgcgctcttggaggcccagtccttgagcgaagaggaccggcgggtttggaaggcgcagcaggagctcgcaagagatattacctggctcgggccatggagaggggcatggtaa

SEQ ID NO: 2841 - protein, 638 aa, Myceliophthora thermophilia
MDCERAPLIEGKLLAVDGSSPPPAPWKNPLKNNQATKRRHPLRGFLKAILTISPLLLVTGYAFFQPKLPFRHPVQPPDPPQPVRYPGEHISWTPCGTIDNRALECANLTVPVDQFDTNSSVEASSHDDDDDTDNDNHHKHHQPGDTFTIPLLRLRSANATPSTRNLLLNPGGPGGSGAAFLYQRGAQLATLVGDGFHLLSFDPRGVNGSTPLATCYRSEEDRRALSSRARTARRPVEDSGELWAWTGSFVRACDDVMGGAGAGAHVNTPQTAADMNSILDAVGQRALYYWGFSYGTILGQTYATLFPDRAERVIIDGVANQFDWYESRLDAEMIADTDRVLEGFVDECVRAGEERCALAAMATSKEELLDLLLERVARLRDDPVGVYVNETQWGVLDYWTLWYNGVFPALYKPAVWGELADRLAALFRGNATAAWLAYGTKPAWDSLGDAFKFISINDGVSGPDKWPMDRLELLDYLLPFFNQSLFGEAQLDYYFSKQAWTIPHAHSYVPRRRVRTAHPLLILSTTYDPVCPLVSAKGAADVFERSRLVEVKGYGHCTLAVPSRCVARHVRDFLYDGKLPDDGHVRCEPDANPAFAKPEEADALLEAQSLSEEDRRVWKAQQELARDITWLGPWRGAW

SEQ ID NO: 2842 - DNA, 1248 bp, Myceliophthora thermophilia
atgaattgtcaggaacgtcatgaatcaggacacgaagcatctccttgtgggtatgctggcgtgatcggtgcgggcattgctggtctcgcagcttccattgcccttcgccgcgcgggttgggatgtggaggtattcgagaggtcacaattcaagaacgaggttggcgccgcaatcaccatgacgcccaacgccgccctggtcctgagtcgctggggtttcgacatggaaaaggcaatggcaatgccaaatcggtcactggtaatccgttcggccacggatccttccgttaccctgcagcgacaagattttgccgacggcgatggggtgctgaaatatggcgtatggtcatttcaccgcatggacttgcacagcgagctgaggaaccttgctacggcgccgcctacggacgtgattcctgcagctcccgcgcagatcaagttgggatacaaggtcgaggggttggattgcgagagtggagttataaggctggccaatggccagactatccacaaggatttgatcgttgttgcggatggcgcacatgcaagtagtcagctgatttccgaagtcgccggacatccctgcgaagcccgccgaaacggccgatccatctatcgctggctagttcccatggacatcgtcatggccgacccggagctcgggtccgtctacagcagcgagcactccggtttcgtggcgtggctggatccgagcacccgagcgttctgggtcagctatgtgtgccgcggtggcaaggtgctgaacatcgctctcgtgcacgatacgcaacccgaccgtgacgaggacggggtgtggcactcgcaggtgccaagggaagaggtcctctccgtagcccaaaacttccatcagtcgatcaaaaggatgattttcatgcctactgaggatggcatccacgttcatcatgcgaaaacacgaccgccgctggacagcttcgcccgcgcccgcaccgtggtagtgggcgacgcagcacatgtcatgatgccctcccacgccgctggcgcgggtatcgccatcgagtcggcagcctcactggaagttcttttccgggaagttgacggaaaggatggcccgaccgtgagataccgactccggctctttgacaaattgcgcatccctcgatgcaacctcaccatgttggtatccaatagtccccagggtcaaccccggaaatccggtgtggtagatgagatacgcaaattctaccaggggaccgttgccaccttctga

SEQ ID NO: 2843 - protein, 415 aa, Myceliophthora thermophilia
MNCQERHESGHEASPCGYAGVIGAGIAGLAASIALRRAGWDVEVFERSQFKNEVGAAITMTPNAALVLSRWGFDMEKAMAMPNRSLVIRSATDPSVTLQRQDFADGDGVLKYGVWSFHRMDLHSELRNLATAPPTDVIPAAPAQIKLGYKVEGLDCESGVIRLANGQTIHKDLIVVADGAHASSQLISEVAGHPCEARRNGRSIYRWLVPMDIVMADPELGSVYSSEHSGFVAWLDPSTRAFWVSYVCRGGKVLNIALVHDTQPDRDEDGVWHSQVPREEVLSVAQNFHQSIKRMIFMPTEDGIHVHHAKTRPPLDSFARARTVVVGDAAHVMMPSHAAGAGIAIESAASLEVLFREVDGKDGPTVRYRLRLFDKLRIPRCNLTMLVSNSPQGQPRKSGVVDEIRKFYQGTVATF

SEQ ID NO: 2844 - DNA, 759 bp, Myceliophthora thermophilia
atgacgacggcgacgacaacgacaacgatgcgaacaatggacaccgggacaaccccccaagcacatcgacccatcaccatccgcctcccctccaaatacgccacgggagaaacatcggcatcatcatcatcatcatcatcatcatcagcaccaccatcatcaagagcaattcctttcaccccgccgccgctctcctttatgcagcgcacctggacagtcacccactcgacgctcagcatgtggcgcggctcccgcaacgtgcgcatcacctacggagccctcccgccgcgggacgggagggagcggctctcggacacggtcgagcacgagaccgtcccgtggtgggggggtggcggcagcgccagcaacaacaagggggcggtgctccggcgcatctccgggaccgacacggcctcgtcgcgtggcgggggggagacgggcgcctgggattggcgcggccgcgggtggctggccctcgtcggcggcagccactgggaggtgctcgggtgggggcagcgcgagtgccccggcgagccgggccgcccggtccggtggatggtgacgtggttcgcgcccaccctgttcacggccgaggggctggacctctacagcgatcgggccgacggcgggaacgaggagctggcgcgggacgtcttggccgagctggcgagggtgtgccgggggaaggaaaggctgcgcaagctcgtggagcaggatatgagagaggtggccatctctttgccttggaaggaggcgtga

SEQ ID NO: 2845 - protein, 252 aa, Myceliophthora thermophilia
MTTATTTTTMRTMDTGTTPQAHRPITIRLPSKYATGETSASSSSSSSSSAPPSSRAIPFTPPPLSFMQRTWTVTHSTLSMWRGSRNVRITYGALPPRDGRERLSDTVEHETVPWWGGGGSASNNKGAVLRRISGTDTASSRGGGETGAWDWRGRGWLALVGGSHWEVLGWGQRECPGEPGRPVRWMVTWFAPTLFTAEGLDLYSDRADGGNEELARDVLAELARVCRGKERLRKLVEQDMREVAISLPWKEA

SEQ ID NO: 2846 - DNA, 1629 bp, Myceliophthora thermophilia
atggcgggcaacggaccgggcatgctctacgttaccatgcagccccgcgaggggctatcgctggaccagttccatgagtggtacaacaacgagcatggcccgacacgcctgcgcctcccgcacatcttcaccaacggtctgcggtatcgcgccaccgacggccagcagccgcatttcctggccgtttacgacgtgacatcgatggcgcacctcgagacacccatctacacggatttgcgcgcaaaccggtctcagcgcgaggcagccaccattggccaggtcgatgtcgaccgcaagttcttggacctcgtggccacgcagcagagccccttgtttacgcccatcgagcagctaactgacgacgaagcagaggggctcgtgctcgtctcggtcgaggtctcgctcaggccgggcgtcgagggcgccgaggccgccgtcgcccggtggtaccaagaggaacacattcccatgctctccaggatcccgggatggctgcgcagccgggtttttcgcaccccttcggtcatcgaaggtccgcccggcgaagtcaggattgccacgctgcacgagtacgccaaggagaacggccttggcggccccgagcacaaggcggccatgagcaccgcttggcgcgaacaagtcttcacccactacattgcccacaagacccgccgcacatatgagttgttttacgtctttggccccgcgccgagagagcttcatgccctctcgcggctgccgccgaccgccgccttcgcgaccgcggacggcaagatctcgacgacgcccggcgagaaggacgcggcgatcgacgccttcgtcacgacgacggacggcctgaccatcccctaccggctggaaggcaatccctcgccggaggcgccgacagtggccttctccaactcgctgctcacatcgatgcatatgtgggaccccttggtcgccatcctcaaggctgcgcgccccgacctacgcattcttcgctacgatacccgcggccggcacgacgtgccctccccgccagttcccgccaacctcgacatgctgagcgacgacctggccgcgcttctccgggcgctccgcatccccaaactgcacgctctcatcggcgtctcgatgggcggtgcgaccacgctcaagtttgcgctcaagtacccggctctcctggacaggttcatcgcctgcgacttcaacgttgcctccagcgacaagaacacgaccgcctggaaggagcgtattgccgtggccgagggtcccgacggcgggatccggaagctggccggtcaaacggtcgagcgctggttccacccgcacaccatgacggccaagaaggacgtcgccaactggatgacggatatggttgctgccaacagcgtccagggattccgctattcttgccaggcgttgtgggattatgacctgcgcgaggagatgagaggggccaaagttccgggcctcttggttgtcggtgaaggagacggcaagggggcgcttgtgaaggccatggaagggttcaaggacttgcttgggccttccggggcggagctgaagattgttccccaagcagggcatcttcccatgtcggaatcgcccagcgagttttggaacgagattgctggtttcctctaa

SEQ ID NO: 2847 - protein, 542 aa, Myceliophthora thermophilia
MAGNGPGMLYVTMQPREGLSLDQFHEWYNNEHGPTRLRLPHIFTNGLRYRATDGQQPHFLAVYDVTSMAHLETPIYTDLRANRSQREAATIGQVDVDRKFLDLVATQQSPLFTPIEQLTDDEAEGLVLVSVEVSLRPGVEGAEAAVARWYQEEHIPMLSRIPGWLRSRVFRTPSVIEGPPGEVRIATLHEYAKENGLGGPEHKAAMSTAWREQVFTHYIAHKTRRTYELFYVFGPAPRELHALSRLPPTAAFATADGKISTTPGEKDAAIDAFVTTTDGLTIPYRLEGNPSPEAPTVAFSNSLLTSMHMWDPLVAILKAARPDLRILRYDTRGRHDVPSPPVPANLDMLSDDLAALLRALRIPKLHALIGVSMGGATTLKFALKYPALLDRFIACDFNVASSDKNTTAWKERIAVAEGPDGGIRKLAGQTVERWFHPHTMTAKKDVANWMTDMVAANSVQGFRYSCQALWDYDLREEMRGAKVPGLLVVGEGDGKGALVKAMEGFKDLLGPSGAELKIVPQAGHLPMSESPSEFWNEIAGFL

SEQ ID NO: 2848 - DNA, 3342 bp, Myceliophthora thermophilia
atgacttgccgcgagttggccgcctccgatggctccggcaccagcaggcccggcccggccctcaatgacctcccttgtccccggatgcaggcccgggtccgtcgtcgatgcacatggctcggcttgcacaactcgaccctctggctgggatgcatgctcctggcgctctgcgtgggctattggcccgtggcagcggccatgcgtccggaccgcgtgcgggagctccggcaggaaaccgtcaacatgttttaccacggttttgacaactacatgaagatagccttcccggaagatgagctccgaccggtctcttgctccccgctcacccgggatagggagaacccgcggaatgtcgagctgaatgatgttttgggcaactactcgctcaccctcatcgacagcctctccaccctggccatccttgcctcggccccccccgaggacggcgagaccggcccgaaggcgctgagggacttccaggatggcgtggcagccctggtcgaacagtacggagacggcacctccggcccctctggtgtcggccttcgcggccgcggcttcgacgtcgacagcaaggtgcaggtgttcgaaacggtcatacgcggcgtcgggggcctcctgagcgcccacctgtttgccattggcgccttgccgattacgggctacaatccccggcaccccggagacgacctgctgcacccgaggcctgtcgtctggcccaacgggttcagatacgatggccaactgctgaggctcgctctggacctgggccagaggcttctccccgctttctacaccaggaccggcatgccgtatccccgcgtcaacctccgccacggcatcccgttctacaccaactcgcccctccacgaggccgctgcaccggggaccaccgccgatgggtcccccgagatcaccgaaacgtgcagcgctggtgccggatccttggtcctggagttcaccgttctcagccgccttaccggtgacccccgctttgagcagctggccaaaagggcgttctgggccgtctggtacagaaagagccagataggtctgattggtgccggagtggatgccgagcaggggcattggataggttcctacgccgtaatcggtgctggcgctgacagcttcttcgagtatgccctcaaatcccacatcttgctctctggccacgagctcccgaatcaaacagcagtccgccctgatcgcgccagcgacggatggttggatccaaacaccctgttcaatcccctcagtgatgccgagaactcccccgactccttcctcgaagcctggcatcacgcacacgcatccatcaagcgccacctctacagcgaccgtgaccatcctcactatgagaacgtcaacctgtggaccggctccctagcgtcctcctgggtagacagcctcggcgcctactattcggggctcctcgtcctcgccggcgaggtgagcgaggcgatcgagacgaacctgctctacgctgccatctggacccgctacgccgcactcccggaacgatggtccatccgcgagaagacggtggaaggcggcctcggatggtggccgctaaggccggagtttatcgagtctacctaccacttataccgcgctaccaaagacccctggtacctctatgtcggcgagatggtgctccgagacatcgcgagacggtgttggaccccttgcggctgggcggggctccagaacgtcttggacgggcaaaagagcgaccgcatggaaagcttcttcctcggtgaaactgccaagtacatgtacctgctctacgacgaccaacacccactaaactcgctcgacgccgcgtacgttttcaacaccgagggccaccccctaatcatacccaaggccgcgtcggcaagtggacgccgacgaccgcgagccgaacgcaaggatctggccatctacaacgacgacgccttcaccaactcatgcccccctcgtccctccgcgactcccatctctggttctgttatcgccgccagggatgacatctaccacgccgcacggatgctggacctacatctgctgtccacttcgccacgcaccgtcgacggcgggcagatgtccggccagcacatggcgagatcaaatttcactctgtttccgtggaccctcccatccgaactgctccctagcaacgggacttgcgccaaagtacaccacccgacagagctcgtcctcgagtttgcctcgaacgcgggacagatggtgggcggcggtgcgttcaactttatgatcggcgcccaaaatctggaacgtttgagtgcggatcggatccgcgtcaccagcctgtctggtctgaagctcacgatgcatctcgagggggacttggagcaagagtggcgcgttacaaaagtcaacggcatccccctgggccgcgacgagttcctcgtatttgaccggtccatcctgggggaggtctctgaccccagattcaacctcgtccgagacccggtgatggtcaagctccagcacctccaccaagtcgacatcccagaggacgatgccgacaccgtcgacgatgacgcgccacaagccagcaaccacgaacccggacccgaacccgaaccgctcgaggacggaccgaacccctccgtcaccgtcacggacctcggctcccttgtcaaatccctcctcagccgcatcacctcttccctcgacaacatccagctacccacctccctaccacgcatcggcgccaccctcctccccttcaacctcgttctcaacacaacagccataacctcaaccggcatcggttccgcccctctccctcccggtgcctccccgccttcggccgcccaacggcaccggaccccgcccttcggccccgtccccgatgccctcttcccctggtcaaccatctacgcctcgccggacgacgcctgctcctctccgctaccggatgctgccccccgcgaccaccagatcatcctcatccgccgcggcggctgcagcttctcgaccaagctggccaacatcccggcattcacgccgtccccggactcgctccagctcgtgattgtcgtgtcggacgacggcgacgacgctgaccaggacaaccgcggaggtggtggtggcggcggcggggttgccgggctcgtgcggccgctgctggacgaggtgcagcgcacgccgggcggcatccagcggcggcatccgatcgccatggtcatggtgggcggtggggaggccgtgttccgacagctggaggcggcgagccgcgtcggggtggtgcggcggtactttgtcgagagccagggggtgaagataaggaacatcattgtcgacgaaggcggcgacgagatggactggtga

SEQ ID NO: 2849 - protein, 1113 aa, Myceliophthora thermophilia
MTCRELAASDGSGTSRPGPALNDLPCPRMQARVRRRCTWLGLHNSTLWLGCMLLALCVGYWPVAAAMRPDRVRELRQETVNMFYHGFDNYMKIAFPEDELRPVSCSPLTRDRENPRNVELNDVLGNYSLTLIDSLSTLAILASAPPEDGETGPKALRDFQDGVAALVEQYGDGTSGPSGVGLRGRGFDVDSKVQVFETVIRGVGGLLSAHLFAIGALPITGYNPRHPGDDLLHPRPVVWPNGFRYDGQLLRLALDLGQRLLPAFYTRTGMPYPRVNLRHGIPFYTNSPLHEAAAPGTTADGSPEITETCSAGAGSLVLEFTVLSRLTGDPRFEQLAKRAFWAVWYRKSQIGLIGAGVDAEQGHWIGSYAVIGAGADSFFEYALKSHILLSGHELPNQTAVRPDRASDGWLDPNTLFNPLSDAENSPDSFLEAWHHAHASIKRHLYSDRDHPHYENVNLWTGSLASSWVDSLGAYYSGLLVLAGEVSEAIETNLLYAAIWTRYAALPERWSIREKTVEGGLGWWPLRPEFIESTYHLYRATKDPWYLYVGEMVLRDIARRCWTPCGWAGLQNVLDGQKSDRMESFFLGETAKYMYLLYDDQHPLNSLDAAYVFNTEGHPLIIPKAASASGRRRPRAERKDLAIYNDDAFTNSCPPRPSATPISGSVIAARDDIYHAARMLDLHLLSTSPRTVDGGQMSGQHMARSNFTLFPWTLPSELLPSNGTCAKVHHPTELVLEFASNAGQMVGGGAFNFMIGAQNLERLSADRIRVTSLSGLKLTMHLEGDLEQEWRVTKVNGIPLGRDEFLVFDRSILGEVSDPRFNLVRDPVMVKLQHLHQVDIPEDDADTVDDDAPQASNHEPGPEPEPLEDGPNPSVTVTDLGSLVKSLLSRITSSLDNIQLPTSLPRIGATLLPFNLVLNTTAITSTGIGSAPLPPGASPPSAAQRHRTPPFGPVPDALFPWSTIYASPDDACSSPLPDAAPRDHQIILIRRGGCSFSTKLANIPAFTPSPDSLQLVIVVSDDGDDADQDNRGGGGGGGGVAGLVRPLLDEVQRTPGGIQRRHPIAMVMVGGGEAVFRQLEAASRVGVVRRYFVESQGVKIRNIIVDEGGDEMDW

SEQ ID NO: 2850 - DNA, 1002 bp, Myceliophthora thermophilia
atgacctcttccccctcctccccctcctccacggcctcatctgagggcctcaccccctcgcaactggccgacttccaccgcgacggctacctcatcatcccggacgccctcccgccgtccacggtcagcgccctcctcgccgaggccaaccggctcctcgacagcctcgacctgtccacgcacccgctcacgcgcttccgcaccggcggcgaggacgggaccgagcacgtcggggacgactacttcctcggctcgggagacaagatccgcttcttcctcgaggaggacgcgttcgacggcgaggggcggctggtccggcccaagcaccgcgccgtcaacaagatcggccactacctgcacgcgctctcgccgcccttcgccgccctcctgtcggcctcgccctcggacccgcgcggcttcgtgccgggcctgcgcgcccgcccgcccgccgtcgcccgcgacctcggcttcgccgacccgcgcgtgctccagagcatggtcatctgcaagaaccccgagatcggcggcgccgtgcccccgcaccaggactcgaccttcctctacaccgacccccccagcgccgtcggcttctggtacgcgctcgaggacgccacggtcgagaacggctgcctgagcttcctgcccggctcccaccgctgggccccggtcgagaagcggctggtgcggaagccgggcggcggcaccgagatggtggccaaccgagaaggggccaagttcccccgcggcgaaggctacggcgaggaactcggggccggccggccgcggggcgacggcgacggcgactatgtgcccggcgaggtcaaggccggctcgctggtgctgatccacggcaatctgctgcacaagagcgagcggaacctgagccagaaggggaggatgatttataccttccacatcatcgaaggtgccgagggattccggtacgatgagagaaactggctccagccaccagaggaaggattcacgaggttatatgtatga

SEQ ID NO: 2851 - protein, 333 aa, Myceliophthora thermophilia
MTSSPSSPSSTASSEGLTPSQLADFHRDGYLIIPDALPPSTVSALLAEANRLLDSLDLSTHPLTRFRTGGEDGTEHVGDDYFLGSGDKIRFFLEEDAFDGEGRLVRPKHRAVNKIGHYLHALSPPFAALLSASPSDPRGFVPGLRARPPAVARDLGFADPRVLQSMVICKNPEIGGAVPPHQDSTFLYTDPPSAVGFWYALEDATVENGCLSFLPGSHRWAPVEKRLVRKPGGGTEMVANREGAKFPRGEGYGEELGAGRPRGDGDGDYVPGEVKAGSLVLIHGNLLHKSERNLSQKGRMIYTFHIIEGAEGFRYDERNWLQPPEEGFTRLYV

SEQ ID NO: 2852 - DNA, 1311 bp, Myceliophthora thermophilia
atgtctagacgcgaacagctgcgcgtcctcgtcgcagacgcctcgatagccggtccgacggccgcctactggctggccaacgccggcgcccgtgtccctatcgtagagcggtttcctcatctgcacaccaatggccaaaacgtcgacatccgcaccgtcggcgtgtccgtcatgtgcaagatgcccggatttgaggccgcggttcgctccaaaacggtgcccatggacggcatcagcttcgtcgacacccgcggccgcccatacgccaccatcggcgcctcggggaacccagaccagcaatcgctcgtgtccgagtacgaaatcctccggggcgacctcgcccggatcctcttcgacatgaccgagccgaaccccaacatcacctacgtctttggcgagcagatcgcctccctctcgccaacccccccccccttcctcgtccttctccgacacggctgccgcatccggccccgtcacggtcacgttcgcaaacggccgcctcccgactcaggaatacgacctcgttttggccgccgacggcgcgggctcgcgcacccgcgccctcgcgctcggctgctccccgcgcgaccacgcgcggttaccatcctgcgccgctaccgcgcgcccagcaaggcgcgcggaagaaacaacaccccatacgacgacgacgacgacgacaacaaaaacaaaaaccccatgcgccccttccgcgaggcccagcgccaaggcgacgcggccctccgcgcgttcgtagccgcgcagctcccggccgcctccgggcccgacgaacccggccggggagtgtcccgatattgcgttggagttgctagcggggggtgctggacctgtacgcgagcgagatggcgcaggtgcgggcgctggcgctggcgctggcgctggcgcggggccgggtggcgctggtgggcgaggcgacgccgggtacgcgtccggggcgacggggatgggctgggcaccagcctcgcgctggcgggggcgtacgtcctggccggggaggtggcgaggcgcgcgggcgagggtgagggtgagggtgcggtcgatgtggagggcgcgctgagggcgtacgaggagcggatgtggcgcctcgtggccgagaagaaccatcgggagcccaaactcgtacacgacctgctgatgctgatgccgcagaccgcgttggggctctggctccggaatcgcatgctgtccttcctctcgcgatcgggcttgctggggctcggccggatttcgtctgccggtgcgtttagaaaagggggagaagcgaccttgccggattacgagtgggttttgtga

SEQ ID NO: 2853 - protein, 436 aa, Myceliophthora thermophilia
MSRREQLRVLVADASIAGPTAAYWLANAGARVPIVERFPHLHTNGQNVDIRTVGVSVMCKMPGFEAAVRSKTVPMDGISFVDTRGRPYATIGASGNPDQQSLVSEYEILRGDLARILFDMTEPNPNITYVFGEQIASLSPTPPPFLVLLRHGCRIRPRHGHVRKRPPPDSGIRPRFGRRRRGLAHPRPRARLLPARPRAVTILRRYRAPSKARGRNNTPYDDDDDDNKNKNPMRPFREAQRQGDAALRAFVAAQLPAASGPDEPGRGVSRYCVGVASGGCWTCTRARWRRCGRWRWRWRWRGAGWRWWARRRRVRVRGDGDGLGTSLALAGAYVLAGEVARRAGEGEGEGAVDVEGALRAYEERMWRLVAEKNHREPKLVHDLLMLMPQTALGLWLRNRMLSFLSRSGLLGLGRISSAGAFRKGGEATLPDYEWVL

SEQ ID NO: 2854 - DNA, 348 bp, Myceliophthora thermophilia
atgtacgtactacacaagaagctcaaaaacaaacttgagtttgttagaaccagaataaagaactactacaacaaatataggctcgaaggacctcacctagagaggggagacaaagtctacctagttatacaaaacttacgaaccaaacgaccaagtacaaagctagacttcaagaaggtcagacccttcgttattaaggaacgaatttcgacatctaactaccgactatcgttaccgttatctatacgattacggacgaatgttttttatattttacttctcaaactagcgccgaagaacgctaaaatcgctataaacatcgaagcaaaggacgaagaagaagaatag

SEQ ID NO: 2855 - protein, 115 aa, Myceliophthora thermophilia
MYVLHKKLKNKLEFVRTRIKNYYNKYRLEGPHLERGDKVYLVIQNLRTKRPSTKLDFKKVRPFVIKERISTSNYRLSLPLSIRLRTNVFYILLLKLAPKNAKIAINIEAKDEEEE

SEQ ID NO: 2856 - DNA, 6705 bp, Myceliophthora thermophilia
atgactacgacgacggtctaccgccccgccacagcgcgcattaccagcgccgaacctcaaggtctggttacccttgagctcgaggatggtgtcgcctaccagggctacagcttcggcgcgcccaagagcatctctggcgagctggtcttccagacgggtttggtggggtatcccgagtccatcacggacccctcctaccgcggccagatcctcgtcatcaccttcccccttgtcggcaactacggcgtccccccgagggaagccctcgaccagctgcttggtgatctccccgcccacttcgagtcatcgaagatccacatcgccggcctcgtaacggccacatatgcaggcgaggacttctcccacttcctcgccaactcgtccctcggcacatggctcaaggagcagggcgtcccagccatgtacggtgtcgacacgcgcgccctgacgaagcgcattcgcgaggagggcagcatgctgggccgcatgctcatggagaaaaaggacctggccaacggggtcaacggtgacacggacggccacaagctccccggcatcctgggcgactggaggcctcgcttcgagtcggtcgattgggtcaaccccaacgagaagaacctcgtagcagaggtttctatcaaggcccccaagctctaccgaccccccgaggcttccggcctgaagcacccttcaggccgcccgctgcgcatcctttgtctcgacgttggtatgaaatacaaccagctgaggtgcttcctcaagcgcggggttgaggtcctggtctgcccctgggactacgacttccgtcacgagacatacgacggcctattcatctctaacggccccggtgacccggccatcttggactccacggtcaagcgcatcgccgcagccctggaggagaaccgcacccccatcttcggcatctgcttaggccaccagctgctcgcccgggctgcagggggccagaccaccaagctcaagtttggtaaccgcggccacaacatcccctgcaccagcatggtgactggcaggtgccacatcacttcccagaaccacggctacgccgtcgatgcggccactctgcccgccgggtggcaagagctcttcgtcaatgccaacgatggcagcaacgagggtatcatgcacgtcgacaggccacacttcagcgttcagttccaccccgagagcacccctggccccagggataccgaattcctcttcgacgttttcatccagactgtttccgagtgcgctgccgacagcagtctcttgcgcaagcccgtccggttccccggcggcacggtcgaggaaaataacaggctgaaccctcgcgtctcggtcaagaaggtcctggtgctcggcagcggcggtctcagcatcggccaagccggtgaatttgactactcgggcagtcaggcaatcaaggctctgaaggaggaaggcatctacaccgtcctcatcaaccccaacattgccaccattcaaacgtccaagggcttggcggacaaggtctacttcttgcccgtcaatgcagagttcgtgcggaaggtcatcctttacgagaagcccgacgccatctactgcacctttggcggtcagacagccctgtcggtcggtatccagcttaaggacgagttcgaggcgctcggtgtcaaggtcctgggtacgccgatcgacaccatcatcaccacagaggaccgcgagctttttgctcgcagcatggactccattggcgagaagtgcgccaagtccgccgccgccaacaacgtggaggaggctctgagagtggtcaaggacattggcttcccggtcattgtccgcgccgcgtatgccctcggtggtctcggcagcggtttcgccaacaacgaggccgagctcctcgatctttgcaacaaggccttcgccgctagccctcaggtgctgatcgagcgcagcatgaagggctggaaggagatcgagtacgaggtcgtccgtgattgccaggacaactgcatcacggtgtgcaacatggagaattttgatcctctcggcatccacactggcgactcgattgtcgtcgctccttctcagacgctgtccgacgaggactacaacatgctccggacgactgccgtcaatgtcatccgccatctcggggtcgtcggcgagtgcaacattcaatatgcgttgaatcccttctccaaggagtattgcatcatcgaggtcaacgccaggctgtctcggtcctcggccctggcatccaaggctaccggctatccccttgctttcattgccgccaagctgggtctcggcatcccgctgaaggagatcaagaacagcgttaccaaggtcacctgcgcctgcttcgaaccctcgctcgactatgtcgtggtcaagatgcctcgttgggacctcaagaagttcacgcgtgtctccacccagcttgggtcctccatgaagagtgtcggcgaagtcatgagtatcggcagaacttttgaggaagccatccagaaggccatccgggctatcgatttccacaacctgggcttcaacgagacaccggcgctcatgtcgattgacgatgagctccagactccgtccgaccagcgcctcttcgccattgccaacgccatggccgccggctactccgtcgagcgtatctgggagctgaccaagatcgataaatggttccttgacaggctcaagggccttagcgacttcgccaagcagatgaaggactacaaggcaagcggcggcactctcagtcctggaattctcctccgagcgaagcagcttggtttctgtgatcgccagatcgccaagttctggggctctaccgagctcgccgtgcgtggcatgcgtcttgaggccggcatcacgccttttgtcaagcaaatcgacaccgtcgccgccgagttcccggcctacaccaactacctctacctcacctataatgccagcgagcacgacatcaccttcaacgacaatggcgtcatggtccttggctctggcgtgtaccgcatcggttcttctgtcgagtttgactggtgctctgtcagagcgattcgcacacttcgcgagtcgaagatcaagaccatcatggtcaactacaacccggaaaccgtgtccactgattatgacgaggccgacaagctctatttcgagaacatcaatctggaaacggttctagatatctacgaggtggaaactgccagcggcgtccttggagccatgggtggccagacaccgaacaacattgcgcttcccctcctgcgtgctggcgtcaatgttctcggtacttcgcccgagatgatcgacaccgccgaaaaccggtacaagttttctcgcatgctggaccggatcggggtggaccagccgacctggaaggagttgacaagcttcgaagaggcaaaggctttctgtcaggcggtttcttatccggtgttggtgcgcccgtcctacgtgctctccggtgccgccatgaacacggtctactcggagcacgatctggaaaactacctgcagcaagccgccgaggtctcgcccgagcaccctgttgtcatcacaaagtacattgagaacgctaaggagatcgagatggacgccgtggccaaggacggcaaggtcgtctgccacttcatctcggagcacgtcgaaaatgcaggtgttcactctggtgatgccacgctcatccttccgccgcaggacctgtccaagacgaccatccagcgcatcgaggaagccacccgcaagattggcgacgcgctcaatgttaccggtcctttcaacatccagttcatcgccaaggacaatgacatcaaggtgattgagtgcaacgtccgcgcgtctcgctctttccccttcgtctccaaggtcatgggcgtggatctcattgagatggctaccaaggcgatcatgaaccttccattcgaggagtaccccgaaatccagtgccctccggactgcgtgggtgtcaaggtcccgcagttcagcttctcgcgtctctctggcgctgatcccgttcttggcgtcgagatggcttccaccggcgaggttgcctccttcggtgccgacaagtacgaggcatacctcaaggctctgctgtctaccggcttcaagatccctaagaacaacattctcctctctattggttcctacaaggacaaggaggagatgcttccctcggtcaagaaactgcaggagctgggctacaagctcttcgccaccgccggaacggcagatttcctgggtgcccatggcgtgcaggtgcagtatctcgaggttctgcccaagggagaggatcagaagtccgaatactcgctctcgcagcatctggccaagaacatgatcgacctgtacatcaacctgccgtccaacaacaagtataggcgtccggccaactacgtgagcaagggttaccagacccgccgcatggctgtggactatcaagttcctctcgtcaccaacgtcaagaacgccaagatcttggtcgaagccctcgccaggcacttcgagctggacatcagtatccgggactaccagactagccaccgcacgatccagcttcccggactggtcaacatcgcggccttcgttcccggcctggtctccagggacagcgacgacctccagcgtgcgaccaaggcttctattgctgctggtttcagcatgatccgagtcatgcccgtcagcaaggggggctcgatctcggacgtcaagtcgttgaaggttgcccagcagaacggtaagcgcggtgcgtactgcgacttcaacctgtccatcgcggcgacctcggataatgcccaccagattagccacgctgccggcgaggtcggttccttgttcattcctttcaaccacctctcggacaacatcagcaaagtcgcccaagtggaggcgcattttgacgcttggcccacgcacaagccgatcatcacggacgcgaggacgaccgacctggcttctattctccttctcgccagcctgcacaatcgccgcatccacgtcactgcggtgaccaccaaagatgacatcaagctcatcgccctcggcaaggagaagggcctcaaggtcacttgcgatgtcagcatctactcgcttcacctgtcgcagaaggatttccctggttgccaattcctgcccacggaggaggatcaggctgccctgtgggaatatctggagacgatcgatgtcttctcggttggcagcttgccctaccagcttgcccacttcctgaagaagcctacggacgtgactgttggcattgccgatgctctcccgctcatcttgacctcggtcgccgatggcaagttgactgtcgaagatgttagagtcaggcttcacgacaacccgattcgcatcttcgaactgcatgagcagctcggcgcgagcttggaggtcgagatcgaccggccttacactttggaagccaccgagtcctggtcgcccttcacgggtaagaccctgaaggctaccgttcagcgcgtcaccttccaagacgaaaccgtctgcctcgacggcaccatgctctcggtgtccccgaggggcactgatatgtccactcacggggcactgcctccaactgccgtggtttcgacccccgctgtcaggcccgtcacccagcctatgtcgcctacccccgaagaccgtcgccacattcggtcggggctcgggaggccgaagcccacggaaagcactgcgcctctcgctcccctgggtcgggcgcatgccgttgatgaactcgctcctcccctgaccattcagccccacatctcgccgctgcaggagatgctgtctgcgccgtcgacctttaagaagtcccatgtcttgtcggtgacacagtacacccgttccgacttgcgccttctcttccacattgcccaggaaatgcgccttggtgtccagcgcgaaggcgtccttgacattctcaagggccgcctactgtgtaccctcttttacgagccgtcgacccgcacgtcggcctcgttcgacgcagccatgcagcgcctcggcggccggaccatcgccatcacaacgtcgacatcgtcggtgcaaaaaggggagagtctccaggacacgctccgcacgcttgcctgctacggcgacgcagtcgtcctccgtcaccctgatgagaagtgcgtggaagtcgccaagaaatactcccccgtgcccgtcatcaacggcggcaacggaagcaaggagcacccaactcaggccttcctcgacctcttcacaattcgcgaagaactcggcaccatgcagggcctgaccatcaccttcgtcggcgacctcctctacggccggcccgtccactccctcgtttacctgctccgccactaccaagtgaaggtgcagctcgtctcgcccaaggcgctggccctcccacctgccgtccgccagcagctcgtcgacgctggcgagctgctttgcgagtcggagacactgacgcccgagattttgggcaggacagacgtcctgtattgcacgcgcgtacagaaggagcggttcaacagcctggaggagtacgaggcagttaaggattcgtaccgcatcgattacggcacgctcaagcatgccaagtccagcatggtggtcatgcacccgctaccgaggaacgaggaggttgcggaggaggtcgactttgatcagcgggcggcgtatttcagacagatgagatacggtctctactgccgcatggctttgctcgcgctggtcatgtcgtaa

SEQ ID NO: 2857 - protein, 2234 aa, Myceliophthora thermophilia
MTTTTVYRPATARITSAEPQGLVTLELEDGVAYQGYSFGAPKSISGELVFQTGLVGYPESITDPSYRGQILVITFPLVGNYGVPPREALDQLLGDLPAHFESSKIHIAGLVTATYAGEDFSHFLANSSLGTWLKEQGVPAMYGVDTRALTKRIREEGSMLGRMLMEKKDLANGVNGDTDGHKLPGILGDWRPRFESVDWVNPNEKNLVAEVSIKAPKLYRPPEASGLKHPSGRPLRILCLDVGMKYNQLRCFLKRGVEVLVCPWDYDFRHETYDGLFISNGPGDPAILDSTVKRIAAALEENRTPIFGICLGHQLLARAAGGQTTKLKFGNRGHNIPCTSMVTGRCHITSQNHGYAVDAATLPAGWQELFVNANDGSNEGIMHVDRPHFSVQFHPESTPGPRDTEFLFDVFIQTVSECAADSSLLRKPVRFPGGTVEENNRLNPRVSVKKVLVLGSGGLSIGQAGEFDYSGSQAIKALKEEGIYTVLINPNIATIQTSKGLADKVYFLPVNAEFVRKVILYEKPDAIYCTFGGQTALSVGIQLKDEFEALGVKVLGTPIDTIITTEDRELFARSMDSIGEKCAKSAAANNVEEALRVVKDIGFPVIVRAAYALGGLGSGFANNEAELLDLCNKAFAASPQVLIERSMKGWKEIEYEVVRDCQDNCITVCNMENFDPLGIHTGDSIVVAPSQTLSDEDYNMLRTTAVNVIRHLGVVGECNIQYALNPFSKEYCIIEVNARLSRSSALASKATGYPLAFIAAKLGLGIPLKEIKNSVTKVTCACFEPSLDYVVVKMPRWDLKKFTRVSTQLGSSMKSVGEVMSIGRTFEEAIQKAIRAIDFHNLGFNETPALMSIDDELQTPSDQRLFAIANAMAAGYSVERIWELTKIDKWFLDRLKGLSDFAKQMKDYKASGGTLSPGILLRAKQLGFCDRQIAKFWGSTELAVRGMRLEAGITPFVKQIDTVAAEFPAYTNYLYLTYNASEHDITFNDNGVMVLGSGVYRIGSSVEFDWCSVRAIRTLRESKIKTIMVNYNPETVSTDYDEADKLYFENINLETVLDIYEVETASGVLGAMGGQTPNNIALPLLRAGVNVLGTSPEMIDTAENRYKFSRMLDRIGVDQPTWKELTSFEEAKAFCQAVSYPVLVRPSYVLSGAAMNTVYSEHDLENYLQQAAEVSPEHPVVITKYIENAKEIEMDAVAKDGKVVCHFISEHVENAGVHSGDATLILPPQDLSKTTIQRIEEATRKIGDALNVTGPFNIQFIAKDNDIKVIECNVRASRSFPFVSKVMGVDLIEMATKAIMNLPFEEYPEIQCPPDCVGVKVPQFSFSRLSGADPVLGVEMASTGEVASFGADKYEAYLKALLSTGFKIPKNNILLSIGSYKDKEEMLPSVKKLQELGYKLFATAGTADFLGAHGVQVQYLEVLPKGEDQKSEYSLSQHLAKNMIDLYINLPSNNKYRRPANYVSKGYQTRRMAVDYQVPLVTNVKNAKILVEALARHFELDISIRDYQTSHRTIQLPGLVNIAAFVPGLVSRDSDDLQRATKASIAAGFSMIRVMPVSKGGSISDVKSLKVAQQNGKRGAYCDFNLSIAATSDNAHQISHAAGEVGSLFIPFNHLSDNISKVAQVEAHFDAWPTHKPIITDARTTDLASILLLASLHNRRIHVTAVTTKDDIKLIALGKEKGLKVTCDVSIYSLHLSQKDFPGCQFLPTEEDQAALWEYLETIDVFSVGSLPYQLAHFLKKPTDVTVGIADALPLILTSVADGKLTVEDVRVRLHDNPIRIFELHEQLGASLEVEIDRPYTLEATESWSPFTGKTLKATVQRVTFQDETVCLDGTMLSVSPRGTDMSTHGALPPTAVVSTPAVRPVTQPMSPTPEDRRHIRSGLGRPKPTESTAPLAPLGRAHAVDELAPPLTIQPHISPLQEMLSAPSTFKKSHVLSVTQYTRSDLRLLFHIAQEMRLGVQREGVLDILKGRLLCTLFYEPSTRTSASFDAAMQRLGGRTIAITTSTSSVQKGESLQDTLRTLACYGDAVVLRHPDEKCVEVAKKYSPVPVINGGNGSKEHPTQAFLDLFTIREELGTMQGLTITFVGDLLYGRPVHSLVYLLRHYQVKVQLVSPKALALPPAVRQQLVDAGELLCESETLTPEILGRTDVLYCTRVQKERFNSLEEYEAVKDSYRIDYGTLKHAKSSMVVMHPLPRNEEVAEEVDFDQRAAYFRQMRYGLYCRMALLALVMS

SEQ ID NO: 2858 - DNA, 369 bp, Myceliophthora thermophilia
atgagagagattggagagtggatgcgcgaccaggcgcggcctgaccgcgtgctggcttttccaaactgtttccgacttccaagattcttctggtgttctgtttttgatgtgcgggctacggtgcggccttctgtgccgacactggcggctcgccgcttcccatgctcaagatgctcgcgtctttcgctcagcgcgatgagggggcctcaatcgccaacctcgctgctactgcgtacttgcgtcaacgctggcagcaggaggaatgtggatgctggggtgaagtcgcaggccgctgctattggcagtctcggggacgatgttaatgcaggcaccgagagcccgtcagatgcagccaatcctgagtcgtga

SEQ ID NO: 2859 - protein, 122 aa, Myceliophthora thermophilia
MREIGEWMRDQARPDRVLAFPNCFRLPRFFWCSVFDVRATVRPSVPTLAARRFPCSRCSRLSLSAMRGPQSPTSLLLRTCVNAGSRRNVDAGVKSQAAAIGSLGDDVNAGTESPSDAANPES

(The sequence listing continues in the following parts.)

1. A recombinant Myceliophthera thermophilus polypeptide comprising an amino acid sequence identified in any of Tables 1-4.

2. The recombinant polypeptide of claim 1, wherein the polypeptide is selected from the group consisting of a glycohydrolase, a carbohydrate esterase, an oxidase, an oxidoreductase a reductase and a dehydrogenase.

3. (canceled)

4. An isolated nucleic acid encoding a polypeptide of claim 1.

5. (canceled)

6. A recombinant vector comprising at least one nucleic acid of claim 4, wherein the nucleic acid is operably linked to a promoter.

7. (canceled)

8. A recombinant host cell comprising at least one recombinant vector of claim 6, operably linked to a heterologous promoter.

9. The recombinant host cell of claim 8, wherein the host cell is prokaryotic or eukaryotic.

10-14. (canceled)

15. A method of producing a polypeptide, the method comprising culturing a recombinant host cell of claim 8, under conditions in which the polypeptide is produced.

16-18. (canceled)

19. A method for degrading a cellulosic biomass, the method comprising contacting the cellulosic biomass with a composition comprising a recombinant biomass degradation polypeptide of claim 1.

20. The method of claim 19, wherein the composition is a cell culture medium into which the biomass degradation polypeptide has been secreted by cells expressing the polypeptide.

21-26. (canceled)

27. The method of claim 19, wherein the biomass degradation polypeptide is a glycohydrolase.

28. (canceled)

29. A composition comprising a cellulase and at least one recombinant biomass degradation polypeptide of claim 1.

30-32. (canceled)

33. A method of increasing production of active protein from a host cell, the method comprising modifying expression of a protein production polypeptide of any of Tables 1-4 in the host cell.

34-39. (canceled)
